(19) United States
(12) Patent Application Publication
(10) Pub. No.: US 2024/0360455 A1
(43) Pub. Date: Oct. 31, 2024

(54) EXTRA-HEPATIC DELIVERY IRNA COMPOSITIONS AND METHODS OF USE THEREOF

(71) Applicant: Alnylam Pharmaceuticals, Inc., Cambridge, MA (US)

(72) Inventors: Jayaprakash K. Nair, Cambridge, MA (US); Justin Pierson, Wakefield, MA (US); Elena Castellanos-Rizaldos, Melrose, MA (US); Yesseinia Anglero-Rodriguez, Cambridge, MA (US); Karyn Schmidt, Melrose, MA (US); Lucas D. BonDurant, Broolline, MA (US); Kevin Dooley, Melrose, MA (US); Ivan Zlatev, Cambridge, MA (US); Vasant R. Jadhav, Sharon, MA (US); Martin A. Maier, Belmont, MA (US); Alexander V. Kel'in, Swampscott, MA (US); Masaaki Nakata, Cambridge, MA (US)

(21) Appl. No.: 18/631,104

(22) Filed: Apr. 10, 2024

Related U.S. Application Data
(63) Continuation of application No. PCT/US2022/046668, filed on Oct. 14, 2022.
(60) Provisional application No. 63/255,984, filed on Oct. 15, 2021.

(51) Int. Cl. C12N 15/113; A61K 45/06; A61P 9/10

(52) U.S. Cl. CPC C12N 15/1137; A61K 45/06; A61P 9/10; C12N 2310/11; C12N 2310/351; C12N 2320/32; C12Y 207/11017

(57) ABSTRACT

The present invention provides double stranded ribonucleic acid (dsRNA) agents for inhibiting expression of a target gene, comprising an antisense strand which is complementary to the target gene; a sense strand which is complementary to the antisense strand and forms a double stranded region with the antisense strand; and one or more C₂₂ hydrocarbon chains conjugated to one or more internal positions on at least one strand, compositions comprising such dsRNA agents, and methods of use thereof for treating a subject having a skeletal muscle disorder, a cardiac muscle disorder, or an adipose tissue disorder.

### RELATED APPLICATIONS

[0001] This application is a 35 § U.S.C. 111(a) continuation application which claims the benefit of priority to PCT/US2022/046668, filed on Oct. 14, 2022, which, in turn, claims the benefit of priority to U.S. Provisional Application No. 63/255,984, filed on Oct. 15, 2021. The entire contents of each of the foregoing applications are incorporated herein by reference.

### SEQUENCE LISTING

[0002] The instant application contains a Sequence Listing which has been submitted electronically in XML file format and is hereby incorporated by reference in its entirety. Said XML copy, created on Mar. 29, 2024, is named 121301_15302_SL.xml and is 37,892,374 bytes in size.

### BACKGROUND OF THE INVENTION

[0003] Efficient delivery of an RNAi agent to cells in vivo requires specific targeting and substantial protection from the extracellular environment, particularly serum proteins. RNAi-based therapeutics show promising clinical data for treatment of liver-associated disorders. However, RNAi delivery into extra-hepatic tissues remains an obstacle, limiting the use of RNAi-based therapies.

[0004] One of the limiting factors is the ability to deliver intact RNAi efficiently to extra-hepatic tissues, such as muscle tissues, e.g., skeletal muscle tissues and cardiac muscle tissues, and adipose tissue.

[0005] For example, when administered systemically, RNAi agents naturally accumulate in the liver limiting distribution to extra-hepatic tissues.

[0006] Similarly, particular difficulties have been associated when RNAi agents are administered locally, in that although the RNAi agents can achieve significant target gene reduction, there is limited distribution in muscle or adipose tissue and target gene reduction is only observed in a small portion of the tissue, minimizing the potential therapeutic use.

[0007] Previous work has used delivery reagents such as liposomes, cationic lipids, and nanoparticles forming complexes to aid the intracellular internalization of RNAi agents into extra-hepatic cells. However, only limited success in delivering RNAi agents to extra-hepatic tissues, like muscle tissue, after systemic administration has been reported. For example although cholesterol-conjugated RNAi agents are delivered to muscles after intravenous injection, a high dose (50 mg/kg) is required to achieve sustainable gene silencing. In addition, cholesterol conjugates are highly toxic at high concentrations, limiting their potential for clinical applications. With respect to adipose tissues, while viral carriers have shown promise for RNAi agent delivery to adipocytes, the delivery process is labor intensive and the high immunogenicity has limited the widespread application. (See, e.g., Biscans, et al. (2018) Nucl Acids Res 47(3):1082).

[0008] Thus, systemic delivery of oligonucleotides to extra-hepatic tissues, like muscle tissue and adipose tissue, remains a challenge and, accordingly, there is a continuing need for new and improved compositions and methods for delivering RNAi agents in vivo, without the use of tissue delivery reagents, to achieve and enhance the rapeutic potential of RNAi agents.

### SUMMARY OF THE INVENTION

[0009] The present invention is based, at least in part, on the surprising discovery that conjugating a C₂₂ lipophilic moiety to one or more internal positions on at least one strand of a dsRNA agent, e.g., position 6 on the sense strand, counting from the 5′-end, provides surprisingly efficient in vivo delivery to muscle and/or adipose tissue resulting in efficient entry and internalization of the dsRNA agent into muscle tissue, e.g., cardiac and skeletal tissue, and/or adipose tissue, and sparingly good inhibition of target gene expression in muscle tissue and/or adipose tissue, e.g., cardiac and skeletal tissue, and/or adipose tissue.

[0010] Accordingly, in one aspect, the present invention provides a dsRNA agent comprising an antisense strand which is complementary to a target gene; a sense strand which is complementary to the antisense strand and forms a double stranded region with the antisense strand; and one or more C₂₂ hydrocarbon chain conjugated to one or more internal positions on at least one strand, wherein the dsRNA agent is suitable for delivery to a muscle tissue, e.g., skeletal muscle tissue or cardiac muscle tissue, or an adipose tissue. In some embodiments, the one or more C₂₂ hydrocarbon chains conjugated to one or more internal positions on at least one strand are conjugated to the dsRNA agent via a linker or carrier.

[0011] In some embodiments, the lipophilicity of the one or more C₂₂ hydrocarbon chain, measured by octanol-water partition coefficient, log K_{ow}, exceeds 0. The lipophilic moiety may possess a log K_{ow} exceeding 1, exceeding 1.5, exceeding 2, exceeding 3, exceeding 4, exceeding 5, or exceeding 10.

[0012] In some embodiments, the hydrophobicity of the dsRNA agent, measured by the unbound fraction in the plasma protein binding assay of the dsRNA agent, exceeds 0.2. In one embodiment, the plasma protein binding assay determined is an electrophoretic mobility shift assay (EMSA) using human serum albumin protein. The hydrophobicity of the dsRNA agent, measured by fraction of unbound dsRNA in the binding assay, exceeds 0.15, exceeds 0.2, exceeds 0.25, exceeds 0.3, exceeds 0.35, exceeds 0.4, exceeds 0.45, or exceeds 0.5 for an enhanced in vivo delivery of dsRNA/

[0013] The C₂₂ hydrocarbon chain may be saturated or unsaturated.

[0014] The C₂₂ hydrocarbon chain may be linear or branched

[0015] In some embodiments, the internal positions include all positions except the three terminal positions from each end of the at least one strand.

[0016] In some embodiments, the internal positions exclude a cleavage site region of the sense strand.

[0017] In some embodiments, the internal positions exclude positions 9-12 or positions 11-13, counting from the 5′-end of the sense strand.

[0018] In some embodiments, the internal positions exclude a cleavage site region of the antisense strand.

[0019] In some embodiments, the internal positions exclude positions 12-14, counting from the 5′-end of the antisense strand.

[0020] In some embodiments, the one or more C₂₂ hydrocarbon chains are conjugated to one or more of the following internal positions: positions 4-8 and 13-18 on the sense strand, and positions 6-10 and 15-18 on the antisense strand, counting from the 5′ end of each strand.

[0021] In some embodiments, the one or more C₂₂ hydrocarbon chains are conjugated to one or more of the following internal positions: positions 5, 6, 7, 15, and 17 on the sense strand, and positions 15 and 17 on the antisense strand, counting from the 5′-end of each strand.

[0022] In some embodiments, the one or more C₂₂ hydrocarbon chains are conjugated to position 6 on the sense strand, counting from the 5′-end of the sense strand.

[0023] In some embodiments, the one or more C₂₂ hydrocarbon chains is an aliphatic, alicyclic, or polyalicyclic compound, e.g., the one or more C₂₂ hydrocarbon chains contains a functional group selected from the group consisting of hydroxyl, amine, carboxylic acid, sulfonate, phosphate, thiol, azide, and alkyne.

[0024] In some embodiments, the one or more C₂₂ hydrocarbon chains is a C22 acid, e.g. the C22 acid is selected from the group consisting of docosanoic acid, 6-octyltetradecanoic acid, 10-hexylhexadecanoic acid, all-cis-7,10,13,16,19-docosapentaenoic acid, all-cis-4,7,10,13,16,19-docosahexaenoic acid, all-cis-13,16-docosadienoic acid, all-cis-7,10,13,16-docosatetraenoic acid, all-cis-4,7,10,13,16-docosapentaenoic acid, and cis-13-docosenoic acid.

[chemical structure]

[0025] In some embodiments, the one or more C₂₂ hydrocarbon chains is a C22 alcohol, e.g., the C22 alcohol is selected from the group consisting of 1-docosanol, 6-octyltetradecan-1-ol, 10-hexylhexadecan-1-ol, cis-13-docosen-1-ol, docosan-9-ol, docosan-2-ol, docosan-10-ol, docosan-11-ol, and cis-4,7,10,13,16,19-docosahexanol.

[chemical structure]

[0026] In some embodiments, the one or more C₂₂ hydrocarbon chains is a C22 amide, e.g., the C22 amide is selected from the group consisting of (E)-Docos-4-enamide, (E)-Docos-5-enamide, (Z)-Docos-9-enamide, (E)-Docos-11-enamide, 12-Docosenamide, (Z)-Docos-13-enamide, (Z)—N-Hydroxy-13-docoseneamide, (E)-Docos-14-enamide, 6-cis-Docosenamide, 14-Docosenamide Docos-11-enamide, (4E, 13E)-Docosa-4,13-dienamide, and (5E, 13E)-Docosa-5,13-dienamide.

[0027] The one or more C₂₂ hydrocarbon chains may be conjugated to the dsRNA agent via a direct attachment to the ribosugar of the dsRNA agent. Alternatively, the one or more C₂₂ hydrocarbon chains may be conjugated to the dsRNA agent via a linker or a carrier. In some embodiments, the one or more C₂₂ hydrocarbon chains may be conjugated to the dsRNA agent via internucleotide phosphate linkage.

[chemical structure]

[0028] In certain embodiments, the one or more C₂₂ hydrocarbon chains is conjugated to the dsRNA agent via one or more linkers (tethers), e.g., a carrier that replaces one or more nucleotide(s) in the internal position(s).

[0029] In some embodiments, the one or more C₂₂ hydrocarbon chains is conjugated to the dsRNA agent via a linker a linker containing an ether, thioether, urea, carbonate, amine, amide, maleimide-thioether, disulfide, phosphodiester, sulfonamide linkage, a product of a click reaction (e.g., a triazole from the azide-alkyne cycloaddition), or carbamate.

[0030] In some embodiments, at least one of the linkers (tethers) is a redox cleavable linker (such as a reductively cleavable linker; e.g., a disulfide group), an acid cleavable linker (e.g., a hydrazone group, an ester group, an acetal group, or a ketal group), an esterase cleavable linker (e.g., an ester group), a phosphatase cleavable linker (e.g., a phosphate group), or a peptidase cleavable linker (e.g., a peptide bond).

[0031] In other embodiments, at least one of the linkers (tethers) is a bio-clevable linker selected from the group consisting of DNA, RNA, disulfide, amide, peptide, functionalized monosaccharides or oligosaccharides of galactosamine, glucosamine, glucose, galactose, mannose, and combinations thereof.

[0032] In certain embodiments, the one or more C₂₂ hydrocarbon chains is conjugated to the dsRNA agent via a carrier that replaces one or more nucleotide(s). The carrier can be a cyclic group or an acyclic group. In one embodiment, the cyclic group is selected from the group consisting of pyrrolidinyl, pyrazolinyl, pyrazolidinyl, imidazolinyl, imidazolidinyl, piperidinyl, piperazinyl, [1,3]dioxolane, oxazolidinyl, isoxazolidinyl, morpholinyl, thiazolidinyl, isothiazolidinyl, quinoxalinyl, pyridazinonyl, tetrahydrofuryl, and decalin. In one embodiment, the acyclic group is a moiety based on a serinol backbone or a diethanolamine backbone.

[0033] In some embodiments, the carrier replaces one or more nucleotide(s) in the internal position(s) of the dsRNA agent.

[0034] In some embodiments, the sense and antisense strands of the dsRNA agent are each 15 to 30 nucleotides in length.

[0035] In one embodiment, the sense and antisense strands of a dsRNA agent are each 19 to 25 nucleotides in length.

[0036] In one embodiment, the sense and antisense strands of the dsRNA agent are each 21 to 23 nucleotides in length.

[0037] In some embodiments, the dsRNA agent comprises a single-stranded overhang on at least one of the termini, e.g., 3′ and/or 5′ overhang(s) of 1-10 nucleotides in length, for instance, an overhang of 1, 2, 3, 4, 5, or 6 nucleotides. In some embodiments, both strands have at least one stretch of 1-5 (e.g., 1, 2, 3, 4, or 5) single-stranded nucleotides in the double stranded region. In one embodiment, the single-stranded overhang is 1, 2, or 3 nucleotides in length. In some embodiments, the dsRNA agent may also have a blunt end, located at the 5′-end of the antisense strand (or the 3′-end of the sense strand), or vice versa. In one embodiment, the dsRNA agent comprises a 3′ overhang at the 3′-end of the antisense strand, and optionally a blunt end at the 5′-end of the antisense strand. In one embodiment, the dsRNA agent has a 5′ overhang at the 5′-end of the sense strand, and optionally a blunt end at the 5′-end of the antisense strand. In one embodiment, the dsRNA agent has two blunt ends at both ends of the iRNA duplex.

[0038] In some embodiments, at least one end of the dsRNA agent is blunt-ended.

[0039] In one embodiment, the sense strand of the dsRNA agent is 21-nucleotides in length, and the antisense strand is 23-nucleotides in length, wherein the strands form a double-stranded region of 21 consecutive base pairs having a 2-nucleotide long single-stranded overhangs at the 3′-end.

[0040] In some embodiments, the lipophilic moiety is conjugated to a nucleobase, sugar moiety, or internucleosidic phosphate linkage of the dsRNA agent.

[0041] In some embodiments, the dsRNA agent further comprises a phosphate or phosphate mimic at the 5′-end of the antisense strand. In one embodiment, the phosphate mimic is a 5′-vinyl phosphonate (VP).

[0042] In some embodiments, the 5′-end of the antisense strand of the dsRNA agent does not contain a 5′-vinyl phosphonate (VP).

[0043] In some embodiments, the dsRNA agent further comprises at least one terminal, chiral phosphorus atom.

[0044] A site specific, chiral modification to the internucleotide linkage may occur at the 5′ end, 3′ end, or both the 5′ end and 3′ end of a strand. This is being referred to herein as a “terminal” chiral modification. The terminal modification may occur at a 3′ or 5′ terminal position in a terminal region, e.g., at a position on a terminal nucleotide or within the last 2, 3, 4, 5, 6, 7, 8, 9 or 10 nucleotides of a strand. A chiral modification may occur on the sense strand, antisense strand, or both the sense strand and antisense strand. Each of the chiral pure phosphorus atoms may be in either Rp configuration or Sp configuration, and combination thereof. More details regarding chiral modifications and chirally-modified dsRNA agents can be found in PCT/US18/67103, entitled “Chirally-Modified Double-Stranded RNA Agents,” filed Dec. 21, 2018, which is incorporated herein by reference in its entirety.

[0045] In some embodiments, the dsRNA agent further comprises a terminal, chiral modification occurring at the first internucleotide linkage at the 3′ end of the antisense strand, having the linkage phosphorus atom in Sp configuration; a terminal, chiral modification occurring at the first internucleotide linkage at the 5′ end of the antisense strand, having the linkage phosphorus atom in Rp configuration; and a terminal, chiral modification occurring at the first internucleotide linkage at the 5′ end of the sense strand, having the linkage phosphorus atom in either Rp configuration or Sp configuration.

[0046] In one embodiment, the dsRNA agent further comprises a terminal, chiral modification occurring at the first and second internucleotide linkages at the 3′ end of the antisense strand, having the linkage phosphorus atom in Sp configuration; a terminal, chiral modification occurring at the first internucleotide linkage at the 5′ end of the antisense strand, having the linkage phosphorus atom in Rp configuration; and a terminal, chiral modification occurring at the first internucleotide linkage at the 5′ end of the sense strand, having the linkage phosphorus atom in either Rp or Sp configuration.

[0047] In one embodiment, the dsRNA agent further comprises a terminal, chiral modification occurring at the first, second, and third internucleotide linkages at the 3′ end of the antisense strand, having the linkage phosphorus atom in Sp configuration; a terminal, chiral modification occurring at the first internucleotide linkage at the 5′ end of the antisense strand, having the linkage phosphorus atom in Rp configuration; and a terminal, chiral modification occurring at the first internucleotide linkage at the 5′ end of the sense strand, having the linkage phosphorus atom in either Rp or Sp configuration.

[0048] In one embodiment, the dsRNA agent further comprises a terminal, chiral modification occurring at the first and second internucleotide linkages at the 3′ end of the antisense strand, having the linkage phosphorus atom in Sp configuration; a terminal, chiral modification occurring at the third internucleotide linkages at the 3′ end of the antisense strand, having the linkage phosphorus atom in Rp configuration; a terminal, chiral modification occurring at the first internucleotide linkage at the 5′ end of the antisense strand, having the linkage phosphorus atom in Rp configuration; and a terminal, chiral modification occurring at the first internucleotide linkage at the 5′ end of the sense strand, having the linkage phosphorus atom in either Rp or Sp configuration.

[0049] In one embodiment, the dsRNA agent further comprises a terminal, chiral modification occurring at the first and second internucleotide linkages at the 3′ end of the antisense strand, having the linkage phosphorus atom in Sp configuration; a terminal, chiral modification occurring at the first, and second internucleotide linkages at the 5′ end of the antisense strand, having the linkage phosphorus atom in Rp configuration; and a terminal, chiral modification occurring at the first internucleotide linkage at the 5′ end of the sense strand, having the linkage phosphorus atom in either Rp or Sp configuration.

[0050] In some embodiments, the dsRNA agent has at least two phosphorothioate internucleotide linkages at the first five nucleotides on the antisense strand (counting from the 5′ end).

[0051] In some embodiments, the antisense strand comprises two blocks of one, two, or three phosphorothioate internucleotide linkages separated by 1, 2, 3, 4, 5, 6, 7, 8, 9, 10, 11, 12, 13, 14, 15, 16, 17, or 18 phosphate internucleotide linkages.

[0052] In some embodiments, the dsRNA agent further comprises a targeting ligand that targets a receptor which mediates delivery to a skeletal muscle, cardiac muscle, or adipose tissue. In one embodiment, the targeting ligand is selected from the group consisting of Angiopep-2, lipoprotein receptor related protein (LRP) ligand, bEnd.3 cell binding ligand, transferrin receptor (TfR) ligand, manose receptor ligand, glucose transporter protein, LDL receptor ligand, trans-retinol, RGD peptide, LDL receptor ligand, CD63 ligand, CD36, and carbohydrate based ligand.

[0053] In some embodiments, the dsRNA agent further comprises a targeting ligand that targets a liver tissue. In some embodiments, the targeting ligand is a carbohydrate-based ligand. In one embodiment, the targeting ligand is a GalNAc conjugate.

[0054] In some embodiments, the dsRNA agent further comprises a dual targeting ligand that targets a liver tissue and a receptor which mediates delivery to a skeletal muscle, cardiac muscle, or adipose tissue.

[0055] All the above aspects and embodiments would be applicable to an oligonucleotide having one or more C₂₂ hydrocarbon chains conjugated to one or more internal positions on the oligonucleotide. In some embodiments, 100%, 95%, 90%, 85%, 80%, 75%, 70%, 65%, 60%, 55%, 50%, 45%, 40%, 35% or 30% of the oligonucleotide is modified. For example, when 50% of the oligonucleotide is modified, 50% of all nucleotides present in the oligonucleotide contain a modification as described herein.

[0056] In one embodiment, the oligonucleotide is a double-stranded dsRNA agent, and at least 50% of the nucleotides of the double-stranded dsRNA agent is independently modified with 2′-O-methyl, 2′-O-allyl, 2′-deoxy, or 2′-fluoro.

[0057] In one embodiment, the oligonucleotide is an antisense oligonucleotide, and at least 50% of the nucleotides of the antisense oligonucleotide are independently modified with LNA, CeNA, 2′-methoxyethyl, or 2′-deoxy.

[0058] In some embodiments, the dsRNA agent has less than 12, less than 10, less than 8, less than 6, less than 4, less than 2, or no 2′-F modifications on the sense strand. In some embodiments, the dsRNA agent has less than 12, less than 10, less than 8, less than 6, less than 4, less than 2, or no 2′-F modifications on the antisense strand.

[0059] In some embodiments, the dsRNA agent has one or more 2′-F modifications on any position of the sense strand or antisense strand.

[0060] In some embodiments, the 3′ end of the sense strand is protected via an end cap which is a cyclic group having an amine, said cyclic group being selected from the group consisting of pyrrolidinyl, pyrazolinyl, pyrazolidinyl, imidazolinyl, imidazolidinyl, piperidinyl, piperazinyl, [1,3]dioxolanyl, oxazolidinyl, isoxazolidinyl, morpholinyl, thiazolidinyl, isothiazolidinyl, quinoxalinyl, pyridazinonyl, tetrahydrofuranyl, and decalinyl.

[0061] In one embodiment, the target gene is selected from the group consisting of adrenoceptor beta 1 (ADRB1); calcium voltage-gated channel subunit alpha1 C (CACNA1C); calcium voltage-gated channel subunit alpha1 G (CACNA1G) (T type calcium channel); angiotensin II receptor type 1(AGTR1); Sodium Voltage-Gated Channel Alpha Subunit 2 (SCN2A); Hyperpolarization Activated Cyclic Nucleotide Gated Potassium Channel 1 (HCN1); Hyperpolarization Activated Cyclic Nucleotide Gated Potassium Channel 4 (HCN4); Hyperpolarization Activated Cyclic Nucleotide Gated Potassium Channel 3 (HCN3); Potassium Voltage-Gated Channel Subfamily A Member 5 (KCNA5); Potassium Inwardly Rectifying Channel Subfamily J Member 3 (KCNJ3); Potassium Inwardly Rectifying Channel Subfamily J Member 4 (KCNJ4); phospholamban (PLN); calcium/calmodulin dependent protein kinase II delta (CAMK2D); or Phosphodiesterase 1 (PDE1).

[0062] In one embodiment, the antisense strand comprises at least 15, e.g., 15, 16, 17, 18, 19, 20, 21, 22, or 23, contiguous nucleotides differing by no more than 3, e.g., 3, 2, 1, or 0, nucleotides from any one of the antisense nucleotide sequences in any one of Tables 2-5, 7B, 7C, 9-16, 19-26, or 28-35.

[0063] In one embodiment, the dsRNA agent is any one of the agents in any one of Tables 2, 3, 4, 5, 7B, 7C, 9-16, 19-26, or 28-35.

[0064] In one embodiment, the target gene is selected from the group consisting of Delta 4-Desaturase, Sphingolipid 1 (DEGS1); leptin; folliculin (FLCN); Zinc Finger Protein 423 (ZFP423); Cyclin Dependent Kinase 6 (CDK6); Regulatory Associated Protein Of MTOR Complex 1 (RPTOR); Mechanistic Target Of Rapamycin Kinase, (mTOR); Forkhead Box P1 (FOXP1); Phosphodiesterase 3B (PDE3B); and Activin A Receptor Type 1C (ACVR1C).

[0065] In one embodiment, the target gene is selected from the group consisting of myostatin (MSTN); Cholinergic Receptor Nicotinic Alpha 1 Subunit (CHRNA1); Cholinergic Receptor Nicotinic Beta 1 Subunit (CHRNB1); Cholinergic Receptor Nicotinic Delta Subunit (CHRND); Cholinergic Receptor Nicotinic Epsilon Subunit (CHRNE); Cholinergic Receptor Nicotinic Gamma Subunit (CHRNG); Collagen Type XIII Alpha 1 Chain (COL13A1); Docking Protein 7 (DOK7); LDL Receptor Related Protein 4 (LRP4); Muscle Associated Receptor Tyrosine Kinase (MUSK); Receptor Associated Protein Of The Synapse (RAPSN); Sodium Voltage-Gated Channel Alpha Subunit 4 (SCN4A); and Double Homeobox 4 (DUX4).

[0066] The present invention also provides cells and pharmaceutical compositions comprising the dsRNA agents of the invention. In another aspect, the present invention provides a method of inhibiting expression of a target gene in a skeletal muscle cell, a cardiac muscle cell, or an adipocyte, or adipose tissue. The method includes contacting the cell with a dsRNA agent that inhibits expression of a target gene, wherein the dsRNA agent comprises an antisense strand which is complementary to the target gene; a sense strand which is complementary to the antisense strand and forms a double stranded region with the antisense strand; and one or more C₂₂ hydrocarbon chains conjugated to one or more internal positions on at least one strand, wherein the dsRNA agent is suitable for delivery to a muscle tissue, e.g., skeletal muscle tissue or cardiac muscle tissue, or an adipose tissue. In some embodiments, the one or more C₂₂ hydrocarbon chains conjugated to one or more internal positions on at least one strand are conjugated to the dsRNA agent via a linker or carrier.

[0067] In some embodiments, the lipophilicity of the one or more C₂₂ hydrocarbon chain, measured by octanol-water partition coefficient, log K_{ow}, exceeds 0. The lipophilic moiety may possess a log K_{ow} exceeding 1, exceeding 1.5, exceeding 2, exceeding 3, exceeding 4, exceeding 5, or exceeding 10.

[0068] In some embodiments, the hydrophobicity of the dsRNA agent, measured by the unbound fraction in the plasma protein binding assay of the dsRNA agent, exceeds 0.2. In one embodiment, the plasma protein binding assay determined is an electrophoretic mobility shift assay (EMSA) using human serum albumin protein. The hydrophobicity of the dsRNA agent, measured by fraction of unbound dsRNA in the binding assay, exceeds 0.15, exceeds 0.2, exceeds 0.25, exceeds 0.3, exceeds 0.35, exceeds 0.4, exceeds 0.45, or exceeds 0.5 for an enhanced in vivo delivery of dsRNA/

[0069] The C₂₂ hydrocarbon chain may be saturated or unsaturated.

[0070] The C₂₂ hydrocarbon chain may be linear or branched

[0071] In some embodiments, the internal positions include all positions except the three terminal positions from each end of the at least one strand.

[0072] In some embodiments, the internal positions exclude a cleavage site region of the sense strand.

[0073] In some embodiments, the internal positions exclude positions 9-12 or positions 11-13, counting from the 5′-end of the sense strand.

[0074] In some embodiments, the internal positions exclude a cleavage site region of the antisense strand.

[0075] In some embodiments, the internal positions exclude positions 12-14, counting from the 5′-end of the antisense strand.

[0076] In some embodiments, the one or more C₂₂ hydrocarbon chains are conjugated to one or more of the following internal positions: positions 4-8 and 13-18 on the sense strand, and positions 6-10 and 15-18 on the antisense strand, counting from the 5′ end of each strand.

[0077] In some embodiments, the one or more C₂₂ hydrocarbon chains are conjugated to one or more of the following internal positions: positions 5, 6, 7, 15, and 17 on the sense strand, and positions 15 and 17 on the antisense strand, counting from the 5′-end of each strand.

[0078] In some embodiments, the one or more C₂₂ hydrocarbon chains are conjugated to position 6 on the sense strand, counting from the 5′-end of the sense strand.

[0079] In some embodiments, the one or more C₂₂ hydrocarbon chains is an aliphatic, alicyclic, or polyalicyclic compound, e.g., the one or more C₂₂ hydrocarbon chains contains a functional group selected from the group consisting of hydroxyl, amine, carboxylic acid, sulfonate, phosphate, thiol, azide, and alkyne.

[0080] In some embodiments, the one or more C₂₂ hydrocarbon chains is a C22 acid, e.g. the C22 acid is selected from the group consisting of docosanoic acid, 6-octyltetradecanoic acid, 10-hexylhexadecanoic acid, all-cis-7,10,13,16,19-docosapentaenoic acid, all-cis-4,7,10,13,16,19-docosahexaenoic acid, all-cis-13,16-docosadienoic acid, all-cis-7,10,13,16-docosatetraenoic acid, all-cis-4,7,10,13,16-docosapentaenoic acid, and cis-13-docosenoic acid.

[chemical structure]

[0081] In some embodiments, the one or more C₂₂ hydrocarbon chains is a C22 alcohol, e.g., the C22 alcohol is selected from the group consisting of 1-docosanol, 6-octyltetradecan-1-ol, 10-hexylhexadecan-1-ol, cis-13-docosen-1-ol, docosan-9-ol, docosan-2-ol, docosan-10-ol, docosan-11-ol, and cis-4,7,10,13,16,19-docosahexanol.

[chemical structure]

[0082] In some embodiments, the one or more C₂₂ hydrocarbon chains is a C22 amide, e.g., the C22 amide is selected from the group consisting of (E)-Docos-4-enamide, (E)-Docos-5-enamide, (Z)-Docos-9-enamide, (E)-Docos-11-enamide, 12-Docosenamide, (Z)-Docos-13-enamide, (Z)—N-Hydroxy-13-docoseneamide, (E)-Docos-14-enamide, 6-cis-Docosenamide, 14-Docosenamide Docos-11-enamide, (4E, 13E)-Docosa-4,13-dienamide, and (5E, 13E)-Docosa-5,13-dienamide.

[0083] The one or more C₂₂ hydrocarbon chains may be conjugated to the dsRNA agent via a direct attachment to the ribosugar of the dsRNA agent. Alternatively, the one or more C₂₂ hydrocarbon chains may be conjugated to the dsRNA agent via a linker or a carrier. In some embodiments, the one or more C₂₂ hydrocarbon chains may be conjugated to the dsRNA agent via internucleotide phosphate linkage.

[chemical structure]

[0084] In certain embodiments, the one or more C₂₂ hydrocarbon chains is conjugated to the dsRNA agent via one or more linkers (tethers), e.g., a carrier that replaces one or more nucleotide(s) in the internal position(s).

[0085] In some embodiments, the one or more C₂₂ hydrocarbon chains is conjugated to the dsRNA agent via a linker a linker containing an ether, thioether, urea, carbonate, amine, amide, maleimide-thioether, disulfide, phosphodiester, sulfonamide linkage, a product of a click reaction (e.g., a triazole from the azide-alkyne cycloaddition), or carbamate.

[0086] In some embodiments, at least one of the linkers (tethers) is a redox cleavable linker (such as a reductively cleavable linker; e.g., a disulfide group), an acid cleavable linker (e.g., a hydrazone group, an ester group, an acetal group, or a ketal group), an esterase cleavable linker (e.g., an ester group), a phosphatase cleavable linker (e.g., a phosphate group), or a peptidase cleavable linker (e.g., a peptide bond).

[0087] In other embodiments, at least one of the linkers (tethers) is a bio-clevable linker selected from the group consisting of DNA, RNA, disulfide, amide, peptide, e.g., protease cleavable peptide, functionalized monosaccharides or oligosaccharides of galactosamine, glucosamine, glucose, galactose, mannose, and combinations thereof.

[0088] In certain embodiments, the one or more C₂₂ hydrocarbon chains is conjugated to the dsRNA agent via a carrier that replaces one or more nucleotide(s). The carrier can be a cyclic group or an acyclic group. In one embodiment, the cyclic group is selected from the group consisting of pyrrolidinyl, pyrazolinyl, pyrazolidinyl, imidazolinyl, imidazolidinyl, piperidinyl, piperazinyl, [1,3]dioxolane, oxazolidinyl, isoxazolidinyl, morpholinyl, thiazolidinyl, isothiazolidinyl, quinoxalinyl, pyridazinonyl, tetrahydrofuryl, and decalin. In one embodiment, the acyclic group is a moiety based on a serinol backbone or a diethanolamine backbone.

[0089] In some embodiments, the carrier replaces one or more nucleotide(s) in the internal position(s) of the dsRNA agent.

[0090] In some embodiments, the sense and antisense strands of the dsRNA agent are each 15 to 30 nucleotides in length.

[0091] In one embodiment, the sense and antisense strands of a dsRNA agent are each 19 to 25 nucleotides in length.

[0092] In one embodiment, the sense and antisense strands of the dsRNA agent are each 21 to 23 nucleotides in length.

[0093] In some embodiments, the dsRNA agent comprises a single-stranded overhang on at least one of the termini, e.g., 3′ and/or 5′ overhang(s) of 1-10 nucleotides in length, for instance, an overhang of 1, 2, 3, 4, 5, or 6 nucleotides. In some embodiments, both strands have at least one stretch of 1-5 (e.g., 1, 2, 3, 4, or 5) single-stranded nucleotides in the double stranded region. In one embodiment, the single-stranded overhang is 1, 2, or 3 nucleotides in length. In some embodiments, the dsRNA agent may also have a blunt end, located at the 5′-end of the antisense strand (or the 3′-end of the sense strand), or vice versa. In one embodiment, the dsRNA agent comprises a 3′ overhang at the 3′-end of the antisense strand, and optionally a blunt end at the 5′-end of the antisense strand. In one embodiment, the dsRNA agent has a 5′ overhang at the 5′-end of the sense strand, and optionally a blunt end at the 5′-end of the antisense strand. In one embodiment, the dsRNA agent has two blunt ends at both ends of the iRNA duplex.

[0094] In some embodiments, at least one end of the dsRNA agent is blunt-ended.

[0095] In one embodiment, the sense strand of the dsRNA agent is 21-nucleotides in length, and the antisense strand is 23-nucleotides in length, wherein the strands form a double-stranded region of 21 consecutive base pairs having a 2-nucleotide long single-stranded overhangs at the 3′-end.

[0096] In some embodiments, the lipophilic moiety is conjugated to a nucleobase, sugar moiety, or internucleosidic phosphate linkage of the dsRNA agent.

[0097] In some embodiments, the dsRNA agent further comprises a phosphate or phosphate mimic at the 5′-end of the antisense strand. In one embodiment, the phosphate mimic is a 5′-vinyl phosphonate (VP).

[0098] In some embodiments, the 5′-end of the antisense strand of the dsRNA agent does not contain a 5′-vinyl phosphonate (VP).

[0099] In some embodiments, the dsRNA agent further comprises at least one terminal, chiral phosphorus atom.

[0100] A site specific, chiral modification to the internucleotide linkage may occur at the 5′ end, 3′ end, or both the 5′ end and 3′ end of a strand. This is being referred to herein as a “terminal” chiral modification. The terminal modification may occur at a 3′ or 5′ terminal position in a terminal region, e.g., at a position on a terminal nucleotide or within the last 2, 3, 4, 5, 6, 7, 8, 9 or 10 nucleotides of a strand. A chiral modification may occur on the sense strand, antisense strand, or both the sense strand and antisense strand. Each of the chiral pure phosphorus atoms may be in either Rp configuration or Sp configuration, and combination thereof. More details regarding chiral modifications and chirally-modified dsRNA agents can be found in PCT/US18/67103, entitled “Chirally-Modified Double-Stranded RNA Agents,” filed Dec. 21, 2018, which is incorporated herein by reference in its entirety.

[0101] In some embodiments, the dsRNA agent further comprises a terminal, chiral modification occurring at the first internucleotide linkage at the 3′ end of the antisense strand, having the linkage phosphorus atom in Sp configuration; a terminal, chiral modification occurring at the first internucleotide linkage at the 5′ end of the antisense strand, having the linkage phosphorus atom in Rp configuration; and a terminal, chiral modification occurring at the first internucleotide linkage at the 5′ end of the sense strand, having the linkage phosphorus atom in either Rp configuration or Sp configuration.

[0102] In one embodiment, the dsRNA agent further comprises a terminal, chiral modification occurring at the first and second internucleotide linkages at the 3′ end of the antisense strand, having the linkage phosphorus atom in Sp configuration; a terminal, chiral modification occurring at the first internucleotide linkage at the 5′ end of the antisense strand, having the linkage phosphorus atom in Rp configuration; and a terminal, chiral modification occurring at the first internucleotide linkage at the 5′ end of the sense strand, having the linkage phosphorus atom in either Rp or Sp configuration.

[0103] In one embodiment, the dsRNA agent further comprises a terminal, chiral modification occurring at the first, second, and third internucleotide linkages at the 3′ end of the antisense strand, having the linkage phosphorus atom in Sp configuration; a terminal, chiral modification occurring at the first internucleotide linkage at the 5′ end of the antisense strand, having the linkage phosphorus atom in Rp configuration; and a terminal, chiral modification occurring at the first internucleotide linkage at the 5′ end of the sense strand, having the linkage phosphorus atom in either Rp or Sp configuration.

[0104] In one embodiment, the dsRNA agent further comprises a terminal, chiral modification occurring at the first and second internucleotide linkages at the 3′ end of the antisense strand, having the linkage phosphorus atom in Sp configuration; a terminal, chiral modification occurring at the third internucleotide linkages at the 3′ end of the antisense strand, having the linkage phosphorus atom in Rp configuration; a terminal, chiral modification occurring at the first internucleotide linkage at the 5′ end of the antisense strand, having the linkage phosphorus atom in Rp configuration; and a terminal, chiral modification occurring at the first internucleotide linkage at the 5′ end of the sense strand, having the linkage phosphorus atom in either Rp or Sp configuration.

[0105] In one embodiment, the dsRNA agent further comprises a terminal, chiral modification occurring at the first and second internucleotide linkages at the 3′ end of the antisense strand, having the linkage phosphorus atom in Sp configuration; a terminal, chiral modification occurring at the first, and second internucleotide linkages at the 5′ end of the antisense strand, having the linkage phosphorus atom in Rp configuration; and a terminal, chiral modification occurring at the first internucleotide linkage at the 5′ end of the sense strand, having the linkage phosphorus atom in either Rp or Sp configuration.

[0106] In some embodiments, the dsRNA agent has at least two phosphorothioate internucleotide linkages at the first five nucleotides on the antisense strand (counting from the 5′ end).

[0107] In some embodiments, the antisense strand comprises two blocks of one, two, or three phosphorothioate internucleotide linkages separated by 1, 2, 3, 4, 5, 6, 7, 8, 9, 10, 11, 12, 13, 14, 15, 16, 17, or 18 phosphate internucleotide linkages.

[0108] In some embodiments, the dsRNA agent further comprises a targeting ligand that targets a receptor which mediates delivery to a skeletal muscle, cardiac muscle, or adipose tissue. In one embodiment, the targeting ligand is selected from the group consisting of Angiopep-2, lipoprotein receptor related protein (LRP) ligand, bEnd.3 cell binding ligand, transferrin receptor (TfR) ligand, manose receptor ligand, glucose transporter protein, LDL receptor ligand, trans-retinol, RGD peptide, LDL receptor ligand, CD63 ligand, CD36, and carbohydrate based ligand.

[0109] In some embodiments, the dsRNA agent further comprises a targeting ligand that targets a liver tissue. In some embodiments, the targeting ligand is a carbohydrate-based ligand. In one embodiment, the targeting ligand is a GalNAc conjugate.

[0110] In some embodiments, the dsRNA agent further comprises a dual targeting ligand that targets a liver tissue and a receptor which mediates delivery to a skeletal muscle, cardiac muscle, or adipose tissue.

[0111] All the above aspects and embodiments would be applicable to an oligonucleotide having one or more C₂₂ hydrocarbon chains conjugated to one or more internal positions on the oligonucleotide. In some embodiments, 100%, 95%, 90%, 85%, 80%, 75%, 70%, 65%, 60%, 55%, 50%, 45%, 40%, 35% or 30% of the oligonucleotide is modified. For example, when 50% of the oligonucleotide is modified, 50% of all nucleotides present in the oligonucleotide contain a modification as described herein.

[0112] In one embodiment, the oligonucleotide is a double-stranded dsRNA agent, and at least 50% of the nucleotides of the double-stranded dsRNA agent is independently modified with 2′-O-methyl, 2′-O-allyl, 2′-deoxy, or 2′-fluoro.

[0113] In one embodiment, the oligonucleotide is an antisense oligonucleotide, and at least 50% of the nucleotides of the antisense oligonucleotide are independently modified with LNA, CeNA, 2′-methoxyethyl, or 2′-deoxy.

[0114] In some embodiments, the dsRNA agent has less than 12, less than 10, less than 8, less than 6, less than 4, less than 2, or no 2′-F modifications on the sense strand. In some embodiments, the dsRNA agent has less than 12, less than 10, less than 8, less than 6, less than 4, less than 2, or no 2′-F modifications on the antisense strand.

[0115] In some embodiments, the dsRNA agent has one or more 2′-F modifications on any position of the sense strand or antisense strand.

[0116] In some embodiments, the 3′ end of the sense strand is protected via an end cap which is a cyclic group having an amine, said cyclic group being selected from the group consisting of pyrrolidinyl, pyrazolinyl, pyrazolidinyl, imidazolinyl, imidazolidinyl, piperidinyl, piperazinyl, [1,3]dioxolanyl, oxazolidinyl, isoxazolidinyl, morpholinyl, thiazolidinyl, isothiazolidinyl, quinoxalinyl, pyridazinonyl, tetrahydrofuranyl, and decalinyl.

[0117] In one embodiment, the target gene is selected from the group consisting of adrenoceptor beta 1 (ADRB1); calcium voltage-gated channel subunit alpha1 C (CACNA1C); calcium voltage-gated channel subunit alpha1 G (CACNA1G) (T type calcium channel); angiotensin II receptor type 1(AGTR1); Sodium Voltage-Gated Channel Alpha Subunit 2 (SCN2A); Hyperpolarization Activated Cyclic Nucleotide Gated Potassium Channel 1 (HCN1); Hyperpolarization Activated Cyclic Nucleotide Gated Potassium Channel 4 (HCN4); Hyperpolarization Activated Cyclic Nucleotide Gated Potassium Channel 3 (HCN3); Potassium Voltage-Gated Channel Subfamily A Member 5 (KCNA5); Potassium Inwardly Rectifying Channel Subfamily J Member 3 (KCNJ3); Potassium Inwardly Rectifying Channel Subfamily J Member 4 (KCNJ4); phospholamban (PLN); calcium/calmodulin dependent protein kinase II delta (CAMK2D); or Phosphodiesterase 1 (PDE1).

[0118] In one embodiment, the antisense strand comprises at least 15, e.g., 15, 16, 17, 18, 19, 20, 21, 22, or 23, contiguous nucleotides differing by no more than 3, e.g., 3, 2, 1, or 0, nucleotides from any one of the antisense nucleotide sequences in any one of Tables 2-5, 7B, 7C, 9-16, 19-26, and 28-35.

[0119] In one embodiment, the dsRNA agent is any one of the agents in any one of Tables 2, 3, 4, 5, 7B, 7C, 9-16, 19-26, or 28-35.

[0120] In one embodiment, the target gene is selected from the group consisting of Delta 4-Desaturase, Sphingolipid 1 (DEGS1); leptin; folliculin (FLCN); Zinc Finger Protein 423 (ZFP423); Cyclin Dependent Kinase 6 (CDK6); Regulatory Associated Protein Of MTOR Complex 1 (RPTOR); Mechanistic Target Of Rapamycin Kinase, (mTOR); Forkhead Box P1 (FOXP1); Phosphodiesterase 3B (PDE3B); and Activin A Receptor Type 1C (ACVR1C).

[0121] In another embodiment, the target gene is selected from the group consisting of PPARG, ADIPOQ, CD36, LPL, ADAMTS9, RASD1, GYS2, CAT, DPYS, MLXIPL, VEGFA, HLA-DQA1, LIPA, CTSC, FCGR2A, GBE1, SH2B3, CTSK, CDKN2B, ELN, ARG1, HHEX, TCF7L2, CYP2A6, ALDH2, ACADS, GLYCTK, LDLR, HAL, ACER3, SLC7A7. PTPN22, CDKN1C, LEPR, SNAI2, PGM1, IGF2BP2, TTPA, ATP7B, ASPA, ADRB3, MAN2B1, RCAN1, PIGL, TBX1, LMNB1, FBP1, ETFA, LMNA, LAT2, PRKAG2, SELENBP1, TKT, PCSK1, PSAP, NDN, ACYl, SATB2, CYP21A2, POMC, CDC73, CTSH, CFTR, CTSA, G6PD, EXT1, EXT2, CPT1A, SEMA5A, WFS1, KIT, ACAT1, GGCX, FKBP6, PPARGC1B, DGCR6, HMGCS2, PEPD, WRN, LCAT, KLF13, SLC16A2, DHCR7, ITPR3, CLDN4, FZD9, SLC30A2, APOA5, HADHA, CDKAL1, PTPN2, LIPC, CD226, PON1, MCCC1, EIF2AK3, GYG1, BCL7B, AGL, VKORC1, BAZ1B, NAGS, ASL, STAR, ACP2, POLG, GAA, ALDH3A2, MANBA, ARSA, AGA, CYP27B1, CPS1, DLAT, DCXR, EIF4H, DYRKIA, GTF2I, LAMP2, CTH, EPO, FLAD1, AKT2, WAC, GLB1, RFC2, BACH2, D2HGDH, GHRL, TBL2, RRM2B, PRKACA, DLD, NEU1, ADSL, SLC22A5, ADCY10, INSR, HSD17B10, DGCR8, NPAP1, OXCT1, SDC3, HMGCL, PGAP1, MCCC2, LMF1, PIGM, UCP3, PAH, VPS33A, BCS1L, PDP1, AHCY, ALDH18A1, ENO3, MTTP, MAT1A, GNPTAB, PHGDH, BCAT2, CBS, HDAC4, LIG3, PSAT1, HGD, CTNND2, PDHB, PDHA1, NADK2, UPB1, PKLR, BCKDK, MEN1, GALT, LIMK1, SLC39A4, KCNJ11, PDHX, ACAD8, GSS, CHRNA7, SLC6A9, ERBB3, GLUD1, GSR, OAT, SLC6A8, CLIP2, STX1A, CARTPT, SLC25A15, DGCR2, LIPT2, NR5A1, DNM1L, PHEX, SLC30A9, B3GAT3, SLC34A3, SLC12A3, EPX, SARS2, CAPN10, ASNS, ALDOB, AGRP, MFF, GK, APOC2, CLDN3, HPRT1, PFKM, AMACR, SNRPN, HNF1B, L2HGDH, SORD, IDH2, TPMT, CYP2C19, TERT, MC4R, TMPRSS15, SLCO1B3, FGF23, PAX4, SLC30A8, MTNR1B, SI, SLCO1B1, and NROB2.

[0122] In one embodiment, the target gene is selected from the group consisting of myostatin (MSTN); Cholinergic Receptor Nicotinic Alpha 1 Subunit (CHRNA1); Cholinergic Receptor Nicotinic Beta 1 Subunit (CHRNB1); Cholinergic Receptor Nicotinic Delta Subunit (CHRND); Cholinergic Receptor Nicotinic Epsilon Subunit (CHRNE); Cholinergic Receptor Nicotinic Gamma Subunit (CHRNG); Collagen Type XIII Alpha 1 Chain (COL13A1); Docking Protein 7 (DOK7); LDL Receptor Related Protein 4 (LRP4); Muscle Associated Receptor Tyrosine Kinase (MUSK); Receptor Associated Protein Of The Synapse (RAPSN); Sodium Voltage-Gated Channel Alpha Subunit 4 (SCN4A); and Double Homeobox 4 (DUX4).

[0123] In one embodiment, the cell is within a subject.

[0124] In one embodiment, the subject is a human.

[0125] In another aspect, the present invention provides a method of treating a subject having a skeletal muscle disorder, a cardiac muscle disorder, or an adipose tissue disorder, comprising administering to the subject a therapeutically effective amount of the dsRNA agent of the invention or a pharmaceutical composition of the invention, thereby treating the subject.

[0126] In one embodiment, the cardiac muscle disorder is selected from the group consisting of obstructive hypertrophic cardiomyopathy (HOCM); familial hypertrophic cardiomyopathy (FHC); Heart failure with preserved ejection fraction (HFPEF); atrial fibrillation (AFIB); ventricular fibrillation (VFIB); angina; myocardial infarction (MI); heart failure or heart failure with reduced ejection fraction (HFREF); supraventricular tachycardia (SVT); and hypertrophic cardiomyopathy (HCM).

[0127] In one embodiment, the skeletal muscle disorder is selected from the group consisting of Myostatin-related muscle hypertrophy, congenital myasthenic syndrome, and facioscapulohumeral muscular dystrophy (FSHD).

[0128] In one embodiment, the adipose tissue disorder is selected from the group consisting of a metabolic disorder, e.g. metabolic syndrome, a disorder of carbohydrates, e.g., type II diabetes, pre-diabetes, a lipid metabolism disorder, e.g., a hyperlipidemia, hypertension, a cardiovascular disease, a disorders of body weight.

[0129] The dsRNA agent may be administered to the subject intravenously, subcutaneously or intramuscularly.

[0130] In one embodiment, the dsRNA agent is administered to the subject intramuscularly.

[0131] In one embodiment, the dsRNA agent is administered to the subject subcutaneously.

[0132] In one embodiment, the methods of the invention further include administering to the subject an additional agent or a therapy suitable for treatment or prevention of a skeletal muscle disorder, cardiac muscle disorder, or an adipose tissue disorder.

[0133] In one aspect, the present invention provides an RNA-induced silencing complex (RISC) comprising an antisense strand of any of the dsRNA agents of the invention.

[0134] In another embodiment, the RNAi agent is a pharmaceutically acceptable salt thereof. “Pharmaceutically acceptable salts” of each of RNAi agents herein include, but are not limited to, a sodium salt, a calcium salt, a lithium salt, a potassium salt, an ammonium salt, a magnesium salt, an mixtures thereof. One skilled in the art will appreciate that the RNAi agent, when provided as a polycationic salt having one cation per free acid group of the optionally modified phosophodiester backbone and/or any other acidic modifications (e.g., 5′-terminal phosphonate groups). For example, an oligonucleotide of “n” nucleotides in length contains n-1 optionally modified phosophodiesters, so that an oligonucleotide of 21 nt in length may be provided as a salt having up to 20 cations (e.g, 20 sodium cations). Similarly, an RNAi agentshaving a sense strand of 21 nt in length and an antisense strand of 23 nt in length may be provided as a salt having up to 42 cations (e.g, 42 sodium cations). In the preceding example, where the RNAi agent also includes a 5′-terminal phosphate or a 5′-terminal vinylphosphonate group, the RNAi agent may be provided as a salt having up to 44 cations (e.g, 44 sodium cations).

[0135] In one aspect, the present invention provides a method of synthesizing a nucleoside monomer having the structure of Formula (I):

[chemical structure]

[0136] wherein:
[0137] B is a modified or unmodified nucleobase;
[0138] R¹ is a hydroxyl protecting group;
[0139] R² is H or phosphoramidite;
[0140] R³ is C₂₂H₄₅
   [0141] wherein the compound of formula (I) is free or substantially free of a compound of Formula (II)

[chemical structure]

[0142] wherein:
[0143] B is a modified or unmodified nucleobase;
[0144] R¹ is a hydroxyl protecting group;
[0145] R² is C₂₂H₄₅
[0146] R³ is H

[0147] In one embodiment, the hydroxyl protecting group is selected from the group consisting of 4,4′-dimethoxytrityl (DMT), monomethoxytrityl (MMT), 9-fluorenlnethylcarbonate (Fnoc), o-nitrophenylcarbonyl, p-phenylazopheniylcarbonlk, phenlcarbony, p-chlorophenylcarbonyl, and 5′-(α-methyl-2-lnitropiperonyl)oxycartonyl (MeNPOC).

### BRIEF DESCRIPTION OF THE DRAWINGS

[0148] FIG. 1 is a graph depicting the effect of intravenous administration of a single 5 mg/kg or 20 mg/kg dose of the indicated dsRNA agents at Day 14 post-dose on SOD1 mRNA expression in liver, cardiac, and skeletal muscle tissues in mice.

[0149] FIG. 2A is a graph depicting the effect of intravenous administration of a single 1 mg/kg, 5 mg/kg, or 20 mg/kg dose of duplex AD-1615344 at Day 14 and Day 28 post-dose on MALAT1 mRNA expression in skeletal muscle tissue in mice.

[0150] FIG. 2B is a graph depicting the effect of intravenous administration of a single 1 mg/kg, 5 mg/kg, or 20 mg/kg dose of duplex AD-1615345 at Day 14 and Day 28 post-dose on MALAT1 mRNA expression in skeletal muscle tissue in mice.

[0151] FIG. 3A is a graph depicting the effect of route of administration of a single 5 mg/kg dose of AD-1427062, targeting the mouse SOD1 gene, on SOD1 mRNA expression in skeletal muscle tissue. IV, intravenous administration; IM(I), intramuscular administration of AD-1427062; IM(D); intramuscular administration of distal skeletal muscle with PBS control; SQ, subcutaneous administration; and IP, intraperitoneal administration.

[0152] FIG. 3B is a graph depicting the effect of route of administration of a single 5 mg/kg dose of AD-1427062, targeting the mouse SOD1 gene, on SOD1 mRNA expression in cardiac muscle tissue. IV, intravenous administration; IM(I), intramuscular administration; SQ, subcutaneous administration; and IP, intraperitoneal administration.

[0153] FIG. 3C is a graph depicting the effect of route of administration of a single 5 mg/kg dose of AD-1640773, targeting the mouse MSTN1 gene, on SOD1 mRNA expression in skeletal muscle tissue. IV, intravenous administration; IM(I), intramuscular administration of AD-1640773; IM(D); intramuscular administration of distal skeletal muscle with PBS control; and SQ, subcutaneous administration.

[0154] FIG. 3D is a graph depicting the effect of route of administration of a single 5 mg/kg dose of AD-1427062, targeting the mouse SOD1 gene, on SOD1 mRNA expression in adipose tissue. GAPDH mRNA expression was used as a control. IV, intravenous administration; IM(I), intramuscular administration; SQ, subcutaneous administration; and IP, intraperitoneal administration.

[0155] FIG. 3E is a graph depicting the effect of route of administration of a single 5 mg/kg dose of AD-1427062, targeting the mouse SOD1 gene, on SOD1 mRNA expression in adipose tissue. HPRT mRNA expression was used as a control. IV, intravenous administration; IM(I), intramuscular administration; SQ, subcutaneous administration; and IP, intraperitoneal administration.

[0156] FIG. 4A is a graph depicting SOD1 mRNA silencing in mouse gonadal adipose tissue at Days 14 and 28 post-dose of a single intravenously administered 0.5 mg/kg, 2 mg/kg or 5 mg/kg dose of a dsRNA agent targeting SOD1. GAPDH mRNA expression was used as a control.

[0157] FIG. 4B is a graph depicting SOD1 mRNA silencing in mouse subcutaneous adipose tissue at Days 14 and 28 post-dose of a single intravenously administered 0.5 mg/kg, 2 mg/kg or 5 mg/kg dose of a dsRNA agent targeting SOD1. GAPDH mRNA expression was used as a control.

[0158] FIG. 4C is a graph depicting SOD1 mRNA silencing in mouse brown intrascapular adipose tissue at Days 14 and 28 post-dose of a single intravenously administered 0.5 mg/kg, 2 mg/kg or 5 mg/kg dose of a dsRNA agent targeting SOD1. GAPDH mRNA expression was used as a control.

[0159] FIG. 5 is a graph summarizing SOD1 mRNA silencing in non-human primates' adipose tissue (brown adipose, white hind limb, white subcutaneous and white uterine) at 30 days post-dose of a single 3 mg/kg IV administered dose of a dsRNA agent targeting SOD1.

[0160] FIG. 6A is a graph depicting Leptin serum concentrations in lean female mice pre-dose (Day 0) and Days 8, 14, and 21 post-dose following subcutaneous administration of a single 5 mg/kg dose of AD-1888031 or AD-1888032. Each bar represents the mean serum concentration for each treatment group at the indicated timepoint +/− standard error (n=3) compared to PBS control.

[0161] FIG. 6B is a graph depicting the percent change in leptin concentration in lean female mice pre-dose (Day 0) and Days 8, 14, and 21 post-dose following subcutaneous administration of a single 5 mg/kg dose of AD-1888031 or AD-1888032. Each bar represents the mean percent change in serum concentration for each treatment group at the indicated timepoint +/− standard error (n=3) compared to PBS control.

[0162] FIG. 7A is a graph depicting Leptin serum concentrations in lean male mice pre-dose (Day 0) and Days 8, 14, and 21 post-dose following subcutaneous administration of a single 5 mg/kg dose of AD-1888031 or AD-1888032. Each bar represents the mean serum concentration for each treatment group at the indicated timepoint +/− standard error (n=3) compared to PBS control.

[0163] FIG. 7B is a graph the percent change in leptin concentration in lean male mice pre-dose (Day 0) and Days 8, 14, and 21 post-dose following subcutaneous administration of a single 5 mg/kg dose of AD-1888031 or AD-1888032. Each bar represents the mean percent change in serum concentration for each treatment group at the indicated timepoint +/− standard error (n=3) compared to PBS control.

[0164] FIG. 8A is a graph depicting Leptin serum concentrations in high-fat diet (HFD) fed male mice pre-dose (Day 0) and Days 8, 14, and 21 post-dose following subcutaneous administration of a single 5 mg/kg dose of AD-1888031 or AD-1888032. Each bar represents the mean serum concentration for each treatment group at the indicated timepoint +/− standard error (n=3) compared to PBS control.

[0165] FIG. 8B is a graph depicting the percent change in leptin concentration in high-fat diet (HFD) fed male mice pre-dose (Day 0) and Days 8, 14, and 21 post-dose following subcutaneous administration of a single 5 mg/kg dose of AD-1888031 or AD-1888032. Each bar represents the mean percent change in serum concentration for each treatment group at the indicated timepoint +/− standard error (n=3) compared to PBS control.

[0166] FIG. 9A is a graph depicting the average relative mouse myostatin mRNA expression after intravenous administration of single 1, 2.5, or 5 mg/kg dose of lipid conjugated Mstn dsRNA agent at Day 14 post-dose in quadriceps as determined by qPCR.

[0167] FIG. 9B is a graph depicting the average relative mouse myostatin mRNA expression after intravenous administration of single 1, 2.5, or 5 mg/kg dose of lipid conjugated Mstn dsRNA agent at Dat 14 and 46 post-dose in quadriceps as determined by qPCR.

[0168] FIG. 10 is a graph depicting the average relative mouse SOD1 mRNA expression after intravenous administration of single 2 mg/kg dose of a lipid conjugated SOD1 dsRNA agent (AD-1427062) at Day 14 post-dose in quadriceps (left and right), gastrocnemius, and diaphragm as determined by qPCR.

[0169] FIG. 11 is a graph depicting the average relative mouse SOD1 mRNA expression following intravenous or subcutaneous administration of single 2 mg/kg or 1 mg/kg×2 doses (administered 1 week apart) of AD-1812376 on Day 14 post-dose in quadriceps as determined by qPCR.

[0170] FIG. 12 is a graph depicting the average relative mouse SOD1 mRNA expression following single 2 mg/kg or 1 mg/kg×2 doses of AD-1812376) agent after 21 days in heart administered either intravenously subcutaneously as determined by qPCR.

[0171] FIG. 13A is a graph depicting the average relative myostatin mRNA expression following intravenous administration of a single 2 mg/kg or 5 mg/kg dose of a dsRNA agent targeting Myostatin and comprising one or more C₂₂ hydrocarbon chains conjugated to position 6 on the sense strand, counting from the 5′-end of the sense strand, at Day 56 post-dose in quadriceps as determined by qPCR and compared to PBS control in non-human primates.

[0172] FIG. 13B is a graph depicting the average relative myostatin mRNA expression following intravenous administration of a single 2 mg/kg or 5 mg/kg dose of a dsRNA agent targeting Myostatin and comprising one or more C₂₂ hydrocarbon chains conjugated to position 6 on the sense strand, counting from the 5′-end of the sense strand, at Day 56 post-dose in gastrocnemius as determined qPCR and compared to PBS control in non-human primates.

[0173] FIG. 13C is a graph depicting the average relative myostatin protein expression following intravenous administration of a single 2 mg/kg or 5 mg/kg dose of a dsRNA agent targeting Myostatin and comprising one or more C₂₂ hydrocarbon chains conjugated to position 6 on the sense strand, counting from the 5′-end of the sense strand, at Day 56 post-dose in quadriceps and gastrocnemius as determined by ELISA and compared to PBS control in non-human primates.

### DETAILED DESCRIPTION OF THE INVENTION

[0174] The inventors have unexpectedly discovered, inter alia, that conjugating a C₂₂ lipophilic moiety to one or more internal positions on at least one strand of a dsRNA agent provides surprisingly efficient in vivo delivery to muscle and/or adipose tissue resulting in efficient entry and internalization of the dsRNA agent into muscle tissue, e.g., cardiac and skeletal muscle tissue, and/or adipose tissue, and surpringly good inhibition of target gene expression in muscle tissue, e.g., cardiac and skeletal muscle tissue, and/or adipose tissue.

[0175] Accordingly, in one aspect, the present invention provides a dsRNA agent comprising an antisense strand which is complementary to the target gene; a sense strand which is complementary to the antisense strand and forms a double stranded region with the antisense strand; and one or more C₂₂ hydrocarbon chains, e.g., saturated or unsaturated, conjugated to one or more internal positions on at least one strand, wherein the dsRNA agent is suitable for delivery to a muscle tissue or an adipose tissue. In some embodiments, the one or more C₂₂ hydrocarbon chains conjugated to one or more internal positions on at least one strand are conjugated to the dsRNA agent via a linker or carrier.

[0176] The following detailed description discloses how to make and use compositions containing dsRNA agents comprising one or more C₂₂ hydrocarbon chains to inhibit the expression of a target gene as well as compositions, uses, and methods for treating subjects that would benefit from inhibition and/or reduction of the expression of the target gene.

### I. Definitions

[0177] In order that the present invention may be more readily understood, certain terms are first defined. In addition, it should be noted that whenever a value or range of values of a parameter are recited, it is intended that values and ranges intermediate to the recited values are also intended to be part of this invention.

[0178] The articles “a” and “an” are used herein to refer to one or to more than one (i.e., to at least one) of the grammatical object of the article. By way of example, “an element” means one element or more than one element, e.g., a plurality of elements.

[0179] The term “including” is used herein to mean, and is used interchangeably with, the phrase “including but not limited to”.

[0180] The term “or” is used herein to mean, and is used interchangeably with, the term “and/or,” unless context clearly indicates otherwise. For example, “sense strand or antisense strand” is understood as “sense strand or antisense strand or sense strand and antisense strand.”

[0181] The term “about” is used herein to mean within the typical ranges of tolerances in the art. For example, “about” can be understood as about 2 standard deviations from the mean. In certain embodiments, about means ±10%. In certain embodiments, about means ±5%. When about is present before a series of numbers or a range, it is understood that “about” can modify each of the numbers in the series or range.

[0182] The term “at least”, “no less than”, or “or more” prior to a number or series of numbers is understood to include the number adjacent to the term “at least”, and all subsequent numbers or integers that could logically be included, as clear from context. For example, the number of nucleotides in a nucleic acid molecule must be an integer. For example, “at least 19 nucleotides of a 21 nucleotide nucleic acid molecule” means that 19, 20, or 21 nucleotides have the indicated property. When at least is present before a series of numbers or a range, it is understood that “at least” can modify each of the numbers in the series or range.

[0183] As used herein, “no more than” or “or less” is understood as the value adjacent to the phrase and logical lower values or integers, as logical from context, to zero. For example, a duplex with an overhang of “no more than 2 nucleotides” has a 2, 1, or 0 nucleotide overhang. When “no more than” is present before a series of numbers or a range, it is understood that “no more than” can modify each of the numbers in the series or range. As used herein, ranges include both the upper and lower limit.

[0184] As used herein, methods of detection can include determination that the amount of analyte present is below the level of detection of the method.

[0185] In the event of a conflict between an indicated target site and the nucleotide sequence for a sense or antisense strand, the indicated sequence takes precedence.

[0186] In the event of a conflict between a sequence and its indicated site on a transcript or other sequence, the nucleotide sequence recited in the specification takes precedence.

[0187] As used herein, “target sequence” or “target nucleic acid” refers to a contiguous portion of the nucleotide sequence of an mRNA molecule formed during the transcription of a target gene, including mRNA that is a product of RNA processing of a primary transcription product. In one embodment, the target portion of the sequence will be at least long enough to serve as a substrate for RNAi-directed cleavage at or near that portion of the nucleotide sequence of an mRNA molecule formed during the transcription of a target gene. In one embodiment, the target sequence is within the protein coding region of the target gene. In another embodiment, the target sequence is within the 3′ UTR of the target gene. The target nucleic acid can be a cellular gene (or mRNA transcribed from the gene) whose expression is associated with a particular disorder or disease state.

[0188] The target sequence may be from about 9-36 nucleotides in length, e.g., about 15-30 nucleotides in length. For example, the target sequence can be about 15-30 nucleotides, 15-29, 15-28, 15-27, 15-26, 15-25, 15-24, 15-23, 15-22, 15-21, 15-20, 15-19, 15-18, 15-17, 18-30, 18-29, 18-28, 18-27, 18-26, 18-25, 18-24, 18-23, 18-22, 18-21, 18-20, 19-30, 19-29, 19-28, 19-27, 19-26, 19-25, 19-24, 19-23, 19-22, 19-21, 19-20, 20-30, 20-29, 20-28, 20-27, 20-26, 20-25, 20-24, 20-23, 20-22, 20-21, 21-30, 21-29, 21-28, 21-27, 21-26, 21-25, 21-24, 21-23, or 21-22 nucleotides in length. In some embodiments, the target sequence is about 19 to about 30 nucleotides in length. In other embodiments, the target sequence is about 19 to about 25 nucleotides in length. In still other embodiments, the target sequence is about 19 to about 23 nucleotides in length. In some embodiments, the target sequence is about 21 to about 23 nucleotides in length. Ranges and lengths intermediate to the above recited ranges and lengths are also contemplated to be part of the invention.

[0189] As used herein, the term “strand comprising a sequence” refers to an oligonucleotide comprising a chain of nucleotides that is described by the sequence referred to using the standard nucleotide nomenclature.

[0190] “G,” “C,” “A,” “T,” and “U” each generally stand for a nucleotide that contains guanine, cytosine, adenine, thymidine, and uracil as a base, respectively. However, it will be understood that the term “ribonucleotide” or “nucleotide” can also refer to a modified nucleotide, as further detailed below, or a surrogate replacement moiety (see, e.g., Table 1). The skilled person is well aware that guanine, cytosine, adenine, and uracil can be replaced by other moieties without substantially altering the base pairing properties of an oligonucleotide comprising a nucleotide bearing such replacement moiety. It is understood that when a cDNA sequence is provided, the corresponding mRNA or RNAi agent would include a U in place of a T. For example, without limitation, a nucleotide comprising inosine as its base can base pair with nucleotides containing adenine, cytosine, or uracil. Hence, nucleotides containing uracil, guanine, or adenine can be replaced in the nucleotide sequences of dsRNA featured in the invention by a nucleotide containing, for example, inosine. In another example, adenine and cytosine anywhere in the oligonucleotide can be replaced with guanine and uracil, respectively to form G-U Wobble base pairing with the target mRNA. Sequences containing such replacement moieties are suitable for the compositions and methods featured in the invention. Further, one of skill in the art that a T is a target gene sequence, or reverse complement thereof, would often be replaced by a U in an RNAi agent of the invention.

[0191] The terms “iRNA”, “RNAi agent,” “iRNA agent,” “RNA interference agent” as used interchangeably herein, refer to an agent that contains RNA as that term is defined herein, and which mediates the targeted cleavage of an RNA transcript via an RNA-induced silencing complex (RISC) pathway. RNA interference (RNAi) is a process that directs the sequence-specific degradation of mRNA. RNAi modulates, e.g., inhibits, the expression of a target gene in a cell, e.g., a cell within a subject, such as a mammalian subject.

[0192] In one embodiment, an RNAi agent of the disclosure includes a single stranded RNAi that interacts with a target RNA sequence, e.g., a target mRNA sequence, to direct the cleavage of the target RNA. Without wishing to be bound by theory it is believed that long double stranded RNA introduced into cells is broken down into double-stranded short interfering RNAs (siRNAs) comprising a sense strand and an antisense strand by a Type III endonuclease known as Dicer (Sharp et al. (2001) Genes Dev. 15:485). Dicer, a ribonuclease-III-like enzyme, processes these dsRNA into 19-23 base pair short interfering RNAs with characteristic two base 3′ overhangs (Bernstein, et al., (2001) Nature 409:363). These siRNAs are then incorporated into an RNA-induced silencing complex (RISC) where one or more helicases unwind the siRNA duplex, enabling the complementary antisense strand to guide target recognition (Nykanen, et al., (2001) Cell 107:309). Upon binding to the appropriate target mRNA, one or more endonucleases within the RISC cleave the target to induce silencing (Elbashir, et al., (2001) Genes Dev. 15:188). Thus, in one aspect the disclosure relates to a single stranded RNA (ssRNA) (the antisense strand of a siRNA duplex) generated within a cell and which promotes the formation of a RISC complex to effect silencing of the target gene. Accordingly, the term “siRNA” is also used herein to refer to an RNAi as described above.

[0193] In another embodiment, the RNAi agent may be a single-stranded RNA that is introduced into a cell or organism to inhibit a target mRNA. Single-stranded RNAi agents bind to the RISC endonuclease, Argonaute 2, which then cleaves the target mRNA. The single-stranded siRNAs are generally 15-30 nucleotides and are chemically modified. The design and testing of single-stranded RNAs are described in U.S. Pat. No. 8,101,348 and in Lima et al., (2012) Cell 150:883-894, the entire contents of each of which are hereby incorporated herein by reference. Any of the antisense nucleotide sequences described herein may be used as a single-stranded siRNA as described herein or as chemically modified by the methods described in Lima et al., (2012) Cell 150:883-894.

[0194] In another embodiment, an “RNAi agent” for use in the compositions and methods of the disclosure is a double stranded RNA and is referred to herein as a “double stranded RNAi agent,” “double stranded RNA (dsRNA) molecule,” “dsRNA agent,” or “dsRNA”. The term “dsRNA” refers to a complex of ribonucleic acid molecules, having a duplex structure comprising two anti-parallel and substantially complementary nucleic acid strands, referred to as having “sense” and “antisense” orientations with respect to a target RNA, i.e., a target mRNA sequence. In some embodiments of the disclosure, a double stranded RNA (dsRNA) triggers the degradation of a target RNA, e.g., an mRNA, through a post-transcriptional gene-silencing mechanism referred to herein as RNA interference or RNAi.

[0195] In general, a dsRNA molecule can include ribonucleotides, but as described in detail herein, each or both strands can also include one or more non-ribonucleotides, e.g., a deoxyribonucleotide, a modified nucleotide. In addition, as used in this specification, an “RNAi agent” may include ribonucleotides with chemical modifications; an RNAi agent may include substantial modifications at multiple nucleotides.

[0196] As used herein, the term “modified nucleotide” refers to a nucleotide having, independently, a modified sugar moiety, a modified internucleotide linkage, or a modified nucleobase. Thus, the term modified nucleotide encompasses substitutions, additions or removal of, e.g., a functional group or atom, to internucleoside linkages, sugar moieties, or nucleobases. The modifications suitable for use in the agents of the disclosure include all types of modifications disclosed herein or known in the art. Any such modifications, as used in a siRNA type molecule, are encompassed by “RNAi agent” for the purposes of this specification and claims.

[0197] In certain embodiments of the instant disclosure, inclusion of a deoxy-nucleotide—which is acknowledged as a naturally occurring form of nucleotide—if present within a RNAi agent can be considered to constitute a modified nucleotide.

[0198] The duplex region may be of any length that permits specific degradation of a desired target RNA through a RISC pathway, and may range from about 9 to 36 base pairs in length, e.g., about 15-30 base pairs in length, for example, about 9, 10, 11, 12, 13, 14, 15, 16, 17, 18, 19, 20, 21, 22, 23, 24, 25, 26, 27, 28, 29, 30, 31, 32, 33, 34, 35, or 36 base pairs in length, such as about 15-30, 15-29, 15-28, 15-27, 15-26, 15-25, 15-24, 15-23, 15-22, 15-21, 15-20, 15-19, 15-18, 15-17, 18-30, 18-29, 18-28, 18-27, 18-26, 18-25, 18-24, 18-23, 18-22, 18-21, 18-20, 19-30, 19-29, 19-28, 19-27, 19-26, 19-25, 19-24, 19-23, 19-22, 19-21, 19-20, 20-30, 20-29, 20-28, 20-27, 20-26, 20-25, 20-24,20-23, 20-22, 20-21, 21-30, 21-29, 21-28, 21-27, 21-26, 21-25, 21-24, 21-23, or 21-22 base pairs in length. Ranges and lengths intermediate to the above recited ranges and lengths are also contemplated to be part of the invention.

[0199] The two strands forming the duplex structure may be different portions of one larger RNA molecule, or they may be separate RNA molecules. Where the two strands are part of one larger molecule, and therefore are connected by an uninterrupted chain of nucleotides between the 3′-end of one strand and the 5′-end of the respective other strand forming the duplex structure, the connecting RNA chain is referred to as a “hairpin loop.” A hairpin loop can comprise at least one unpaired nucleotide. In some embodiments, the hairpin loop can comprise at at least 4, at least 5, at least 6, at least 7, at least 8, at least 9, at least 10, at least 20, at least 23 or more unpaired nucleotides or nucleotides not directed to the target site of the dsRNA. In some embodiments, the hairpin loop can be 10 or fewer nucleotides. In some embodiments, the hairpin loop can be 8 or fewer unpaired nucleotides. In some embodiments, the hairpin loop can be 4-10 unpaired nucleotides. In some embodiments, the hairpin loop can be 4-8 nucleotides.

[0200] In certain embodiment, the two strands of double-stranded oligomeric compound can be linked together. The two strands can be linked to each other at both ends, or at one end only. By linking at one end is meant that 5′-end of first strand is linked to the 3′-end of the second strand or 3′-end of first strand is linked to 5′-end of the second strand. When the two strands are linked to each other at both ends, 5′-end of first strand is linked to 3′-end of second strand and 3′-end of first strand is linked to 5′-end of second strand. The two strands can be linked together by an oligonucleotide linker including, but not limited to, (N)n; wherein N is independently a modified or unmodified nucleotide and n is 3-23. In some embodiments, n is 3-10, e.g., 3, 4, 5, 6, 7, 8, 9, or 10. In some embodiments, the oligonucleotide linker is selected from the group consisting of GNRA, (G)4, (U)4, and (dT)4, wherein N is a modified or unmodified nucleotide and R is a modified or unmodified purine nucleotide. Some of the nucleotides in the linker can be involved in base-pair interactions with other nucleotides in the linker. The two strands can also be linked together by a non-nucleosidic linker, e.g. a linker described herein. It will be appreciated by one of skill in the art that any oligonucleotide chemical modifications or variations describe herein can be used in the oligonucleotide linker.

[0201] Hairpin and dumbbell type oligomeric compounds will have a duplex region equal to or at least 14, 15, 15, 16, 17, 18, 19, 29, 21, 22, 23, 24, or 25 nucleotide pairs. The duplex region can be equal to or less than 200, 100, or 50, in length. In some embodiments, ranges for the duplex region are 15-30, 17 to 23, 19 to 23, and 19 to 21 nucleotides pairs in length.

[0202] The hairpin oligomeric compounds can have a single strand overhang or terminal unpaired region, in some embodiments at the 3′, and in some embodiments on the antisense side of the hairpin. In some embodiments, the overhangs are 1-4, more generally 2-3 nucleotides in length. The hairpin oligomeric compounds that can induce RNA interference are also referred to as “shRNA” herein.

[0203] Where the two substantially complementary strands of a dsRNA are comprised by separate RNA molecules, those molecules need not, but can be covalently connected. Where the two strands are connected covalently by means other than an uninterrupted chain of nucleotides between the 3′-end of one strand and the 5′-end of the respective other strand forming the duplex structure, the connecting structure is referred to as a “linker.” The RNA strands may have the same or a different number of nucleotides. The maximum number of base pairs is the number of nucleotides in the shortest strand of the dsRNA minus any overhangs that are present in the duplex. In addition to the duplex structure, an RNAi may comprise one or more nucleotide overhangs.

[0204] In one embodiment, an RNAi agent of the invention is a dsRNA, each strand of which is 24-30 nucleotides in length, that interacts with a target RNA sequence, e.g., a target mRNA sequence, to direct the cleavage of the target RNA. Without wishing to be bound by theory, long double stranded RNA introduced into cells is broken down into siRNA by a Type III endonuclease known as Dicer (Sharp et al. (2001) Genes Dev. 15:485). Dicer, a ribonuclease-III-like enzyme, processes the dsRNA into 19-23 base pair short interfering RNAs with characteristic two base 3′ overhangs (Bernstein, et al., (2001) Nature 409:363). The siRNAs are then incorporated into an RNA-induced silencing complex (RISC) where one or more helicases unwind the siRNA duplex, enabling the complementary antisense strand to guide target recognition (Nykanen, et al., (2001) Cell 107:309). Upon binding to the appropriate target mRNA, one or more endonucleases within the RISC cleave the target to induce silencing (Elbashir, et al., (2001) Genes Dev. 15:188).

[0205] In one embodiment, an RNAi agent of the invention is a dsRNA agent, each strand of which comprises 19-23 nucleotides that interacts with a target mRNA sequence to direct the cleavage of the target RNA. Without wishing to be bound by theory, long double stranded RNA introduced into cells is broken down into siRNA by a Type III endonuclease known as Dicer (Sharp et al. (2001) Genes Dev. 15:485). Dicer, a ribonuclease-III-like enzyme, processes the dsRNA into 19-23 base pair short interfering RNAs with characteristic two base 3′ overhangs (Bernstein, et al., (2001) Nature 409:363). The siRNAs are then incorporated into an RNA-induced silencing complex (RISC) where one or more helicases unwind the siRNA duplex, enabling the complementary antisense strand to guide target recognition (Nykanen, et al., (2001) Cell 107:309). Upon binding to the appropriate target mRNA, one or more endonucleases within the RISC cleave the target to induce silencing (Elbashir, et al., (2001) Genes Dev. 15:188). In one embodiment, an RNAi agent of the invention is a dsRNA of 24-30 nucleotides that interacts with a target mRNA sequence to direct the cleavage of the target RNA.

[0206] As used herein, the term “nucleotide overhang” refers to at least one unpaired nucleotide that protrudes from the duplex structure of a RNAi agent, e.g., a dsRNA. For example, when a 3′-end of one strand of a dsRNA extends beyond the 5′-end of the other strand, or vice versa, there is a nucleotide overhang. A dsRNA can comprise an overhang of at least one nucleotide; alternatively, the overhang can comprise at least two nucleotides, at least three nucleotides, at least four nucleotides, at least five nucleotides or more. A nucleotide overhang can comprise or consist of a nucleotide/nucleoside analog, including a deoxynucleotide/nucleoside. The overhang(s) can be on the sense strand, the antisense strand or any combination thereof. Furthermore, the nucleotide(s) of an overhang can be present on the 5′-end, 3′-end or both ends of either an antisense or sense strand of a dsRNA.

[0207] In one embodiment of the dsRNA, at least one strand comprises a 3′ overhang of at least 1 nucleotide. In another embodiment, at least one strand comprises a 3′ overhang of at least 2 nucleotides, e.g., 2, 3, 4, 5, 6, 7, 9, 10, 11, 12, 13, 14, or 15 nucleotides. In other embodiments, at least one strand of the RNAi agent comprises a 5′ overhang of at least 1 nucleotide. In certain embodiments, at least one strand comprises a 5′ overhang of at least 2 nucleotides, e.g., 2, 3, 4, 5, 6, 7, 9, 10, 11, 12, 13, 14, or 15 nucleotides. In still other embodiments, both the 3′ and the 5′ end of one strand of the RNAi agent comprise an overhang of at least 1 nucleotide.

[0208] In one embodiment, the antisense strand of a dsRNA has a 1-10 nucleotide, e.g., β-3, 1-3, 2-4, 2-5, 4-10, 5-10, e.g., a 1, 2, 3, 4, 5, 6, 7, 8, 9, or 10 nucleotide, overhang at the 3′-end or the 5′-end. In one embodiment, the sense strand of a dsRNA has a 1-10 nucleotide, e.g., a 1, 2, 3, 4, 5, 6, 7, 8, 9, or 10 nucleotide, overhang at the 3′-end or the 5′-end. In another embodiment, one or more of the nucleotides in the overhang is replaced with a nucleoside thiophosphate.

[0209] In certain embodiments, the overhang on the sense strand or the antisense strand, or both, can include extended lengths longer than 10 nucleotides, e.g., 1-30 nucleotides, 2-30 nucleotides, 10-30 nucleotides, or 10-15 nucleotides in length. In certain embodiments, an extended overhang is on the sense strand of the duplex. In certain embodiments, an extended overhang is present on the 3′end of the sense strand of the duplex. In certain embodiments, an extended overhang is present on the 5′ end of the sense strand of the duplex. In certain embodiments, an extended overhang is on the antisense strand of the duplex. In certain embodiments, an extended overhang is present on the 3′end of the antisense strand of the duplex. In certain embodiments, an extended overhang is present on the 5′ end of the antisense strand of the duplex. In certain embodiments, one or more of the nucleotides in the overhang is replaced with a nucleoside thiophosphate. In certain embodiments, the overhang includes a self-complementary portion such that the overhang is capable of forming a hairpin structure that is stable under physiological conditions.

[0210] The terms “blunt” or “blunt ended” as used herein in reference to a dsRNA mean that there are no unpaired nucleotides or nucleotide analogs at a given terminal end of a dsRNA, i.e., no nucleotide overhang. One or both ends of a dsRNA can be blunt. Where both ends of a dsRNA are blunt, the dsRNA is said to be blunt ended. To be clear, a “blunt ended” dsRNA is a dsRNA that is blunt at both ends, i.e., no nucleotide overhang at either end of the molecule. Most often such a molecule will be double stranded over its entire length.

[0211] The term “antisense strand” or “guide strand” refers to the strand of an iRNA, e.g., a dsRNA, which includes a region that is substantially complementary to a target sequence, e.g., a target mRNA sequence.

[0212] As used herein, the term “region of complementarity” refers to the region on the antisense strand that is substantially complementary to a sequence, for example a target sequence, e.g., a target nucleotide sequence, as defined herein. Where the region of complementarity is not fully complementary to the target sequence, the mismatches can be in the internal or terminal regions of the molecule. Generally, the most tolerated mismatches are in the terminal regions, e.g., within 5, 4, 3, or 2 nucleotides of the 5′- or 3′-terminus of the RNAi agent.

[0213] In some embodiments, a double stranded RNA agent of the invention includes a nucleotide mismatch in the antisense strand. In some embodiments, the antisense strand of the double stranded RNA agent of the invention includes no more than 4 mismatches with the target mRNA, e.g., the antisense strand includes 4, 3, 2, 1, or 0 mismatches with the target mRNA. In some embodiments, the antisense strand double stranded RNA agent of the invention includes no more than 4 mismatches with the sense strand, e.g., the antisense strand includes 4, 3, 2, 1, or 0 mismatches with the sense strand. In some embodiments, a double stranded RNA agent of the invention includes a nucleotide mismatch in the sense strand. In some embodiments, the sense strand of the double stranded RNA agent of the invention includes no more than 4 mismatches with the antisense strand, e.g., the sense strand includes 4, 3, 2, 1, or 0 mismatches with the antisense strand. In some embodiments, the nucleotide mismatch is, for example, within 5, 4, 3 nucleotides from the 3′-end of the iRNA. In another embodiment, the nucleotide mismatch is, for example, in the 3′-terminal nucleotide of the iRNA agent. In some embodiments, the mismatch(s) is not in the seed region.

[0214] Thus, an RNAi agent as described herein can contain one or more mismatches to the target sequence. In one embodiment, a RNAi agent as described herein contains no more than 3 mismatches (i.e., 3, 2, 1, or 0 mismatches). In one embodiment, an RNAi agent as described herein contains no more than 2 mismatches. In one embodiment, an RNAi agent as described herein contains no more than 1 mismatch. In one embodiment, an RNAi agent as described herein contains 0 mismatches. In certain embodiments, if the antisense strand of the RNAi agent contains mismatches to the target sequence, the mismatch can optionally be restricted to be within the last 5 nucleotides from either the 5′- or 3′-end of the region of complementarity. For example, in such embodiments, for a 23 nucleotide RNAi agent, the strand which is complementary to a region of a target gene, generally does not contain any mismatch within the central 13 nucleotides. The methods described herein or methods known in the art can be used to determine whether an RNAi agent containing a mismatch to a target sequence is effective in inhibiting the expression of a target gene. Consideration of the efficacy of RNAi agents with mismatches in inhibiting expression of a target gene is important, especially if the particular region of complementarity in a target gene is known to vary.

[0215] The term “sense strand” or “passenger strand” as used herein, refers to the strand of a RNAi agent that includes a region that is substantially complementary to a region of the antisense strand as that term is defined herein.

[0216] As used herein, “substantially all of the nucleotides are modified” are largely but not wholly modified and can include not more than 5, 4, 3, 2, or 1 unmodified nucleotides.

[0217] As used herein, the term “cleavage region” refers to a region that is located immediately adjacent to the cleavage site. The cleavage site is the site on the target at which cleavage occurs. In some embodiments, the cleavage region comprises three bases on either end of, and immediately adjacent to, the cleavage site. In some embodiments, the cleavage region comprises two bases on either end of, and immediately adjacent to, the cleavage site. In some embodiments, the cleavage site specifically occurs at the site bound by nucleotides 10 and 11 of the antisense strand, and the cleavage region comprises nucleotides 11, 12 and 13.

[0218] As used herein, and unless otherwise indicated, the term “complementary,” when used to describe a first nucleotide sequence in relation to a second nucleotide sequence, refers to the ability of an oligonucleotide or polynucleotide comprising the first nucleotide sequence to hybridize and form a duplex structure under certain conditions with an oligonucleotide or polynucleotide comprising the second nucleotide sequence, as will be understood by the skilled person. Such conditions can be, for example, “stringent conditions”, where stringent conditions can include: 400 mM NaCl, 40 mM PIPES pH 6.4, 1 mM EDTA, 50° C. or 70 oC for 12-16 hours followed by washing (see, e.g., “Molecular Cloning: A Laboratory Manual, Sambrook, et al. (1989) Cold Spring Harbor Laboratory Press). Other conditions, such as physiologically relevant conditions as can be encountered inside an organism, can apply. The skilled person will be able to determine the set of conditions most appropriate for a test of complementarity of two sequences in accordance with the ultimate application of the hybridized nucleotides.

[0219] Complementary sequences within an RNAi agent, e.g., within a dsRNA as described herein, include base-pairing of the oligonucleotide or polynucleotide comprising a first nucleotide sequence to an oligonucleotide or polynucleotide comprising a second nucleotide sequence over the entire length of one or both nucleotide sequences. Such sequences can be referred to as “fully complementary” with respect to each other herein. However, where a first sequence is referred to as “substantially complementary” with respect to a second sequence herein, the two sequences can be fully complementary, or they can form one or more, but generally not more than 5, 4, 3, or 2 mismatched base pairs upon hybridization for a duplex up to 30 base pairs, while retaining the ability to hybridize under the conditions most relevant to their ultimate application, e.g., inhibition of gene expression, in vitro or in vivo. However, where two oligonucleotides are designed to form, upon hybridization, one or more single stranded overhangs, such overhangs shall not be regarded as mismatches with regard to the determination of complementarity. For example, a dsRNA comprising one oligonucleotide 21 nucleotides in length and another oligonucleotide 23 nucleotides in length, wherein the longer oligonucleotide comprises a sequence of 21 nucleotides that is fully complementary to the shorter oligonucleotide, can yet be referred to as “fully complementary” for the purposes described herein.

[0220] “Complementary” sequences, as used herein, can also include, or be formed entirely from, non-Watson-Crick base pairs or base pairs formed from non-natural and modified nucleotides, in so far as the above requirements with respect to their ability to hybridize are fulfilled. Such non-Watson-Crick base pairs include, but are not limited to, G:U Wobble or Hoogsteen base pairing.

[0221] The terms “complementary,” “fully complementary” and “substantially complementary” herein can be used with respect to the base matching between the sense strand and the antisense strand of a dsRNA, or between two oligonucleotides or polynucleotides, such as the antisense strand of a RNAi agent and a target sequence, as will be understood from the context of their use.

[0222] As used herein, a polynucleotide that is “substantially complementary to at least part of” a messenger RNA (mRNA) or target sequence refers to a polynucleotide that is substantially complementary to a contiguous portion of the mRNA of interest or target sequence (e.g., an mRNA encoding a target gene). For example, a polynucleotide is complementary to at least a part of a target RNA if the sequence is substantially complementary to a non-interrupted portion of an mRNA encoding a target gene.

[0223] Accordingly, in some embodiments, the antisense strand polynucleotides disclosed herein are fully complementary to the target gene sequence.

[0224] Exemplary target genes include, for example, adrenoceptor beta 1 (ADRB1); calcium voltage-gated channel subunit alpha1 C (CACNA1C); calcium voltage-gated channel subunit alpha1 G (CACNA1G) (T type calcium channel); angiotensin II receptor type 1(AGTR1); Sodium Voltage-Gated Channel Alpha Subunit 2 (SCN2A); Hyperpolarization Activated Cyclic Nucleotide Gated Potassium Channel 1 (HCN1); Hyperpolarization Activated Cyclic Nucleotide Gated Potassium Channel 4 (HCN4); Hyperpolarization Activated Cyclic Nucleotide Gated Potassium Channel 3 (HCN3); Potassium Voltage-Gated Channel Subfamily A Member 5 (KCNA5); Potassium Inwardly Rectifying Channel Subfamily J Member 3 (KCNJ3); Potassium Inwardly Rectifying Channel Subfamily J Member 4 (KCNJ4); phospholamban (PLN); calcium/calmodulin dependent protein kinase II delta (CAMK2D); Phosphodiesterase 1 (PDE1); myostatin (MSTN); Cholinergic Receptor Nicotinic Alpha 1 Subunit (CHRNA1); Cholinergic Receptor Nicotinic Beta 1 Subunit (CHRNB1); Cholinergic Receptor Nicotinic Delta Subunit (CHRND); Cholinergic Receptor Nicotinic Epsilon Subunit (CHRNE); Cholinergic Receptor Nicotinic Gamma Subunit (CHRNG); Collagen Type XIII Alpha 1 Chain (COL13A1); Docking Protein 7 (DOK7); LDL Receptor Related Protein 4 (LRP4); Muscle Associated Receptor Tyrosine Kinase (MUSK); Receptor Associated Protein Of The Synapse (RAPSN); Sodium Voltage-Gated Channel Alpha Subunit 4 (SCN4A); Double Homeobox 4 (DUX4); Delta 4-Desaturase, Sphingolipid 1 (DEGS1); leptin; folliculin (FLCN); Zinc Finger Protein 423 (ZFP423); Cyclin Dependent Kinase 6 (CDK6); Regulatory Associated Protein Of MTOR Complex 1 (RPTOR); Mechanistic Target Of Rapamycin Kinase, (mTOR); Forkhead Box P1 (FOXP1); Phosphodiesterase 3B (PDE3B); and Activin A Receptor Type 1C (ACVR1C).

[0225] As used herein, “adrenoceptor beta 1,” used interchangeably with the term “ADRB1,” refers to a member of the adrenergic receptor family. The adrenergic receptors are a prototypic family of guanine nucleotide binding regulatory protein-coupled receptors that mediate the physiological effects of the hormone epinephrine and the neurotransmitter norepinephrine. Beta-1 adrenoceptors are predominately located in the heart. Specific polymorphisms in this gene have been shown to affect the resting heart rate and can be involved in heart failure. ADRB1 is also known as ADRB1R, beta-1 adrenergic receptor, B1AR, BETA1AR, FNSS2, or RHR

[0226] An exemplary sequence of a human ADRB1 mRNA transcript can be found at, for example, GenBank Accession No. GI: 1653960731 (NM_000684.3; SEQ ID NO:1; reverse complement, SEQ ID NO: 5). The sequence of mouse ADRB1 mRNA can be found at, for example, GenBank Accession No. GI: 1693744501 (NM_007419.3; SEQ ID NO:2; reverse complement, SEQ ID NO: 6). The sequence of rat ADRB1 mRNA can be found at, for example, GenBank Accession No. GI: 6978458 (NM_012701.1; SEQ ID NO:3; reverse complement, SEQ ID NO: 7). The sequence of Macaca mulatta ADRB1 mRNA can be found at, for example, GenBank Accession No. GI: 577861029 (NM_001289866.1; SEQ ID NO: 4; reverse complement, SEQ ID NO: 8). The sequence of Macaca fascicularis ADRB1 mRNA can be found at, for example, GenBank Accession No. GI: 985482105 (NM_001319353.1; SEQ ID NO: 9; reverse complement, SEQ ID NO: 10).

[0227] Additional examples of ADRB1 mRNA sequences are readily available through publicly available databases, e.g., GenBank, UniProt, OMIM, UCSC Genome Browser, and the Macaca genome project web site.

[0228] Further information on ADRB1 can be found, for example, at www.ncbi.nlm.nih.gov/gene/!term=ADRB1.

[0229] The entire contents of each of the foregoing GenBank Accession numbers and the Gene database numbers are incorporated herein by reference as of the date of filing this application.

[0230] The term ADRB1, as used herein, also refers to variations of the ADRB1 gene including variants provided in the SNP database. Numerous sequence variations within the ADRB1 gene have been identified and may be found at, for example, NCBI dbSNP and UniProt (see, e.g., www.ncbi.nlm.nih.gov/snp/!term=ADRB1, the entire contents of which is incorporated herein by reference as of the date of filing this application.

[0231] In one embodiment, the target gene is calcium voltage-gated channel subunit alpha1 C (CACNA1C).

[0232] As used herein, “calcium voltage-gated channel subunit alpha1 C,” used interchangeably with the term “CACNA1C,” refers to an alpha-1 subunit of a voltage-dependent calcium channel. Calcium channels mediate the influx of calcium ions into the cell upon membrane polarization. The alpha-1 subunit consists of 24 transmembrane segments and forms the pore through which ions pass into the cell. The calcium channel consists of a complex of alpha-1, alpha-2/delta, beta, and gamma subunits in a 1:1:1:1 ratio. There are multiple isoforms of each of these proteins, either encoded by different genes or the result of alternative splicing of transcripts. The protein encoded by this gene binds to and is inhibited by dihydropyridine. CACNA1C is also known as calcium channel, voltage-dependent, L type, alpha 1C subunit; voltage-dependent L-type calcium channel subunit alpha-1C; voltage-gated L-type calcium channel Cav1.2 alpha 1 subunit, splice variant 10; calcium channel, L type, alpha-1 polypeptide, isoform 1, cardiac muscle; calcium channel, cardic dihydropyridine-sensitive, alpha-1 subunit; voltage-dependent L-type Ca2+ channel alpha 1 subunit; voltage-gated calcium channel subunit alpha CaV1.2; DHPR, alpha-1 subunit; CACH2, CACN2, CACNL1A1, CCHL1A1, CaV1.2, LQT8, TS, or TS. LQT8

[0233] An exemplary sequence of a human CACNA1C mRNA transcript can be found at, for example, GenBank Accession No. GI: 1890333913 (NM_199460.4; SEQ ID NO: 11; reverse complement, SEQ ID NO: 12). The sequence of mouse CACNA1C mRNA can be found at, for example, GenBank Accession No. GI: 594140631 (NM_009781.4; SEQ ID NO: 13; reverse complement, SEQ ID NO: 14). The sequence of rat CACNA1C mRNA can be found at, for example, GenBank Accession No. GI: 158186632 (NM_012517.2; SEQ ID NO:15; reverse complement, SEQ ID NO: 16). The sequence of Macaca mulatta CACNA1C mRNA can be found at, for example, GenBank Accession No. GI: 1622843324 (XM_028829106.1; SEQ ID NO: 17; reverse complement, SEQ ID NO: 18).

[0234] Additional examples of CACNA1C mRNA sequences are readily available through publicly available databases, e.g., GenBank, UniProt, OMIM, UCSC Genome Browser, and the Macaca genome project web site.

[0235] Further information on CACNA1C can be found, for example, at www.ncbi.nlm.nih.gov/gene/!term=CACNA1C.

[0236] The entire contents of each of the foregoing GenBank Accession numbers and the Gene database numbers are incorporated herein by reference as of the date of filing this application.

[0237] The term CACNA1C, as used herein, also refers to variations of the CACNA1C gene including variants provided in the SNP database. Numerous sequence variations within the CACNA1C gene have been identified and may be found at, for example, NCBI dbSNP and UniProt (see, e.g., www.ncbi.nlm.nih.gov/gene/!term=CACNA1C, the entire contents of which is incorporated herein by reference as of the date of filing this application.

[0238] As used herein, “calcium voltage-gated channel subunit alpha1 G,” used interchangeably with the term “CACNA1G,” refers to a T-type, low-voltage activated calcium channel. Voltage-sensitive calcium channels mediate the entry of calcium ions into excitable cells, and are also involved in a variety of calcium-dependent processes, including muscle contraction, hormone or neurotransmitter release, gene expression, cell motility, cell division, and cell death. The T-type channels generate currents that are both transient, owing to fast inactivation, and tiny, owing to small conductance. T-type channels are thought to be involved in pacemaker activity, low-threshold calcium spikes, neuronal oscillations and resonance, and rebound burst firing. CACNA1G is also known as calcium channel, voltage-dependent, T type, alpha 1G subunit; voltage-dependent T-type calcium channel subunit alpha-1G; voltage-gated calcium channel subunit alpha Cav3.1; NBR13; Cav3.1c; Ca(V)T.1; KIAA1123; SCA42ND; or SCA42.

[0239] An exemplary sequence of a human CACNA1G mRNA transcript can be found at, for example, GenBank Accession No. GI: 1519244109 (NM_018896.5; SEQ ID NO: 21; reverse complement, SEQ ID NO: 22). The sequence of mouse CACNA1G mRNA can be found at, for example, GenBank Accession No. GI: 295444826 (NM_009783.3; SEQ ID NO: 23; reverse complement, SEQ ID NO: 24). The sequence of rat CACNA1G mRNA can be found at, for example, GenBank Accession No. GI: 1995160279 (NM_001308302.2; SEQ ID NO: 25; reverse complement, SEQ ID NO: 26). The sequence of Macaca mulatta CACNA1G mRNA can be found at, for example, GenBank Accession No. GI: 1622879013 (XM_015119270.2; SEQ ID NO: 27; reverse complement, SEQ ID NO: 28). The sequence of Macaca fascicularis CACNA1G mRNA can be found at, for example, GenBank Accession No. GI: 982305044 (XM_005583707.2; SEQ ID NO: 29; reverse complement, SEQ ID NO: 30).

[0240] Additional exemplary examples of CACNA1G mRNA sequences are readily available through publicly available databases, e.g., GenBank, UniProt, OMIM, UCSC Genome Browser, and the Macaca genome project web site.

[0241] Further information on CACNA1G can be found, for example, at www.ncbi.nlm.nih.gov/gene/!term=CACNA1G.

[0242] The entire contents of each of the foregoing GenBank Accession numbers and the Gene database numbers are incorporated herein by reference as of the date of filing this application.

[0243] The term CACNA1G, as used herein, also refers to variations of the CACNA1G gene including variants provided in the SNP database. Numerous sequence variations within the CACNA1G gene have been identified and may be found at, for example, NCBI dbSNP and UniProt (see, e.g., www.ncbi.nlm.nih.gov/gene/!term=CACNA1G, the entire contents of which is incorporated herein by reference as of the date of filing this application.

[0244] As used herein, “angiotensin II receptor type 1,” used interchangeably with the term “AGTR1,” refers to a receptor for the vasoconstricting peptide angiotensin II. Angiotensin II is a potent vasopressor hormone and a primary regulator of aldosterone secretion. AGTR1 is activated by angiotensin II. The activated receptor in turn couples to G protein and, thus, activates phospholipase C and increases the cytosolic Ca2+ concentrations, which in turn triggers cellular responses such as stimulation of protein kinase C. AGTR1 plays an integral role in blood pressure control, and is implicated in the pathogenesis of hypertension. AGTR1 is also known as angiotensin receptor 1B, AT1, AT2R1, AGTR1A, AT2R1B, AGTR1B, HAT1R, AG2S, AT1B, AT2R1A, AT1AR, AT1BR, or AT1R.

[0245] An exemplary sequence of a human AGTR1 mRNA transcript can be found at, for example, GenBank Accession No. GI: 1820101583 (NM_000685.5; SEQ ID NO: 31; reverse complement, SEQ ID NO: 32). The sequence of mouse AGTR1 mRNA can be found at, for example, GenBank Accession No. GI: 158937294 (NM_177322.3; SEQ ID NO: 33; reverse complement, SEQ ID NO: 34). The sequence of rat AGTR1 mRNA can be found at, for example, GenBank Accession No. GI: 140969764 (NM_030985.4; SEQ ID NO: 35; reverse complement, SEQ ID NO: 36). The sequence of Macaca mulatta AGTR1 mRNA can be found at, for example, GenBank Accession No. GI: 1622904093 (XM_028843763.1; SEQ ID NO: 37; reverse complement, SEQ ID NO: 38). The sequence of Macaca fascicularis AGTR1 mRNA can be found at, for example, GenBank Accession No. GI: 544411901 (XM_005546040.1; SEQ ID NO: 39; reverse complement, SEQ ID NO: 40).

[0246] Additional examples of AGTR1 mRNA sequences are readily available through publicly available databases, e.g., GenBank, UniProt, OMIM, UCSC Genome Browser, and the Macaca genome project web site.

[0247] Further information on AGTR1 can be found, for example, at www.ncbi.nlm.nih.gov/gene/!term=AGTR1.

[0248] The entire contents of each of the foregoing GenBank Accession numbers and the Gene database numbers are incorporated herein by reference as of the date of filing this application.

[0249] The term AGTR1, as used herein, also refers to variations of the AGTR1 gene including variants provided in the SNP database. Numerous sequence variations within the AGTR1 gene have been identified and may be found at, for example, NCBI dbSNP and UniProt (see, e.g., www.ncbi.nlm.nih.gov/gene/!term=AGTR1, the entire contents of which is incorporated herein by reference as of the date of filing this application.

[0250] As used herein, “Sodium Voltage-Gated Channel Alpha Subunit 2,” used interchangeably with the term “SCN2A,” refers to a member of the voltage-gated sodium channel family. Voltage-gated sodium channels are transmembrane glycoprotein complexes composed of a large alpha subunit with four repeat domains, each of which is composed of six membrane-spanning segments, and one or more regulatory beta subunits. Voltage-gated sodium channels function in the generation and propagation of action potentials in neurons and muscle. Specifically, SCN2A permits the sodium influx from the extracellular space into the cytosol after depolarization of the nerve membrane. Allelic variants of SCN2A are associated with seizure disorders and autism spectrum disorders. SCN2A is also known as Nav1.2, HBSCII, SCN2A1, SCN2A2, HBSCI, EIEE11, BFIC3, BFIS3, BFNIS, DEE11, EA9, or HBA.

[0251] An exemplary sequence of a human SCN2A mRNA transcript can be found at, for example, GenBank Accession No. GI: 1697699196 (NM_021007.3; SEQ ID NO: 41; reverse complement, SEQ ID NO: 42). The sequence of mouse SCN2A mRNA can be found at, for example, GenBank Accession No. GI: 1114439824 (NM_001099298.3; SEQ ID NO: 43; reverse complement, SEQ ID NO: 44). The sequence of rat SCN2A mRNA can be found at, for example, GenBank Accession No. GI: 1937915892 (NM 012647.2; SEQ ID NO: 45; reverse complement, SEQ ID NO: 46). The sequence of Macaca mulatta SCN2A mRNA can be found at, for example, GenBank Accession No. GI: 1622850108 (XM_001100368.4; SEQ ID NO: 47; reverse complement, SEQ ID NO: 48). The sequence of Macaca fascicularis SCN2A mRNA can be found at, for example, GenBank Accession No. GI: 544475515 (XM_005573351.1; SEQ ID NO: 49; reverse complement, SEQ ID NO: 50).

[0252] Additional examples of SCN2A mRNA sequences are readily available through publicly available databases, e.g., GenBank, UniProt, OMIM, UCSC Genome Browser, and the Macaca genome project web site.

[0253] Further information on SCN2A can be found, for example, at www.ncbi.nlm.nih.gov/gene/?term=SCN2A.

[0254] The entire contents of each of the foregoing GenBank Accession numbers and the Gene database numbers are incorporated herein by reference as of the date of filing this application.

[0255] The term SCN2A, as used herein, also refers to variations of the SCN2A gene including variants provided in the SNP database. Numerous sequence variations within the SCN2A gene have been identified and may be found at, for example, NCBI dbSNP and UniProt (see, e.g., www.ncbi.nlm.nih.gov/gene/?term=SCN2A, the entire contents of which is incorporated herein by reference as of the date of filing this application.

[0256] As used herein, “Hyperpolarization Activated Cyclic Nucleotide Gated Potassium Channel 1,” used interchangeably with the term “HCN1,” refers to a member of the hyperpolarization-activated cyclic nucleotide-gated (HCN) channel family. These channels are primarily expressed in the heart and in the central and peripheral nervous systems. HCN channels mediate rhythmic electrical activity of cardiac pacemaker cells, and in neurons play important roles in setting resting membrane potentials, dendritic integration, neuronal pacemaking, and establishing action potential threshold. The HCN1 protein can homodimerize or heterodimerize with other pore-forming subunits to form a potassium channel. HCN1 is also known as potassium channel 1, BCNG-1, HAC-2, BCNG1, Potassium/Sodium Hyperpolarization-Activated Cyclic Nucleotide-Gated Channel 1; Brain Cyclic Nucleotide-Gated Channel 1; Hyperpolarization Activated Cyclic Nucleotide-Gated Potassium Channel 1; GEFSP10, EIEE24, or DEE24.

[0257] An exemplary sequence of a human HCN1 mRNA transcript can be found at, for example, GenBank Accession No. GI: 1519313076 (NM_021072.4; SEQ ID NO: 51; reverse complement, SEQ ID NO: 52). The sequence of mouse HCN1 mRNA can be found at, for example, GenBank Accession No. GI: 283837798 (NM_010408.3; SEQ ID NO: 53; reverse complement, SEQ ID NO: 54). The sequence of rat HCN1 mRNA can be found at, for example, GenBank Accession No. GI: 2000186052 (NM_053375.2; SEQ ID NO: 55; reverse complement, SEQ ID NO: 56). The sequence of Macaca mulatta HCN1 mRNA can be found at, for example, GenBank Accession No. GI: 1622944535 (XM_015140004.2; SEQ ID NO: 57; reverse complement, SEQ ID NO: 58). The sequence of Macaca fascicularis HCN1 mRNA can be found at, for example, GenBank Accession No. GI: 982252681 (XM_005556858.2; SEQ ID NO: 59; reverse complement, SEQ ID NO: 60).

[0258] Additional examples of HCN1 mRNA sequences are readily available through publicly available databases, e.g., GenBank, UniProt, OMIM, UCSC Genome Browser, and the Macaca genome project web site.

[0259] Further information on HCN1 can be found, for example, at www.ncbi.nlm.nih.gov/gene/?term=HCN1.

[0260] The entire contents of each of the foregoing GenBank Accession numbers and the Gene database numbers are incorporated herein by reference as of the date of filing this application.

[0261] The term HCN1, as used herein, also refers to variations of the HCN1 gene including variants provided in the SNP database. Numerous sequence variations within the HCN1 gene have been identified and may be found at, for example, NCBI dbSNP and UniProt (see, e.g., www.ncbi.nlm.nih.gov/gene/?term=HCN1, the entire contents of which is incorporated herein by reference as of the date of filing this application.

[0262] As used herein, “Hyperpolarization Activated Cyclic Nucleotide Gated Potassium Channel 4,” used interchangeably with the term “HCN4,” refers to a member of the hyperpolarization-activated cyclic nucleotide-gated (HCN) channel family. The HCN4 channel transports positively charged ions into heart muscle cells. This channel is located primarily in the sino-atrial (SA) node, which is an area of specialized cells in the heart that functions as a natural pacemaker. The HCN4 channel allows potassium and sodium ions to flow into cells of the SA node. This ion flow is often called the “pacemaker current” because it generates electrical impulses that start each heartbeat and is involved in maintaining a regular heart rhythm. HCN4 is also known as Potassium/Sodium Hyperpolarization-Activated Cyclic Nucleotide-Gated Channel 4, Hyperpolarization Activated Cyclic Nucleotide-Gated Potassium Channel 4, Hyperpolarization Activated Cyclic Nucleotide-Gated Cation Channel 4 or SSS2.

[0263] An exemplary sequence of a human HCN4 mRNA transcript can be found at, for example, GenBank Accession No. GI: 1519312820 (NM_005477.3; SEQ ID NO: 61; reverse complement, SEQ ID NO: 62). The sequence of mouse HCN4 mRNA can be found at, for example, GenBank Accession No. GI: 1686254400 (NM_001081192.3; SEQ ID NO: 63; reverse complement, SEQ ID NO: 64). The sequence of rat HCN4 mRNA can be found at, for example, GenBank Accession No. GI: 1937893976 (NM 021658.2; SEQ ID NO: 65; reverse complement, SEQ ID NO: 66). The sequence of Macaca mulatta HCN4 mRNA can be found at, for example, GenBank Accession No. GI: 1622953870 (XM_002804859.3; SEQ ID NO: 67; reverse complement, SEQ ID NO: 68). The sequence of Macaca fascicularis HCN4 mRNA can be found at, for example, GenBank Accession No. GI: 982258526 (XM_005559993.2; SEQ ID NO: 69; reverse complement, SEQ ID NO: 70).

[0264] Additional examples of HCN4 mRNA sequences are readily available through publicly available databases, e.g., GenBank, UniProt, OMIM, UCSC Genome Browser, and the Macaca genome project web site.

[0265] Further information on HCN4 can be found, for example, at www.ncbi.nlm.nih.gov/gene/?term=HCN4.

[0266] The entire contents of each of the foregoing GenBank Accession numbers and the Gene database numbers are incorporated herein by reference as of the date of filing this application.

[0267] The term HCN4, as used herein, also refers to variations of the HCN4 gene including variants provided in the SNP database. Numerous sequence variations within the HCN4 gene have been identified and may be found at, for example, NCBI dbSNP and UniProt (see, e.g., www.ncbi.nlm.nih.gov/gene/?term=HCN4, the entire contents of which is incorporated herein by reference as of the date of filing this application.

[0268] As used herein, “Hyperpolarization Activated Cyclic Nucleotide Gated Potassium Channel 3,” used interchangeably with the term “HCN3,” refers to a member of the hyperpolarization-activated cyclic nucleotide-gated (HCN) channel family. A study conducted in the mouse suggested that HCN3 channels might be involved in the regulation of the circadian system. HCN3 channels have also been reported to be present in the intergeniculate leaflet of the hypothalamus. HCN3 is also known as Potassium/Sodium Hyperpolarization-Activated Cyclic Nucleotide-Gated Channel 3, Hyperpolarization Activated Cyclic Nucleotide-Gated Potassium Channel 3, or KIAA1535.

[0269] An exemplary sequence of a human HCN3 mRNA transcript can be found at, for example, GenBank Accession No. GI: 1519312303 (NM_020897.3; SEQ ID NO: 71; reverse complement, SEQ ID NO: 72). The sequence of mouse HCN3 mRNA can be found at, for example, GenBank Accession No. GI: 6680190 (NM_008227.1; SEQ ID NO: 73; reverse complement, SEQ ID NO: 74). The sequence of rat HCN3 mRNA can be found at, for example, GenBank Accession No. GI: 16758501 (NM_053685.1; SEQ ID NO: 75; reverse complement, SEQ ID NO: 76). The sequence of Macaca mulatta HCN3 mRNA can be found at, for example, GenBank Accession No. GI: 1622829938 (XM_001115891.4; SEQ ID NO: 77; reverse complement, SEQ ID NO: 78). The sequence of Macaca fascicularis HCN3 mRNA can be found at, for example, GenBank Accession No. GI: 982225310 (XM_005541549.2; SEQ ID NO: 79; reverse complement, SEQ ID NO: 80).

[0270] Additional examples of HCN3 mRNA sequences are readily available through publicly available databases, e.g., GenBank, UniProt, OMIM, UCSC Genome Browser, and the Macaca genome project web site.

[0271] Further information on HCN3 can be found, for example, at www.ncbi.nlm.nih.gov/gene/?term=HCN3.

[0272] The entire contents of each of the foregoing GenBank Accession numbers and the Gene database numbers are incorporated herein by reference as of the date of filing this application.

[0273] The term HCN3, as used herein, also refers to variations of the HCN3 gene including variants provided in the SNP database. Numerous sequence variations within the HCN3 gene have been identified and may be found at, for example, NCBI dbSNP and UniProt (see, e.g., www.ncbi.nlm.nih.gov/gene/?term=HCN3, the entire contents of which is incorporated herein by reference as of the date of filing this application.

[0274] As used herein, “Potassium Voltage-Gated Channel Subfamily A Member 5,” used interchangeably with the term “KCNA5,” refers to a member of the voltage-gated potassium channel family. The Voltage-gated potassium channels mediate transmembrane potassium transport in excitable membranes. These channels form tetrameric potassium-selective channels through which potassium ions pass in accordance with their electrochemical gradient, and alternate between opened and closed conformations in response to the voltage difference across the membrane. KCNA5 contains six membrane-spanning domains with a shaker-type repeat in the fourth segment. It belongs to the delayed rectifier class, the function of which could restore the resting membrane potential of beta cells after depolarization and thereby contribute to the regulation of insulin secretion. KCNA5 is also known as HPCN1, HK2, Potassium Voltage-Gated Channel, Shaker-Related Subfamily, Member 5; Voltage-Gated Potassium Channel Subunit Kv1.5; Voltage-Gated Potassium Channel HK2; Kv1.5; Insulinoma And Islet Potassium Channel; Cardiac Potassium Channel; Potassium Channel 1; ATFB7, HCK1 or PCN1.

[0275] An exemplary sequence of a human KCNA5 mRNA transcript can be found at, for example, GenBank Accession No. GI: 1653961222 (NM_002234.4; SEQ ID NO: 81; reverse complement, SEQ ID NO: 82). The sequence of mouse KCNA5 mRNA can be found at, for example, GenBank Accession No. GI: 158937280 (NM_145983.2; SEQ ID NO: 83; reverse complement, SEQ ID NO: 84). The sequence of rat KCNA5 mRNA can be found at, for example, GenBank Accession No. GI: 6981117 (NM_012972.1; SEQ ID NO: 85; reverse complement, SEQ ID NO: 86). The sequence of Macaca mulatta KCNA5 mRNA can be found at, for example, GenBank Accession No. GI: 1622843572 (XM_001102294.4; SEQ ID NO: 87; reverse complement, SEQ ID NO: 88). The sequence of Macaca fascicularis KCNA5 mRNA can be found at, for example, GenBank Accession No. GI: 982279162 (XM_005569870.2; SEQ ID NO: 89; reverse complement, SEQ ID NO: 90).

[0276] Additional examples of KCNA5 mRNA sequences are readily available through publicly available databases, e.g., GenBank, UniProt, OMIM, UCSC Genome Browser, and the Macaca genome project web site.

[0277] Further information on KCNA5 can be found, for example, at www.ncbi.nlm.nih.gov/gene/?term=KCNA5.

[0278] The entire contents of each of the foregoing GenBank Accession numbers and the Gene database numbers are incorporated herein by reference as of the date of filing this application.

[0279] The term KCNA5, as used herein, also refers to variations of the KCNA5 gene including variants provided in the SNP database. Numerous sequence variations within the KCNA5 gene have been identified and may be found at, for example, NCBI dbSNP and UniProt (see, e.g., www.ncbi.nlm.nih.gov/gene/?term=KCNA5, the entire contents of which is incorporated herein by reference as of the date of filing this application.

[0280] As used herein, “Potassium Inwardly Rectifying Channel Subfamily J Member 3,” used interchangeably with the term “KCNJ3,” refers to an integral membrane protein and an inward-rectifier type potassium channel. The inward-rectifier type potassium channels have a greater tendency to allow potassium to flow into a cell rather than out of a cell. This asymmetry in potassium ion conductance plays a key role in the excitability of muscle cells and neurons. KCNJ3 is controlled by G-proteins and plays an important role in regulating heartbeat. It associates with three other G-protein-activated potassium channels to form a heteromultimeric pore-forming complex, which also couples to neurotransmitter receptors in the brain. These multimeric G-protein-gated inwardly-rectifying potassium (GIRK) channels have a wide range of physiological roles, including the regulation of heartbeat, reward mechanisms, learning and memory functions, blood platelet aggregation, insulin secretion, and lipid metabolism. KCNJ3 is also known as GIRK1, G Protein-Activated Inward Rectifier Potassium Channel 1, KGA; Potassium Channel, Inwardly Rectifying Subfamily J Member 3; Inward Rectifier K(+) Channel Kir3.1; or Potassium Inwardly-Rectifying Channel Subfamily J Member 3 Splice Variant 1e.

[0281] An exemplary sequence of a human KCNJ3 mRNA transcript can be found at, for example, GenBank Accession No. GI: 1519246021 (NM_002239.4; SEQ ID NO: 91; reverse complement, SEQ ID NO: 92). The sequence of mouse KCNJ3 mRNA can be found at, for example, GenBank Accession No. GI: 756398330 (NM_008426.2; SEQ ID NO: 93; reverse complement, SEQ ID NO: 94). The sequence of rat KCNJ3 mRNA can be found at, for example, GenBank Accession No. GI: 148747456 (NM_031610.3; SEQ ID NO: 95; reverse complement, SEQ ID NO: 96). The sequence of Macaca mulatta KCNJ3 mRNA can be found at, for example, GenBank Accession No. GI: 387849010 (NM_001261696.1; SEQ ID NO: 97; reverse complement, SEQ ID NO: 98). The sequence of Macaca fascicularis KCNJ3 mRNA can be found at, for example, GenBank Accession No. GI: 982285759 (XM_005573205.2; SEQ ID NO: 99; reverse complement, SEQ ID NO: 100).

[0282] Additional examples of KCNJ3 mRNA sequences are readily available through publicly available databases, e.g., GenBank, UniProt, OMIM, UCSC Genome Browser, and the Macaca genome project web site.

[0283] Further information on KCNJ3 can be found, for example, at www.ncbi.nlm.nih.gov/gene/?term=KCNJ3.

[0284] The entire contents of each of the foregoing GenBank Accession numbers and the Gene database numbers are incorporated herein by reference as of the date of filing this application.

[0285] The term KCNJ3, as used herein, also refers to variations of the KCNJ3 gene including variants provided in the SNP database. Numerous sequence variations within the KCNJ3 gene have been identified and may be found at, for example, NCBI dbSNP and UniProt (see, e.g., www.ncbi.nlm.nih.gov/gene/?term=KCNJ3, the entire contents of which is incorporated herein by reference as of the date of filing this application.

[0286] As used herein, “Potassium Inwardly Rectifying Channel Subfamily J Member 4,” used interchangeably with the term “KCNJ4,” refers to an integral membrane protein and inward-rectifier type potassium channel. The inward-rectifier type potassium channels have a greater tendency to allow potassium to flow into a cell rather than out of a cell. This asymmetry in potassium ion conductance plays a key role in the excitability of muscle cells and neurons. KCNJ4 can tetramerize to form functional inwardly rectifying channels, in which each monomer contains two transmembrane helix domains, an ion-selective P-loop, and cytoplasmic N- and C-terminal domains. The distribution of KCNJ4 is predominantly focused in both heart and brain, especially in the cardiac myocytes and forebrain region. KCNJ4 may play important roles in the regulation of resting membrane potential, cellular excitability and potassium homeostasis in the nervous system and various peripheral tissues. KCNJ4 is also known as HIRK2, HRK1, IRK3, HIR, Kir2.3, inward rectifier potassium channel 4; Inward Rectifier K(+) Channel Kir2.3; Potassium Voltage-Gated Channel Subfamily J Member 4; Hippocampal Inward Rectifier Potassium Channel; or Hippocampal Inward Rectifier.

[0287] An exemplary sequence of a human KCNJ4 mRNA transcript can be found at, for example, GenBank Accession No. GI: 1732746379 (NM_152868.3; SEQ ID NO: 101; reverse complement, SEQ ID NO: 102). The sequence of mouse KCNJ4 mRNA can be found at, for example, GenBank Accession No. GI: 1720383422 (XM_006520486.4; SEQ ID NO: 103; reverse complement, SEQ ID NO: 104). The sequence of rat KCNJ4 mRNA can be found at, for example, GenBank Accession No. GI: 1937901561 (NM 053870.3; SEQ ID NO: 105; reverse complement, SEQ ID NO: 106). The sequence of Macaca mulatta KCNJ4 mRNA can be found at, for example, GenBank Accession No. GI: 1622838042 (XM_015150354.2; SEQ ID NO: 107; reverse complement, SEQ ID NO: 108). The sequence of Macaca fascicularis KCNJ4 mRNA can be found at, for example, GenBank Accession No. GI: 544461851 (XM_005567299.1; SEQ ID NO: 109; reverse complement, SEQ ID NO: 110).

[0288] Additional examples of KCNJ4 mRNA sequences are readily available through publicly available databases, e.g., GenBank, UniProt, OMIM, UCSC Genome Browser, and the Macaca genome project web site.

[0289] Further information on KCNJ4 can be found, for example, at www.ncbi.nlm.nih.gov/gene/?term=KCNJ4.

[0290] The entire contents of each of the foregoing GenBank Accession numbers and the Gene database numbers are incorporated herein by reference as of the date of filing this application.

[0291] The term KCNJ4, as used herein, also refers to variations of the KCNJ4 gene including variants provided in the SNP database. Numerous sequence variations within the KCNJ4 gene have been identified and may be found at, for example, NCBI dbSNP and UniProt (see, e.g., www.ncbi.nlm.nih.gov/gene/?term=KCNJ4, the entire contents of which is incorporated herein by reference as of the date of filing this application. As used herein, “Phosphodiesterase 1,” used interchangeably with the term “PDE1,” refers to a member of the cyclic nucleotide phosphodiesterases families. Cyclic nucleotide phosphodiesterases (PDEs) are superfamily of enzymes that regulate the spatial and temporal relationship of second messenger signaling in the cellular system. Among the 11 different families of PDEs, phosphodiesterase 1 (PDE1) sub-family of enzymes hydrolyze both 3′,5′-cyclic adenosine monophosphate (cAMP) and 3′,5′-cyclic guanosine monophosphate (cGMP) in a mutually competitive manner. The catalytic activity of PDE1 is stimulated by their binding to Ca2+/calmodulin (CaM), resulting in the integration of Ca2+ and cyclic nucleotide-mediated signaling in various diseases. The PDE1 family includes three subtypes, PDE1A, PDE1B and PDE1C, which differ for their relative affinities for cAMP and cGMP. These isoforms are differentially expressed throughout the body, including the cardiovascular, central nervous system and other organs. Thus, PDE1 enzymes play a critical role in the pathophysiology of diseases through the fundamental regulation of cAMP and cGMP signaling. PDE1 is also known as Calcium/Calmodulin-Dependent 3′,5′-Cyclic Nucleotide Phosphodiesterase 1; Calcium/Calmodulin-Stimulated Cyclic Nucleotide Phosphodiesterase; CAM-PDE 1, HSPDE1, HCAM1, or EC 3.1.4.

[0292] An exemplary sequence of a human PDE1 mRNA transcript can be found at, for example, GenBank Accession No. GI: 2062580163 (NM_005019.7; SEQ ID NO: 111; reverse complement, SEQ ID NO: 112). The sequence of mouse PDE1 mRNA can be found at, for example, GenBank Accession No. GI: 227330628 (NM_001159582.1; SEQ ID NO: 113; reverse complement, SEQ ID NO: 114). The sequence of rat PDE1 mRNA can be found at, for example, GenBank Accession No. GI: 13540702 (NM_030871.1; SEQ ID NO: 115; reverse complement, SEQ ID NO: 116). The sequence of Macaca mulatta PDE1 mRNA can be found at, for example, GenBank Accession No. GI: 383872283 (NM_001257584.1; SEQ ID NO: 117; reverse complement, SEQ ID NO: 118). The sequence of Macaca fascicularis PDE1 mRNA can be found at, for example, GenBank Accession No. GI: 982286500 (XR_001483985.1; SEQ ID NO: 119; reverse complement, SEQ ID NO: 120).

[0293] Additional examples of PDE1 mRNA sequences are readily available through publicly available databases, e.g., GenBank, UniProt, OMIM, UCSC Genome Browser, and the Macaca genome project web site.

[0294] Further information on PDE1 can be found, for example, at www.ncbi.nlm.nih.gov/gene/?term=PDE1.

[0295] The entire contents of each of the foregoing GenBank Accession numbers and the Gene database numbers are incorporated herein by reference as of the date of filing this application.

[0296] The term PDE1, as used herein, also refers to variations of the PDE1 gene including variants provided in the SNP database. Numerous sequence variations within the PDE1 gene have been identified and may be found at, for example, NCBI dbSNP and UniProt (see, e.g., www.ncbi.nlm.nih.gov/gene/?term=PDE1, the entire contents of which is incorporated herein by reference as of the date of filing this application.

[0297] As used herein, “Delta 4-Desaturase, Sphingolipid 1,” used interchangeably with the term “DEGS1,” refers to a member of the membrane fatty acid desaturase family which is responsible for inserting double bonds into specific positions in fatty acids. DEGS1 is an enzyme that catalyzes the final step in the ceramide biosynthesis pathway. Ceramides have emerged as important regulators of tissue metabolism that play essential roles in cardiometabolic disease. They are potent biomarkers of diabetes and heart disease and are now being measured clinically as predictors of major adverse cardiac events. Moreover, studies in rodents reveal that inhibitors of ceramide synthesis prevent or reverse the pathogenic features of type 2 diabetes, nonalcoholic fatty liver disease, atherosclerosis, and cardiomyopathy. Therefore, inhibition of DEGS1 is considered as a potential therapeutic approach to lower ceramides and combat cardiometabolic disease.

[0298] DEGS1 is also known as MLD, DES-1, FADS7, Cell Migration-Inducing Gene 15 Protein, Sphingolipid Delta(4)-Desaturase DES1, Dihydroceramide Desaturase 1, Membrane Lipid Desaturase, Degenerative Spermatocyte Homolog 1, Lipid Desaturase, Membrane Fatty Acid (Lipid) Desaturase, Migration-Inducing Gene 15 Protein, Sphingolipid Delta 4 Desaturase, EC 1.14.19.17, HLD18, MIG15 and DEGS.

[0299] An exemplary sequence of a human DEGS1 mRNA transcript can be found at, for example, GenBank Accession No. GI: 1519243257 (NM_003676.4; SEQ ID NO:121; reverse complement, SEQ ID NO: 122). The sequence of mouse DEGS1 mRNA can be found at, for example, GenBank Accession No. GI: 1343071492 (NM_007853.5; SEQ ID NO: 123; reverse complement, SEQ ID NO: 124). The sequence of rat DEGS1 mRNA can be found at, for example, GenBank Accession No. GI: 162287183 (NM_053323.2; SEQ ID NO: 125; reverse complement, SEQ ID NO: 126). The sequence of Macaca fascicularis DEGS1 mRNA can be found at, for example, GenBank Accession No. GI: 982223631 (XM_005540946.2; SEQ ID NO: 127; reverse complement, SEQ ID NO: 128). The sequence of Macaca mulatta DEGS1 mRNA can be found at, for example, GenBank Accession No. GI: 388452769 (NM_001266006.1; SEQ ID NO: 129; reverse complement, SEQ ID NO: 130).

[0300] Additional examples of DEGS1 mRNA sequences are readily available through publicly available databases, e.g., GenBank, UniProt, OMIM, UCSC Genome Browser, and the Macaca genome project web site. Further information on DEGS1 can be found, for example, at www.ncbi.nlm.nih.gov/gene/?term=DEGS1.

[0301] The entire contents of each of the foregoing GenBank Accession numbers and the Gene database numbers are incorporated herein by reference as of the date of filing this application.

[0302] The term DEGS1, as used herein, also refers to variations of the DEGS1 gene including variants provided in the SNP database. Numerous sequence variations within the DEGS1 gene have been identified and may be found at, for example, NCBI dbSNP and UniProt (see, e.g., www.ncbi.nlm.nih.gov/gene/?term=DEGS1, the entire contents of which is incorporated herein by reference as of the date of filing this application.

[0303] As used herein, “leptin,” used interchangeably with the term “LEP,” refers to a protein that is secreted by white adipocytes into the circulation and plays a major role in the regulation of energy homeostasis. Circulating leptin binds to the leptin receptor in the brain, which activates downstream signaling pathways that inhibit feeding and promote energy expenditure. This protein also has several endocrine functions, and is involved in the regulation of immune and inflammatory responses, hematopoiesis, angiogenesis, reproduction, bone formation and wound healing. Mutations in this gene and its regulatory regions cause severe obesity and morbid obesity with hypogonadism in human patients. A mutation in this gene has also been linked to type 2 diabetes mellitus development. Leptin is also known as OBS, OB, obese, obesity factor, or LEPD.

[0304] An exemplary sequence of a human leptin mRNA transcript can be found at, for example, GenBank Accession No. GI: 1519312816 (NM_000230.3; SEQ ID NO:131; reverse complement, SEQ ID NO: 132). The sequence of mouse leptin mRNA can be found at, for example, GenBank Accession No. GI: 34328437 (NM_008493.3; SEQ ID NO:133; reverse complement, SEQ ID NO: 134). The sequence of rat leptin mRNA can be found at, for example, GenBank Accession No. GI: 291463266 (NM_013076.3; SEQ ID NO: 135; reverse complement, SEQ ID NO: 136). The sequence of Macaca fascicularis leptin mRNA can be found at, for example, GenBank Accession No. GI: 982241369 (XM_005550685.2; SEQ ID NO: 137; reverse complement, SEQ ID NO: 138). The sequence of Macaca mulatta leptin mRNA can be found at, for example, GenBank Accession No. GI: 112363108 (NM_001042755.1; SEQ ID NO: 139; reverse complement, SEQ ID NO: 140).

[0305] Additional examples of leptin mRNA sequences are readily available through publicly available databases, e.g., GenBank, UniProt, OMIM, UCSC Genome Browser, and the Macaca genome project web site. Further information on leptin can be found, for example, at www.ncbi.nlm.nih.gov/gene/?term=leptin.

[0306] The entire contents of each of the foregoing GenBank Accession numbers and the Gene database numbers are incorporated herein by reference as of the date of filing this application.

[0307] The term leptin, as used herein, also refers to variations of the leptin gene including variants provided in the SNP database. Numerous sequence variations within the leptin gene have been identified and may be found at, for example, NCBI dbSNP and UniProt (see, e.g., www.ncbi.nlm.nih.gov/gene/?term=leptin, the entire contents of which is incorporated herein by reference as of the date of filing this application.

[0308] As used herein, “folliculin,” used interchangeably with the term “FLCN,” refers to a protein that is related to Birt-Hogg-Dubé syndrome, primary spontaneous pneumothorax and some types of nonhereditary (sporadic) tumors. The folliculin protein is present in many of the body's tissues, including the brain, heart, placenta, testis, skin, lung, and kidney. Folliculin may be important for cells' uptake of foreign particles (endocytosis or phagocytosis). The protein may also play a role in the structural framework that helps to define the shape, size, and movement of a cell (the cytoskeleton) and in interactions between cells. FLCN is also known as BHD, DENND8B, BHD Skin Lesion Fibrofolliculoma Protein, Birt-Hogg-Dube Syndrome Protein, MGC17998, MGC23445 or FLCL.

[0309] An exemplary sequence of a human FLCN mRNA transcript can be found at, for example, GenBank Accession No. GI: 1519312711 (NM_144997.7; SEQ ID NO:141; reverse complement, SEQ ID NO: 142). The sequence of mouse FLCN mRNA can be found at, for example, GenBank Accession No. GI: 405778334 (NM_001271356.1; SEQ ID NO: 143; reverse complement, SEQ ID NO: 144). The sequence of rat FLCN mRNA can be found at, for example, GenBank Accession No. GI: 55742811 (NM_199390.2; SEQ ID NO: 145; reverse complement, SEQ ID NO: 146). The sequence of Macaca fascicularis FLCN mRNA can be found at, for example, GenBank Accession No. GI: 982303338 (XM_005583008.2; SEQ ID NO: 147; reverse complement, SEQ ID NO: 148). The sequence of Macaca mulatta FLCN mRNA can be found at, for example, GenBank Accession No. GI: 388490399 (NM_001266691.1; SEQ ID NO: 149; reverse complement, SEQ ID NO: 150).

[0310] Additional examples of FLCN mRNA sequences are readily available through publicly available databases, e.g., GenBank, UniProt, OMIM, UCSC Genome Browser, and the Macaca genome project web site. Further information on FLCN can be found, for example, at www.ncbi.nlm.nih.gov/gene/?term=FLCN.

[0311] The entire contents of each of the foregoing GenBank Accession numbers and the Gene database numbers are incorporated herein by reference as of the date of filing this application.

[0312] The term FLCN, as used herein, also refers to variations of the FLCN gene including variants provided in the SNP database. Numerous sequence variations within the FLCN gene have been identified and may be found at, for example, NCBI dbSNP and UniProt (see, e.g., www.ncbi.nlm.nih.gov/snp/?term=FLCN, the entire contents of which is incorporated herein by reference as of the date of filing this application.

[0313] As used herein, “Zinc Finger Protein 423,” used interchangeably with the term “ZFP423,” refers to a nuclear protein that belongs to the family of Kruppel-like C2H2 zinc finger proteins. It functions as a DNA-binding transcription factor by using distinct zinc fingers in different signaling pathways. Thus, it is thought that this gene may have multiple roles in signal transduction during development. Mutations in this gene are associated with nephronophthisis-14 and Joubert syndrome-19.

[0314] ZFP423 is also known as NPHP14, HOAZ, OAZ, KIAA0760, Zfp104, JBTS19, Ebfaz, Early B-Cell Factor Associated Zinc Finger Protein, Smad- And Olf-Interacting Zinc Finger Protein, Olf1/EBF-Associated Zinc Finger Protein, or Roaz.

[0315] An exemplary sequence of a human ZFP423 mRNA transcript can be found at, for example, GenBank Accession No. GI: 1889411210 (NM_015069.5; SEQ ID NO:151; reverse complement, SEQ ID NO: 152). The sequence of mouse ZFP423 mRNA can be found at, for example, GenBank Accession No. GI: 46359076 (NM_033327.2; SEQ ID NO:153; reverse complement, SEQ ID NO: 154). The sequence of rat ZFP423 mRNA can be found at, for example, GenBank Accession No. GI: 1997589018 (NM_001393718.1; SEQ ID NO:155; reverse complement, SEQ ID NO: 156). The sequence of Macaca fascicularis ZFP423 mRNA can be found at, for example, XM_005591872.2; (SEQ ID NO: 157; reverse complement, SEQ ID NO: 158). The sequence of Macaca mulatta ZFP423 mRNA can be found at, for example, XM_015126090.2; SEQ ID NO: 159; reverse complement, SEQ ID NO: 160).

[0316] Additional examples of ZFP423 mRNA sequences are readily available through publicly available databases, e.g., GenBank, UniProt, OMIM, UCSC Genome Browser, and the Macaca genome project web site. Further information on ZFP423 can be found, for example, at www.ncbi.nlm.nih.gov/gene/?term=ZFP423.

[0317] The entire contents of each of the foregoing GenBank Accession numbers and the Gene database numbers are incorporated herein by reference as of the date of filing this application.

[0318] The term ZFP423, as used herein, also refers to variations of the ZFP423 gene including variants provided in the SNP database. Numerous sequence variations within the ZFP423 gene have been identified and may be found at, for example, NCBI dbSNP and UniProt (see, e.g., www.ncbi.nlm.nih.gov/snp/?term=ZFP423, the entire contents of which is incorporated herein by reference as of the date of filing this application.

[0319] As used herein, “Cyclin Dependent Kinase 6,” used interchangeably with the term “CDK6,” refers to a member of the CMGC family of serine/threonine protein kinases. This kinase is a catalytic subunit of the protein kinase complex that is important for cell cycle G1 phase progression and G1/S transition. The activity of this kinase first appears in mid-G1 phase, which is controlled by the regulatory subunits including D-type cyclins and members of INK4 family of CDK inhibitors. This kinase, as well as CDK4, has been shown to phosphorylate, and thus regulate the activity of, tumor suppressor protein Rb. Altered expression of this gene has been observed in multiple human cancers. A mutation in this gene resulting in reduced cell proliferation, and impaired cell motility and polarity, and has been identified in patients with primary microcephaly. CDK6 is also known as PLSTIRE, Serine/Threonine-Protein Kinase PLSTIRE, Cell Division Protein Kinase 6, EC 2.7.11.22, MCPH12 or CDKN6.

[0320] An exemplary sequence of a human CDK6 mRNA transcript can be found at, for example, GenBank Accession No. GI: 1677500223 (NM_001259.8; SEQ ID NO: 161; reverse complement, SEQ ID NO: 162). The sequence of mouse CDK6 mRNA can be found at, for example, GenBank Accession No. GI: 922304379 (NM_009873.3; SEQ ID NO: 163; reverse complement, SEQ ID NO: 164). The sequence of rat CDK6 mRNA can be found at, for example, GenBank Accession No. GI: 1982560006 (NM_001191861.2; SEQ ID NO:165; reverse complement, SEQ ID NO: 166). The sequence of Macaca fascicularis CDK6 mRNA can be found at, for example, GenBank Accession No. GI: 982240553 (XM_015447745.1; SEQ ID NO: 167; reverse complement, SEQ ID NO: 168). The sequence of Macaca mulatta CDK6 mRNA can be found at, for example, GenBank Accession No. GI: 386782158 (NM_001261307.1; SEQ ID NO: 169; reverse complement, SEQ ID NO: 170).

[0321] Additional examples of CDK6 mRNA sequences are readily available through publicly available databases, e.g., GenBank, UniProt, OMIM, UCSC Genome Browser, and the Macaca genome project web site. Further information on CDK6 can be found, for example, at www.ncbi.nlm.nih.gov/gene/?term=CDK6.

[0322] The entire contents of each of the foregoing GenBank Accession numbers and the Gene database numbers are incorporated herein by reference as of the date of filing this application.

[0323] The term CDK6, as used herein, also refers to variations of the CDK6 gene including variants provided in the SNP database. Numerous sequence variations within the CDK6 gene have been identified and may be found at, for example, NCBI dbSNP and UniProt (see, e.g., www.ncbi.nlm.nih.gov/gene/?term=CDK6, the entire contents of which is incorporated herein by reference as of the date of filing this application.

[0324] As used herein, “Regulatory Associated Protein Of MTOR Complex 1,” used interchangeably with the term “RPTOR,” refers to a component of a signaling pathway that regulates cell growth in response to nutrient and insulin levels. The encoded protein forms a stoichiometric complex with the mTOR kinase, and also associates with eukaryotic initiation factor 4E-binding protein-1 and ribosomal protein S6 kinase. The protein positively regulates the downstream effector ribosomal protein S6 kinase, and negatively regulates the mTOR kinase. Mutations of RPTOR have been observed in cancers such as intestinal cancer, skin cancer, and stomach cancer. RPTOR is also known as Raptor, KIAA1303, KOG1, Mip1, Regulatory-Associated Protein Of MTOR, or P150 Target Of Rapamycin (TOR)-Scaffold Protein Containing WD-Repeats.

[0325] An exemplary sequence of a human RPTOR mRNA transcript can be found at, for example, GenBank Accession No. GI: 1519244773 (NM_020761.3; SEQ ID NO:171; reverse complement, SEQ ID NO: 172). The sequence of mouse RPTOR mRNA can be found at, for example, GenBank Accession No. GI: 807045913 (NM_028898.3; SEQ ID NO: 173; reverse complement, SEQ ID NO: 174). The sequence of rat RPTOR mRNA can be found at, for example, GenBank Accession No. GI: 260166602 (NM_001134499.2; SEQ ID NO: 175; reverse complement, SEQ ID NO: 176). The sequence of Macaca fascicularis RPTOR mRNA can be found at, for example, GenBank Accession No. GI: 982307196 (XM_005585210.2; SEQ ID NO: 177; reverse complement, SEQ ID NO: 178). The sequence of Macaca mulatta RPTOR mRNA can be found at, for example, GenBank Accession No. GI: 1622881944 (XM_015120520.2; SEQ ID NO: 179; reverse complement, SEQ ID NO: 180).

[0326] Additional examples of RPTOR mRNA sequences are readily available through publicly available databases, e.g., GenBank, UniProt, OMIM, UCSC Genome Browser, and the Macaca genome project web site. Further information on RPTOR can be found, for example, at www.ncbi.nlm.nih.gov/gene/?term=RPTOR.

[0327] The entire contents of each of the foregoing GenBank Accession numbers and the Gene database numbers are incorporated herein by reference as of the date of filing this application.

[0328] The term RPTOR, as used herein, also refers to variations of the RPTOR gene including variants provided in the SNP database. Numerous sequence variations within the RPTOR gene have been identified and may be found at, for example, NCBI dbSNP and UniProt (see, e.g., www.ncbi.nlm.nih.gov/snp/?term=RPTOR, the entire contents of which is incorporated herein by reference as of the date of filing this application.

[0329] As used herein, “Mechanistic Target Of Rapamycin Kinase,” used interchangeably with the term “mTOR,” refers to an atypical serine/threonine kinase of 289 kDa that belongs to the family of the phosphoinositide 3-kinase related kinase. These kinases mediate cellular responses to stresses such as DNA damage and nutrient deprivation. Specifically, mTOR is the intracellular kinase linking nutrient availability with metabolic control, and its deregulation is a hallmark of diabetes and cancer. The mTOR kinase is encoded by a single gene in mammals, but it exerts its main cellular functions by forming mTORC1 and mTORC2 through assembly with specific adaptor proteins. mTORC1 controls protein synthesis, cell growth and proliferation, and mTORC2 is a regulator of the actin cytoskeleton, and promotes cell survival and cell cycle progression. mTOR is also known as RAFT1, Rapamycin And FKBP12 Target 1, Mammalian Target Of Rapamycin, FRAP1, FRAP2, FRAP, FK506-Binding Protein 12-Rapamycin Complex-Associated Protein 1, Serine/Threonine-Protein Kinase MTOR, Rapamycin Associated Protein FRAP2, FLJ44809, DJ576K7.1, FK506 Binding Protein 12-Rapamycin Associated Protein 1, FKBP12-Rapamycin Complex-Associated Protein, Rapamycin Target Protein, EC 2.7.11.1, or SKS.

[0330] An exemplary sequence of a human mTOR mRNA transcript can be found at, for example, GenBank Accession No. GI: 1653961062 (NM_004958.4; SEQ ID NO:181; reverse complement, SEQ ID NO: 182). The sequence of mouse mTOR mRNA can be found at, for example, GenBank Accession No. GI: 227330585 (NM_020009.2; SEQ ID NO: 183; reverse complement, SEQ ID NO: 184). The sequence of rat mTOR mRNA can be found at, for example, GenBank Accession No. GI: 1935257123 (NM_019906.2; SEQ ID NO:185; reverse complement, SEQ ID NO: 186). The sequence of Macaca fascicularis mTOR mRNA can be found at, for example, GenBank Accession No. GI: 982230273 (XM_005544805.2; SEQ ID NO: 187; reverse complement, SEQ ID NO: 188). The sequence of Macaca mulatta mTOR mRNA can be found at, for example, GenBank Accession No. GI: 1622834993 (XM_015111100.2; SEQ ID NO: 189; reverse complement, SEQ ID NO: 190).

[0331] Additional examples of mTOR mRNA sequences are readily available through publicly available databases, e.g., GenBank, UniProt, OMIM, UCSC Genome Browser, and the Macaca genome project web site. Further information on mTOR can be found, for example, at www.ncbi.nlm.nih.gov/gene/?term=mTOR.

[0332] The entire contents of each of the foregoing GenBank Accession numbers and the Gene database numbers are incorporated herein by reference as of the date of filing this application.

[0333] The term mTOR, as used herein, also refers to variations of the mTOR gene including variants provided in the SNP database. Numerous sequence variations within the mTOR gene have been identified and may be found at, for example, NCBI dbSNP and UniProt (see, e.g., www.ncbi.nlm.nih.gov/smp/?term=mTOR the entire contents of which is incorporated herein by reference as of the date of filing this application.

[0334] As used herein, “Forkhead Box P1,” used interchangeably with the term “FOXP1,” refers to a member of the subfamily P of the forkhead box (FOX) transcription factor family. Forkhead box transcription factors play important roles in the regulation of tissue- and cell type-specific gene transcription during both development and adulthood. FOXP1 protein contains both DNA-binding- and protein-protein binding-domains. Previous studies have investigated the biological roles of the transcription factor FOXP1 in brown/beige adipocyte differentiation and thermogenesis. Adipose-specific deletion of FOXP1 leads to an increase of brown adipose activity and browning program of white adipose tissues. The FOXP1-deficient mice show an augmented energy expenditure and are protected from diet-induced obesity and insulin resistance. Consistently, overexpression of FOXP1 in adipocytes impairs adaptive thermogenesis and promotes diet-induced obesity. Thus, FOXP1 provides an important clue for its targeting and treatment of obesity. FOXP1 is also known as HSPC215, HFKH1B, 12CC4, QRF1, Fork Head-Related Protein Like B, Mac-1-Regulated Forkhead, Glutamine-Rich Factor 1, MFH or PAX5/FOXP1 Fusion Protein.

[0335] An exemplary sequence of a human FOXP1 mRNA transcript can be found at, for example, GenBank Accession No. GI: 1777535708 (NM_032682.6; SEQ ID NO:191; reverse complement, SEQ ID NO: 192). The sequence of mouse FOXP1 mRNA can be found at, for example, GenBank Accession No. GI: 309319789 (NM_053202.2; SEQ ID NO: 193; reverse complement, SEQ ID NO: 194). The sequence of rat FOXP1 mRNA can be found at, for example, GenBank Accession No. GI: 1937889958 (NM_001034131.2 SEQ ID NO:195; reverse complement, SEQ ID NO: 196). The sequence of Macaca fascicularis FOXP1 mRNA can be found at, for example, GenBank Accession No. GI: 982232930 (XM_005547604.2; SEQ ID NO: 197; reverse complement, SEQ ID NO: 198). The sequence of Macaca mulatta FOXP1 mRNA can be found at, for example, GenBank Accession No. GI: 388453320 (NM_001266321.1; SEQ ID NO: 199; reverse complement, SEQ ID NO: 200).

[0336] Additional examples of FOXP1 mRNA sequences are readily available through publicly available databases, e.g., GenBank, UniProt, OMIM, UCSC Genome Browser, and the Macaca genome project web site. Further information on FOXP1 can be found, for example, at www.ncbi.nlm.nih.gov/gene/?term=FOXP1.

[0337] The entire contents of each of the foregoing GenBank Accession numbers and the Gene database numbers are incorporated herein by reference as of the date of filing this application.

[0338] The term FOXP1, as used herein, also refers to variations of the FOXP1gene including variants provided in the SNP database. Numerous sequence variations within the FOXP1 gene have been identified and may be found at, for example, NCBI dbSNP and UniProt (see, e.g., www.ncbi.nlm.nih.gov/gene/?term=FOXP1, the entire contents of which is incorporated herein by reference as of the date of filing this application.

[0339] As used herein, “Phosphodiesterase 3B,” used interchangeably with the term “PDE3B,” refers to an isoform of the PDE3 family of cyclic nucleotide phosphodiesterases. Cyclic nucleotide phosphodiesterases regulate intracellular signalling by hydrolysing cAMP and/or cGMP. Enzymes in the PDE3 family of phosphodiesterases are dual-specificity enzymes with high affinities for both cAMP and cGMP but much higher turnover rates for cAMP. PDE3B is relatively abundant in tissues that maintain energy homoeostasis. In adipocytes, PDE3B (phosphodiesterase 3B) is an important regulatory effector in signaling pathways controlled by insulin and cAMP-increasing hormones. Previous results from PDE3B-transgenic mice indicate that PDE3B, plays an important role in modulation of energy metabolism. PDE3B is also known as HcGIP1, CGMP-Inhibited 3′,5′-Cyclic Phosphodiesterase B, Cyclic GMP-Inhibited Phosphodiesterase B, EC 3.1.4.17, CGI-PDE B, CGIP1, or Cyclic Nucleotide Phosphodiesterase.

[0340] An exemplary sequence of a human PDE3B mRNA transcript can be found at, for example, GenBank Accession No. GI: 1889438535 (NM_001363570.2; SEQ ID NO:201; reverse complement, SEQ ID NO: 202). The sequence of mouse PDE3B mRNA can be found at, for example, GenBank Accession No. GI: 112983647 (NM_011055.2; SEQ ID NO:203; reverse complement, SEQ ID NO: 204). The sequence of rat PDE3B mRNA can be found at, for example, GenBank Accession No. GI: 1939401976 (NM_017229.2; SEQ ID NO:205; reverse complement, SEQ ID NO: 206). The sequence of Macaca fascicularis PDE3B mRNA can be found at, for example, GenBank Accession No. GI: 982294968 (XM_005578550.2; SEQ ID NO: 207; reverse complement, SEQ ID NO: 208). The sequence of Macaca mulatta PDE3B mRNA can be found at, for example, GenBank Accession No. GI: 1622864110 (XM_015114810.2; SEQ ID NO: 209; reverse complement, SEQ ID NO: 210).

[0341] Additional examples of PDE3B mRNA sequences are readily available through publicly available databases, e.g., GenBank, UniProt, OMIM, UCSC Genome Browser, and the Macaca genome project web site. Further information on PDE3B can be found, for example, at www.ncbi.nlm.nih.gov/gene/?term=PDE3B.

[0342] The entire contents of each of the foregoing GenBank Accession numbers and the Gene database numbers are incorporated herein by reference as of the date of filing this application.

[0343] The term PDE3B, as used herein, also refers to variations of the PDE3B gene including variants provided in the SNP database. Numerous sequence variations within the PDE3B gene have been identified and may be found at, for example, NCBI dbSNP and UniProt (see, e.g., www.ncbi.nlm.nih.gov/snp/?term=PDE3B, the entire contents of which is incorporated herein by reference as of the date of filing this application.

[0344] As used herein, “Activin A Receptor Type 1C,” used interchangeably with the term “ACVR1C,” refers to a type I receptor for the TGFB family that mediates the activities of a diverse group of signaling molecules, including activin B, growth and differentiation factor 3 (GDF-3) and Nodal. Upon ligand binding, type I receptors phosphorylate cytoplasmic SMAD transcription factors, which then translocate to the nucleus and interact directly with DNA or in complex with other transcription factors. In rodents as well as humans, ALK7 expression is enriched in tissues that are important for the regulation of energy homeostasis, including adipose tissue, pancreatic islets, endocrine gut cells and the arcuate nucleus of the hypothalamus. In white adipose tissue, studies have shown that ALK7 signaling facilitates fat accumulation under conditions of nutrient overload, by repressing the expression of adrenergic receptors, thereby reducing catecholamine sensitivity. Accordingly, mutant mice lacking ALK7 globally, or only in adipocytes, are resistant to diet-induced obesity. Recent studies have identified polymorphic variants in the human Acvr1c gene which affect body fat distribution and protect from type II diabetes, indicating that ALK7 has very similar functions in humans as in rodents. ACVR1C is also known as ALK7, ACVRLK7, Activin Receptor-Like Kinase 7, EC 2.7.11.30, ACTR-IC, Activin Receptor Type IC, or EC 2.7.11.

[0345] An exemplary sequence of a human ACVR1C mRNA transcript can be found at, for example, GenBank Accession No. GI: 1519315475 (NM_145259.3; SEQ ID NO:211; reverse complement, SEQ ID NO: 212). The sequence of mouse ACVR1C mRNA can be found at, for example, GenBank Accession No. GI: 161333830 (NM_001111030.1; SEQ ID NO:213; reverse complement, SEQ ID NO: 214). The sequence of rat ACVR1C mRNA can be found at, for example, GenBank Accession No. GI: 1937875934 (NM_139090.2; SEQ ID NO:215; reverse complement, SEQ ID NO: 216). The sequence of Macaca fascicularis ACVR1C mRNA can be found at, for example, GenBank Accession No. GI: 982285785 (XM_005573224.2; SEQ ID NO: 217; reverse complement, SEQ ID NO: 218). The sequence of Macaca mulatta ACVR1C mRNA can be found at, for example, GenBank Accession No. GI: 388454445 (NM_001266690.1; SEQ ID NO: 219; reverse complement, SEQ ID NO: 220).

[0346] Additional examples of ACVR1C mRNA sequences are readily available through publicly available databases, e.g., GenBank, UniProt, OMIM, UCSC Genome Browser, and the Macaca genome project web site. Further information on ACVR1C can be found, for example, at www.ncbi.nlm.nih.gov/gene/?term=ACVR1C.

[0347] The entire contents of each of the foregoing GenBank Accession numbers and the Gene database numbers are incorporated herein by reference as of the date of filing this application.

[0348] The term ACVR1C, as used herein, also refers to variations of the ACVR1C gene including variants provided in the SNP database. Numerous sequence variations within the ACVR1C gene have been identified and may be found at, for example, NCBI dbSNP and UniProt (see, e.g., www.ncbi.nlm.nih.gov/gene/?term=ACVR1C, the entire contents of which is incorporated herein by reference as of the date of filing this application.

[0349] Specific exemplary target genes that mediate a skeletal muscle disorder include, but are not limited to, myostatin (MSTN); Cholinergic Receptor Nicotinic Alpha 1 Subunit (CHRNA1); Cholinergic Receptor Nicotinic Beta 1 Subunit (CHRNB1); Cholinergic Receptor Nicotinic Delta Subunit (CHRND); Cholinergic Receptor Nicotinic Epsilon Subunit (CHRNE); Cholinergic Receptor Nicotinic Gamma Subunit (CHRNG); Collagen Type XIII Alpha 1 Chain (COL13A1); Docking Protein 7 (DOK7); LDL Receptor Related Protein 4 (LRP4); Muscle Associated Receptor Tyrosine Kinase (MUSK); Receptor Associated Protein Of The Synapse (RAPSN); Sodium Voltage-Gated Channel Alpha Subunit 4 (SCN4A); and Double Homeobox 4 (DUX4).

[0350] As used herein, “myostatin,” used interchangeably with the term “MSTN,” refers to a secreted ligand of the TGF-beta (transforming growth factor-beta) superfamily of proteins. Ligands of this family bind various TGF-beta receptors leading to recruitment and activation of SMAD family transcription factors that regulate gene expression. The encoded preproprotein is proteolytically processed to generate each subunit of the disulfide-linked homodimer. This protein negatively regulates skeletal muscle cell proliferation and differentiation. Mutations in this gene are associated with increased skeletal muscle mass in humans and other mammals. Myostatin is also known as GDF8, Growth/Differentiation Factor 8, or MSLHP.

[0351] An exemplary sequence of a human myostatin mRNA transcript can be found at, for example, GenBank Accession No. GI: 1653961810 (NM_005259.3; SEQ ID NO:221; reverse complement, SEQ ID NO: 222). The sequence of mouse myostatin mRNA can be found at, for example, GenBank Accession No. GI: 922959927 (NM_010834.3; SEQ ID NO:223; reverse complement, SEQ ID NO: 224). The sequence of rat myostatin mRNA can be found at, for example, GenBank Accession No. GI: 9506906 (NM_019151.1; SEQ ID NO:225; reverse complement, SEQ ID NO: 226). The sequence of Macaca fascicularis myostatin mRNA can be found at, for example, GenBank Accession No. NM_001287623.1; SEQ ID NO: 227; reverse complement, SEQ ID NO: 228. The sequence of Macaca mulatta myostatin mRNA can be found at, for example, GenBank Accession No. GI: 121583757 (NM_001080119.1; SEQ ID NO: 229; reverse complement, SEQ ID NO: 230).

[0352] Additional examples of myostatin mRNA sequences are readily available through publicly available databases, e.g., GenBank, UniProt, OMIM, UCSC Genome Browser, and the Macaca genome project web site. Further information on myostatin can be found, for example, at www.ncbi.nlm.nih.gov/gene/?term=myostatin.

[0353] The entire contents of each of the foregoing GenBank Accession numbers and the Gene database numbers are incorporated herein by reference as of the date of filing this application.

[0354] The term myostatin, as used herein, also refers to variations of the myostatin gene including variants provided in the SNP database. Numerous sequence variations within the myostatin gene have been identified and may be found at, for example, NCBI dbSNP and UniProt (see, e.g., www.ncbi.nlm.nih.gov/gene/?term=myostatin, the entire contents of which is incorporated herein by reference as of the date of filing this application.

[0355] As used herein, “Cholinergic Receptor Nicotinic Alpha 1 Subunit,” used interchangeably with the term “CHRNA1,” refers to an alpha subunit of the muscle acetylcholine receptor (AChR). The muscle acetylcholine receptor consists of 5 subunits of 4 different types: 2 alpha subunits and 1 each of the beta, gamma, and delta subunits. This protein plays a role in acetlycholine binding/channel gating. After binding acetylcholine, the AChR responds by an extensive change in conformation that affects all subunits and leads to opening of an ion-conducting channel across the plasma membrane. CHRNA1 is associated with diseases associated such as Myasthenic Syndrome. CHRNA1 is also known as Cholinergic Receptor, Nicotinic, Alpha Polypeptide 1; Acetylcholine Receptor, Nicotinic, Alpha 1 (Muscle); ACHRA; CHRNA; Muscle Nicotinic Acetylcholine Receptor; CMS1A, CMS1B, CMS2A, FCCMS, SCCMS, or ACHRD.

[0356] An exemplary sequence of a human CHRNA1 mRNA transcript can be found at, for example, GenBank Accession No. GI: 1676317412 (NM_001039523.3; SEQ ID NO:231; reverse complement, SEQ ID NO: 232). The sequence of mouse CHRNA1 mRNA can be found at, for example, GenBank Accession No. GI: 425905338 (NM_007389.5; SEQ ID NO:233; reverse complement, SEQ ID NO: 234). The sequence of rat CHRNA1 mRNA can be found at, for example, GenBank Accession No. GI: 1937369362 (NM 024485.2; SEQ ID NO:235; reverse complement, SEQ ID NO: 236). The sequence of Macaca fascicularis CHRNA1 mRNA can be found at, for example, GenBank Accession No. GI: 982286285 (XM_015432377.1; SEQ ID NO: 237; reverse complement, SEQ ID NO: 238). The sequence of Macaca mulatta CHRNA1 mRNA can be found at, for example, GenBank Accession No. GI: 1622850381 (XM_001091711.4; SEQ ID NO: 239; reverse complement, SEQ ID NO: 240).

[0357] Additional examples of CHRNA1 mRNA sequences are readily available through publicly available databases, e.g., GenBank, UniProt, OMIM, UCSC Genome Browser, and the Macaca genome project web site. Further information on CHRNA1 can be found, for example, at www.ncbi.nlm.nih.gov/gene/?term=CHRNA1.

[0358] The entire contents of each of the foregoing GenBank Accession numbers and the Gene database numbers are incorporated herein by reference as of the date of filing this application.

[0359] The term CHRNA1, as used herein, also refers to variations of the CHRNA1 gene including variants provided in the SNP database. Numerous sequence variations within the CHRNA1 gene have been identified and may be found at, for example, NCBI dbSNP and UniProt (see, e.g., 1, the entire contents of which is incorporated herein by reference as of the date of filing this application.

[0360] As used herein, “Cholinergic Receptor Nicotinic Beta 1 Subunit,” used interchangeably with the term “CHRNB1,” refers to a beta subunit of the muscle acetylcholine receptor (AChR). The muscle acetylcholine receptor consists of 5 subunits of 4 different types: 2 alpha subunits and 1 each of the beta, gamma, and delta subunits. This protein plays a role in acetlycholine binding/channel gating. After binding acetylcholine, the AChR responds by an extensive change in conformation that affects all subunits and leads to opening of an ion-conducting channel across the plasma membrane. CHRNB1 is associated with diseases associated such as Myasthenic Syndrome. CHRNB1 is also known as Cholinergic Receptor, Nicotinic, Beta Polypeptide 1; Acetylcholine Receptor, Nicotinic, Beta 1 (Muscle); ACHRB; CHRNB; CMS1D, CMS2C, CMS2A, or SCCMS.

[0361] An exemplary sequence of a human CHRNB1 mRNA transcript can be found at, for example, GenBank Accession No. GI: 1519313560 (NM_000747.3; SEQ ID NO:241; reverse complement, SEQ ID NO: 242). The sequence of mouse CHRNB1 mRNA can be found at, for example, GenBank Accession No. GI: 160358781 (NM_009601.4; SEQ ID NO:243; reverse complement, SEQ ID NO: 244). The sequence of rat CHRNB1 mRNA can be found at, for example, GenBank Accession No. GI: 2048631755 (NM 001395118.1; SEQ ID NO:245; reverse complement, SEQ ID NO: 246). The sequence of Macaca fascicularis CHRNB1 mRNA can be found at, for example, GenBank Accession No. GI: 982302904 (XM_005582753.2; SEQ ID NO: 247; reverse complement, SEQ ID NO: 248). The sequence of Macaca mulatta CHRNB1 mRNA can be found at, for example, GenBank Accession No. GI: 1622877217 (XM_015118481.2; SEQ ID NO: 249; reverse complement, SEQ ID NO: 250).

[0362] Additional examples of CHRNB1 mRNA sequences are readily available through publicly available databases, e.g., GenBank, UniProt, OMIM, UCSC Genome Browser, and the Macaca genome project web site. Further information on CHRNB1 can be found, for example, at www.ncbi.nlm.nih.gov/gene/?term=CHRNB1.

[0363] The entire contents of each of the foregoing GenBank Accession numbers and the Gene database numbers are incorporated herein by reference as of the date of filing this application.

[0364] The term CHRNB1, as used herein, also refers to variations of the CHRNB1 gene including variants provided in the SNP database. Numerous sequence variations within the CHRNB1 gene have been identified and may be found at, for example, NCBI dbSNP and UniProt (see, e.g., www.ncbi.nlm.nih.gov/gene/?term=CHRNB1, the entire contents of which is incorporated herein by reference as of the date of filing this application.

[0365] As used herein, “Cholinergic Receptor Nicotinic Delta Subunit,” used interchangeably with the term “CHRND,” refers to a delta subunit of the muscle acetylcholine receptor (AChR). The muscle acetylcholine receptor consists of 5 subunits of 4 different types: 2 alpha subunits and 1 each of the beta, gamma, and delta subunits. After binding acetylcholine, the AChR responds by an extensive change in conformation that affects all subunits and leads to opening of an ion-conducting channel across the plasma membrane. CHRND is associated with diseases associated such as Myasthenic Syndrome. CHRND is also known as ACHRD, Cholinergic Receptor, Nicotinic, Delta Polypeptide; Acetylcholine Receptor, Nicotinic, Delta (Muscle); CMS2A; CMS3A, CMS3B, CMS3C, FCCMS, or SCCMS.

[0366] An exemplary sequence of a human CHRND mRNA transcript can be found at, for example, GenBank Accession No. GI: 1519243557 (NM_000751.3; SEQ ID NO:251; reverse complement, SEQ ID NO: 252). The sequence of mouse CHRND mRNA can be found at, for example, GenBank Accession No. GI: 426214082 (NM_021600.3; SEQ ID NO:253; reverse complement, SEQ ID NO: 254). The sequence of rat CHRND mRNA can be found at, for example, GenBank Accession No. GI: 9506486 (NM_019298.1; SEQ ID NO:255; reverse complement, SEQ ID NO: 256). The sequence of Macaca fascicularis CHRND mRNA can be found at, for example, GenBank Accession No. GI: 982288086 (XM_005574618.2; SEQ ID NO: 257; reverse complement, SEQ ID NO: 258). The sequence of Macaca mulatta CHRND mRNA can be found at, for example, GenBank Accession No. GI: 1622852529 (XM_028831231.1; SEQ ID NO: 259; reverse complement, SEQ ID NO: 260).

[0367] Additional examples of CHRND mRNA sequences are readily available through publicly available databases, e.g., GenBank, UniProt, OMIM, UCSC Genome Browser, and the Macaca genome project web site. Further information on CHRND can be found, for example, at www.ncbi.nlm.nih.gov/gene/?term=CHRND.

[0368] The entire contents of each of the foregoing GenBank Accession numbers and the Gene database numbers are incorporated herein by reference as of the date of filing this application.

[0369] The term CHRND, as used herein, also refers to variations of the CHRND gene including variants provided in the SNP database. Numerous sequence variations within the CHRND gene have been identified and may be found at, for example, NCBI dbSNP and UniProt (see, e.g., www.ncbi.nlm.nih.gov/gene/?term=CHRND, the entire contents of which is incorporated herein by reference as of the date of filing this application.

[0370] As used herein, “Cholinergic Receptor Nicotinic Epsilon Subunit,” used interchangeably with the term “CHRNE,” refers to a subunit of the acetylcholine receptor. Acetylcholine receptors at mature mammalian neuromuscular junctions are pentameric protein complexes composed of four subunits in the ratio of two alpha subunits to one beta, one epsilon, and one delta subunit. The acetylcholine receptor changes subunit composition shortly after birth when the epsilon subunit replaces the gamma subunit seen in embryonic receptors. Mutations in the epsilon subunit are associated with congenital myasthenic syndrome. CHRNE is also known as Cholinergic Receptor, Nicotinic, Epsilon; Acetylcholine Receptor, Nicotinic, Epsilon; ACHRE; CMS1D, CMS1E, CMS2A, CMS4A, CMS4B, CMS4C, FCCMS, or SCCMS.

[0371] An exemplary sequence of a human CHRNE mRNA transcript can be found at, for example, GenBank Accession No. GI: 1433531118 (NM_000080.4; SEQ ID NO: 261; reverse complement, SEQ ID NO: 262). The sequence of mouse CHRNE mRNA can be found at, for example, GenBank Accession No. GI: 6752949 (NM_009603.1; SEQ ID NO: 263; reverse complement, SEQ ID NO: 264). The sequence of rat CHRNE mRNA can be found at, for example, GenBank Accession No. GI: 8393128 (NM_017194.1; SEQ ID NO: 265; reverse complement, SEQ ID NO: 266). The sequence of Macaca fascicularis CHRNE mRNA can be found at, for example, GenBank Accession No. GI: 982302635 (XM_015437499.1; SEQ ID NO: 267; reverse complement, SEQ ID NO: 268). The sequence of Macaca mulatta CHRNE mRNA can be found at, for example, GenBank Accession No. GI: 1622876897 (XM_015118354.2; SEQ ID NO: 269; reverse complement, SEQ ID NO: 270).

[0372] Additional examples of CHRNE mRNA sequences are readily available through publicly available databases, e.g., GenBank, UniProt, OMIM, UCSC Genome Browser, and the Macaca genome project web site. Further information on CHRNE can be found, for example, at www.ncbi.nlm.nih.gov/gene/?term=CHRNE.

[0373] The entire contents of each of the foregoing GenBank Accession numbers and the Gene database numbers are incorporated herein by reference as of the date of filing this application.

[0374] The term CHRNE, as used herein, also refers to variations of the CHRNE gene including variants provided in the SNP database. Numerous sequence variations within the CHRNE gene have been identified and may be found at, for example, NCBI dbSNP and UniProt (see, e.g., www.ncbi.nlm.nih.gov/gene/?term=CHRNE, the entire contents of which is incorporated herein by reference as of the date of filing this application.

[0375] As used herein, “Cholinergic Receptor Nicotinic Gamma Subunit,” used interchangeably with the term “CHRNG,” refers to a subunit of the acetylcholine receptor. The mammalian muscle-type acetylcholine receptor is a transmembrane pentameric glycoprotein with two alpha subunits, one beta, one delta, and one epsilon (in adult skeletal muscle) or gamma (in fetal and denervated muscle) subunit. This gene, which encodes the gamma subunit, is expressed prior to the thirty-third week of gestation in humans. The gamma subunit of the acetylcholine receptor plays a role in neuromuscular organogenesis and ligand binding and disruption of gamma subunit expression prevents the correct localization of the receptor in cell membranes. Mutations in the subunit are associated with congenital myasthenic syndrome. CHRNG is also known as Cholinergic Receptor, Nicotinic, Gamma; Acetylcholine Receptor, Nicotinic, Gamma; or ACHRG.

[0376] An exemplary sequence of a human CHRNG mRNA transcript can be found at, for example, GenBank Accession No. GI: 1441481359 (NM_005199.5; SEQ ID NO: 271; reverse complement, SEQ ID NO: 272). The sequence of mouse CHRNG mRNA can be found at, for example, GenBank Accession No. GI: 119964695 (NM_009604.3; SEQ ID NO: 273; reverse complement, SEQ ID NO: 274). The sequence of rat CHRNG mRNA can be found at, for example, GenBank Accession No. GI: 9506488 (NM_019145.1; SEQ ID NO: 275; reverse complement, SEQ ID NO: 276). The sequence of Macaca fascicularis CHRNG mRNA can be found at, for example, GenBank Accession No. GI: 982288092 (XM_005574625.2; SEQ ID NO: 277; reverse complement, SEQ ID NO: 278). The sequence of Macaca mulatta CHRNG mRNA can be found at, for example, GenBank Accession No. GI: 1622852538 (XM_028831233.1; SEQ ID NO: 279; reverse complement, SEQ ID NO: 280).

[0377] Additional examples of CHRNG mRNA sequences are readily available through publicly available databases, e.g., GenBank, UniProt, OMIM, UCSC Genome Browser, and the Macaca genome project web site. Further information on CHRNG can be found, for example, at www.ncbi.nlm.nih.gov/gene/?term=CHRNG.

[0378] The entire contents of each of the foregoing GenBank Accession numbers and the Gene database numbers are incorporated herein by reference as of the date of filing this application.

[0379] The term CHRNG, as used herein, also refers to variations of the CHRNG gene including variants provided in the SNP database. Numerous sequence variations within the CHRNG gene have been identified and may be found at, for example, NCBI dbSNP and UniProt (see, e.g., www.ncbi.nlm.nih.gov/gene/?term=CHRNG, the entire contents of which is incorporated herein by reference as of the date of filing this application.

[0380] As used herein, “Collagen Type XIII Alpha 1 Chain,” used interchangeably with the term “COL13A1,” refers to a synaptic extracellular-matrix protein involved in the formation and maintenance of the neuromuscular synapse. COL13A1 encodes the collagen type XIII alpha1 chain (COL13A1), which is a single-pass type II transmembrane protein made of a short intracellular domain, a single transmembrane domain, and a triple-helical collagenous ectodomain. Studies have shown that patients with COL13A1 mutations underlie a myasthenic syndrome characterized by early onset muscle weakness with predominantly feeding and breathing difficulties often requiring ventilation and artificial feeding. COL13A1 is also known as COLXIIIA1, Collagen Alpha-1(XIII) Chain, or CMS19.

[0381] An exemplary sequence of a human COL13A1 mRNA transcript can be found at, for example, GenBank Accession No. GI: 1677498641 (NM_001130103.2; SEQ ID NO: 281; reverse complement, SEQ ID NO: 282). The sequence of mouse COL13A1 mRNA can be found at, for example, GenBank Accession No. GI: 755571593 (NM_007731.3; SEQ ID NO: 283; reverse complement, SEQ ID NO: 284). The sequence of rat COL13A1 mRNA can be found at, for example, GenBank Accession No. GI: 157821424 (NM_001109172.1; SEQ ID NO: 285; reverse complement, SEQ ID NO: 286). The sequence of Macaca fascicularis COL13A1 mRNA can be found at, for example, GenBank Accession No. GI: 982269148 (XM_015456252.1; SEQ ID NO: 287; reverse complement, SEQ ID NO: 288). The sequence of Macaca mulatta COL13A1 mRNA can be found at, for example, GenBank Accession No. GI: 1622966101 (XM_015147482.2; SEQ ID NO: 289; reverse complement, SEQ ID NO: 290).

[0382] Additional examples of COL13A1 mRNA sequences are readily available through publicly available databases, e.g., GenBank, UniProt, OMIM, UCSC Genome Browser, and the Macaca genome project web site. Further information on COL13A1 can be found, for example, at www.ncbi.nlm.nih.gov/gene/?term=COL13A1.

[0383] The entire contents of each of the foregoing GenBank Accession numbers and the Gene database numbers are incorporated herein by reference as of the date of filing this application.

[0384] The term COL13A1, as used herein, also refers to variations of the COL13A1 gene including variants provided in the SNP database. Numerous sequence variations within the COL13A1 gene have been identified and may be found at, for example, NCBI dbSNP and UniProt (see, e.g., www.ncbi.nlm.nih.gov/gene/?term=COL13A1 the entire contents of which is incorporated herein by reference as of the date of filing this application.

[0385] As used herein, “Docking Protein 7,” used interchangeably with the term “DOK7,” refers to a protein that is essential for neuromuscular synaptogenesis. The protein functions in aneural activation of muscle-specific receptor kinase, which is required for postsynaptic differentiation, and in the subsequent clustering of the acetylcholine receptor in myotubes. This protein can also induce autophosphorylation of muscle-specific receptor kinase. Mutations in this gene are a cause of congenital myasthenic syndrome. DOK7 is also known as C4orf25, Downstream Of Tyrosine Kinase 7, FLJ33718, FLJ39137, Chromosome 4 Open Reading Frame 25, CMS10, CMS1B, or FADS3.

[0386] An exemplary sequence of a human DOK7 mRNA transcript can be found at, for example, GenBank Accession No. GI: 1519242777 (NM_173660.5; SEQ ID NO: 291; reverse complement, SEQ ID NO: 292). The sequence of mouse DOK7 mRNA can be found at, for example, GenBank Accession No. GI: 1143077055 (NM_001348478.1; SEQ ID NO: 293; reverse complement, SEQ ID NO: 294). The sequence of rat DOK7 mRNA can be found at, for example, GenBank Accession No. GI: 194240570 (NM_001130062.1; SEQ ID NO: 295; reverse complement, SEQ ID NO: 296). The sequence of Macaca fascicularis DOK7 mRNA can be found at, for example, GenBank Accession No. GI: 982247946 (XM_015450057.1; SEQ ID NO: 297; reverse complement, SEQ ID NO: 298). The sequence of Macaca mulatta DOK7 mRNA can be found at, for example, GenBank Accession No. GI: 1622938489 (XM_015137905.2; SEQ ID NO: 299; reverse complement, SEQ ID NO: 300).

[0387] Additional examples of DOK7 mRNA sequences are readily available through publicly available databases, e.g., GenBank, UniProt, OMIM, UCSC Genome Browser, and the Macaca genome project web site. Further information on DOK7 can be found, for example, at www.ncbi.nlm.nih.gov/gene/?term=DOK7.

[0388] The entire contents of each of the foregoing GenBank Accession numbers and the Gene database numbers are incorporated herein by reference as of the date of filing this application.

[0389] The term DOK7, as used herein, also refers to variations of the DOK7 gene including variants provided in the SNP database. Numerous sequence variations within the DOK7 gene have been identified and may be found at, for example, NCBI dbSNP and UniProt (see, e.g., www.ncbi.nlm.nih.gov/gene/?term=DOK7, the entire contents of which is incorporated herein by reference as of the date of filing this application.

[0390] As used herein, “LDL Receptor Related Protein 4,” used interchangeably with the term “LRP4,” refers to a member of the low-density lipoprotein receptor-related protein family. LRP4 is a single-transmembrane protein that possesses a large extracellular domain with multiple LDLR repeats, EGF-like and β-propeller repeats; a transmembrane domain; and a short C-terminal region without an identifiable catalytic motif Mice lacking LRP4 die at birth and do not form the NMJ, indicating a critical role in neuromuscular junction (NMJ) formation. LPR4 mutation or malfunction is implicated in disorders including congenital myasthenic syndrome, myasthenia gravis, and diseases of bone or kidney. LRP4 is also known as MEGF7, LRP-4, SOST2, CLSS, Low-Density Lipoprotein Receptor-Related Protein 4, Multiple Epidermal Growth Factor-Like Domains 7, LRP10, KIAA0816, or CMS17.

[0391] An exemplary sequence of a human LRP4 mRNA transcript can be found at, for example, GenBank Accession No. GI: 1519312025 (NM_002334.4; SEQ ID NO: 301; reverse complement, SEQ ID NO: 302). The sequence of mouse LRP4 mRNA can be found at, for example, GenBank Accession No. GI: 224994222 (NM_172668.3; SEQ ID NO: 303; reverse complement, SEQ ID NO: 304). The sequence of rat LRP4 mRNA can be found at, for example, GenBank Accession No. GI: 329112575 (NM_031322.3; SEQ ID NO: 305; reverse complement, SEQ ID NO: 306). The sequence of Macaca fascicularis LRP4 mRNA can be found at, for example, GenBank Accession No. GI: 982294148 (XM_005578015.2; SEQ ID NO: 307; reverse complement, SEQ ID NO: 308). The sequence of Macaca mulatta LRP4 mRNA can be found at, for example, GenBank Accession No. GI: 1622863351 (XM_015114355.2; SEQ ID NO: 309; reverse complement, SEQ ID NO: 310).

[0392] Additional examples of LRP4 mRNA sequences are readily available through publicly available databases, e.g., GenBank, UniProt, OMIM, UCSC Genome Browser, and the Macaca genome project web site. Further information on LRP4 can be found, for example, at www.ncbi.nlm.nih.gov/gene/?term=LRP4.

[0393] The entire contents of each of the foregoing GenBank Accession numbers and the Gene database numbers are incorporated herein by reference as of the date of filing this application.

[0394] The term LRP4, as used herein, also refers to variations of the LRP4 gene including variants provided in the SNP database. Numerous sequence variations within the LRP4 gene have been identified and may be found at, for example, NCBI dbSNP and UniProt (see, e.g., www.ncbi.nlm.nih.gov/snp/?term=LRP4, the entire contents ofwhich is incorporated herein by reference as of the date of filing this application.

[0395] As used herein, “Muscle Associated Receptor Tyrosine Kinase,” used interchangeably with the term “MUSK,” refers to a muscle-specific tyrosine kinase receptor, which plays a central role in the formation and the maintenance of the neuromuscular junction (NMJ), the synapse between the motor neuron and the skeletal muscle. Recruitment of AGRIN by LRP4 to the MUSK signaling complex induces phosphorylation and activation of MUSK, the kinase of the complex. The activation of MUSK in myotubes regulates the formation of NMJs through the regulation of different processes including the specific expression of genes in subsynaptic nuclei, the reorganization of the actin cytoskeleton and the clustering of the acetylcholine receptors in the postsynaptic membrane. Mutations in this gene have been associated with congenital myasthenic syndrome. MUSK is also known as EC 2.7.10.1, FADS1, CMS9, FADS, Muscle, Skeletal Receptor Tyrosine-Protein Kinase, or Muscle-Specific Kinase Receptor.

[0396] An exemplary sequence of a human MUSK mRNA transcript can be found at, for example, GenBank Accession No. GI: 1609044119 (NM_005592.4; SEQ ID NO: 311; reverse complement, SEQ ID NO: 312). The sequence of mouse MUSK mRNA can be found at, for example, GenBank Accession No. GI: 260267047 (NM_001037127.2; SEQ ID NO: 313; reverse complement, SEQ ID NO: 314). The sequence of rat MUSK mRNA can be found at, for example, GenBank Accession No. GI: 1937920431 (NM 031061.2; SEQ ID NO: 315; reverse complement, SEQ ID NO: 316). The sequence of Macaca fascicularis MUSK mRNA can be found at, for example, GenBank Accession No. GI: 982300549 (XM_005581093.2; SEQ ID NO: 317; reverse complement, SEQ ID NO: 318). The sequence of Macaca mulatta MUSK mRNA can be found at, for example, GenBank Accession No. GI: 1622871800 (XM_015117113.2; SEQ ID NO: 319; reverse complement, SEQ ID NO: 320).

[0397] Additional examples of MUSK mRNA sequences are readily available through publicly available databases, e.g., GenBank, UniProt, OMIM, UCSC Genome Browser, and the Macaca genome project web site. Further information on MUSK can be found, for example, at www.ncbi.nlm.nih.gov/gene/?term=MUSK.

[0398] The entire contents of each of the foregoing GenBank Accession numbers and the Gene database numbers are incorporated herein by reference as of the date of filing this application.

[0399] The term MUSK, as used herein, also refers to variations of the MUSK gene including variants provided in the SNP database. Numerous sequence variations within the MUSK gene have been identified and may be found at, for example, NCBI dbSNP and UniProt (see, e.g., www.ncbi.nlm.nih.gov/gene/?term=MUSK, the entire contents of which is incorporated herein by reference as of the date of filing this application.

[0400] As used herein, “Receptor Associated Protein Of The Synapse,” used interchangeably with the term “RAPSN,” refers to a member of a family of proteins that are receptor associated proteins of the synapse. The encoded protein contains a conserved cAMP-dependent protein kinase phosphorylation site, and plays a critical role in clustering and anchoring nicotinic acetylcholine receptors at synaptic sites by linking the receptors to the underlying postsynaptic cytoskeleton, possibly by direct association with actin or spectrin. Mutations in this gene may play a role in postsynaptic congenital myasthenic syndromes. RAPSN is also known as RNF205, 43 KDa Receptor-Associated Protein Of The Synapse, RING Finger Protein 205, CMS1D, CMS1E, Acetylcholine Receptor-Associated 43 Kda Protein, RAPSYN, CMS11, CMS4C, FADS2, or FADS.

[0401] An exemplary sequence of a human RAPSN mRNA transcript can be found at, for example, GenBank Accession No. GI: 1519241818 (NM_005055.5; SEQ ID NO: 321; reverse complement, SEQ ID NO: 322). The sequence of mouse RAPSN mRNA can be found at, for example, GenBank Accession No. GI: 224967080 (NM_009023.3; SEQ ID NO: 323; reverse complement, SEQ ID NO: 324). The sequence of rat RAPSN mRNA can be found at, for example, GenBank Accession No. GI: 157819696 (NM_001108584.1; SEQ ID NO: 325; reverse complement, SEQ ID NO: 326). The sequence of Macaca fascicularis RAPSN mRNA can be found at, for example, GenBank Accession No. GI: 982294016 (XM_015434747.1; SEQ ID NO: 327; reverse complement, SEQ ID NO: 328). The sequence of Macaca mulatta RAPSN mRNA can be found at, for example, GenBank Accession No. GI: 1622863236 (XM_015114296.2; SEQ ID NO: 329; reverse complement, SEQ ID NO: 330).

[0402] Additional examples of RAPSN mRNA sequences are readily available through publicly available databases, e.g., GenBank, UniProt, OMIM, UCSC Genome Browser, and the Macaca genome project web site. Further information on RAPSN can be found, for example, at www.ncbi.nlm.nih.gov/gene/?term=RAPSN.

[0403] The entire contents of each of the foregoing GenBank Accession numbers and the Gene database numbers are incorporated herein by reference as of the date of filing this application.

[0404] The term RAPSN, as used herein, also refers to variations of the RAPSN gene including variants provided in the SNP database. Numerous sequence variations within the RAPSN gene have been identified and may be found at, for example, NCBI dbSNP and UniProt (see, e.g., www.ncbi.nlm.nih.gov/gene/?term=RAPSN, the entire contents of which is incorporated herein by reference as of the date of filing this application.

[0405] As used herein, “Sodium Voltage-Gated Channel Alpha Subunit 4,” used interchangeably with the term “SCN4A,” refers to a member of the voltage-gated sodium channel family. Voltage-gated sodium channels are transmembrane glycoprotein complexes composed of a large alpha subunit with 24 transmembrane domains and one or more regulatory beta subunits. They are responsible for the generation and propagation of action potentials in neurons and muscle. This gene encodes one member of the sodium channel alpha subunit gene family. It is expressed in skeletal muscle, and mutations in this gene have been linked to congenital myasthenic syndrome, and several myotonia and periodic paralysis disorders. SCN4A is also known as SkM1, Nav1.4, HYPP, Sodium Channel Protein Skeletal Muscle Subunit Alpha, Voltage-Gated Sodium Channel Subunit Alpha Nav1.4, HYKPP, Skeletal Muscle Voltage-Dependent Sodium Channel Type IV Alpha Subunit, CTC-264K15.6, Na(V)1.4, HOKPP2, CMS16, or NAC1A.

[0406] An exemplary sequence of a human SCN4A mRNA transcript can be found at, for example, GenBank Accession No. GI: 93587341 (NM_000334.4; SEQ ID NO: 331; reverse complement, SEQ ID NO: 332). The sequence of mouse SCN4A mRNA can be found at, for example, GenBank Accession No. GI: 134948031 (NM_133199.2; SEQ ID NO: 333; reverse complement, SEQ ID NO: 334). The sequence of rat SCN4A mRNA can be found at, for example, GenBank Accession No. GI: 1937369400 (NM_013178.2; SEQ ID NO: 335; reverse complement, SEQ ID NO: 336). The sequence of Macaca fascicularis SCN4A mRNA can be found at, for example, GenBank Accession No. GI: 982306407 (XM_015438708.1; SEQ ID NO: 337; reverse complement, SEQ ID NO: 338).

[0407] The sequence of Macaca mulatta SCN4A mRNA can be found at, for example, GenBank Accession No. GI: 1622880585 (XM_015120096.2; SEQ ID NO: 339; reverse complement, SEQ ID NO: 340).

[0408] Additional examples of SCN4A mRNA sequences are readily available through publicly available databases, e.g., GenBank, UniProt, OMIM, UCSC Genome Browser, and the Macaca genome project web site. Further information on SCN4A can be found, for example, at www.ncbi.nlm.nih.gov/gene/?term=SCN4A.

[0409] The entire contents of each of the foregoing GenBank Accession numbers and the Gene database numbers are incorporated herein by reference as of the date of filing this application.

[0410] The term SCN4A, as used herein, also refers to variations of the SCN4A gene including variants provided in the SNP database. Numerous sequence variations within the SCN4A gene have been identified and may be found at, for example, NCBI dbSNP and UniProt (see, e.g., www.ncbi.nlm.nih.gov/snp/?term=SCN4A, the entire contents of which is incorporated herein by reference as of the date of filing this application.

[0411] As used herein, “Double Homeobox 4,” used interchangeably with the term “DUX4,” refers to a transcriptional activator of many genes. DUX4 is normally expressed during early embryonic development, and is then effectively silenced in all tissues except the testis and thymus. DUX4 has been implicated as being involved in cell death, oxidative stress, muscle differentiation and growth, epigenetic regulation, and a number of other signaling pathways in skeletal muscle. Inappropriate expression of DUX4 in muscle cells is the cause of facioscapulohumeral muscular dystrophy (FSHD), which is characterized by muscle weakness and wasting (atrophy) that worsens slowly over time. DUX4 is also known as Double Homeobox Protein 10, Double Homeobox Protein 4, Double Homeobox Protein 4/10, DUX4L, and DUX10.

[0412] An exemplary sequence of a human DUX4 mRNA transcript can be found at, for example, GenBank Accession No. GI: 1774753171 (NM_001306068.3; SEQ ID NO: 341; reverse complement, SEQ ID NO: 342). The sequence of mouse DUX4 mRNA can be found at, for example, GenBank Accession No. GI: 126432555 (NM_001081954.1; SEQ ID NO: 343; reverse complement, SEQ ID NO: 344). The sequence of rat DUX4 mRNA can be found at, for example, GenBank Accession No. GI: 1958689769 (XM_008771031.3; SEQ ID NO: 345; reverse complement, SEQ ID NO: 346). The sequence of Macaca mulatta DUX4 mRNA can be found at, for example, GenBank Accession No. GI: 1622942424 (XM_028848991.1; SEQ ID NO: 347; reverse complement, SEQ ID NO: 348).

[0413] Additional examples of DUX4 mRNA sequences are readily available through publicly available databases, e.g., GenBank, UniProt, OMIM, UCSC Genome Browser, and the Macaca genome project web site. Further information on DUX4 can be found, for example, at www.ncbi.nlm.nih.gov/gene/?term=DUX4.

[0414] The entire contents of each of the foregoing GenBank Accession numbers and the Gene database numbers are incorporated herein by reference as of the date of filing this application.

[0415] The term DUX4, as used herein, also refers to variations of the DUX4 gene including variants provided in the SNP database. Numerous sequence variations within the DUX4 gene have been identified and may be found at, for example, NCBI dbSNP and UniProt (see, e.g., www.ncbi.nlm.nih.gov/gene/?term=DUX4, the entire contents of which is incorporated herein by reference as of the date of filing this application.

[0416] As used herein, “phospholamban,” used interchangeably with the term “PLN,” refers to a crucial regulator of cardiac contractility. PLN is a major substrate for the cAMP-dependent protein kinase in cardiac muscle. The encoded protein is an inhibitor of cardiac muscle sarcoplasmic reticulum Ca(2+)-ATPase in the unphosphorylated state, but inhibition is relieved upon phosphorylation of the protein. The subsequent activation of the Ca(2+) pump leads to enhanced muscle relaxation rates, thereby contributing to the inotropic response elicited in heart by beta-agonists. The encoded protein is a key regulator of cardiac diastolic function. Mutations in this gene are a cause of inherited human dilated cardiomyopathy with refractory congestive heart failure, and also familial hypertrophic cardiomyopathy. PLN is also known as CMD1P, PLB, Cardiac Phospholamban, or CMH.

[0417] An exemplary sequence of a human PLN mRNA transcript can be found at, for example, GenBank Accession No. GI: 1519242997 (NM_002667.5; SEQ ID NO: 349; reverse complement, SEQ ID NO: 350). The sequence of mouse PLN mRNA can be found at, for example, GenBank Accession No. GI: 213512815 (NM_001141927.1; SEQ ID NO: 351; reverse complement, SEQ ID NO: 352). The sequence of rat PLN mRNA can be found at, for example, GenBank Accession No. GI: 399124783 (NM_022707.2; SEQ ID NO: 353; reverse complement, SEQ ID NO: 354). The sequence of Macaca mulatta PLN mRNA can be found at, for example, GenBank Accession No. GI: 1863319929 (NM_001190894.2; SEQ ID NO: 355; reverse complement, SEQ ID NO: 356).

[0418] Additional examples of PLN mRNA sequences are readily available through publicly available databases, e.g., GenBank, UniProt, OMIM, UCSC Genome Browser, and the Macaca genome project web site. Further information on PLN can be found, for example, at www.ncbi.nlm.nih.gov/gene/?term=PLN.

[0419] The entire contents of each of the foregoing GenBank Accession numbers and the Gene database numbers are incorporated herein by reference as of the date of filing this application.

[0420] The term PLN, as used herein, also refers to variations of the PLN gene including variants provided in the SNP database. Numerous sequence variations within the PLN gene have been identified and may be found at, for example, NCBI dbSNP and UniProt (see, e.g., www.ncbi.nlm.nih.gov/snp/?term=PLN, the entire contents of which is incorporated herein by reference as of the date of filing this application.

[0421] As used herein, “calcium/calmodulin dependent protein kinase II delta,” used interchangeably with the term “CAMK2D,” refers to a member of the serine/threonine protein kinase family and the Ca(2+)/calmodulin-dependent protein kinase subfamily. CAMK2D is involved in the regulation of Ca(2+) homeostatis and excitation-contraction coupling in heart by targeting ion channels, transporters and accessory proteins involved in Ca(2+) influx into the myocyte, Ca(2+) release from the sarcoplasmic reticulum (SR), SR Ca(2+) uptake and Na(+) and K(+) channel transport. CAMK2D also targets transcription factors and signaling molecules to regulate heart function. In its activated form, CAMK2D is involved in the pathogenesis of dilated cardiomyopathy and heart failure. CAMK2D contributes to cardiac decompensation and heart failure by regulating SR Ca(2+) release via direct phosphorylation of RYR2 Ca(2+) channel. In the nucleus, CAMK2D phosphorylates the MEF2 repressor HDAC4, promoting its nuclear export and binding to 14-3-3 protein, and expression of MEF2 and genes involved in the hypertrophic program. CAMK2D is essential for left ventricular remodeling responses to myocardial infarction. In pathological myocardial remodeling, CAMK2D acts downstream of the beta adrenergic receptor signaling cascade to regulate key proteins involved in excitation-contraction coupling. CAMK2D regulates Ca(2+) influx to myocytes by binding and phosphorylating the L-type Ca(2+) channel subunit beta-2 CACNB2. In addition to Ca(2+) channels, CAMK2D can target and regulate the cardiac sarcolemmal Na(+) channel Nav1.5/SCN5A and the K+ channel Kv4.3/KCND3, which contribute to arrhythmogenesis in heart failure. CAMK2D phosphorylates phospholamban (PLN), an endogenous inhibitor of SERCA2A/ATP2A2, contributing to the enhancement of SR Ca(2+) uptake that may be important in frequency-dependent acceleration of relaxation and maintenance of contractile function during acidosis. CAMK2D may participate in the modulation of skeletal muscle function in response to exercise, by regulating SR Ca(2+) transport through phosphorylation of PLN and triadin, a ryanodine receptor-coupling factor. CAMK2D is also known as Calcium/Calmodulin-Dependent Protein Kinase Type II Delta Chain, CaM Kinase II Delta Subunit, CaM Kinase II Subunit Delta, CAMKD, EC 2.7.11.17, or EC 2.7.11.

[0422] An exemplary sequence of a human CAMK2D mRNA transcript can be found at, for example, GenBank Accession No. GI: 1519243899 (NM_001321571.2; SEQ ID NO: 357; reverse complement, SEQ ID NO: 358). The sequence of mouse CAMK2D mRNA can be found at, for example, GenBank Accession No. GI: 654824235 (NM_001025439.2; SEQ ID NO: 359; reverse complement, SEQ ID NO: 360). The sequence of rat CAMK2D mRNA can be found at, for example, GenBank Accession No. GI: 144922682 (NM_012519.2; SEQ ID NO: 361; reverse complement, SEQ ID NO: 362). The sequence of Macaca mulatta CAMK2D mRNA can be found at, for example, GenBank Accession No. GI: 1622941163 (XM_015139100.2; SEQ ID NO: 363; reverse complement, SEQ ID NO: 364).

[0423] Additional examples of CAMK2D mRNA sequences are readily available through publicly available databases, e.g., GenBank, UniProt, OMIM, UCSC Genome Browser, and the Macaca genome project web site. Further information on CAMK2D can be found, for example, at www.ncbi.nlm.nih.gov/gene/?term=CAMK2D.

[0424] The entire contents of each of the foregoing GenBank Accession numbers and the Gene database numbers are incorporated herein by reference as of the date of filing this application.

[0425] The term CAMK2D, as used herein, also refers to variations of the CAMK2D gene including variants provided in the SNP database. Numerous sequence variations within the CAMK2D gene have been identified and may be found at, for example, NCBI dbSNP and UniProt (see, e.g., www.ncbi.nlm.nih.gov/snp/?term=CAMK2D, the entire contents of which is incorporated herein by reference as of the date of filing this application.

[0426] In other embodiments, the antisense strand polynucleotides disclosed herein are substantially complementary to the target gene sequence and comprise a contiguous nucleotide sequence which is at least about 80% complementary over its entire length to the equivalent region of the nucleotide sequence of SEQ ID NOs: 1-4 for ADRB1, or a fragment of SEQ ID NOs: 1-4, such as about 85%, 86%, 87%, 88%, 89%, 90%, 91%, 92%, 93%, 94%, 95%, 96%, 97%, 98%, or about 99% complementary.

[0427] In other embodiments, the antisense polynucleotides disclosed herein are substantially complementary to the target ADRB1 sequence and comprise a contiguous nucleotide sequence which is at least about 80% complementary over its entire length to any one of the sense strand nucleotide sequences in any one of Tables 2-5, 7B, and 7C, and, or a fragment of any one of the sense strand nucleotide sequences in any one of Tables 2-5, 7B, and 7C, such as about 85%, 86%, 87%, 88%, 89%, 90%, 91%, 92%, 93%, 94%, 95%, 96%, 97%, 98%, or about 99% complementary.

[0428] In one embodiment, an RNAi agent of the disclosure includes a sense strand that is substantially complementary to an antisense polynucleotide which, in turn, is the same as a target ADRB1 sequence, and wherein the sense strand polynucleotide comprises a contiguous nucleotide sequence which is at least about 80% complementary over its entire length to the equivalent region of the nucleotide sequence of SEQ ID NOs: 5-8, or a fragment of any one of SEQ ID NOs: 5-8, such as about 86%, 87%, 88%, 89%, 90%, 91%, 92%, 93%, 94%, 95%, 96%, 97%, 98%, or about 99% complementary.

[0429] In some embodiments, an iRNA of the invention includes a sense strand that is substantially complementary to an antisense polynucleotide which, in turn, is complementary to a target ADRB1 sequence, and wherein the sense strand polynucleotide comprises a contiguous nucleotide sequence which is at least about 80% complementary over its entire length to any one of the antisense strand nucleotide sequences in any one of any one of Tables 2-5, 7B, and 7C, or a fragment of any one of the antisense strand nucleotide sequences in any one of Tables 2-5, 7B, and 7C, such as about 86%, 87%, 88%, 89%, 90%, 91%, 92%, 93%, 94%, 95%, 96%, 97%, 98%, or about 99% complementary.

[0430] In some embodiments, the antisense polynucleotides disclosed herein are substantially complementary to the target LEP sequence and comprise a contiguous nucleotide sequence which is at least about 80% complementary over its entire length to any one of the sense strand nucleotide sequences in any one of Tables 9-16, or a fragment of any one of the sense strand nucleotide sequences in any one of Tables 9-16, such as about 85%, 86%, 87%, 88%, 89%, 90%, 91%, 92%, 93%, 94%, 95%, 96%, 97%, 98%, or about 99% complementary.

[0431] In some embodiments, an iRNA of the invention includes a sense strand that is substantially complementary to an antisense polynucleotide which, in turn, is complementary to a target LEP sequence, and wherein the sense strand polynucleotide comprises a contiguous nucleotide sequence which is at least about 80% complementary over its entire length to any one of the antisense strand nucleotide sequences in any one of any one of Tables 9-16, or a fragment of any one of the antisense strand nucleotide sequences in any one of Tables 9-16, such as about 86%, 87%, 88%, 89%, 90%, 91%, 92%, 93%, 94%, 95%, 96%, 97%, 98%, or about 99% complementary.

[0432] In some embodiments, the antisense polynucleotides disclosed herein are substantially complementary to the target PLN sequence and comprise a contiguous nucleotide sequence which is at least about 80% complementary over its entire length to any one of the sense strand nucleotide sequences in any one of Tables 19-22, or a fragment of any one of the sense strand nucleotide sequences in any one of Tables 19-22, such as about 85%, 86%, 87%, 88%, 89%, 90%, 91%, 92%, 93%, 94%, 95%, 96%, 97%, 98%, or about 99% complementary.

[0433] In some embodiments, an iRNA of the invention includes a sense strand that is substantially complementary to an antisense polynucleotide which, in turn, is complementary to a target PLN sequence, and wherein the sense strand polynucleotide comprises a contiguous nucleotide sequence which is at least about 80% complementary over its entire length to any one of the antisense strand nucleotide sequences in any one of any one of Tables 19-22, or a fragment of any one of the antisense strand nucleotide sequences in any one of Tables 19-22, such as about 86%, 87%, 88%, 89%, 90%, 91%, 92%, 93%, 94%, 95%, 96%, 97%, 98%, or about 99% complementary.

[0434] In some embodiments, the antisense polynucleotides disclosed herein are substantially complementary to the target CAMK2D sequence and comprise a contiguous nucleotide sequence which is at least about 80% complementary over its entire length to any one of the sense strand nucleotide sequences in any one of Tables 23-26, or a fragment of any one of the sense strand nucleotide sequences in any one of Tables 23-26, such as about 85%, 86%, 87%, 88%, 89%, 90%, 91%, 92%, 93%, 94%, 95%, 96%, 97%, 98%, or about 99% complementary.

[0435] In some embodiments, an iRNA of the invention includes a sense strand that is substantially complementary to an antisense polynucleotide which, in turn, is complementary to a target CAMK2D sequence, and wherein the sense strand polynucleotide comprises a contiguous nucleotide sequence which is at least about 80% complementary over its entire length to any one of the antisense strand nucleotide sequences in any one of any one of Tables 23-26, or a fragment of any one of the antisense strand nucleotide sequences in any one of Tables 23-26, such as about 86%, 87%, 88%, 89%, 90%, 91%, 92%, 93%, 94%, 95%, 96%, 97%, 98%, or about 99% complementary.

[0436] In some embodiments, the double-stranded region of a double-stranded iRNA agent is equal to or at least, 10, 11, 12, 13, 14, 15, 16, 17, 18, 19, 20, 21, 22, 23, 23, 24, 25, 26, 27, 28, 29, 30 or more nucleotide pairs in length.

[0437] In some embodiments, the antisense strand of a double-stranded iRNA agent is equal to or at least 14, 15, 16, 17, 18, 19, 20, 21, 22, 23, 23, 24, 25, 26, 27, 28, 29, or 30 nucleotides in length.

[0438] In some embodiments, the sense strand of a double-stranded iRNA agent is equal to or at least 10, 11, 12, 13, 14, 15, 16, 17, 18, 19, 20, 21, 22, 23, 23, 24, 25, 26, 27, 28, 29, or 30 nucleotides in length.

[0439] In one embodiment, the sense and antisense strands of the double-stranded iRNA agent are each independently 15 to 30 nucleotides in length.

[0440] In one embodiment, the sense and antisense strands of the double-stranded iRNA agent are each independently 19 to 25 nucleotides in length.

[0441] In one embodiment, the sense and antisense strands of the double-stranded iRNA agent are each independently 21 to 23 nucleotides in length.

[0442] In one embodiment, the sense strand of the iRNA agent is 21-nucleotides in length, and the antisense strand is 23-nucleotides in length, wherein the strands form a double-stranded region of 21 consecutive base pairs having a 2-nucleotide long single stranded overhangs at the 3′-end.

[0443] In one aspect of the invention, an agent for use in the methods and compositions of the invention is a single-stranded antisense nucleic acid molecule that inhibits a target mRNA via an antisense inhibition mechanism. The single-stranded antisense RNA molecule is complementary to a sequence within the target mRNA. The single-stranded antisense oligonucleotides can inhibit translation in a stoichiometric manner by base pairing to the mRNA and physically obstructing the translation machinery, see Dias, N. et al., (2002) Mol Cancer Ther 1:347-355. The single-stranded antisense RNA molecule may be about 15 to about 30 nucleotides in length and have a sequence that is complementary to a target sequence. For example, the single-stranded antisense RNA molecule may comprise a sequence that is at least about 15, 16, 17, 18, 19, 20, or more contiguous nucleotides from any one of the antisense sequences described herein.

[0444] In one embodiment, at least partial suppression of the expression of a target gene, is assessed by a reduction of the amount of target mRNA which can be isolated from or detected in a first cell or group of cells in which a target gene is transcribed and which has or have been treated such that the expression of a target gene is inhibited, as compared to a second cell or group of cells substantially identical to the first cell or group of cells but which has or have not been so treated (control cells). The degree of inhibition may be expressed in terms of:

$$\frac{( mRNA in control cells ) - ( mRNA in treated cells )}{( mRNA in control cells )} 100 \%$$

[0445] In one embodiment, inhibition of expression is determined by the dual luciferase method wherein the RNAi agent is present at 10 nM.

[0446] The phrase “contacting a cell with an RNAi agent,” such as a dsRNA, as used herein, includes contacting a cell by any possible means. Contacting a cell with an RNAi agent includes contacting a cell in vitro with the RNAi agent or contacting a cell in vivo with the RNAi agent. The contacting may be done directly or indirectly. Thus, for example, the RNAi agent may be put into physical contact with the cell by the individual performing the method, or alternatively, the RNAi agent may be put into a situation that will permit or cause it to subsequently come into contact with the cell.

[0447] Contacting a cell in vitro may be done, for example, by incubating the cell with the RNAi agent. Contacting a cell in vivo may be done, for example, by injecting the RNAi agent into or near the tissue where the cell is located, or by injecting the RNAi agent into another area, or to the bloodstream or the subcutaneous space, such that the agent will subsequently reach the tissue where the cell to be contacted is located. In some embodiments, the RNAi agent may contain or be coupled to a ligand, e.g., one or more GalNAc derivatives as described below, that directs or otherwise stabilizes the RNAi agent at a site of interest, e.g., the liver. In other embodiments, the RNAi agent may contain or be coupled to one or more C₂₂ hydrocarbon chains and one or more GalNAc derivatives. In other embodiments, the RNAi agent contains or is coupled to one or more C₂₂ hydrocarbon chains and does not contain or is not coupled to one or more GalNAc derivatives. Combinations of in vitro and in vivo methods of contacting are also possible. For example, a cell may also be contacted in vitro with an RNAi agent and subsequently transplanted into a subject.

[0448] In one embodiment, contacting a cell with an RNAi agent includes “introducing” or “delivering the RNAi agent into the cell” by facilitating or effecting uptake or absorption into the cell. Absorption or uptake of a RNAi agent can occur through unaided diffusive or active cellular processes, or by auxiliary agents or devices. Introducing a RNAi agent into a cell may be in vitro or in vivo. For example, for in vivo introduction, a RNAi agent can be injected into a tissue site or administered systemically. In vitro introduction into a cell includes methods known in the art such as electroporation and lipofection. Further approaches are described herein below or are known in the art.

[0449] The term “lipid nanoparticle” or “LNP” is a vesicle comprising a lipid layer encapsulating a pharmaceutically active molecule, such as a nucleic acid molecule, e.g., a RNAi agent or a plasmid from which a RNAi agent is transcribed. LNPs are described in, for example, U.S. Pat. Nos. 6,858,225, 6,815,432, 8,158,601, and 8,058,069, the entire contents of which are hereby incorporated herein by reference.

[0450] As used herein, a “subject” is an animal, such as a mammal, including a primate (such as a human, a non-human primate, e.g., a monkey, and a chimpanzee), or a non-primate (such as a a cow, a pig, a horse, a goat, a rabbit, a sheep, a hamster, a guinea pig, a cat, a dog, a rat, or a mouse), or a bird that expresses the target gene, either endogenously or heterologously. In one embodiment, the subject is a human, such as a human being treated or assessed for a disease, disorder, or condition that would benefit from reduction in target gene expression; a human at risk for a disease, disorder, or condition that would benefit from reduction in target gene expression; a human having a disease, disorder, or condition that would benefit from reduction in target gene expression; or human being treated for a disease, disorder, or condition that would benefit from reduction in target gene expression as described herein. In some embodiments, the subject is a female human. In other embodiments, the subject is a male human. In one embodiment, the subject is an adult subject. In another embodiment, the subject is a pediatric subject.

[0451] As used herein, the terms “treating” or “treatment” refer to a beneficial or desired result including, but not limited to, alleviation or amelioration of one or more signs or symptoms associated with target gene expression or target gene protein production, e.g., a target gene-associated disease, e.g., a skeletal muscle disorder, a cardiac muscle disorder, or an adipose tissue disorder, or symptoms associated with unwanted target gene expression; diminishing the extent of unwanted target activation or stabilization; amelioration or palliation of unwanted target activation or stabilization. “Treatment” can also mean prolonging survival as compared to expected survival in the absence of treatment.

[0452] The term “lower” in the context of the level of a target gene in a subject or a disease marker or symptom refers to a statistically significant decrease in such level. The decrease can be, for example, at least 10%, 15%, 20%, 25%, 30%, %, 40%, 45%, 50%, 55%, 60%, 65%, 70%, 75%, 80%, 85%, 90%, 95%, or more. In certain embodiments, a decrease is at least 20%. In certain embodiments, the decrease is at least 50% in a disease marker, e.g., protein or gene expression level. “Lower” in the context of the level of a target gene in a subject is a decrease to a level accepted as within the range of normal for an individual without such disorder. In certain embodiments, the expression of the target is normalized, i.e., decreased towards or to a level accepted as within the range of normal for an individual without such disorder, e.g., blood glucose level, blood uric acid level, blood lipid level, blood oxygen level, white blood cell count, kidney function, spleen function, liver function. For example, chronic hyperuricemia is defined as serum urate levels greater than 6.8 mg/dl (greater than 360 mmol/), the level above which the physiological saturation threshold is exceeded (Mandell, Cleve. Clin. Med. 75:S5-S8, 2008). As used here, “lower” in a subject can refer to lowering of gene expression or protein production in a cell in a subject does not require lowering of expression in all cells or tissues of a subject. For example, as used herein, lowering in a subject can include lowering of gene expression or protein production in a subject.

[0453] The term “lower” can also be used in association with normalizing a symptom of a disease or condition, i.e. decreasing the difference between a level in a subject suffering from a target gene-associated disease towards or to a level in a normal subject not suffering from a target gene-associated disease. As used herein, if a disease is associated with an elevated value for a symptom, “normal” is considered to be the upper limit of normal. If a disease is associated with a decreased value for a symptom, “normal” is considered to be the lower limit of normal.

[0454] As used herein, “prevention” or “preventing,” when used in reference to a disease, disorder, or condition thereof, that would benefit from a reduction in expression of a target gene or production of a target protein, refers to a reduction in the likelihood that a subject will develop a symptom associated with such a disease, disorder, or condition, e.g., a symptom of a target gene-associated disease. The failure to develop a disease, disorder, or condition, or the reduction in the development of a symptom associated with such a disease, disorder, or condition (e.g., by at least about 10% on a clinically accepted scale for that disease or disorder), or the exhibition of delayed symptoms delayed (e.g., by days, weeks, months or years) is considered effective prevention.

[0455] As used herein, the term “target gene-associated disease,” is a disease or disorder that would benefit from reduction in the expression or activity of the target gene. The term “target gene-associated disease,” is a disease or disorder that is caused by, or associated with expression or protein production of the target gene. The term “target gene-associated disease” includes a disease, disorder or condition that would benefit from a decrease in expression or protein activity of the target gene. Additional information regarding specific target genes and disease that would benefit from reduction in expression of the target gene are descried below.

[0456] In one embodiment, the target gene-associated disease is a cardiac muscle disease or disorder.

[0457] In one embodiment, the target gene-associated disease is a skeletal muscle disease or disorder.

[0458] In one embodiment, the target gene-associated disease is a adipose tissue disease or disorder.

[0459] Exemplary cardiac muscle disorders include obstructive hypertrophic cardiomyopathy (HOCM); familial hypertrophic cardiomyopathy (FHC); Heart failure with preserved ejection fraction (HFPEF); atrial fibrillation (AFIB); ventricular fibrillation (VFIB); angina; myocardial infarction (MI); heart failure or heart failure with reduced ejection fraction (HFREF); supraventricular tachycardia (SVT); and hypertrophic cardiomyopathy (HCM).

[0460] “Heart failure” (“HF”) or “congestive heart failure” (“CHF”) is a chronic condition in which the heart doesn't pump blood as well as it should. Heart failure occurs when the heart's capacity to pump blood cannot keep up with the body's need. Heart failure can occur if the heart cannot pump (systolic) or fill (diastolic) adequately. As the heart weakens, blood begins to back up and force liquid through the capillary walls. The term “congestive” refers to the resulting buildup of fluid in the ankles and feet, arms, lungs, and/or other organs.

[0461] One type of heart failure is “heart failure with preserved left ventricular function” (“HF-pEF”) also known as “heart failure with preserved ejection fraction” (“HF-pEF”) is a condition in which the heart contracts and pumps normally, but the ventricles are thicker and stiffer than normal. Because of this, the ventricles can't relax properly and fill up all the way. Because there's less blood in the ventricles, less blood is pumped out to the rest of the body when the heart contracts.

[0462] The most common cause of congestive heart failure is coronary artery disease. Risk factors for coronary artery disease include high levels of cholesterol and/or triglyceride, high blood pressure, poor diet, a sedentary lifestyle, diabetes, smoking, being overweight or obese, and stress. In addition to coronary artery disease, several other conditions can damage the heart muscles, including inherited and genetic factors, some infections and autoimmune diseases and some treatments such as chemotherapy.

[0463] Symptoms of CHF include shortness of breath, fatigue, swollen legs, and rapid heartbeat.

[0464] Treatments can include eating less salt, limiting fluid intake, and taking prescription medications, e.g., vasodilators, diuretics, aldosterone inhibitors, ACE inhibitors or ARB drugs, digitalis glycosides, anticoagulants or antiplatelets, beta-blockers, and tranquilizers, and surgical procedures, include for example, bypass surgery, heart valve replacement, implantation of a pacemaker, e.g., biventricular pacing therapy or an implantable cardioverter defibrillator, ventricular assist devices (VAD therapy), and heart transplant.

[0465] “Hypertrophic cardiomyopathy” (“HCM”) refers to impaired heart function associated with abnormally thick heart muscle in the absence of other heart disease; e.g., valvular heart disease. “Hypertrophic obstructive cardiomyopathy” (“HOCM”) is a subtype of HCM, where the wall (septum) between the two bottom chambers of the heart thickens. The walls of the pumping chamber can also become stiff The thickened septum may cause a narrowing that can block or reduce the blood flow from the left ventricle to the aorta, which is a condition called “outflow tract obstruction.”

[0466] Both HCM and HOCM may be caused by heart muscle gene mutation, which may be inherited. As such, multiple family members may be affected by HCM and HOCM. Phenotypic expression of the gene mutation may be variable.

[0467] Both HCM and HOCM may be caused by heart muscle gene mutation, which may be inherited. As such, multiple family members may be affected by HCM and HOCM. Phenotypic expression of the gene mutation may be variable. In other words, even with the same gene mutation, the severity of heart function impairment may vary between affected patients.

[0468] Symptoms associated with HCM may vary in severity and character as well, including, fatigue, chest pain, dyspnea, abnormal heart rhythm, heart failure, syncope, and sudden cardiac death.

[0469] Treatments include pacemakers, defibrillators, alcohol septal ablation, surgical myectomy, advanced heart failure therapy, beta blockers, calcium channel blockers, and anti-arrhythmics.

[0470] “Familial hypertrophic cardiomyopathy” is an autosomal dominant disease characterized mainly by left ventricular hypertrophy. Thickening usually occurs in the interventricular septum. In some, thickening of the interventricular septum impedes the flow of oxygen-rich blood from the heart, which may lead to an abnormal heart sound during a heartbeat (heart murmur) and other signs and symptoms of the condition. Other affected individuals do not have physical obstruction of blood flow, but the pumping of blood is less efficient, which can also lead to symptoms of the condition. Cardiac hypertrophy often begins in adolescence or young adulthood, although it can develop at any time throughout life.

[0471] The symptoms of familial hypertrophic cardiomyopathy are variable, even within the same family. Many affected individuals have no symptoms. Other people with familial hypertrophic cardiomyopathy may experience chest pain; shortness of breath, especially with physical exertion; a sensation of fluttering or pounding in the chest (palpitations); lightheadedness; dizziness; and fainting.

[0472] While most people with familial hypertrophic cardiomyopathy are symptom-free or have only mild symptoms, this condition can have serious consequences. It can cause abnormal heart rhythms (arrhythmias) that may be life threatening. People with familial hypertrophic cardiomyopathy have an increased risk of sudden death, even if they have no other symptoms of the condition. A small number of affected individuals develop potentially fatal heart failure, which may require heart transplantation.

[0473] Mutations in one of several genes can cause familial hypertrophic cardiomyopathy; the most commonly involved genes are MYH7, MYBPC3, TNNT2, and TNNI3. Other genes, including some that have not been identified, may also be involved in this condition.

[0474] Treatments include, beta blockers, calcium channel blockers, heart rhythm drugs such as amiodarone (Pacerone) or disopyramide (Norpace), and blood thinners such as warfarin (Coumadin, Jantoven), dabigatran (Pradaxa), rivaroxaban (Xarelto) or apixaban (Eliquis). Surgeries or other procedures include apical myectomy, septal myectomy, septal ablation, and implantable cardioverter-defibrillator (ICD).

[0475] “Atrial fibrillation” (“AFIB”) is when the atria beat chaotically and irregularly—out of coordination with the ventricles. The result is a fast and irregular heart rhythm. The heart rate in atrial fibrillation may range from 100 to 175 beats a minute. The normal range for a heart rate is 60 to 100 beats a minute.

[0476] Episodes of atrial fibrillation may come and go, or may go away and may require treatment. Although atrial fibrillation itself usually isn't life-threatening, it is a serious medical condition that sometimes requires emergency treatment.

[0477] A major concern with atrial fibrillation is the potential to develop blood clots within the atria which may circulate to other organs and lead to blocked blood flow (ischemia).

[0478] Causes of AFIB include, abnormalities or damage to the heart's structure, high blood pressure, heart attack, coronary artery disease, abnormal heart valves, congenital heart defects, an overactive thyroid gland or other metabolic imbalance, exposure to stimulants, such as medications, caffeine, tobacco or alcohol, sick sinus syndrome—improper functioning of the heart's natural pacemaker, lung diseases, previous heart surgery, viral infections, stress due to surgery, pneumonia or other illnesses, and sleep apnea.

[0479] Symptoms include palpitations, which are sensations of a racing, uncomfortable, irregular heartbeat or a flip-flopping in the chest, weakness, reduced ability to exercise, fatigue, lightheadedness, dizziness, shortness of breath, and chest pain.

[0480] Treatments include, electrical cardioversion, anti-arrhythmics, digoxin, beta blockers, calcium channel blockers anticoagulants, catheter ablation, Maze procedure, atrioventricular (AV) node ablation, and left atrial appendage closure.

[0481] “Ventricular fibrillation” (“VFIB”) is a type of abnormal heart rhythm (arrhythmia). During ventricular fibrillation, disorganized heart signals cause the ventricles to twitch (quiver) uselessly. As a result, the heart doesn't pump blood to the rest of the body.

[0482] Ventricular fibrillation is an emergency that requires immediate medical attention. It's the most frequent cause of sudden cardiac death.

[0483] Collapse and loss of consciousness is the most common symptom of ventricular fibrillation. Other symptoms include chest pain, very fast heartbeat (tachycardia), dizziness, nausea, and shortness of breath.

[0484] Risk factors include previous episode of ventricular fibrillation, previous heart attack, a congenital heart defect, heart muscle disease (cardiomyopathy), injuries that cause damage to the heart muscle, such as being struck by lightning, drug misuse, especially with cocaine or methamphetamine, and severe imbalance of potassium or magnesium.

[0485] Treatments include, cardiopulmonary resuscitation (CPR), defibrillation, anti-arrhythmics, an implantable cardioverter-defibrillator (ICD), cardiac ablation, coronary angioplasty and stent placement, and coronary bypass surgery.

[0486] A “myocardial infarction” or “MI” occurs when the flow of blood to the heart is blocked. The blockage is most often a buildup of fat, cholesterol and other substances, which form a plaque in the arteries that feed the heart (coronary arteries).

[0487] Symptoms include pressure, tightness, pain, or a squeezing or aching sensation in the chest or arms that may spread to the neck, jaw or back, nausea, indigestion, heartburn or abdominal pain, shortness of breath, cold sweat, fatigue, lightheadedness or sudden dizziness

[0488] Heart attack risk factors include age (e.g., men age 45 or older and women age 55 or older are more likely to have a heart attack than are younger men and women, tobacco, high blood pressure. Over time, high blood pressure can damage arteries that lead to your heart. High blood pressure that occurs with other conditions, such as obesity, high cholesterol or diabetes, increases your risk even more, high cholesterol or triglyceride levels, obesity, diabetes, metabolic syndrome, family history of heart attacks, lack of physical activity, stress, illicit drug use, a history of preeclampsia, and an autoimmune condition.

[0489] Treatments include, aspirin, thrombolytics, antiplatelet agents, other blood-thinning medications, pain relievers, nitroglycerin, beta blockers, ACE inhibitors, statins, coronary angioplasty and stenting, and coronary artery bypass surgery.

[0490] “Supraventricular tachycardia” (“SVT”) is as an abnormally fast or erratic heartbeat that affects the heart's atria. During an episode of SVT, the heart beats about 150 to 220 times per minute, but it can occasionally beat faster or slower.

[0491] The main symptom of supraventricular tachycardia (SVT) is a very fast heartbeat (100 beats a minute or more) that may last for a few minutes to a few days. The fast heartbeat may come and go suddenly, with stretches of normal heart rates in between.

[0492] Signs and symptoms of supraventricular tachycardia may include very fast (rapid) heartbeat, a fluttering or pounding in the chest (palpitations), a pounding sensation in the neck, weakness or feeling very tired (fatigue), chest pain, shortness of breath, lightheadedness or dizziness, sweating, and fainting (syncope) or near fainting. Some with SVT have no signs or symptoms at all.

[0493] For some, a supraventricular tachycardia episode is related to an obvious trigger, such as exercise, stress or lack of sleep. Some people may not have a noticeable trigger. Things that may cause an SVT episode include age, coronary artery disease, previous heart surgery, heart disease, heart failure, other heart problems, such as Wolff-Parkinson-White syndrome, chronic lung disease, consuming too much caffeine, drinking too much alcohol, drug use, particularly stimulants such as cocaine and methamphetamines, pregnancy, smoking, thyroid disease, tobacco, sleep apnea, diabetes, and certain medications, including asthma medications and over-the-counter cold and allergy drugs.

[0494] Treatments include, carotid sinus massage, vagal maneuvers, cardioversion, beta blockers, anti-arrhythmics, calcium channel blocker, catheter ablation, and pacemaker.

[0495] “Hypertrophic cardiomyopathy” (“HCM”) is a disease in which the heart muscle becomes abnormally thick (hypertrophied). The thickened heart muscle can make it harder for the heart to pump blood.

[0496] “Angina” is a type of chest pain caused by reduced blood flow to the heart. Angina is a symptom of coronary artery disease.

[0497] Angina, also called angina pectoris, is often described as squeezing, pressure, heaviness, tightness or pain in your chest. Some with angina symptoms say angina feels like a vise squeezing their chest or a heavy weight lying on their chest. There may also be pain in the arms, neck, jaw, shoulder or back. Other symptoms that you may have with angina include dizziness, fatigue, nausea, shortness of breath, and sweating.

[0498] Risk factors include tobacco, diabetes, high blood pressure, high cholesterol or triglyceride levels, family history of heart disease, age (e.g., men older than 45 and women older than 55 have a greater risk than do younger adults), lack of exercise, obesity, and stress.

[0499] Treatments include, lifestyle changes, nitrates, aspirin, clot-preventing drugs, beta blockers, statins, calcium channel blockers, blood pressure-lowering medications, angiotensin-converting enzyme (ACE) inhibitors or angiotensin II receptor blockers (ARBs), ranolazine (Ranexa), angioplasty and stenting, coronary artery bypass surgery, and external counterpulsation (ECP).

[0500] Exemplary skeletal muscle disorders include Myostatin-related muscle hypertrophy, congenital myasthenic syndrome, and facioscapulohumeral muscular dystrophy (FSHD).

[0501] Myostatin-related muscle hypertrophy is a rare condition characterized by reduced body fat and increased muscle size. Affected individuals have up to twice the usual amount of muscle mass in their bodies. They also tend to have increased muscle strength. Myostatin-related muscle hypertrophy is caused by mutations in the MSTN gene. It follows an incomplete autosomal dominant pattern of inheritance.

[0502] Congenital myasthenic syndromes (CMS) are a heterogeneous group of early-onset genetic neuromuscular transmission disorders due to mutations in proteins involved in the organisation, maintenance, function, or modification of the motor endplate (endplate myopathies), e.g., CHRNA1, CHRNB1, CHRBD, CHRNE, CHRNG, COL13A1, DOX7, LRP4, MUSK, RAPSN, or SCN4A. CMS are clinically characterised by abnormal fatigability, or transient or permanent weakness of extra-ocular, facial, bulbar, truncal, respiratory, or limb muscles. Onset of endplate myopathy is intrauterine, congenital, in infancy, or childhood, and rarely in adolescence. Severity ranges from mild, phasic weakness, to disabling, permanent muscle weakness, respiratory insufficiency, and early death. All subtypes of CMS share the clinical features of fatigability and muscle weakness, but age of onset, presenting symptoms, and response to treatment vary depending on the molecular mechanism that results from the underlying genetic defect. The term CMS is misleading since not all CMS are congenital. See, Finsterer (2019) Orphanet JRare Dis. 14: 57 for a review.

[0503] Facioscapulohumeral muscular dystrophy (FSHD) type 1 is an autosomal dominant condition caused by mutations in DUX4. FSHD typically presents before age 20 years with weakness of the facial muscles and the stabilizers of the scapula or the dorsiflexors of the foot. There is extreme clinical variability. In some cases, Congenital facial weakness may be present. In FSHD, the muscle weakness is slowly progressive and approximately 20% of affected individuals eventually require a wheelchair. Life expectancy is not shortened. The incidence is approximately 4 individuals affected per 100,000 people.

[0504] Exemplary adipose tissue disorders include a metabolic disorder, e.g. metabolic syndrome, a disorder of carbohydrates, e.g., type II diabetes, pre-diabetes, a lipid metabolism disorder, e.g., a hyperlipidemia, hypertension, a cardiovascular disease, a disorders of body weight.

[0505] As used herein, a “metabolic disorder” refers to any disease or disorder that disrupts normal metabolism, the process of converting food to energy on a cellular level. Metabolic diseases affect the ability of the cell to perform critical biochemical reactions that involve the processing or transport of proteins (amino acids), carbohydrates (sugars and starches), or lipids (fatty acids). Non-limiting examples of metabolic diseases include disorders of carbohydrates, e.g., diabetes, type I diabetes, type II diabetes, galactosemia, hereditary fructose intolerance, fructose 1,6-diphosphatase deficiency, glycogen storage disorders, congenital disorders of glycosylation, insulin resistance, insulin insufficiency, hyperinsulinemia, impaired glucose tolerance (IGT), abnormal glycogen metabolism; disorders of amino acid metabolism, e.g., maple syrup urine disease (MSUD), or homocystinuria; disorder of organic acid metabolism, e.g., methylmalonic aciduria, 3-methylglutaconic aciduria-Barth syndrome, glutaric aciduria or 2-hydroxyglutaric aciduria—D and L forms; disorders of fatty acid beta-oxidation, e.g., medium-chain acyl-CoA dehydrogenase deficiency (MCAD), long-chain 3-hydroxyacyl-CoA dehydrogenase deficiency (LCHAD), very-long-chain acyl-CoA dehydrogenase deficiency (VLCAD); disorders of lipid metabolism, e.g., GM1 Gangliosidosis, Tay-Sachs Disease, Sandhoff Disease, Fabry Disease, Gaucher Disease, Niemann-Pick Disease, Krabbe Disease, Mucolipidoses, or Mucopolysaccharidoses; mitochondrial disorders, e.g., mitochondrial cardiomyopathies; Leigh disease; mitochondrial encephalopathy, lactic acidosis, and stroke-like episodes (MELAS); myoclonic epilepsy with ragged-red fibers (MERRF); neuropathy, ataxia, and retinitis pigmentosa (NARP); Barth syndrome; peroxisomal disorders, e.g., Zellweger Syndrome (cerebrohepatorenal syndrome), X-Linked Adrenoleukodystrophy, Refsum Disease, genetic obesity, Laron syndrome; Growth hormone insensitivity syndrome; Pituitary dwarfism II, adiponectin deficiency, CD36 deficiency; Platelet glycoprotein IV deficiency, Hyperlipoproteinemia, type I, Acatalasemia; Takahara disease, Glycogen storage disease type IV; Andersen disease, Acute alcohol sensitivity, Early childhood-onset progressive leukodystrophy, Secondary hyperammonemia, Glycogen storage disease of heart, 3-Methylcrotonylglycinuria; 3-Methylcrotonyl-CoA carboxylase deficiency, Leprechaunism; Donohue syndrome, Insulin-resistant diabetes mellitus with acanthosis nigricans; Type A insulin resistance, Pyruvate dehydrogenase complex deficiency, Pyruvate dehydrogenase E3-binding protein deficiency; and Lacticacidemia due to PDX1 deficiency.

[0506] In one embodiment, a metabolic disorder is metabolic syndrome. The term “metabolic syndrome, as used herein, is disorder that includes a clustering of components that reflect over nutrition, sedentary lifestyles, genetic factors, increasing age, and resultant excess adiposity. Metabolic syndrome includes the clustering of abdominal obesity, insulin resistance, dyslipidemia, and elevated blood pressure and is associated with other comorbidities including the prothrombotic state, proinflammatory state, nonalcoholic fatty liver disease, and reproductive disorders. The prevalence of the metabolic syndrome has increased to epidemic proportions not only in the United States and the remainder of the urbanized world but also in developing nations. Metabolic syndrome is associated with an approximate doubling of cardiovascular disease risk and a 5-fold increased risk for incident type 2 diabetes mellitus.

[0507] Abdominal adiposity (e.g., a large waist circumference (high waist-to-hip ratio)), high blood pressure, insulin resistance and dislipidemia are central to metabolic syndrome and its individual components (e.g., central obesity, fasting blood glucose (FBG)/pre-diabetes/diabetes, hypercholesterolemia, hypertriglyceridemia, and hypertension).

[0508] In one embodiment, a metabolic disorder is a disorder of carbohydrates. In one embodiment, the disorder of carbohydrates is diabetes.

[0509] As used herein, the term “diabetes” refers to a group of metabolic disorders characterized by high blood sugar (glucose) levels which result from defects in insulin secretion or action, or both. There are two most common types of diabetes, namely type 1 diabetes and type 2 diabetes, which both result from the body's inability to regulate insulin. Insulin is a hormone released by the pancreas in response to increased levels of blood sugar (glucose) in the blood.

[0510] The term “type I diabetes,” as used herein, refers to a chronic disease that occurs when the pancreas produces too little insulin to regulate blood sugar levels appropriately. Type I diabetes is also referred to as insulin-dependent diabetes mellitus, IDDM, and juvenile onset diabetes. People with type I diabetes (insulin-dependent diabetes) produce little or no insulin at all. Although about 6 percent of the United States population has some form of diabetes, only about 10 percent of all diabetics have type I disorder. Most people who have type I diabetes developed the disorder before age 30. Type 1 diabetes represents the result of a progressive autoimmune destruction of the pancreatic β-cells with subsequent insulin deficiency. More than 90 percent of the insulin-producing cells (beta cells) of the pancreas are permanently destroyed. The resulting insulin deficiency is severe, and to survive, a person with type I diabetes must regularly inject insulin.

[0511] In type II diabetes (also referred to as noninsulin-dependent diabetes mellitus, NDDM), the pancreas continues to manufacture insulin, sometimes even at higher than normal levels. However, the body develops resistance to its effects, resulting in a relative insulin deficiency. Type II diabetes may occur in children and adolescents but usually begins after age 30 and becomes progressively more common with age: about 15 percent of people over age 70 have type II diabetes. Obesity is a risk factor for type II diabetes, and 80 to 90 percent of the people with this disorder are obese.

[0512] In some embodiments, diabetes includes pre-diabetes. “Pre-diabetes” refers to one or more early diabetic conditions including impaired glucose utilization, abnormal or impaired fasting glucose levels, impaired glucose tolerance, impaired insulin sensitivity and insulin resistance. Prediabetes is a major risk factor for the development of type 2 diabetes mellitus, cardiovascular disease and mortality. Much focus has been given to developing therapeutic interventions that prevent the development of type 2 diabetes by effectively treating prediabetes.

[0513] Diabetes can be diagnosed by the administration of a glucose tolerance test. Clinically, diabetes is often divided into several basic categories. Primary examples of these categories include, autoimmune diabetes mellitus, non-insulin-dependent diabetes mellitus (type 1 NDDM), insulin-dependent diabetes mellitus (type 2 IDDM), non-autoimmune diabetes mellitus, non-insulin-dependent diabetes mellitus (type 2 NIDDM), and maturity-onset diabetes of the young (MODY). A further category, often referred to as secondary, refers to diabetes brought about by some identifiable condition which causes or allows a diabetic syndrome to develop. Examples of secondary categories include, diabetes caused by pancreatic disease, hormonal abnormalities, drug- or chemical-induced diabetes, diabetes caused by insulin receptor abnormalities, diabetes associated with genetic syndromes, and diabetes of other causes. (see e.g., Harrison's (1996) 14th ed., New York, McGraw-Hill).

[0514] In one embodiment, a metabolic disorder is a lipid metabolism disorder. As used herein, a “lipid metabolism disorder” or “disorder of lipid metabolism” refers to any disorder associated with or caused by a disturbance in lipid metabolism. This term also includes any disorder, disease or condition that can lead to hyperlipidemia, or condition characterized by abnormal elevation of levels of any or all lipids and/or lipoproteins in the blood. This term refers to an inherited disorder, such as familial hypertriglyceridemia, familial partial lipodystrophy type 1 (FPLD1), or an induced or acquired disorder, such as a disorder induced or acquired as a result of a disease, disorder or condition (e.g., renal failure), a diet, or intake of certain drugs (e.g., as a result of highly active antiretroviral therapy (HAART) used for treating, e.g., AIDS or HIV).

[0515] Additional examples of disorders of lipid metabolism include, but are not limited to, atherosclerosis, dyslipidemia, hypertriglyceridemia (including drug-induced hypertriglyceridemia, diuretic-induced hypertriglyceridemia, alcohol-induced hypertriglyceridemia, β-adrenergic blocking agent-induced hypertriglyceridemia, estrogen-induced hypertriglyceridemia, glucocorticoid-induced hypertriglyceridemia, retinoid-induced hypertriglyceridemia, cimetidine-induced hypertriglyceridemia, and familial hypertriglyceridemia), acute pancreatitis associated with hypertriglyceridemia, chylomicron syndrome, familial chylomicronemia, Apo-E deficiency or resistance, LPL deficiency or hypoactivity, hyperlipidemia (including familial combined hyperlipidemia), hypercholesterolemia, gout associated with hypercholesterolemia, xanthomatosis (subcutaneous cholesterol deposits), hyperlipidemia with heterogeneous LPL deficiency, hyperlipidemia with high LDL and heterogeneous LPL deficiency, fatty liver disease, or non-alcoholic stetohepatitis (NASH).

[0516] Cardiovascular diseases are also considered “metabolic disorders”, as defined herein. These diseases may include coronary artery disease (also called ischemic heart disease), hypertension, inflammation associated with coronary artery disease, restenosis, peripheral vascular diseases, and stroke.

[0517] Disorders related to body weight are also considered “metabolic disorders”, as defined herein. Such disorders may include obesity, hypo-metabolic states, hypothyroidism, uremia, and other conditions associated with weight gain (including rapid weight gain), weight loss, maintenance of weight loss, or risk of weight regain following weight loss.

[0518] Blood sugar disorders are further considered “metabolic disorders”, as defined herein. Such disorders may include diabetes, hypertension, and polycystic ovarian syndrome related to insulin resistance. Other exemplary disorders of metabolic disorders may also include renal transplantation, nephrotic syndrome, Cushing's syndrome, acromegaly, systemic lupus erythematosus, dysglobulinemia, lipodystrophy, glycogenosis type I, and Addison's disease.

[0519] In one embodiment, an adipose-tissue-associated disorder is primary hypertension. “Primary hypertension” is a result of environmental or genetic causes (e.g., a result of no obvious underlying medical cause).

[0520] In one embodiment, an adipose-tissue-associated disorder is secondary hypertension. “Secondary hypertension” has an identifiable underlying disorder which can be of multiple etiologies, including renal, vascular, and endocrine causes, e.g., renal parenchymal disease (e.g., polycystic kidneys, glomerular or interstitial disease), renal vascular disease (e.g., renal artery stenosis, fibromuscular dysplasia), endocrine disorders (e.g., adreno cortico steroid or mineralocorticoid excess, pheochromocytoma, hyperthyroidism or hypothyroidism, growth hormone excess, hyperparathyroidism), coarctation of the aorta, or oral contraceptive use.

[0521] In one embodiment, an adipose-tissue-associated disorder is resistant hypertension. “Resistant hypertension” is blood pressure that remains above goal (e.g., above 130 mm Hg systolic or above 90 diastolic) in spite of concurrent use of three antihypertensive agents of different classes, one of which is a thiazide diuretic. Subjects whose blood pressure is controlled with four or more medications are also considered to have resistant hypertension.

[0522] Additional diseases or conditions related to metabolic disorders that would be apparent to the skilled artisan and are within the scope of this disclosure.

[0523] “Therapeutically effective amount,” as used herein, is intended to include the amount of an RNAi agent that, when administered to a subject having a target gene-associated disease, is sufficient to effect treatment of the disease (e.g., by diminishing, ameliorating, or maintaining the existing disease or one or more symptoms of disease). The “therapeutically effective amount” may vary depending on the RNAi agent, how the agent is administered, the disease and its severity and the history, age, weight, family history, genetic makeup, the types of preceding or concomitant treatments, if any, and other individual characteristics of the subject to be treated.

[0524] “Prophylactically effective amount,” as used herein, is intended to include the amount of a RNAi agent that, when administered to a subject having a target gene-associated disorder, e.g., gout or diabetes, is sufficient to prevent or ameliorate the disease or one or more symptoms of the disease. Ameliorating the disease includes slowing the course of the disease or reducing the severity of later-developing disease. The “prophylactically effective amount” may vary depending on the RNAi agent, how the agent is administered, the degree of risk of disease, and the history, age, weight, family history, genetic makeup, the types of preceding or concomitant treatments, if any, and other individual characteristics of the patient to be treated.

[0525] A “therapeutically-effective amount” or “prophylacticaly effective amount” also includes an amount of a RNAi agent that produces some desired local or systemic effect at a reasonable benefit/risk ratio applicable to any treatment. A RNAi agent employed in the methods of the present disclosure may be administered in a sufficient amount to produce a reasonable benefit/risk ratio applicable to such treatment.

[0526] The phrase “pharmaceutically acceptable” is employed herein to refer to those compounds, materials (including salts), compositions, or dosage forms which are, within the scope of sound medical judgment, suitable for use in contact with the tissues of human subjects and animal subjects without excessive toxicity, irritation, allergic response, or other problem or complication, commensurate with a reasonable benefit/risk ratio.

[0527] The phrase “pharmaceutically-acceptable carrier” as used herein means a pharmaceutically-acceptable material, composition or vehicle, such as a liquid or solid filler, diluent, excipient, manufacturing aid (e.g., lubricant, talc magnesium, calcium or zinc stearate, or steric acid), or solvent encapsulating material, involved in carrying or transporting the subject compound from one organ, or portion of the body, to another organ, or portion of the body. Each carrier must be “acceptable” in the sense of being compatible with the other ingredients of the formulation and not injurious to the subject being treated. Some examples of materials which can serve as pharmaceutically-acceptable carriers include: (1) sugars, such as lactose, glucose and sucrose; (2) starches, such as corn starch and potato starch; (3) cellulose, and its derivatives, such as sodium carboxymethyl cellulose, ethyl cellulose and cellulose acetate; (4) powdered tragacanth; (5) malt; (6) gelatin; (7) lubricating agents, such as magnesium state, sodium lauryl sulfate and talc; (8) excipients, such as cocoa butter and suppository waxes; (9) oils, such as peanut oil, cottonseed oil, safflower oil, sesame oil, olive oil, corn oil and soybean oil; (10) glycols, such as propylene glycol; (11) polyols, such as glycerin, sorbitol, mannitol and polyethylene glycol; (12) esters, such as ethyl oleate and ethyl laurate; (13) agar; (14) buffering agents, such as magnesium hydroxide and aluminum hydroxide; (15) alginic acid; (16) pyrogen-free water; (17) isotonic saline; (18) Ringer's solution; (19) ethyl alcohol; (20) pH buffered solutions; (21) polyesters, polycarbonates or polyanhydrides; (22) bulking agents, such as polypeptides and amino acids (23) serum component, such as serum albumin, HDL and LDL; and (22) other non-toxic compatible substances employed in pharmaceutical formulations. Pharmaceutically acceptable carriers for pulmonary delivery are known in the art and will vary depending on the desired location for deposition of the agent, e.g., upper or lower respiratory system, and the type of device to be used for delivery, e.g., sprayer, nebulizer, dry powder inhaler.

[0528] The term “sample,” as used herein, includes a collection of similar fluids, cells, or tissues isolated from a subject, as well as fluids, cells, or tissues present within a subject. Examples of biological fluids include blood, serum and serosal fluids, plasma, bronchial fluids, sputum, cerebrospinal fluid, ocular fluids, lymph, urine, saliva, sputum, and the like. Tissue samples may include samples from tissues, organs or localized regions. For example, samples may be derived from particular organs, parts of organs, or fluids or cells within those organs.

### II. RNAi Agents of the Invention

[0529] Described herein are RNAi agents comprising one or more C22 hydrocarbon chains, e.g., saturated or unsaturated, conjugated to one or more internal positions on at least one strand which inhibit the expression of a target gene in muscle tissue or an adipose tissue. In one embodiment, the RNAi agent includes double stranded ribonucleic acid (dsRNA) molecules for inhibiting the expression of a target gene in a cell, such as a cell within a subject, e.g., a mammal, such as a human, e.g., a subject having a target gene-associated disorder, e.g., a muscle tissue disease or an adipose tissue disease, or a subject at risk of a target gene-associated disease, e.g., a muscle tissue disease or an adipose tissue disease.

[0530] The dsRNA includes an antisense strand having a region of complementarity which is complementary to at least a part of a target RNA, e.g., an mRNA formed in the expression of a target gene. The region of complementarity is about 15-30 nucleotides or less in length. Upon contact with a cell expressing the target gene, the RNAi agent inhibits the expression of the target gene (e.g., a human gene, a primate gene, a non-primate gene) by at least 50% as assayed by, for example, a PCR or branched DNA (bDNA)-based method, or by a protein-based method, such as by immunofluorescence analysis, using, for example, western blotting, flowcytometric techniques, or histology based method such as immunohistochemistry or in situ hybridization. In certain embodiments, inhibition of expression is by at least 50% as assayed by the Dual-Glo lucifierase assay in Example 1 where the siRNA is at a 10 nM concentration.

[0531] A dsRNA includes two RNA strands that are complementary and hybridize to form a duplex structure under conditions in which the dsRNA will be used. One strand of a dsRNA (the antisense strand) includes a region of complementarity that is substantially complementary, and generally fully complementary, to a target sequence. For example, the target sequence can be derived from the sequence of an mRNA formed during the expression of a target gene. The other strand (the sense strand) includes a region that is complementary to the antisense strand, such that the two strands hybridize and form a duplex structure when combined under suitable conditions. As described elsewhere herein and as known in the art, the complementary sequences of a dsRNA can also be contained as self-complementary regions of a single nucleic acid molecule, as opposed to being on separate oligonucleotides.

[0532] Generally, the duplex structure is 15 to 30 base pairs in length, e.g., 15-29, 15-28, 15-27, 15-26, 15-25, 15-24, 15-23, 15-22, 15-21, 15-20, 15-19, 15-18, 15-17, 18-30, 18-29, 18-28, 18-27, 18-26, 18-25, 18-24, 18-23, 18-22, 18-21, 18-20, 19-30, 19-29, 19-28, 19-27, 19-26, 19-25, 19-24, 19-23, 19-22, 19-21, 19-20, 20-30, 20-29, 20-28, 20-27, 20-26, 20-25, 20-24,20-23, 20-22, 20-21, 21-30, 21-29, 21-28, 21-27, 21-26, 21-25, 21-24, 21-23, or 21-22 base pairs in length. In certain embodiments, the duplex structure is 18 to 25 base pairs in length, e.g., 18-25, 18-24, 18-23, 18-22, 18-21, 18-20, 19-25, 19-24, 19-23, 19-22, 19-21, 19-20, 20-25, 20-24,20-23, 20-22, 20-21, 21-25, 21-24, 21-23, 21-22, 22-25, 22-24, 22-23, 23-25, 23-24 or 24-25 base pairs in length, for example, 19-21 basepairs in length. Ranges and lengths intermediate to the above recited ranges and lengths are also contemplated to be part of the disclosure.

[0533] Similarly, the region of complementarity to the target sequence is 15 to 30 nucleotides in length, e.g., 15-29, 15-28, 15-27, 15-26, 15-25, 15-24, 15-23, 15-22, 15-21, 15-20, 15-19, 15-18, 15-17, 18-30, 18-29, 18-28, 18-27, 18-26, 18-25, 18-24, 18-23, 18-22, 18-21, 18-20, 19-30, 19-29, 19-28, 19-27, 19-26, 19-25, 19-24, 19-23, 19-22, 19-21, 19-20, 20-30, 20-29, 20-28, 20-27, 20-26, 20-25, 20-24,20-23, 20-22, 20-21, 21-30, 21-29, 21-28, 21-27, 21-26, 21-25, 21-24, 21-23, or 21-22 nucleotides in length, for example 19-23 nucleotides in length or 21-23 nucleotides in length. Ranges and lengths intermediate to the above recited ranges and lengths are also contemplated to be part of the disclosure.

[0534] In some embodiments, the dsRNA is 15 to 23 nucleotides in length, or 25 to 30 nucleotides in length. In general, the dsRNA is long enough to serve as a substrate for the Dicer enzyme. For example, it is well known in the art that dsRNAs longer than about 21-23 nucleotides can serve as substrates for Dicer. As the ordinarily skilled person will also recognize, the region of an RNA targeted for cleavage will most often be part of a larger RNA molecule, often an mRNA molecule. Where relevant, a “part” of an mRNA target is a contiguous sequence of an mRNA target of sufficient length to allow it to be a substrate for RNAi-directed cleavage (i.e., cleavage through a RISC pathway).

[0535] One of skill in the art will also recognize that the duplex region is a primary functional portion of a dsRNA, e.g., a duplex region of about 15 to 36 base pairs, e.g., 15-36, 15-35, 15-34, 15-33, 15-32, 15-31, 15-30, 15-29, 15-28, 15-27, 15-26, 15-25, 15-24, 15-23, 15-22, 15-21, 15-20, 15-19, 15-18, 15-17, 18-30, 18-29, 18-28, 18-27, 18-26, 18-25, 18-24, 18-23, 18-22, 18-21, 18-20, 19-30, 19-29, 19-28, 19-27, 19-26, 19-25, 19-24, 19-23, 19-22, 19-21, 19-20, 20-30, 20-29, 20-28, 20-27, 20-26, 20-25, 20-24,20-23, 20-22, 20-21, 21-30, 21-29, 21-28, 21-27, 21-26, 21-25, 21-24, 21-23, or 21-22 base pairs, for example, 19-21 base pairs. Thus, in one embodiment, to the extent that it becomes processed to a functional duplex, of e.g., 15-30 base pairs, that targets a desired RNA for cleavage, an RNA molecule or complex of RNA molecules having a duplex region greater than 30 base pairs is a dsRNA. Thus, an ordinarily skilled artisan will recognize that in one embodiment, a miRNA is a dsRNA. In another embodiment, a dsRNA is not a naturally occurring miRNA. In another embodiment, a RNAi agent useful to target gene expression is not generated in the target cell by cleavage of a larger dsRNA.

[0536] A dsRNA as described herein can further include one or more single-stranded nucleotide overhangs e.g., 1, 2, 3, or 4 nucleotides. A nucleotide overhang can comprise or consist of a nucleotide/nucleoside analog, including a deoxynucleotide/nucleoside. The overhang(s) can be on the sense strand, the antisense strand or any combination thereof. Furthermore, the nucleotide(s) of an overhang can be present on the 5′-end, 3′-end or both ends of either an antisense or sense strand of a dsRNA. In certain embodiments, longer, extended overhangs are possible.

[0537] A dsRNA can be synthesized by standard methods known in the art as further discussed below, e.g., by use of an automated DNA synthesizer, such as are commercially available from, for example, Biosearch, Applied Biosystems, Inc.

[0538] iRNA compounds of the invention may be prepared using a two-step procedure. First, the individual strands of the double stranded RNA molecule are prepared separately. Then, the component strands are annealed. The individual strands of the siRNA compound can be prepared using solution-phase or solid-phase organic synthesis or both. Organic synthesis offers the advantage that the oligonucleotide strands comprising unnatural or modified nucleotides can be easily prepared. Single-stranded oligonucleotides of the invention can be prepared using solution-phase or solid-phase organic synthesis or both.

[0539] An iRNA can be produced, e.g., in bulk, by a variety of methods. Exemplary methods include: organic synthesis and RNA cleavage, e.g., in vitro cleavage.

[0540] An iRNA can be made by separately synthesizing a single stranded RNA molecule, or each respective strand of a double-stranded RNA molecule, after which the component strands can then be annealed.

[0541] A large machine, e.g., the OligoPilot II from Pharmacia Biotec AB (Uppsala Sweden), can be used to produce a large amount of a particular RNA strand for a given siRNA. The OligoPilotII reactor can efficiently couple a nucleotide using only a 1.5 molar excess of a phosphoramidite nucleotide. To make an RNA strand, ribonucleotides amidites are used. Standard cycles of monomer addition can be used to synthesize the 21 to 23 nucleotide strand for the siRNA. Typically, the two complementary strands are produced separately and then annealed, e.g., after release from the solid support and deprotection.

[0542] Organic synthesis can be used to produce a discrete iRNA species. The complementary of the species to a target gene can be precisely specified. For example, the species may be complementary to a region that includes a polymorphism, e.g., a single nucleotide polymorphism. Further the location of the polymorphism can be precisely defined. In some embodiments, the polymorphism is located in an internal region, e.g., at least 4, 5, 7, or 9 nucleotides from one or both of the termini.

[0543] In one embodiment, dsRNA is cleaved in vitro into siRNAs, for example, using a Dicer or comparable RNAse III-based activity. For example, the dsRNA can be incubated in an in vitro extract from Drosophila or using purified components, e.g., a purified RNAse or RISC complex (RNA-induced silencing complex). See, e.g., Ketting et al. Genes Dev 2001 Oct. 15; 15(20):2654-9 and Hammond Science 2001 Aug. 10; 293(5532):1146-50.

[0544] dsRNA cleavage generally produces a plurality of siRNA species, each being a particular 21 to 23 nucleotide fragment of a source dsRNA molecule. For example, siRNAs that include sequences complementary to overlapping regions and adjacent regions of a source dsiRNA molecule may be present.

[0545] Regardless of the method of synthesis, the dsRNA preparation can be prepared in a solution (e.g., an aqueous or organic solution) that is appropriate for formulation. For example, the dsRNA preparation can be precipitated and redissolved in pure double-distilled water, and lyophilized. The dried dsRNA can then be resuspended in a solution appropriate for the intended formulation process.

[0546] In one aspect, a dsRNA of the disclosure includes at least two nucleotide sequences, a sense sequence and an antisense sequence.

[0547] In one embodiment, the dsRNA of the disclosure targets the ADRB1 gene. The sense strand sequence for ADRB1 may be selected from the group of sequences provided in any one of Tables 2-5, 7B, and 7C, and the corresponding nucleotide sequence of the antisense strand of the sense strand may be selected from the group of sequences of any one of Tables 2-5, 7B, and 7C. In this aspect, one of the two sequences is complementary to the other of the two sequences, with one of the sequences being substantially complementary to a sequence of an mRNA generated in the expression of a target gene. As such, in this aspect, a dsRNA will include two oligonucleotides, where one oligonucleotide is described as the sense strand (passenger strand) in any one of Tables 2-5, 7B, and 7C, and the second oligonucleotide is described as the corresponding antisense strand (guide strand) of the sense strand in any one of Tables 2-5, 7B, and 7C for ADRB1.

[0548] In one embodiment, the dsRNA of the disclosure targets the Leptin (LEP) gene. The sense strand sequence for LEP may be selected from the group of sequences provided in any one of Tables 9-16, and the corresponding nucleotide sequence of the antisense strand of the sense strand may be selected from the group of sequences of any one of Tables 9-16. In this aspect, one of the two sequences is complementary to the other of the two sequences, with one of the sequences being substantially complementary to a sequence of an mRNA generated in the expression of a target gene. As such, in this aspect, a dsRNA will include two oligonucleotides, where one oligonucleotide is described as the sense strand (passenger strand) in any one of Tables 9-16, and the second oligonucleotide is described as the corresponding antisense strand (guide strand) of the sense strand in any one of Tables 9-16 for LEP.

[0549] In one embodiment, the dsRNA of the disclosure targets the PLN gene. The sense strand sequence for PLN may be selected from the group of sequences provided in any one of Tables 19-22, and the corresponding nucleotide sequence of the antisense strand of the sense strand may be selected from the group of sequences of any one of Tables 19-22. In this aspect, one of the two sequences is complementary to the other of the two sequences, with one of the sequences being substantially complementary to a sequence of an mRNA generated in the expression of a target gene. As such, in this aspect, a dsRNA will include two oligonucleotides, where one oligonucleotide is described as the sense strand (passenger strand) in any one of Tables 19-22, and the second oligonucleotide is described as the corresponding antisense strand (guide strand) of the sense strand in any one of Tables 19-22 for PLN.

[0550] In one embodiment, the dsRNA of the disclosure targets the CAMK2D gene. The sense strand sequence for CAMK2D may be selected from the group of sequences provided in any one of Tables 23-26, and the corresponding nucleotide sequence of the antisense strand of the sense strand may be selected from the group of sequences of any one of Tables 23-26. In this aspect, one of the two sequences is complementary to the other of the two sequences, with one of the sequences being substantially complementary to a sequence of an mRNA generated in the expression of a target gene. As such, in this aspect, a dsRNA will include two oligonucleotides, where one oligonucleotide is described as the sense strand (passenger strand) in any one of Tables 23-26, and the second oligonucleotide is described as the corresponding antisense strand (guide strand) of the sense strand in any one of Tables 23-26 for CAMK2D.

[0551] In one embodiment, the substantially complementary sequences of the dsRNA are contained on separate oligonucleotides. In another embodiment, the substantially complementary sequences of the dsRNA are contained on a single oligonucleotide.

[0552] It will be understood that, although the sequences provided herein are described as modified or conjugated sequences, the RNA of the RNAi agent of the disclosure e.g., a dsRNA of the disclosure, may comprise any one of the sequences set forth in any one of Tables 2-5, 7B, 7C, 9-16, and 19-26 that is un-modified, un-conjugated, or modified or conjugated differently than described therein. One or more lipophilic ligands or one or more GalNAc ligands can be included in any of the positions of the RNAi agents provided in the instant application.

[0553] The skilled person is well aware that dsRNAs having a duplex structure of about 20 to 23 base pairs, e.g., 21, base pairs have been hailed as particularly effective in inducing RNA interference (Elbashir et al., (2001) EMBO J., 20:6877-6888). However, others have found that shorter or longer RNA duplex structures can also be effective (Chu and Rana (2007) RNA 14:1714-1719; Kim et al. (2005) Nat Biotech 23:222-226). In the embodiments described above, by virtue of the nature of the oligonucleotide sequences provided herein, dsRNAs described herein can include at least one strand of a length of minimally 21 nucleotides. It can be reasonably expected that shorter duplexes minus only a few nucleotides on one or both ends can be similarly effective as compared to the dsRNAs described above. Hence, dsRNAs having a sequence of at least 15, 16, 17, 18, 19, 20, or more contiguous nucleotides derived from one of the sequences provided herein, and differing in their ability to inhibit the expression of a target gene by not more than 10, 15, 20, 25, or 30% inhibition from a dsRNA comprising the full sequence using the in vitro assay with Cos 7 and a 10 nM concentration of the RNA agent and the PCR assay as provided in the examples herein, are contemplated to be within the scope of the present disclosure.

[0554] In addition, the RNAs described herein identify a site(s) in a target gene transcript that is susceptible to RISC-mediated cleavage. As such, the present disclosure further features RNAi agents that target within this site(s). As used herein, a RNAi agent is said to target within a particular site of an RNA transcript if the RNAi agent promotes cleavage of the transcript anywhere within that particular site. Such a RNAi agent will generally include at least about 15 contiguous nucleotides, such as at least 19 nucleotides, from one of the sequences provided herein coupled to additional nucleotide sequences taken from the region contiguous to the selected sequence in a target gene.

[0555] An RNAi agent as described herein can contain one or more mismatches to the target sequence. In one embodiment, an RNAi agent as described herein contains no more than 3 mismatches (i.e., 3, 2, 1, or 0 mismatches). In one embodiment, an RNAi agent as described herein contains no more than 2 mismatches. In one embodiment, an RNAi agent as described herein contains no more than 1 mismatch. In one embodiment, an RNAi agent as described herein contains 0 mismatches. In certain embodiments, if the antisense strand of the RNAi agent contains mismatches to the target sequence, the mismatch can optionally be restricted to be within the last 5 nucleotides from either the 5′- or 3′-end of the region of complementarity. For example, in such embodiments, for a 23 nucleotide RNAi agent, the strand which is complementary to a region of a target gene generally does not contain any mismatch within the central 13 nucleotides. The methods described herein or methods known in the art can be used to determine whether an RNAi agent containing a mismatch to a target sequence is effective in inhibiting the expression of a target gene. Consideration of the efficacy of RNAi agents with mismatches in inhibiting expression of a target gene is important, especially if the particular region of complementarity in a target gene is known to mutate.

### III. C₂₂ Hydrocarbon Chains

[0556] As described herein, conjugating a C₂₂ hydrocarbon chain, e.g., saturated or unsaturated, to one or more internal position(s) of the dsRNA agent increases lipophilicity of the dsRNA agent and provides optimal hydrophobicity for the enhanced in vivo delivery of dsRNA to muscle tissue, e.g., skeletal muscle tissue or cardiac muscle tissue, or adipose tissue.

[0557] One way to characterize lipophilicity is by the octanol-water partition coefficient, log K_{ow}, where K_{ow} is the ratio of a chemical's concentration in the octanol-phase to its concentration in the aqueous phase of a two-phase system at equilibrium. The octanol-water partition coefficient is a laboratory-measured property of a substance. However, it may also be predicted by using coefficients attributed to the structural components of a chemical which are calculated using first-principle or empirical methods (see, for example, Tetko et al., J Chem. Inf Comput. Sci. 41:1407-21 (2001), which is incorporated herein by reference in its entirety). It provides a thermodynamic measure of the tendency of the substance to prefer a non-aqueous or oily milieu rather than water (i.e. its hydrophilic/lipophilic balance). In principle, a chemical substance is lipophilic in character when its log K_{ow} exceeds 0. Typically, the lipophilic moiety possesses a log K_{ow} exceeding 1, exceeding 1.5, exceeding 2, exceeding 3, exceeding 4, exceeding 5, or exceeding 10. For instance, the log K_{ow} of 6-amino hexanol, for instance, is predicted to be approximately 0.7. Using the same method, the log K_{ow} of cholesteryl N-(hexan-6-ol) carbamate is predicted to be 10.7.

[0558] The lipophilicity of a molecule can change with respect to the functional group it carries. For instance, adding a hydroxyl group or amine group to the end of a C₂₂ hydrocarbon chain can increase or decrease the partition coefficient (e.g., log K_{ow}) value of the C₂₂ hydrocarbon chain.

[0559] Alternatively, the hydrophobicity of the dsRNA agent, conjugated to one or more C₂₂ hydrocarbon chains, can be measured by its protein binding characteristics. For instance, the unbound fraction in the plasma protein binding assay of the dsRNA agent can be determined to positively correlate to the relative hydrophobicity of the dsRNA agent, which can positively correlate to the silencing activity of the dsRNA agent.

[0560] In one embodiment, the plasma protein binding assay determined is an electrophoretic mobility shift assay (EMSA) using human serum albumin protein. The hydrophobicity of the dsRNA agent, measured by fraction of unbound dsRNA in the binding assay, exceeds 0.15, exceeds 0.2, exceeds 0.25, exceeds 0.3, exceeds 0.35, exceeds 0.4, exceeds 0.45, or exceeds 0.5 for an enhanced in vivo delivery of siRNA.

[0561] In certain embodiments, the one or more C₂₂ hydrocarbon chains is an aliphatic, alicyclic, or polyalicyclic compound is an aliphatic, cyclic such as alicyclic, or polycyclic such as polyalicyclic compound. The hydrocarbon chain may comprise various substituents and/or one or more heteroatoms, such as an oxygen or nitrogen atom.

[0562] The one or more C₂₂ hydrocarbon chains may be attached to the iRNA agent by any method known in the art, including via a functional grouping already present in the lipophilic moiety or introduced into the iRNA agent, such as a hydroxy group (e.g., —CO—CH₂—OH). The functional groups already present in the C₂₂ hydrocarbon chain or introduced into the dsRNA agent include, but are not limited to, hydroxyl, amine, carboxylic acid, sulfonate, phosphate, thiol, azide, and alkyne.

[0563] Conjugation of the dsRNA agent and the C₂₂ hydrocarbon chain may occur, for example, through formation of an ether or a carboxylic or carbamoyl ester linkage between the hydroxy and an alkyl group R—, an alkanoyl group RCO— or a substituted carbamoyl group RNHCO—. The alkyl group R may be cyclic (e.g., cyclohexyl) or acyclic (e.g., straight-chained or branched; and saturated or unsaturated). Alkyl group R may be a butyl, pentyl, hexyl, heptyl, octyl, nonyl, decyl, undecyl, dodecyl, tridecyl, tetradecyl, pentadecyl, hexadecyl, heptadecyl or octadecyl group, or the like.

[0564] In some embodiments, the C₂₂ hydrocarbon chain is conjugated to the dsRNA agent via a linker a linker containing an ether, thioether, urea, carbonate, amine, amide, maleimide-thioether, disulfide, phosphodiester, sulfonamide linkage, a product of a click reaction (e.g., a triazole from the azide-alkyne cycloaddition), or carbamate.

[0565] In one embodiment, the one or more C₂₂ hydrocarbon chains is a C₂₂ acid, e.g., the C₂₂ acid is selected from the group consisting of docosanoic acid, 6-octyltetradecanoic acid, 10-hexylhexadecanoic acid, all-cis-7,10,13,16,19-docosapentaenoic acid, all-cis-4,7,10,13,16,19-docosahexaenoic acid, all-cis-13,16-docosadienoic acid, all-cis-7,10,13,16-docosatetraenoic acid, all-cis-4,7,10,13,16-docosapentaenoic acid, and cis-13-docosenoic acid.

[chemical structure]

[0566] In one embodiment, the one or more C₂₂ hydrocarbon chains is a C₂₂ alcohol, e.g. the C₂₂ alcohol is selected from the group consisting of 1-docosanol, 6-octyltetradecan-1-ol, 10-hexylhexadecan-1-ol, cis-13-docosen-1-ol, docosan-9-ol, docosan-2-ol, docosan-10-ol, docosan-11-ol, and cis-4,7,10,13,16,19-docosahexanol.

[chemical structure]

[0567] In one embodiment the one or more C₂₂ hydrocarbon chains is not cis-4,7,10,13,16,19-docosahexanoic acid. In one embodiment, the one or more C₂₂ hydrocarbon chains is not cis-4,7,10,13,16,19-docosahexanol. In one embodiment, the one or more C₂₂ hydrocarbon chains is not cis-4,7,10,13,16,19-docosahexanoic acid and is not cis-4,7,10,13,16,19-docosahexanol.

[0568] In one embodiment, the one or more C₂₂ hydrocarbon chains is a C₂₂ amide, e.g., the C₂₂ amide is selected from the group consisting of (E)-Docos-4-enamide, (E)-Docos-5-enamide, (Z)-Docos-9-enamide, (E)-Docos-11-enamide, 12-Docosenamide, (Z)-Docos-13-enamide, (Z)—N-Hydroxy-13-docoseneamide, (E)-Docos-14-enamide, 6-cis-Docosenamide, 14-Docosenamide Docos-11-enamide, (4E, 13E)-Docosa-4,13-dienamide, and (5E, 13E)-Docosa-5,13-dienamide.

[0569] In certain embodiments, more than one C₂₂ hydrocarbon chains can be incorporated into the double-strand iRNA agent, particularly when the C₂₂ hydrocarbon chains has a low lipophilicity or hydrophobicity. In one embodiment, two or more C₂₂ hydrocarbon chains are incorporated into the same strand of the double-strand iRNA agent. In one embodiment, each strand of the double-strand iRNA agent has one or more C₂₂ hydrocarbon chains incorporated. In one embodiment, two or more C₂₂ hydrocarbon chains are incorporated into the same position (i.e., the same nucleobase, same sugar moiety, or same internucleosidic linkage) of the double-stranded iRNA agent. This can be achieved by, e.g., conjugating the two or more saturated or unsaturated C₂₂ hydrocarbon chains via a carrier, and/or conjugating the two or more C₂₂ hydrocarbon chains via a branched linker, and/or conjugating the two or more C₂₂ hydrocarbon chains via one or more linkers, with one or more linkers linking the C₂₂ hydrocarbon chains consecutively.

[0570] The one or more C₂₂ hydrocarbon chains may be conjugated to the iRNA agent via a direct attachment to the ribosugar of the iRNA agent. Alternatively, the one or more C₂₂ hydrocarbon chains may be conjugated to the double-strand iRNA agent via a linker or a carrier.

[0571] In certain embodiments, the one or more C₂₂ hydrocarbon chains may be conjugated to the iRNA agent via one or more linkers (tethers).

[0572] In one embodiment, the one or more C₂₂ hydrocarbon chains is conjugated to the dsRNA agent via a linker containing an ether, thioether, urea, carbonate, amine, amide, maleimide-thioether, disulfide, phosphodiester, sulfonamide linkage, a product of a click reaction (e.g., a triazole from the azide-alkyne cycloaddition), or carbamate.

### A. Linkers Tethers

[0573] Linkers/Tethers are connected to the one or more C₂₂ hydrocarbon chains at a “tethering attachment point (TAP).” Linkers/Tethers may include any C₁-C₁₀₀ carbon-containing moiety, (e.g. C₁-C₇₅, C₁-C₅₀, C₁-C₂₀, C₁-C₁₀; C₁, C₂, C₃, C₄, C₅, C₆, C₇, C₈, C₉, or C₁₀), and may have at least one nitrogen atom. In certain embodiments, the nitrogen atom forms part of a terminal amino or amido (NHC(O)—) group on the linker/tether, which may serve as a connection point for the lipophilic moiety. Non-limited examples of linkers/tethers (underlined) include TAP-(CH₂)ₙNH—; TAP-C(O)(CH₂)ₙNH—; TAP-NR″″(CH₂)ₙNH—, TAP-C(O)—(CH₂)ₙ—C(O)—; TAP-C(O)—(CH₂)ₙ—C(O)O—; TAP-C(O)—O—; TAP-C(O)—(CH₂)ₙ—NH—C(O)—; TAP-C(O)—(CH₂A; TAP-C(O)—NH—; TAP-C(O)—; TAP-(CH₂)ₙ—C(O)—; TAP-(CH₂)ₙ—C(O)O—; TAP-(CH₂)ₙ—; or TAP-(CH₂)ₙ—NH—C(O)—; in which n is 1-20 (e.g., 1, 2, 3, 4, 5, 6, 7, 8, 9, 10, 11, 12, 13, 14, 15, 16, 17, 18, 19, or 20) and R″″ is C₁-C₆ alkyl. Preferably, n is 5, 6, or 11. In other embodiments, the nitrogen may form part of a terminal oxyamino group, e.g., —ONH₂, or hydrazino group, —NHNH₂. The linker/tether may optionally be substituted, e.g., with hydroxy, alkoxy, perhaloalkyl, and/or optionally inserted with one or more additional heteroatoms, e.g., N, O, or S. Preferred tethered ligands may include, e.g., TAP-(CH₂)ₙNH(LIGAND); TAP-C(O)(CH₂)ₙNH(LIGAND); TAP-NR″″(CH₂), NH(LIGAND); TAP-(CH₂)ₙONH(LIGAND); TAP-C(O)(CH₂)ₙONH(LIGAND); TAP-NR″″(CH₂)ₙONH(LIGAND); TAP-(CH₂)ₙNHNH₂(LIGAND), TAP-C(O)(CH₂)ₙNHNH₂(LIGAND); TAP-NR″″(CH₂)ₙNHNH₂(LIGAND); TAP-C(O)—(CH₂)ₙ—C(O)(LIGAND); TAP-C(O)—(CH₂)ₙ—C(O)O(LIGAND); TAP-C(O)—O(LIGAND); TAP-C(O)—(CH₂)ₙ—NH—C(O)(LIGAND); TAP-C(O)—(CH₂)ₙ(LIGAND); TAP-C(O)—NH(LIGAND); TAP-C(O)(LIGAND); TAP-(CH₂)ₙ—C(O) (LIGAND); TAP-(CH₂)ₙ—C(O)O(LIGAND); TAP-(CH₂)ₙ(LIGAND); or TAP-(CH₂)ₙ—NH—C(O)(LIGAND). In some embodiments, amino terminated linkers/tethers (e.g., NH₂, ONH₂, NH₂NH₂) can form an imino bond (i.e., C═N) with the ligand. In some embodiments, amino terminated linkers/tethers (e.g., NH₂, ONH₂, NH₂NH₂) can acylated, e.g., with C(O)CF₃.

[0574] In some embodiments, the linker/tether can terminate with a mercapto group (i.e., SH) or an olefin (e.g., CH═CH₂). For example, the tether can be TAP-(CH₂)ₙ—SH, TAP-C(O)(CH₂)ₙSH, TAP-(CH₂)ₙ—(CH═CH₂), or TAP-C(O)(CH₂)ₙ(CH═CH₂), in which n can be as described elsewhere. The tether may optionally be substituted, e.g., with hydroxy, alkoxy, perhaloalkyl, and/or optionally inserted with one or more additional heteroatoms, e.g., N, O, or S. The double bond can be cis or trans or E or Z.

[0575] In other embodiments, the linker/tether may include an electrophilic moiety, preferably at the terminal position of the linker/tether. Exemplary electrophilic moieties include, e.g., an aldehyde, alkyl halide, mesylate, tosylate, nosylate, or brosylate, or an activated carboxylic acid ester, e.g. an NHS ester, or a pentafluorophenyl ester. Preferred linkers/tethers (underlined) include TAP-(CH₂)ₙCHO; TAP-C(O)(CH₂)ₙCHO; or TAP-NR″″(CH₂)ₙCHO, in which n is 1-6 and R″″ is C₁-C₆ alkyl; or TAP-(CH₂)ₙC(O)ONHS; TAP-C(O)(CH₂), C(O)ONHS; or TAP-NR′″″(CH₂)ₙC(O)ONHS, in which n is 1-6 and R″″ is C₁-C₆ alkyl; TAP-(CH₂)ₙC(O)OC₆F₅; TAP-C(O)(CH₂)ₙC(O) OC₆F₅; or TAP-NR″″(CH₂)ₙC(O) OC₆F₅, in which n is 1-11 and R″″ is C₁-C₆ alkyl; or —(CH₂)ₙCH₂LG; TAP-C(O)(CH₂)ₙCH₂LG; or TAP-NR″″(CH₂)ₙCH₂LG, in which n can be as described elsewhere and R″″ is C₁-C₆ alkyl (LG can be a leaving group, e.g., halide, mesylate, tosylate, nosylate, brosylate). Tethering can be carried out by coupling a nucleophilic group of a ligand, e.g., a thiol or amino group with an electrophilic group on the tether.

[0576] In other embodiments, it can be desirable for the monomer to include a phthalimido group (K)

[chemical structure]

at the terminal position of the linker/tether.

[0577] In other embodiments, other protected amino groups can be at the terminal position of the linker/tether, e.g., alloc, monomethoxy trityl (MMT), trifluoroacetyl, Fmoc, or aryl sulfonyl (e.g., the aryl portion can be ortho-nitrophenyl or ortho, para-dinitrophenyl).

[0578] Any of the linkers/tethers described herein may further include one or more additional linking groups, e.g., —O—(CH₂)ₙ—, —(CH₂)ₙ—SS—, —(CH₂)ₙ—, or —(CH═CH)—.

### B. Cleavable Linkers/Tethers

[0579] In some embodiments, at least one of the linkers/tethers can be a redox cleavable linker, an acid cleavable linker, an esterase cleavable linker, a phosphatase cleavable linker, or a peptidase cleavable linker.

[0580] In one embodiment, at least one of the linkers/tethers can be a reductively cleavable linker (e.g., a disulfide group).

[0581] In one embodiment, at least one of the linkers/tethers can be an acid cleavable linker (e.g., a hydrazone group, an ester group, an acetal group, or a ketal group).

[0582] In one embodiment, at least one of the linkers/tethers can be an esterase cleavable linker (e.g., an ester group).

[0583] In one embodiment, at least one of the linkers/tethers can be a phosphatase cleavable linker (e.g., a phosphate group).

[0584] In one embodiment, at least one of the linkers/tethers can be a peptidase cleavable linker (e.g., a peptide bond).

[0585] Cleavable linking groups are susceptible to cleavage agents, e.g., pH, redox potential or the presence of degradative molecules. Generally, cleavage agents are more prevalent or found at higher levels or activities inside cells than in serum or blood. Examples of such degradative agents include: redox agents which are selected for particular substrates or which have no substrate specificity, including, e.g., oxidative or reductive enzymes or reductive agents such as mercaptans, present in cells, that can degrade a redox cleavable linking group by reduction; esterases; endosomes or agents that can create an acidic environment, e.g., those that result in a pH of five or lower; enzymes that can hydrolyze or degrade an acid cleavable linking group by acting as a general acid, peptidases (which can be substrate specific), and phosphatases.

[0586] A cleavable linkage group, such as a disulfide bond can be susceptible to pH. The pH of human serum is 7.4, while the average intracellular pH is slightly lower, ranging from about 7.1-7.3. Endosomes have a more acidic pH, in the range of 5.5-6.0, and lysosomes have an even more acidic pH at around 5.0. Some tethers will have a linkage group that is cleaved at a preferred pH, thereby releasing the iRNA agent from a ligand (e.g., a targeting or cell-permeable ligand, such as cholesterol) inside the cell, or into the desired compartment of the cell.

[0587] A chemical junction (e.g., a linking group) that links a ligand to an iRNA agent can include a disulfide bond. When the iRNA agent/ligand complex is taken up into the cell by endocytosis, the acidic environment of the endosome will cause the disulfide bond to be cleaved, thereby releasing the iRNA agent from the ligand (Quintana et al., Pharm Res. 19:1310-1316, 2002; Patri et al., Curr. Opin. Curr. Biol. 6:466-471, 2002). The ligand can be a targeting ligand or a second therapeutic agent that may complement the rapeutic effects of the iRNA agent.

[0588] A tether can include a linking group that is cleavable by a particular enzyme. The type of linking group incorporated into a tether can depend on the cell to be targeted by the iRNA agent. For example, an iRNA agent that targets an mRNA in liver cells can be conjugated to a tether that includes an ester group. Liver cells are rich in esterases, and therefore the tether will be cleaved more efficiently in liver cells than in cell types that are not esterase-rich. Cleavage of the tether releases the iRNA agent from a ligand that is attached to the distal end of the tether, thereby potentially enhancing silencing activity of the iRNA agent. Other cell-types rich in esterases include cells of the lung, renal cortex, and testis.

[0589] Tethers that contain peptide bonds can be conjugated to iRNA agents target to cell types rich in peptidases, such as liver cells and synoviocytes. For example, an iRNA agent targeted to synoviocytes, such as for the treatment of an inflammatory disease (e.g., rheumatoid arthritis), can be conjugated to a tether containing a peptide bond.

[0590] In general, the suitability of a candidate cleavable linking group can be evaluated by testing the ability of a degradative agent (or condition) to cleave the candidate linking group. It will also be desirable to also test the candidate cleavable linking group for the ability to resist cleavage in the blood or when in contact with other non-target tissue, e.g., tissue the iRNA agent would be exposed to when administered to a subject. Thus one can determine the relative susceptibility to cleavage between a first and a second condition, where the first is selected to be indicative of cleavage in a target cell and the second is selected to be indicative of cleavage in other tissues or biological fluids, e.g., blood or serum. The evaluations can be carried out in cell free systems, in cells, in cell culture, in organ or tissue culture, or in whole animals. It may be useful to make initial evaluations in cell-free or culture conditions and to confirm by further evaluations in whole animals. In preferred embodiments, useful candidate compounds are cleaved at least 2, 4, 10 or 100 times faster in the cell (or under in vitro conditions selected to mimic intracellular conditions) as compared to blood or serum (or under in vitro conditions selected to mimic extracellular conditions).

### C. Redox Cleavable Linking Groups

[0591] One class of cleavable linking groups are redox cleavable linking groups that are cleaved upon reduction or oxidation. An example of reductively cleavable linking group is a disulphide linking group (—S—S—). To determine if a candidate cleavable linking group is a suitable “reductively cleavable linking group,” or for example is suitable for use with a particular iRNA moiety and particular targeting agent one can look to methods described herein. For example, a candidate can be evaluated by incubation with dithiothreitol (DTT), or other reducing agent using reagents know in the art, which mimic the rate of cleavage which would be observed in a cell, e.g., a target cell. The candidates can also be evaluated under conditions which are selected to mimic blood or serum conditions. In a preferred embodiment, candidate compounds are cleaved by at most 10% in the blood. In preferred embodiments, useful candidate compounds are degraded at least 2, 4, 10 or 100 times faster in the cell (or under in vitro conditions selected to mimic intracellular conditions) as compared to blood (or under in vitro conditions selected to mimic extracellular conditions). The rate of cleavage of candidate compounds can be determined using standard enzyme kinetics assays under conditions chosen to mimic intracellular media and compared to conditions chosen to mimic extracellular media.

### D. Phosphate-Based Cleavable Linking Groups

[0592] Phosphate-based linking groups are cleaved by agents that degrade or hydrolyze the phosphate group. An example of an agent that cleaves phosphate groups in cells are enzymes such as phosphatases in cells. Examples of phosphate-based linking groups are —O—P(O)(ORk)-O— —O—P(S)(ORk)-O—, —O—P(S)(SRk)-O—, —S—P(O)(ORk)-O—, —O—P(O)(ORk)-S—, —S—P(O)(ORk)-S—, —O—P(S)(ORk)-S—, —S—P(S)(ORk)-O—, —O—P(O)(Rk)-O—, —O—P(S)(Rk)-O—, —S—P(O)(Rk)-O—, —S—P(S)(Rk)-O—, —S—P(O)(Rk)-S—, —O—P(S)(Rk)-S—. Preferred embodiments are —O—P(O)(OH)—O—, —O—P(S)(OH)—O—, —O—P(S)(SH)—O—, —S—P(O)(OH)—O—, —O—P(O)(OH)—S—, —S—P(O)(OH)—S—, —O—P(S)(OH)—S— —S—P(S)(OH)—O—, —O—P(O)(H)—O—, —O—P(S)(H)—O—, —S—P(O)(H)—O—, —S—P(S)(H)—O—, —S—P(O)(H)—S—, —O—P(S)(H)—S—. A preferred embodiment is —O—P(O)(OH)—O—. These candidates can be evaluated using methods analogous to those described above.

### E. Acid Cleavable Linking Groups

[0593] Acid cleavable linking groups are linking groups that are cleaved under acidic conditions. In preferred embodiments acid cleavable linking groups are cleaved in an acidic environment with a pH of about 6.5 or lower (e.g., about 6.0, 5.5, 5.0, or lower), or by agents such as enzymes that can act as a general acid. In a cell, specific low pH organelles, such as endosomes and lysosomes can provide a cleaving environment for acid cleavable linking groups. Examples of acid cleavable linking groups include but are not limited to hydrazones, ketals, acetals, esters, and esters of amino acids. Acid cleavable groups can have the general formula —C═NN—, C(O)O, or —OC(O). A preferred embodiment is when the carbon attached to the oxygen of the ester (the alkoxy group) is an aryl group, substituted alkyl group, or tertiary alkyl group such as dimethyl pentyl or t-butyl. These candidates can be evaluated using methods analogous to those described above.

### F. Ester-Based Linking Groups

[0594] Ester-based linking groups are cleaved by enzymes such as esterases and amidases in cells. Examples of ester-based cleavable linking groups include but are not limited to esters of alkylene, alkenylene and alkynylene groups. Ester cleavable linking groups have the general formula —C(O)O—, or —OC(O)—. These candidates can be evaluated using methods analogous to those described above.

### G. Peptide-Based Cleaving Groups

[0595] Peptide-based linking groups are cleaved by enzymes such as peptidases and proteases in cells. Peptide-based cleavable linking groups are peptide bonds formed between amino acids to yield oligopeptides (e.g., dipeptides, tripeptides etc.) and polypeptides. Peptide-based cleavable groups do not include the amide group (—C(O)NH—). The amide group can be formed between any alkylene, alkenylene or alkynelene. A peptide bond is a special type of amide bond formed between amino acids to yield peptides and proteins. The peptide based cleavage group is generally limited to the peptide bond (i.e., the amide bond) formed between amino acids yielding peptides and proteins and does not include the entire amide functional group. Peptide cleavable linking groups have the general formula —NHCHR¹C(O)NHCHR²C(O)—, where R¹ and R² are the R groups of the two adjacent amino acids. These candidates can be evaluated using methods analogous to those described above.

### H. Biocleavable Linkers Tethers

[0596] The linkers can also includes biocleavable linkers that are nucleotide and non-nucleotide linkers or combinations thereof that connect two parts of a molecule, for example, one or both strands of two individual siRNA molecules to generate a bis(siRNA). In some embodiments, mere electrostatic or stacking interaction between two individual siRNAs can represent a linker. The non-nucleotide linkers include tethers or linkers derived from monosaccharides, disaccharides, oligosaccharides, and derivatives thereof, aliphatic, alicyclic, hetercyclic, and combinations thereof.

[0597] In some embodiments, at least one of the linkers (tethers) is a bio-clevable linker selected from the group consisting of DNA, RNA, disulfide, amide, functionalized monosaccharides or oligosaccharides of galactosamine, glucosamine, glucose, galactose, and mannose, and combinations thereof.

[0598] In one embodiment, the bio-cleavable carbohydrate linker may have 1 to 10 saccharide units, which have at least one anomeric linkage capable of connecting two siRNA units. When two or more saccharides are present, these units can be linked via 1-3, 1-4, or 1-6 sugar linkages, or via alkyl chains.

[0599] Exemplary bio-cleavable linkers include:

[chemical structure]

[chemical structure]

[chemical structure]

[chemical structure]

[chemical structure]

[chemical structure]

[chemical structure]

[chemical structure]

[chemical structure]

[chemical structure]

[chemical structure]

[chemical structure]

[0600] More discussion about the biocleavable linkers may be found in PCT application No. PCT/US18/14213, entitled “Endosomal Cleavable Linkers,” filed on Jan. 18, 2018, the entire contents of which are incorporated herein by reference.

### 1. Carriers

[0601] In certain embodiments, the one or more C₂₂ hydrocarbon chains is conjugated to the iRNA agent via a carrier that replaces one or more nucleotide(s).

[0602] The carrier can be a cyclic group or an acyclic group. In one embodiment, the cyclic group is selected from the group consisting of pyrrolidinyl, pyrazolinyl, pyrazolidinyl, imidazolinyl, imidazolidinyl, piperidinyl, piperazinyl, [1,3]dioxolane, oxazolidinyl, isoxazolidinyl, morpholinyl, thiazolidinyl, isothiazolidinyl, quinoxalinyl, pyridazinonyl, tetrahydrofuryl, and decalin. In one embodiment, the acyclic group is a moiety based on a serinol backbone or a diethanolamine backbone.

[0603] In some embodiments, the carrier replaces one or more nucleotide(s) in the internal position(s) of the dsRNA agent.

[0604] In other embodiments, the carrier replaces the nucleotides at the terminal end of the sense strand or antisense strand. In one embodiment, the carrier replaces the terminal nucleotide on the 3′ end of the sense strand, thereby functioning as an end cap protecting the 3′ end of the sense strand. In one embodiment, the carrier is a cyclic group having an amine, for instance, the carrier may be pyrrolidinyl, pyrazolinyl, pyrazolidinyl, imidazolinyl, imidazolidinyl, piperidinyl, piperazinyl, [1,3]dioxolanyl, oxazolidinyl, isoxazolidinyl, morpholinyl, thiazolidinyl, isothiazolidinyl, quinoxalinyl, pyridazinonyl, tetrahydrofuranyl, or decalinyl.

[0605] A ribonucleotide subunit in which the ribose sugar of the subunit has been so replaced is referred to herein as a ribose replacement modification subunit (RRMS). The carrier can be a cyclic or acyclic moiety and include two “backbone attachment points” (e.g., hydroxyl groups) and a ligand (e.g., the lipophilic moiety). The one or more C₂₂ hydrocarbon chains can be directly attached to the carrier or indirectly attached to the carrier by an intervening linker/tether, as described above.

[chemical structure]

[0606] The ligand-conjugated monomer subunit may be the 5′ or 3′ terminal subunit of the iRNA molecule, i.e., one of the two “W” groups may be a hydroxyl group, and the other “W” group may be a chain of two or more unmodified or modified ribonucleotides. Alternatively, the ligand-conjugated monomer subunit may occupy an internal position, and both “W” groups may be one or more unmodified or modified ribonucleotides. More than one ligand-conjugated monomer subunit may be present in an iRNA agent.

a. Sugar Replacement-Based Monomers, e.g., Ligand-Conjugated Monomers (Cyclic)

[0607] Cyclic sugar replacement-based monomers, e.g., sugar replacement-based ligand-conjugated monomers, are also referred to herein as RRMS monomer compounds. The carriers may have the general formula (LCM-2) provided below (in that structure preferred backbone attachment points can be chosen from R^{t} or R²; R³ or R4; or R⁹ and R¹⁰ if Y is CR⁹R¹⁰ (two positions are chosen to give two backbone attachment points, e.g., R^{t} and R⁴, or R⁴ and R⁹)). Preferred tethering attachment points include R7; R or R when X is CH₂. The carriers are described below as an entity, which can be incorporated into a strand. Thus, it is understood that the structures also encompass the situations wherein one (in the case of a terminal position) or two (in the case of an internal position) of the attachment points, e.g., R¹ or R²; R³ or R⁴; or R⁹ or R¹⁰ (when Y is CR⁹R¹⁰), is connected to the phosphate, or modified phosphate, e.g., sulfur containing, backbone. E.g., one of the above-named R groups can be —CH₂—, wherein one bond is connected to the carrier and one to a backbone atom, e.g., a linking oxygen or a central phosphorus atom.

[chemical structure]

[0608] wherein:
[0609] X is N(CO)R⁷, NR⁷ or CH₂;
[0610] Y is NR⁸, O, S, CR⁹R¹⁰;
[0611] Z is CR¹¹R¹² or absent;
[0612] Each of R¹, R², R³, R⁴, R⁹, and R¹⁰ is, independently, H, OR^{a}, or (CH₂)ₙOR^{b}, provided that at least two of R¹, R², R³, R⁴, R⁹, and R¹⁰ are OR^{a} and/or (CH₂)ₙOR^{b};
[0613] Each of R⁵, R⁶, R¹¹, and R¹² is, independently, a ligand, H, C₁-C₆ alkyl optionally substituted with 1-3 R¹³, or C(O)NHR⁷; or R⁵ and R¹¹ together are C₃-C₈ cycloalkyl optionally substituted with R¹⁴;
[0614] R⁷ can be a ligand, e.g., R⁷ can be R^{d}, or R⁷ can be a ligand tethered indirectly to the carrier, e.g., through a tethering moiety, e.g., C₁-C₂₀ alkyl substituted with NR^{c}R^{d}; or C₁-C₂₀ alkyl substituted with NHC(O)R^{d};
[0615] R⁸ is H or C1-C₆ alkyl;
[0616] R¹³ is hydroxy, C₁-C₄ alkoxy, or halo;
[0617] R¹⁴ is NR^{c}R⁷;
[0618] R¹⁵ is C₁-C₆ alkyl optionally substituted with cyano, or C₂-C₆ alkenyl;
[0619] R¹⁶ is C₁-C₁₀ alkyl;
[0620] R¹⁷ is a liquid or solid phase support reagent;
[0621] L is —C(O)(CH₂)_{q}C(O)—, or —C(O)(CH₂)_{q}S—;
[0622] R^{a} is a protecting group, e.g., CAr₃; (e.g., a dimethoxytrityl group) or Si(X^{5′})(X^{5″})(X⁵″′) in which (X^{5″}), (X^{5″}), and (X⁵″′) are as described elsewhere.
[0623] R is P(O)(O⁻)H, P(OR″)N(R¹⁶)₂ or L-R¹⁷;
[0624] R^{c} is H or C₁-C₆ alkyl;
[0625] R^{d} is H or a ligand;
[0626] Each Ar is, independently, C₆-C₁₀ aryl optionally substituted with C₁-C₄ alkoxy;
[0627] n is 1-4; and q is 0-4.

[0628] Exemplary carriers include those in which, e.g., X is N(CO)R⁷ or NR⁷, Y is CR⁹R¹⁰, and Z is absent; or X is N(CO)R⁷ or NR⁷, Y is CR⁹R¹⁰, and Z is CR¹¹R¹²; or X is N(CO)R⁷ or NR⁷, Y is NR⁸, and Z is CR¹¹R¹²; or X is N(CO)R⁷ or NR⁷, Y is O, and Z is CR¹¹R¹²; or X is CH₂; Y is CR⁹R¹⁰; Z is CR¹¹R¹², and R⁵ and R¹¹ together form C₆ cycloalkyl (H, z=2), or the indane ring system, e.g., X is CH₂; Y is CR⁹R¹⁰; Z is CR¹¹R¹², and R⁵ and R¹¹ together form C₅ cycloalkyl (H, z=1).

[0629] In certain embodiments, the carrier may be based on the pyrroline ring system or the 4-hydroxyproline ring system, e.g., X is N(CO)R⁷ or NR⁷, Y is CR⁹R¹⁰, and Z is absent (D).

[chemical structure]

OFG¹ is preferably attached to a primary carbon, e.g., an exocyclic alkylene group, e.g., a methylene group, connected to one of the carbons in the five-membered ring (—CH₂OFG¹ in D). OFG² is preferably attached directly to one of the carbons in the five-membered ring (—OFG² in D). For the pyrroline-based carriers, —CH₂OFG¹ may be attached to C-2 and OFG² may be attached to C-3; or —CH₂OFG¹ may be attached to C-3 and OFG² may be attached to C-4. In certain embodiments, CH₂OFG¹ and OFG² may be geminally substituted to one of the above-referenced carbons. For the 3-hydroxyproline-based carriers, —CH₂OFG¹ may be attached to C-2 and OFG² may be attached to C-4. The pyrroline- and 4-hydroxyproline-based monomers may therefore contain linkages (e.g., carbon-carbon bonds) wherein bond rotation is restricted about that particular linkage, e.g. restriction resulting from the presence of a ring. Thus, CH₂OFG¹ and OFG² may be cis or trans with respect to one another in any of the pairings delineated above Accordingly, all cis trans isomers are expressly included. The monomers may also contain one or more asymmetric centers and thus occur as racemates and racemic mixtures, single enantiomers, individual diastereomers and diastereomeric mixtures. All such isomeric forms of the monomers are expressly included (e.g., the centers bearing CH₂OFG¹ and OFG² can both have the R configuration; or both have the S configuration; or one center can have the R configuration and the other center can have the S configuration and vice versa). The tethering attachment point is preferably nitrogen. Preferred examples of carrier D include the following:

[chemical structure]

[0630] In certain embodiments, the carrier may be based on the piperidine ring system (E), e.g., X is N(CO)R⁷ or NR⁷, Y is CR⁹R¹⁰, and Z is CR¹¹R¹²

[chemical structure]

[0631] OFG¹ is preferably attached to a primary carbon, e.g., an exocyclic alkylene group, e.g., a methylene group (n=1) or ethylene group (n=2), connected to one of the carbons in the six-membered ring [—(CH₂)ₙOFG¹ in E]. OFG² is preferably attached directly to one of the carbons in the six-membered ring (—OFG² in E). —(CH₂)ₙOFG¹ and OFG² may be disposed in a geminal manner on the ring, i.e., both groups may be attached to the same carbon, e.g., at C-2, C-3, or C-4. Alternatively, —(CH₂)ₙOFG¹ and OFG² may be disposed in a vicinal manner on the ring, i.e., both groups may be attached to adjacent ring carbon atoms, e.g., —(CH₂)ₙOFG¹ may be attached to C-2 and OFG² may be attached to C-3; —(CH₂)ₙOFG¹ may be attached to C-3 and OFG² may be attached to C-2; —(CH₂)ₙOFG¹ may be attached to C-3 and OFG² may be attached to C-4; or —(CH₂)ₙOFG¹ may be attached to C-4 and OFG² may be attached to C-3. The piperidine-based monomers may therefore contain linkages (e.g., carbon-carbon bonds) wherein bond rotation is restricted about that particular linkage, e.g. restriction resulting from the presence of a ring. Thus, —(CH₂)ₙOFG¹ and OFG² may be cis or trans with respect to one another in any of the pairings delineated above. Accordingly, all cis trans isomers are expressly included. The monomers may also contain one or more asymmetric centers and thus occur as racemates and racemic mixtures, single enantiomers, individual diastereomers and diastereomeric mixtures. All such isomeric forms of the monomers are expressly included (e.g., the centers bearing CH₂OFG¹ and OFG² can both have the R configuration; or both have the S configuration; or one center can have the R configuration and the other center can have the S configuration and vice versa). The tethering attachment point is preferably nitrogen.

[0632] In certain embodiments, the carrier may be based on the piperazine ring system (F), e.g., X is N(CO)R⁷ or NR⁷, Y is NR^{B}, and Z is CR¹¹R¹², or the morpholine ring system (G), e.g., X is N(CO)R⁷ or NR⁷, Y is O, and Z is CR¹¹R¹²

[chemical structure]

[0633] OFG¹ is preferably attached to a primary carbon, e.g., an exocyclic alkylene group, e.g., a methylene group, connected to one of the carbons in the six-membered ring (—CH₂OFG¹ in F or G). OFG² is preferably attached directly to one of the carbons in the six-membered rings (—OFG² in F or G). For both F and G, —CH₂OFG¹ may be attached to C-2 and OFG² may be attached to C-3; or vice versa. In certain embodiments, CH₂OFG¹ and OFG² may be geminally substituted to one of the above-referenced carbons. The piperazine- and morpholine-based monomers may therefore contain linkages (e.g., carbon-carbon bonds) wherein bond rotation is restricted about that particular linkage, e.g. restriction resulting from the presence of a ring. Thus, CH₂OFG¹ and OFG² may be cis or trans with respect to one another in any of the pairings delineated above. Accordingly, all cis trans isomers are expressly included. The monomers may also contain one or more asymmetric centers and thus occur as racemates and racemic mixtures, single enantiomers, individual diastereomers and diastereomeric mixtures. All such isomeric forms of the monomers are expressly included (e.g., the centers bearing CH₂OFG¹ and OFG² can both have the R configuration; or both have the S configuration; or one center can have the R configuration and the other center can have the S configuration and vice versa). R″′ can be, e.g., C1-C₆ alkyl, preferably CH₃. The tethering attachment point is preferably nitrogen in both F and G.

[0634] In certain embodiments, the carrier may be based on the decalin ring system, e.g., X is CH₂; Y is CR⁹R¹⁰; Z is CR¹¹R¹², and R⁵ and R¹¹ together form C₆ cycloalkyl (H, z=2), or the indane ring system, e.g., X is CH₂; Y is CR⁹R¹⁰; Z is CR¹¹R¹², and R⁵ and R¹¹ together form C₅ cycloalkyl (H, z=1).

[chemical structure]

[0635] OFG¹ is preferably attached to a primary carbon, e.g., an exocyclic methylene group (n=1) or ethylene group (n=2) connected to one of C-2, C-3, C-4, or C-5 [—(CH₂)ₙOFG¹ in H]. OFG² is preferably attached directly to one of C-2, C-3, C-4, or C-5 (—OFG² in H). —(CH₂)ₙOFG¹ and OFG² may be disposed in a geminal manner on the ring, i.e., both groups may be attached to the same carbon, e.g., at C-2, C-3, C-4, or C-5. Alternatively, —(CH₂)ₙOFG¹ and OFG² may be disposed in a vicinal manner on the ring, i.e., both groups may be attached to adjacent ring carbon atoms, e.g., —(CH₂)ₙOFG¹ may be attached to C-2 and OFG² may be attached to C-3; —(CH₂)ₙOFG¹ may be attached to C-3 and OFG² may be attached to C-2; —(CH₂)ₙOFG¹ may be attached to C-3 and OFG² may be attached to C-4; or —(CH₂)ₙOFG¹ may be attached to C-4 and OFG² may be attached to C-3; —(CH₂)ₙOFG¹ may be attached to C-4 and OFG² may be attached to C-5; or —(CH₂)ₙOFG¹ may be attached to C-5 and OFG² may be attached to C-4. The decalin or indane-based monomers may therefore contain linkages (e.g., carbon-carbon bonds) wherein bond rotation is restricted about that particular linkage, e.g. restriction resulting from the presence of a ring. Thus, —(CH₂)ₙOFG¹ and OFG² may be cis or trans with respect to one another in any of the pairings delineated above. Accordingly, all cis trans isomers are expressly included. The monomers may also contain one or more asymmetric centers and thus occur as racemates and racemic mixtures, single enantiomers, individual diastereomers and diastereomeric mixtures. All such isomeric forms of the monomers are expressly included (e.g., the centers bearing CH₂OFG¹ and OFG² can both have the R configuration; or both have the S configuration; or one center can have the R configuration and the other center can have the S configuration and vice versa). In a preferred embodiment, the substituents at C-1 and C-6 are trans with respect to one another. The tethering attachment point is preferably C-6 or C-7.

[0636] Other carriers may include those based on 3-hydroxyproline (J).

[chemical structure]

[0637] Thus, —(CH₂)ₙOFG¹ and OFG² may be cis or trans with respect to one another. Accordingly, all cis trans isomers are expressly included. The monomers may also contain one or more asymmetric centers and thus occur as racemates and racemic mixtures, single enantiomers, individual diastereomers and diastereomeric mixtures. All such isomeric forms of the monomers are expressly included (e.g., the centers bearing CH₂OFG¹ and OFG² can both have the R configuration; or both have the S configuration; or one center can have the R configuration and the other center can have the S configuration and vice versa). The tethering attachment point is preferably nitrogen.

[0638] Details about more representative cyclic, sugar replacement-based carriers can be found in U.S. Pat. Nos. 7,745,608 and 8,017,762, which are herein incorporated by reference in their entireties.

b. Sugar Replacement-Based Monomers (Acyclic)

[0639] Acyclic sugar replacement-based monomers, e.g., sugar replacement-based ligand-conjugated monomers, are also referred to herein as ribose replacement monomer subunit (RRMS) monomer compounds. Preferred acyclic carriers can have formula LCM-3 or LCM-4:

[chemical structure]

[0640] In some embodiments, each of x, y, and z can be, independently of one another, 0, 1, 2, or 3. In formula LCM-3, when y and z are different, then the tertiary carbon can have either the R or S configuration. In preferred embodiments, x is zero and y and z are each 1 in formula LCM-3 (e.g., based on serinol), and y and z are each 1 in formula LCM-3. Each of formula LCM-3 or LCM-4 below can optionally be substituted, e.g., with hydroxy, alkoxy, perhaloalkyl.

[0641] Details about more representative acyclic, sugar replacement-based carriers can be found in U.S. Pat. Nos. 7,745,608 and 8,017,762, which are herein incorporated by reference in their entireties.

[0642] The one or more C₂₂ hydrocarbon chains is conjugated to one or more internal positions on at least one strand. Internal positions of a strand refers to the nucleotide on any position of the strand, except the terminal position from the 3′ end and 5′ end of the strand (e.g., excluding 2 positions: position 1 counting from the 3′ end and position 1 counting from the 5′ end).

[0643] In one embodiment, the one or more C₂₂ hydrocarbon chains is conjugated to one or more internal positions on at least one strand, which include all positions except the terminal two positions from each end of the strand (e.g., excluding 4 positions: positions 1 and 2 counting from the 3′ end and positions 1 and 2 counting from the 5′ end). In one embodiment, the one or more C₂₂ hydrocarbon chains is conjugated to one or more internal positions on at least one strand, which include all positions except the terminal three positions from each end of the strand (e.g., excluding 6 positions: positions 1, 2, and 3 counting from the 3′ end and positions 1, 2, and 3 counting from the 5′ end).

[0644] In one embodiment, the one or more C₂₂ hydrocarbon chains is conjugated to one or more internal positions on at least one strand, except the cleavage site region of the sense strand, for instance, the one or more C₂₂ hydrocarbon chains is not conjugated to positions 9-12 counting from the 5′-end of the sense strand, for example, the one or more C₂₂ hydrocarbon chains is not conjugated to positions 9-11 counting from the 5′-end of the sense strand. Alternatively, the internal positions exclude positions 11-13 counting from the 3′-end of the sense strand.

[0645] In one embodiment, the one or more C₂₂ hydrocarbon chains is conjugated to one or more internal positions on at least one strand, which exclude the cleavage site region of the antisense strand. For instance, the internal positions exclude positions 12-14 counting from the 5′-end of the antisense strand.

[0646] In one embodiment, the one or more C₂₂ hydrocarbon chains is conjugated to one or more internal positions on at least one strand, which exclude positions 11-13 on the sense strand, counting from the 3′-end, and positions 12-14 on the antisense strand, counting from the 5′-end.

[0647] In one embodiment, the one or more C₂₂ hydrocarbon chains is conjugated to one or more of the following internal positions: positions 4-8 and 13-18 on the sense strand, and positions 6-10 and 15-18 on the antisense strand, counting from the 5′ end of each strand.

[0648] In one embodiment, the one or more C₂₂ hydrocarbon chains is conjugated to one or more of the following internal positions: positions 5, 6, 7, 15, and 17 on the sense strand, and positions 15 and 17 on the antisense strand, counting from the 5′ end of each strand.

[0649] In one embodiment, the one or more C₂₂ hydrocarbon chains is conjugated to position 6 on the sense strand, counting from the 5′ end of each strand.

[0650] In some embodiments, the one or more C₂₂ hydrocarbon chains is conjugated to a nucleobase, sugar moiety, or internucleosidic phosphate linkage of the dsRNA agent.

### IV. Additional Modifications for the RNAi Agents of the Invention

[0651] In one embodiment, the RNAi agent of the disclosure comprising one or more C₂₂ hydrocarbon chains conjugated to one or more internal positions on at least one strand, does not comprise chemical modifications known in the art and described herein, in the remaining positions of the sense and anti-sense strands.

[0652] In some embodiments, the dsRNA agents of the invention comprising one or more C₂₂ hydrocarbon chains conjugated to one or more internal positions on at least one strand, comprise at least one additional nucleic acid modification described herein. For example, at least one modification selected from the group consisting of modified internucleoside linkage, modified nucleobase, modified sugar, and any combinations thereof. Without limitations, such a modification can be present anywhere in the dsRNA agent of the invention. For example, the modification can be present in one of the RNA molecules.

[0653] Modifications include, for example, end modifications, e.g., 5′-end modifications (phosphorylation, conjugation, inverted linkages) or 3′-end modifications (conjugation, DNA nucleotides, inverted linkages, etc.); base modifications, e.g., replacement with stabilizing bases, destabilizing bases, or bases that base pair with an expanded repertoire of partners, removal of bases (abasic nucleotides), or conjugated bases; sugar modifications (e.g., at the 2′-position or 4′-position) or replacement of the sugar; or backbone modifications, including modification or replacement of the phosphodiester linkages. Specific examples of RNAi agents useful in the embodiments described herein include, but are not limited to, RNAs containing modified backbones or no natural internucleoside linkages. RNAs having modified backbones include, among others, those that do not have a phosphorus atom in the backbone. For the purposes of this specification, and as sometimes referenced in the art, modified RNAs that do not have a phosphorus atom in their internucleoside backbone can also be considered to be oligonucleosides. In some embodiments, a modified RNAi agent will have a phosphorus atom in its internucleoside backbone.

### A. Nucleobase Modifications

[0654] The naturally occurring base portion of a nucleoside is typically a heterocyclic base. The two most common classes of such heterocyclic bases are the purines and the pyrimidines. For those nucleosides that include a pentofuranosyl sugar, a phosphate group can be linked to the 2′, 3′ or 5′ hydroxyl moiety of the sugar. In forming oligonucleotides, those phosphate groups covalently link adjacent nucleosides to one another to form a linear polymeric compound. Within oligonucleotides, the phosphate groups are commonly referred to as forming the internucleoside backbone of the oligonucleotide. The naturally occurring linkage or backbone of RNA and of DNA is a 3′ to 5′ phosphodiester linkage.

[0655] In addition to “unmodified” or “natural” nucleobases such as the purine nucleobases adenine (A) and guanine (G), and the pyrimidine nucleobases thymine (T), cytosine (C) and uracil (U), many modified nucleobases or nucleobase mimetics known to those skilled in the art are amenable with the compounds described herein. The unmodified or natural nucleobases can be modified or replaced to provide iRNAs having improved properties. For example, nuclease resistant oligonucleotides can be prepared with these bases or with synthetic and natural nucleobases (e.g., inosine, xanthine, hypoxanthine, nubularine, isoguanisine, or tubercidine) and any one of the oligomer modifications described herein. Alternatively, substituted or modified analogs of any of the above bases and “universal bases” can be employed. When a natural base is replaced by a non-natural and/or universal base, the nucleotide is said to comprise a modified nucleobase and/or a nucleobase modification herein. Modified nucleobase and/or nucleobase modifications also include natural, non-natural and universal bases, which comprise conjugated moieties, e.g. a ligand described herein. Preferred conjugate moieties for conjugation with nucleobases include cationic amino groups which can be conjugated to the nucleobase via an appropriate alkyl, alkenyl or a linker with an amide linkage.

[0656] An oligomeric compound described herein can also include nucleobase (often referred to in the art simply as “base”) modifications or substitutions. As used herein, “unmodified” or “natural” nucleobases include the purine bases adenine (A) and guanine (G), and the pyrimidine bases thymine (T), cytosine (C) and uracil (U). Exemplary modified nucleobases include, but are not limited to, other synthetic and natural nucleobases such as inosine, xanthine, hypoxanthine, nubularine, isoguanisine, tubercidine, 2-(halo)adenine, 2-(alkyl)adenine, 2-(propyl)adenine, 2-(amino)adenine, 2-(aminoalkyll)adenine, 2-(aminopropyl)adenine, 2-(methylthio)-N⁶-(isopentenyl)adenine, 6-(alkyl)adenine, 6-(methyl)adenine, 7-(deaza)adenine, 8-(alkenyl)adenine, 8-(alkyl)adenine, 8-(alkynyl)adenine, 8-(amino)adenine, 8-(halo)adenine, 8-(hydroxyl)adenine, 8-(thioalkyl)adenine, 8-(thiol)adenine, N⁶-(isopentyl)adenine, N⁶-(methyl)adenine, N⁶,N⁶-(dimethyl)adenine, 2-(alkyl)guanine, 2-(propyl)guanine, 6-(alkyl)guanine, 6-(methyl)guanine, 7-(alkyl)guanine, 7-(methyl)guanine, 7-(deaza)guanine, 8-(alkyl)guanine, 8-(alkenyl)guanine, 8-(alkynyl)guanine, 8-(amino)guanine, 8-(halo)guanine, 8-(hydroxyl)guanine, 8-(thioalkyl)guanine, 8-(thiol)guanine, N-(methyl)guanine, 2-(thio)cytosine, 3-(deaza)-5-(aza)cytosine, 3-(alkyl)cytosine, 3-(methyl)cytosine, 5-(alkyl)cytosine, 5-(alkynyl)cytosine, 5-(halo)cytosine, 5-(methyl)cytosine, 5-(propynyl)cytosine, 5-(propynyl)cytosine, 5-(trifluoromethyl)cytosine, 6-(azo)cytosine, N⁴-(acetyl)cytosine, 3-(3-amino-3-carboxypropyl)uracil, 2-(thio)uracil, 5-(methyl)-2-(thio)uracil, 5-(methylaminomethyl)-2-(thio)uracil, 4-(thio)uracil, 5-(methyl)-4-(thio)uracil, 5-(methylaminomethyl)-4-(thio)uracil, 5-(methyl)-2,4-(dithio)uracil, 5-(methylaminomethyl)-2,4-(dithio)uracil, 5-(2-aminopropyl)uracil, 5-(alkyl)uracil, 5-(alkynyl)uracil, 5-(allylamino)uracil, 5-(aminoallyl)uracil, 5-(aminoalkyl)uracil, 5-(guanidiniumalkyl)uracil, 5-(1,3-diazole-1-alkyl)uracil, 5-(cyanoalkyl)uracil, 5-(dialkylaminoalkyl)uracil, 5-(dimethylaminoalkyl)uracil, 5-(halo)uracil, 5-(methoxy)uracil, uracil-5-oxyacetic acid, 5-(methoxycarbonylmethyl)-2-(thio)uracil, 5-(methoxycarbonyl-methyl)uracil, 5-(propynyl)uracil, 5-(propynyl)uracil, 5-(trifluoromethyl)uracil, 6-(azo)uracil, dihydrouracil, N³-(methyl)uracil, 5-uracil (i.e., pseudouracil), 2-(thio)pseudouracil, 4-(thio)pseudouracil, 2,4-(dithio)psuedouracil, 5-(alkyl)pseudouracil, 5-(methyl)pseudouracil, 5-(alkyl)-2-(thio)pseudouracil, 5-(methyl)-2-(thio)pseudouracil, 5-(alkyl)-4-(thio)pseudouracil, 5-(methyl)-4-(thio)pseudouracil, 5-(alkyl)-2,4-(dithio)pseudouracil, 5-(methyl)-2,4-(dithio)pseudouracil, 1-substituted pseudouracil, 1-substituted 2(thio)-pseudouracil, 1-substituted 4-(thio)pseudouracil, 1-substituted 2,4-(dithio)pseudouracil, 1-(aminocarbonylethylenyl)-pseudouracil, 1-(aminocarbonylethylenyl)-2(thio)-pseudouracil, 1-(aminocarbonylethylenyl)-4-(thio)pseudouracil, 1-(aminocarbonylethylenyl)-2,4-(dithio)pseudouracil, 1-(aminoalkylaminocarbonylethylenyl)-pseudouracil, 1-(aminoalkylamino-carbonylethylenyl)-2(thio)-pseudouracil, 1-(aminoalkylaminocarbonylethylenyl)-4-(thio)pseudouracil, 1-(aminoalkylaminocarbonylethylenyl)-2,4-(dithio)pseudouracil, 1,3-(diaza)-2-(oxo)-phenoxazin-1-yl, 1-(aza)-2-(thio)-3-(aza)-phenoxazin-1-yl, 1,3-(diaza)-2-(oxo)-phenthiazin-1-yl, 1-(aza)-2-(thio)-3-(aza)-phenthiazin-1-yl, 7-substituted 1,3-(diaza)-2-(oxo)-phenoxazin-1-yl, 7-substituted 1-(aza)-2-(thio)-3-(aza)-phenoxazin-1-yl, 7-substituted 1,3-(diaza)-2-(oxo)-phenthiazin-1-yl, 7-substituted 1-(aza)-2-(thio)-3-(aza)-phenthiazin-1-yl, 7-(aminoalkylhydroxy)-1,3-(diaza)-2-(oxo)-phenoxazin-1-yl, 7-(aminoalkylhydroxy)-1-(aza)-2-(thio)-3-(aza)-phenoxazin-1-yl, 7-(aminoalkylhydroxy)-1,3-(diaza)-2-(oxo)-phenthiazin-1-yl, 7-(aminoalkylhydroxy)-1-(aza)-2-(thio)-3-(aza)-phenthiazin-1-yl, 7-(guanidiniumalkylhydroxy)-1,3-(diaza)-2-(oxo)-phenoxazin-1-yl, 7-(guanidiniumalkylhydroxy)-1-(aza)-2-(thio)-3-(aza)-phenoxazin-1-yl, 7-(guanidiniumalkyl-hydroxy)-1,3-(diaza)-2-(oxo)-phenthiazin-1-yl, 7-(guanidiniumalkylhydroxy)-1-(aza)-2-(thio)-3-(aza)-phenthiazin-1-yl, 1,3,5-(triaza)-2,6-(dioxa)-naphthalene, inosine, xanthine, hypoxanthine, nubularine, tubercidine, isoguanisine, inosinyl, 2-aza-inosinyl, 7-deaza-inosinyl, nitroimidazolyl, nitropyrazolyl, nitrobenzimidazolyl, nitroindazolyl, aminoindolyl, pyrrolopyrimidinyl, 3-(methyl)isocarbostyrilyl, 5-(methyl)isocarbostyrilyl, 3-(methyl)-7-(propynyl)isocarbostyrilyl, 7-(aza)indolyl, 6-(methyl)-7-(aza)indolyl, imidizopyridinyl, 9-(methyl)-imidizopyridinyl, pyrrolopyrizinyl, isocarbostyrilyl, 7-(propynyl)isocarbostyrilyl, propynyl-7-(aza)indolyl, 2,4,5-(trimethyl)phenyl, 4-(methyl)indolyl, 4,6-(dimethyl)indolyl, phenyl, napthalenyl, anthracenyl, phenanthracenyl, pyrenyl, stilbenyl, tetracenyl, pentacenyl, difluorotolyl, 4-(fluoro)-6-(methyl)benzimidazole, 4-(methyl)benzimidazole, 6-(azo)thymine, 2-pyridinone, 5-nitroindole, 3-nitropyrrole, 6-(aza)pyrimidine, 2-(amino)purine, 2,6-(diamino)purine, 5-substituted pyrimidines, N²-substituted purines, N⁶-substituted purines, 06-substituted purines, substituted 1,2,4-triazoles, pyrrolo-pyrimidin-2-on-3-yl, 6-phenyl-pyrrolo-pyrimidin-2-on-3-yl, para-substituted-6-phenyl-pyrrolo-pyrimidin-2-on-3-yl, ortho-substituted-6-phenyl-pyrrolo-pyrimidin-2-on-3-yl, bis-ortho-substituted-6-phenyl-pyrrolo-pyrimidin-2-on-3-yl, para-(aminoalkylhydroxy)-6-phenyl-pyrrolo-pyrimidin-2-on-3-yl, ortho-(aminoalkylhydroxy)-6-phenyl-pyrrolo-pyrimidin-2-on-3-yl, bis-ortho-(aminoalkylhydroxy)-6-phenyl-pyrrolo-pyrimidin-2-on-3-yl, pyridopyrimidin-3-yl, 2-oxo-7-amino-pyridopyrimidin-3-yl, 2-oxo-pyridopyrimidine-3-yl, or any O-alkylated or N-alkylated derivatives thereof. Alternatively, substituted or modified analogs of any of the above bases and “universal bases” can be employed.

[0657] As used herein, a universal nucleobase is any nucleobase that can base pair with all of the four naturally occurring nucleobases without substantially affecting the melting behavior, recognition by intracellular enzymes or activity of the iRNA duplex. Some exemplary universal nucleobases include, but are not limited to, 2,4-difluorotoluene, nitropyrrolyl, nitroindolyl, 8-aza-7-deazaadenine, 4-fluoro-6-methylbenzimidazle, 4-methylbenzimidazle, 3-methyl isocarbostyrilyl, 5-methyl isocarbostyrilyl, 3-methyl-7-propynyl isocarbostyrilyl, 7-azaindolyl, 6-methyl-7-azaindolyl, imidizopyridinyl, 9-methyl-imidizopyridinyl, pyrrolopyrizinyl, isocarbostyrilyl, 7-propynyl isocarbostyrilyl, propynyl-7-azaindolyl, 2,4,5-trimethylphenyl, 4-methylinolyl, 4,6-dimethylindolyl, phenyl, napthalenyl, anthracenyl, phenanthracenyl, pyrenyl, stilbenyl, tetracenyl, pentacenyl, and structural derivatives thereof (see for example, Loakes, 2001, Nucleic Acids Research, 29, 2437-2447).

[0658] Further nucleobases include those disclosed in U.S. Pat. No. 3,687,808; those disclosed in International Application No. PCT/US09/038425, filed Mar. 26, 2009; those disclosed in the Concise Encyclopedia Of Polymer Science And Engineering, pages 858-859, Kroschwitz, J. I., ed. John Wiley & Sons, 1990; those disclosed by English et al., Angewandte Chemie, International Edition, 1991, 30, 613; those disclosed in Modified Nucleosides in Biochemistry, Biotechnology and Medicine, Herdewijin, P. Ed. Wiley-VCH, 2008; and those disclosed by Sanghvi, Y. S., Chapter 15, dsRNA Research and Applications, pages 289-302, Crooke, S. T. and Lebleu, B., Eds., CRC Press, 1993. Contents of all of the above are herein incorporated by reference.

[0659] In certain embodiments, a modified nucleobase is a nucleobase that is fairly similar in structure to the parent nucleobase, such as for example a 7-deaza purine, a 5-methyl cytosine, or a G-clamp. In certain embodiments, nucleobase mimetic include more complicated structures, such as for example a tricyclic phenoxazine nucleobase mimetic. Methods for preparation of the above noted modified nucleobases are well known to those skilled in the art.

### B. Sugar Modifications

[0660] DsRNA agent of the inventions provided herein can comprise one or more (e.g., 1, 2, 3, 4, 5, 6, 7, 8, 9, 10, 11, 12, 13, 14, 15 or more) monomer, including a nucleoside or nucleotide, having a modified sugar moiety. For example, the furanosyl sugar ring of a nucleoside can be modified in a number of ways including, but not limited to, addition of a substituent group, bridging of two non-geminal ring atoms to form a locked nucleic acid or bicyclic nucleic acid. In certain embodiments, oligomeric compounds comprise one or more (e.g., 1, 2, 3, 4, 5, 6, 7, 8, 9, 10, 11, 12, 13, 14, 15 or more) monomers that are LNA.

[0661] In some embodiments of a locked nucleic acid, the 2′ position of furnaosyl is connected to the 4′ position by a linker selected independently from —[C(R1)(R2)]ₙ—, —[C(R1)(R2)]ₙ—O—, —[C(R1)(R2)]ₙ—N(R1)-, —[C(R1)(R2)]ₙ—N(R1)-O—, —[C(R1R2)]ₙ—O—N(R1)-, —C(R1)=C(R2)-O—, —C(R1)=N—, —C(R1)=N—O—, —C(═NR1)-, —C(═NR1)-O—, —C(═O)—, —C(═O)O—, —C(═S)—, —C(═S)O—, —C(═S)S—, —O—, —Si(R1)2-, —S(═O)ₓ, and —N(R1)-;
[0662] wherein:
[0663] x is 0, 1, or 2;
[0664] n is 1, 2, 3, or 4;
[0665] each R1 and R2 is, independently, H, a protecting group, hydroxyl, C1-C12 alkyl, substituted C1-C12 alkyl, C2-C12 alkenyl, substituted C2-C12 alkenyl, C2-C12 alkynyl, substituted C2-C12 alkynyl, C5-C20 aryl, substituted C5-C20 aryl, heterocycle radical, substituted heterocycle radical, heteroaryl, substituted heteroaryl, C5-C7 alicyclic radical, substituted C5-C7 alicyclic radical, halogen, OJ1, NJ1J2, SJ1, N3, COOJ1, acyl (C(═O)—H), substituted acyl, CN, sulfonyl (S(═O)2-J1), or sulfoxyl (S(═O)-J1); and
[0666] each J1 and J2 is, independently, H, C1-C12 alkyl, substituted C1-C12 alkyl, C2-C12 alkenyl, substituted C2-C12 alkenyl, C2-C12 alkynyl, substituted C2-C12 alkynyl, C5-C20 aryl, substituted C5-C20 aryl, acyl (C(═O)—H), substituted acyl, a heterocycle radical, a substituted heterocycle radical, C1-C12 aminoalkyl, substituted C1-C12 aminoalkyl or a protecting group.

[0667] In some embodiments, each of the linkers of the LNA compounds is, independently, —[C(R1)(R2)]ₙ—, —[C(R1)(R2)]ₙ—O—, —C(R1R2)-N(R1)-O— or —C(R1R2)-O—N(R1)-. In another embodiment, each of said linkers is, independently, 4′-CH₂-2′, 4′-(CH₂)2-2′, 4′-(CH₂)3-2′, 4′-CH₂—O-2′, 4′-(CH₂)2-O-2′, 4′-CH₂—O—N(R1)-2′ and 4′-CH₂—N(R1)-O-2′- wherein each R1 is, independently, H, a protecting group or C1-C12 alkyl.

[0668] Certain LNA's have been prepared and disclosed in the patent literature as well as in scientific literature (Singh et al., Chem. Commun., 1998, 4, 455-456; Koshkin et al., Tetrahedron, 1998, 54, 3607-3630; Wahlestedt et al., Proc. Natl. Acad. Sci. U.S.A., 2000, 97, 5633-5638; Kumar et al., Bioorg. Med. Chem. Lett., 1998, 8, 2219-2222; WO 94/14226; WO 2005/021570; Singh et al., J. Org. Chem., 1998, 63, 10035-10039; Examples of issued US patents and published applications that disclose LNA s include, for example, U.S. Pat. Nos. 7,053,207; 6,268,490; 6,770,748; 6,794,499; 7,034,133; and 6,525,191; and U.S. Pre-Grant Publication Nos. 2004-0171570; 2004-0219565; 2004-0014959; 2003-0207841; 2004-0143114; and 20030082807.

[0669] Also provided herein are LNAs in which the 2′-hydroxyl group of the ribosyl sugar ring is linked to the 4′ carbon atom of the sugar ring thereby forming a methyleneoxy (4′-CH₂—O-2′) linkage to form the bicyclic sugar moiety (reviewed in Elayadi et al., Curr. Opinion Invens. Drugs, 2001, 2, 558-561; Braasch et al., Chem. Biol., 2001, 8 1-7; and Orum et al., Curr. Opinion Mol. Ther., 2001, 3, 239-243; see also U.S. Pat. Nos. 6,268,490 and 6,670,461). The linkage can be a methylene (—CH₂—) group bridging the 2′ oxygen atom and the 4′ carbon atom, for which the term methyleneoxy (4′-CH₂-0-2′) LNA is used for the bicyclic moiety; in the case of an ethylene group in this position, the term ethyleneoxy (4′-CH₂CH₂—O-2′) LNA is used (Singh et al., Chem. Commun., 1998, 4, 455-456: Morita et al., Bioorganic Medicinal Chemistry, 2003, 11, 2211-2226). Methyleneoxy (4′-CH₂—O-2′) LNA and other bicyclic sugar analogs display very high duplex thermal stabilities with complementary DNA and RNA (Tm=+3 to +10° C.), stability towards 3′-exonucleolytic degradation and good solubility properties. Potent and nontoxic antisense oligonucleotides comprising BNAs have been described (Wahlestedt et al., Proc. Natl. Acad. Sci. U.S.A., 2000, 97, 5633-5638).

[0670] An isomer of methyleneoxy (4′-CH₂—O-2′) LNA that has also been discussed is alpha-L-methyleneoxy (4′-CH₂—O-2′) LNA which has been shown to have superior stability against a 3′-exonuclease. The alpha-L-methyleneoxy (4′-CH₂—O-2′) LNA's were incorporated into antisense gapmers and chimeras that showed potent antisense activity (Frieden et al., Nucleic Acids Research, 2003, 21, 6365-6372).

[0671] The synthesis and preparation of the methyleneoxy (4′-CH₂—O-2′) LNA monomers adenine, cytosine, guanine, 5-methyl-cytosine, thymine and uracil, along with their oligomerization, and nucleic acid recognition properties have been described (Koshkin et al., Tetrahedron, 1998, 54, 3607-3630). BNAs and preparation thereof are also described in WO 98/39352 and WO 99/14226.

[0672] Analogs of methyleneoxy (4′-CH₂—O-2′) LNA, phosphorothioate-methyleneoxy (4′-CH₂—O-2′) LNA and 2′-thio-LNAs, have also been prepared (Kumar et al., Bioorg. Med. Chem. Lett., 1998, 8, 2219-2222). Preparation of locked nucleoside analogs comprising oligodeoxyribonucleotide duplexes as substrates for nucleic acid polymerases has also been described (Wengel et al., WO 99/14226). Furthermore, synthesis of 2′-amino-LNA, a novel conformationally restricted high-affinity oligonucleotide analog has been described in the art (Singh et al., J. Org. Chem., 1998, 63, 10035-10039). In addition, 2′-Amino- and 2′-methylamino-LNA's have been prepared and the rmal stability of their duplexes with complementary RNA and DNA strands has been previously reported.

[0673] Modified sugar moieties are well known and can be used to alter, typically increase, the affinity of the antisense compound for its target and/or increase nuclease resistance. A representative list of preferred modified sugars includes but is not limited to bicyclic modified sugars, including methyleneoxy (4′-CH₂—O-2′) LNA and ethyleneoxy (4′-(CH₂)2-O-2′ bridge) ENA; substituted sugars, especially 2′-substituted sugars having a 2′-F, 2′-OCH₃ or a 2′-O(CH₂)2-OCH₃ substituent group; and 4′-thio modified sugars. Sugars can also be replaced with sugar mimetic groups among others. Methods for the preparations of modified sugars are well known to those skilled in the art. Some representative patents and publications that teach the preparation of such modified sugars include, but are not limited to, U.S. Pat. Nos. 4,981,957; 5,118,800; 5,319,080; 5,359,044; 5,393,878; 5,446,137; 5,466,786; 5,514,785; 5,519,134; 5,567,811; 5,576,427; 5,591,722; 5,597,909; 5,610,300; 5,627,053; 5,639,873; 5,646,265; 5,658,873; 5,670,633; 5,792,747; 5,700,920; 6,531,584; and 6,600,032; and WO 2005/121371.

[0674] Examples of “oxy”-2′ hydroxyl group modifications include alkoxy or aryloxy (OR, e.g., R═H, alkyl, cycloalkyl, aryl, aralkyl, heteroaryl or sugar); polyethyleneglycols (PEG), O(CH₂CH₂O)˜CH₂CH₂OR, n=1-50; “locked” nucleic acids (LNA) in which the furanose portion of the nucleoside includes a bridge connecting two carbon atoms on the furanose ring, thereby forming a bicyclic ring system; 0-AMINE or O—(CH₂)ₙAMINE (n=1-10, AMINE=NH₂; alkylamino, dialkylamino, heterocyclyl, arylamino, diaryl amino, heteroaryl amino, diheteroaryl amino, ethylene diamine or polyamino); and O—CH₂CH₂(NCH₂CH₂NMe₂)₂.

[0675] “Deoxy” modifications include hydrogen (i.e. deoxyribose sugars, which are of particular relevance to the single-strand overhangs); halo (e.g., fluoro); amino (e.g. NH₂; alkylamino, dialkylamino, heterocyclyl, arylamino, diaryl amino, heteroaryl amino, diheteroaryl amino, or amino acid); NH(CH₂CH₂NH)˜CH₂CH₂-AMINE (AMINE=NH₂; alkylamino, dialkylamino, heterocyclyl, arylamino, diaryl amino, heteroaryl amino, or diheteroaryl amino); —NHC(O)R (R=alkyl, cycloalkyl, aryl, aralkyl, heteroaryl or sugar); cyano; mercapto; alkyl-thio-alkyl; thioalkoxy; thioalkyl; alkyl; cycloalkyl; aryl; alkenyl and alkynyl, which can be optionally substituted with e.g., an amino functionality.

[0676] Other suitable 2′-modifications, e.g., modified MOE, are described in U.S. Patent Application Publication No. 20130130378, contents of which are herein incorporated by reference.

[0677] A modification at the 2′ position can be present in the arabinose configuration The term “arabinose configuration” refers to the placement of a substituent on the C2′ of ribose in the same configuration as the 2′-OH is in the arabinose.

[0678] The sugar can comprise two different modifications at the same carbon in the sugar, e.g., gem modification. The sugar group can also contain one or more carbons that possess the opposite stereochemical configuration than that of the corresponding carbon in ribose. Thus, an oligomeric compound can include one or more monomers containing e.g., arabinose, as the sugar. The monomer can have an alpha linkage at the 1′ position on the sugar, e.g., alpha-nucleosides. The monomer can also have the opposite configuration at the 4′-position, e.g., C5′ and H4′ or substituents replacing them are interchanged with each other. When the C5′ and H4′ or substituents replacing them are interchanged with each other, the sugar is said to be modified at the 4′ position.

[0679] DsRNA agent of the inventions disclosed herein can also include abasic sugars, i.e., a sugar which lack a nucleobase at C-1′ or has other chemical groups in place of a nucleobase at C1′. See for example U.S. Pat. No. 5,998,203, content of which is herein incorporated in its entirety. These abasic sugars can also be further containing modifications at one or more of the constituent sugar atoms. DsRNA agent of the inventions can also contain one or more sugars that are the L isomer, e.g. L-nucleosides. Modification to the sugar group can also include replacement of the 4′-O with a sulfur, optionally substituted nitrogen or CH₂ group. In some embodiments, linkage between C1′ and nucleobase is in a configuration.

[0680] Sugar modifications can also include acyclic nucleotides, wherein a C—C bonds between ribose carbons (e.g., C1′-C2′, C2′-C3′, C3′-C4′, C4′-O4′, C1′-O4′) is absent and/or at least one of ribose carbons or oxygen (e.g., C1′, C2′, C3′, C4′ or O4′) are independently or in combination absent from the nucleotide. In some embodiments, acyclic nucleotide is

[chemical structure]

wherein B is a modified or unmodified nucleobase, R₁ and R₂ independently are H, halogen, OR₃, or alkyl; and R₃ is H, alkyl, cycloalkyl, aryl, aralkyl, heteroaryl or sugar).

[0681] In some embodiments, sugar modifications are selected from the group consisting of 2′-H, 2′-0-Me (2′-O-methyl), 2′-O-MOE (2′-O-methoxyethyl), 2′-F, 2′-O-[2-(methylamino)-2-oxoethyl] (2′-O-NMA), 2′-S-methyl, 2′-O—CH₂-(4′-C) (LNA), 2′-O—CH₂CH₂-(4′-C) (ENA), 2′-O-aminopropyl (2′-0-AP), 2′-O-dimethylaminoethyl (2′-O-DMAOE), 2′-O-dimethylaminopropyl (2′-O-DMAP), 2′-O-dimethylaminoethyloxyethyl (2′-O-DMAEOE) and gem 2′-OMe/2′F with 2′-O-Me in the arabinose configuration.

[0682] It is to be understood that when a particular nucleotide is linked through its 2′-position to the next nucleotide, the sugar modifications described herein can be placed at the 3′-position of the sugar for that particular nucleotide, e.g., the nucleotide that is linked through its 2′-position. A modification at the 3′ position can be present in the xylose configuration The term “xylose configuration” refers to the placement of a substituent on the C3′ of ribose in the same configuration as the 3′-OH is in the xylose sugar.

[0683] The hydrogen attached to C4′ and/or C1′ can be replaced by a straight- or branched-optionally substituted alkyl, optionally substituted alkenyl, optionally substituted alkynyl, wherein backbone of the alkyl, alkenyl and alkynyl can contain one or more of O, S, S(O), SO₂, N(R′), C(O), N(R′)C(O)O, OC(O)N(R′), CH(Z′), phosphorous containing linkage, optionally substituted aryl, optionally substituted heteroaryl, optionally substituted heterocyclic or optionally substituted cycloalkyl, where R′ is hydrogen, acyl or optionally substituted aliphatic, Z′ is selected from the group consisting of OR₁₁, COR₁₁, CO₂R₁₁,

[chemical structure]

NR₂₁R₃₁, CONR₂₁R₃₁, CON(H)NR₂₁R₃₁, ONR₂₁R₃₁, CON(H)N=CR₄₁R₅₁, N(R₂₁)C(═NR₃₁)NR₂₁R₃₁, N(R₂₁)C(O)NR₂₁R₃₁, N(R₂₁)C(S)NR₂₁R₃₁, OC(O)NR₂₁R₃₁, SC(O)NR₂₁R₃₁, N(R₂₁)C(S)OR₁₁, N(R₂₁)C(O)OR₁₁, N(R₂₁)C(O)SR₁₁, N(R₂₁)N═CR₄₁R₅₁, ON═CR₄, R₅₁, SO₂R₁₁, SOR₁, SR₁₁, and substituted or unsubstituted heterocyclic; R₂₁ and R₃₁ for each occurrence are independently hydrogen, acyl, unsubstituted or substituted aliphatic, aryl, heteroaryl, heterocyclic, OR₁₁, COR₁, CO₂R₁₁, or NR₁₁R₁₁′; or R₂₁ and R₃₁, taken together with the atoms to which they are attached, form a heterocyclic ring; R₄₁ and R₅₁ for each occurrence are independently hydrogen, acyl, unsubstituted or substituted aliphatic, aryl, heteroaryl, heterocyclic, OR₁₁, COR₁₁, or CO₂R₁₁, or NR₁₁R₁₁′; and R₁₁ and R₁′ are independently hydrogen, aliphatic, substituted aliphatic, aryl, heteroaryl, or heterocyclic. In some embodiments, the hydrogen attached to the C4′ of the 5′ terminal nucleotide is replaced.

[0684] In some embodiments, C4′ and C5′ together form an optionally substituted heterocyclic, preferably comprising at least one —PX(Y)—, wherein X is H, OH, OM, SH, optionally substituted alkyl, optionally substituted alkoxy, optionally substituted alkylthio, optionally substituted alkylamino or optionally substituted dialkylamino, where M is independently for each occurrence an alki metal or transition metal with an overall charge of +1; and Y is O, S, or NR′, where R′ is hydrogen, optionally substituted aliphatic. Preferably this modification is at the 5 terminal of the iRNA.

[0685] In certain embodiments, LNA's include bicyclic nucleoside having the formula:

[chemical structure]

wherein:
[0686] Bₓ is a heterocyclic base moiety;
[0687] T₁ is H or a hydroxyl protecting group;
[0688] T₂ is H, a hydroxyl protecting group or a reactive phosphorus group;
[0689] Z is C1-C6 alkyl, C2-C6 alkenyl, C2-C6 alkynyl, substituted C1-C6 alkyl, substituted C2-C6 alkenyl, substituted C2-C6 alkynyl, acyl, substituted acyl, or substituted amide.

[0690] In some embodiments, each of the substituted groups, is, independently, mono or poly substituted with optionally protected substituent groups independently selected from halogen, oxo, hydroxyl, OJ1, NJ1J2, SJ1, N3, OC(═X)J1, OC(═X)NJ1J2, NJ3C(═X)NJ1J2 and CN, wherein each J1, J2 and J3 is, independently, H or C1-C6 alkyl, and X is O, S or NJ1.

[0691] In certain such embodiments, each of the substituted groups, is, independently, mono or poly substituted with substituent groups independently selected from halogen, oxo, hydroxyl, OJ1, NJ11J2, SJ1, N3, OC(═X)J1, and NJ3C(═X)NJ1IJ2, wherein each J1, J2 and J3 is, independently, H, C1-C6 alkyl, or substituted C1-C6 alkyl and X is 0 or NJ1.

[0692] In certain embodiments, the Z group is C1-C6 alkyl substituted with one or more Xx, wherein each Xx is independently OJ1, NJ1J2, SJ1, N3, OC(═X)J1, OC(═X)NJ1J2, NJ3C(═X)NJ1J2 or CN; wherein each J1, J2 and J3 is, independently, H or C1-C6 alkyl, and X is O, S or NJ1. In another embodiment, the Z group is C1-C6 alkyl substituted with one or more Xx, wherein each Xx is independently halo (e.g., fluoro), hydroxyl, alkoxy (e.g., CH₃O—), substituted alkoxy or azido.

[0693] In certain embodiments, the Z group is —CH₂Xx, wherein Xx is OJ1, NJ1J2, SJ1, N3, OC(═X)J1, OC(═X)NJ1J2, NJ3C(═X)NJ1J2 or CN; wherein each J1, J2 and J3 is, independently, H or C1-C6 alkyl, and X is O, S or NJ1. In another embodiment, the Z group is —CH₂Xx, wherein Xx is halo (e.g., fluoro), hydroxyl, alkoxy (e.g., CH₃O—) or azido.

[0694] In certain such embodiments, the Z group is in the (R)-configuration:

[chemical structure]

[0695] In certain such embodiments, the Z group is in the (S)-configuration:

[chemical structure]

[0696] In certain embodiments, each T₁ and T₂ is a hydroxyl protecting group. A preferred list of hydroxyl protecting groups includes benzyl, benzoyl, 2,6-dichlorobenzyl, t-butyldimethylsilyl, t-butyldiphenylsilyl, mesylate, tosylate, dimethoxytrityl (DMT), 9-phenylxanthine-9-yl (Pixyl) and 9-(p-methoxyphenyl)xanthine-9-yl (MOX). In certain embodiments, T₁ is a hydroxyl protecting group selected from acetyl, benzyl, t-butyldimethylsilyl, t-butyldiphenylsilyl and dimethoxytrityl wherein a more preferred hydroxyl protecting group is T₁ is 4,4′-dimethoxytrityl.

[0697] In certain embodiments, T₂ is a reactive phosphorus group wherein preferred reactive phosphorus groups include diisopropylcyanoethoxy phosphoramidite and H-phosphonate. In certain embodiments T₁ is 4,4′-dimethoxytrityl and T₂ is diisopropylcyanoethoxy phosphoramidite.

[0698] In certain embodiments, the compounds of the invention comprise at least one monomer of the formula:

[chemical structure]

or of the formula:

[chemical structure]

or of the formula:

[chemical structure]

[0699] wherein
[0700] Bₓ is a heterocyclic base moiety;
[0701] T₃ is H, a hydroxyl protecting group, a linked conjugate group or an internucleoside linking group attached to a nucleoside, a nucleotide, an oligonucleoside, an oligonucleotide, a monomeric subunit or an oligomeric compound;
[0702] T₄ is H, a hydroxyl protecting group, a linked conjugate group or an internucleoside linking group attached to a nucleoside, a nucleotide, an oligonucleoside, an oligonucleotide, a monomeric subunit or an oligomeric compound;
[0703] wherein at least one of T₃ and T₄ is an internucleoside linking group attached to a nucleoside, a nucleotide, an oligonucleoside, an oligonucleotide, a monomeric subunit or an oligomeric compound; and
[0704] Z is C₁-C₆ alkyl, C₂-C₆ alkenyl, C₂-C₆ alkynyl, substituted C₁-C₆ alkyl, substituted C₂-C₆ alkenyl, substituted C₂-C₆ alkynyl, acyl, substituted acyl, or substituted amide.

[0705] In some embodiments, each of the substituted groups, is, independently, mono or poly substituted with optionally protected substituent groups independently selected from halogen, oxo, hydroxyl, OJ1, NJ1J2, SJ1, N3, OC(═X)J1, OC(═X)NJ1J2, NJ3C(═X)NJ1J2 and CN, wherein each J1, J2 and J3 is, independently, H or C1-C6 alkyl, and X is O, S or NJ1.

[0706] In some embodiments, each of the substituted groups, is, independently, mono or poly substituted with substituent groups independently selected from halogen, oxo, hydroxyl, OJ1, NJ1J2, SJ1, N3, OC(═X)J1, and NJ3C(═X)NJ1J2, wherein each J1, J2 and J3 is, independently, H or C₁-C₆ alkyl, and X is O or NJ1.

[0707] In certain such embodiments, at least one Z is C₁-C₆ alkyl or substituted C₁-C₆ alkyl. In certain embodiments, each Z is, independently, C₁-C₆ alkyl or substituted C₁-C₆ alkyl. In certain embodiments, at least one Z is C₁-C₆ alkyl. In certain embodiments, each Z is, independently, C₁-C₆ alkyl. In certain embodiments, at least one Z is methyl. In certain embodiments, each Z is methyl. In certain embodiments, at least one Z is ethyl. In certain embodiments, each Z is ethyl. In certain embodiments, at least one Z is substituted C₁-C₆ alkyl. In certain embodiments, each Z is, independently, substituted C₁-C₆ alkyl. In certain embodiments, at least one Z is substituted methyl. In certain embodiments, each Z is substituted methyl. In certain embodiments, at least one Z is substituted ethyl. In certain embodiments, each Z is substituted ethyl.

[0708] In certain embodiments, at least one substituent group is C₁-C₆ alkoxy (e.g., at least one Z is C₁-C₆ alkyl substituted with one or more C₁-C₆ alkoxy). In another embodiment, each substituent group is, independently, C₁-C₆ alkoxy (e.g., each Z is, independently, C₁-C₆ alkyl substituted with one or more C₁-C₆ alkoxy).

[0709] In certain embodiments, at least one C₁-C₆ alkoxy substituent group is CH₃O— (e.g., at least one Z is CH₃OCH₂—). In another embodiment, each C₁-C₆ alkoxy substituent group is CH₃O— (e.g., each Z is CH₃OCH₂—).

[0710] In certain embodiments, at least one substituent group is halogen (e.g., at least one Z is C₁-C₆ alkyl substituted with one or more halogen). In certain embodiments, each substituent group is, independently, halogen (e.g., each Z is, independently, C₁-C₆ alkyl substituted with one or more halogen). In certain embodiments, at least one halogen substituent group is fluoro (e.g., at least one Z is CH₂FCH₂—, CHF₂CH₂— or CF₃CH₂—). In certain embodiments, each halo substituent group is fluoro (e.g., each Z is, independently, CH₂FCH₂—, CHF₂CH₂— or CF₃CH₂—).

[0711] In certain embodiments, at least one substituent group is hydroxyl (e.g., at least one Z is C1-C6 alkyl substituted with one or more hydroxyl). In certain embodiments, each substituent group is, independently, hydroxyl (e.g., each Z is, independently, C₁-C₆ alkyl substituted with one or more hydroxyl). In certain embodiments, at least one Z is HOCH₂—. In another embodiment, each Z is HOCH₂—.

[0712] In certain embodiments, at least one Z is CH₃—, CH₃CH₂—, CH₂OCH₃—, CH₂F— or HOCH₂—. In certain embodiments, each Z is, independently, CH₃—, CH₃CH₂—, CH₂OCH₃—, CH₂F— or HOCH₂—.

[0713] In certain embodiments, at least one Z group is C₁-C₆ alkyl substituted with one or more Xx, wherein each Xx is, independently, OJ1, NJ1J2, SJ1, N3, OC(═X)J1, OC(═X)NJ1J2, NJ3C(═X)NJ1J2 or CN; wherein each J1, J2 and J3 is, independently, H or C₁-C₆ alkyl, and X is O, S or NJ1. In another embodiment, at least one Z group is C₁-C₆ alkyl substituted with one or more Xx, wherein each Xx is, independently, halo (e.g., fluoro), hydroxyl, alkoxy (e.g., CH₃O—) or azido.

[0714] In certain embodiments, each Z group is, independently, C₁-C₆ alkyl substituted with one or more Xx, wherein each Xx is independently OJ1, NJ1J2, SJ1, N3, OC(═X)J1, OC(═X)NJ1J2, NJ3C(═X)NJ1J2 or CN; wherein each J1, J2 and J3 is, independently, H or C₁-C₆ alkyl, and X is O, S or NJ1. In another embodiment, each Z group is, independently, C₁-C₆ alkyl substituted with one or more Xx, wherein each Xx is independently halo (e.g., fluoro), hydroxyl, alkoxy (e.g., CH₃O—) or azido.

[0715] In certain embodiments, at least one Z group is —CH₂Xx, wherein Xx is OJ1, NJ1J2, SJ1, N3, OC(═X)J1, OC(═X)NJ1J2, NJ3C(═X)NJ1J2 or CN; wherein each J1, J2 and J3 is, independently, H or C₁-C₆ alkyl, and X is O, S or NJ1 In certain embodiments, at least one Z group is —CH₂Xx, wherein Xx is halo (e.g., fluoro), hydroxyl, alkoxy (e.g., CH₃O—) or azido.

[0716] In certain embodiments, each Z group is, independently, —CH₂Xx, wherein each Xx is, independently, OJ1, NJ1J2, SJ1, N3, OC(═X)J1, OC(═X)NJ1J2, NJ3C(═X)NJ1J2 or CN; wherein each J1, J2 and J3 is, independently, H or C₁-C₆ alkyl, and X is O, S or NJ1. In another embodiment, each Z group is, independently, —CH₂Xx, wherein each Xx is, independently, halo (e.g., fluoro), hydroxyl, alkoxy (e.g., CH₃O—) or azido.

[0717] In certain embodiments, at least one Z is CH₃—. In another embodiment, each Z is, CH₃—.

[0718] In certain embodiments, the Z group of at least one monomer is in the (R)-configuration represented by the formula:

[chemical structure]

or the formula:

[chemical structure]

or the formula:

[chemical structure]

[0719] IN certain embodiments, the Z group of each monomer of the formula is in the (R)-configuration.

[0720] In certain embodiments, the Z group of at least one monomer is in the (S)-configuration represented by the formula:

[chemical structure]

or the formula:

[chemical structure]

or the formula:

[chemical structure]

[0721] In certain embodiments, the Z group of each monomer of the formula is in the (S)-configuration.

[0722] In certain embodiments, T₃ is H or a hydroxyl protecting group. In certain embodiments, T₄ is H or a hydroxyl protecting group. In a further embodiment T₃ is an internucleoside linking group attached to a nucleoside, a nucleotide or a monomeric subunit. In certain embodiments, T₄ is an internucleoside linking group attached to a nucleoside, a nucleotide or a monomeric subunit. In certain embodiments, T₃ is an internucleoside linking group attached to an oligonucleoside or an oligonucleotide. In certain embodiments, T₄ is an internucleoside linking group attached to an oligonucleoside or an oligonucleotide. In certain embodiments, T₃ is an internucleoside linking group attached to an oligomeric compound. In certain embodiments, T₄ is an internucleoside linking group attached to an oligomeric compound. In certain embodiments, at least one of T₃ and T₄ comprises an internucleoside linking group selected from phosphodiester or phosphorothioate.

[0723] In certain embodiments, dsRNA agent of the invention comprise at least one region of at least two contiguous monomers of the formula:

[chemical structure]

or of the formula:

[chemical structure]

or of the formula:

[chemical structure]

[0724] In certain such embodiments, LNAs include, but are not limited to, (A) α-L-Methyleneoxy (4′-CH₂—O-2′) LNA, (B) β-D-Methyleneoxy (4′-CH₂—O-2′) LNA, (C) Ethyleneoxy (4′-(CH₂)2-O-2′) LNA, (D) Aminooxy (4′-CH₂—O—N(R)-2′) LNA and (E) Oxyamino (4′-CH₂—N(R)—O-2′) LNA, as depicted below:

[chemical structure]

[0725] In certain embodiments, the dsRNA agent of the invention comprises at least two regions of at least two contiguous monomers of the above formula. In certain embodiments, the dsRNA agent of the invention comprises a gapped motif. In certain embodiments, the dsRNA agent of the invention comprises at least one region of from about 8 to about 14 contiguous β-D-2′-deoxyribofuranosyl nucleosides. In certain embodiments, the dsRNA agent of the invention comprises at least one region of from about 9 to about 12 contiguous β-D-2′-deoxyribofuranosyl nucleosides.

[0726] In certain embodiments, the dsRNA agent of the invention comprises at least one (e.g., 1, 2, 3, 4, 5, 6, 7, 8, 9, 10, 11, 12, 13, 14, 15 or more) comprises at least one (S)-cEt monomer of the formula.

[chemical structure]

[0727] wherein Bₓ is heterocyclic base moiety.

[0728] In certain embodiments, monomers include sugar mimetics. In certain such embodiments, a mimetic is used in place of the sugar or sugar-internucleoside linkage combination, and the nucleobase is maintained for hybridization to a selected target. Representative examples of a sugar mimetics include, but are not limited to, cyclohexenyl or morpholino. Representative examples of a mimetic for a sugar-internucleoside linkage combination include, but are not limited to, peptide nucleic acids (PNA) and morpholino groups linked by uncharged achiral linkages. In some instances a mimetic is used in place of the nucleobase. Representative nucleobase mimetics are well known in the art and include, but are not limited to, tricyclic phenoxazine analogs and universal bases (Berger et al., Nuc Acid Res. 2000, 28:2911-14, incorporated herein by reference). Methods of synthesis of sugar, nucleoside and nucleobase mimetics are well known to those skilled in the art.

### C. Intersugar Linkage Modifications

[0729] Described herein are linking groups that link monomers (including, but not limited to, modified and unmodified nucleosides and nucleotides) together, thereby forming an oligomeric compound, e.g., an oligonucleotide. Such linking groups are also referred to as intersugar linkage. The two main classes of linking groups are defined by the presence or absence of a phosphorus atom. Representative phosphorus containing linkages include, but are not limited to, phosphodiesters (P═O), phosphotriesters, methylphosphonates, phosphoramidate, and phosphorothioates (P═S). Representative non-phosphorus containing linking groups include, but are not limited to, methylenemethylimino (—CH₂—N(CH₃)—O—CH₂—), thiodiester (—O—C(O)—S—), thionocarbamate (—O—C(O)(NH)—S—); siloxane (—O—Si(H)₂—O—); and N,N′-dimethylhydrazine (—CH₂—N(CH₃)—N(CH₃)—). Modified linkages, compared to natural phosphodiester linkages, can be used to alter, typically increase, nuclease resistance of the oligonucleotides. In certain embodiments, linkages having a chiral atom can be prepared as racemic mixtures, as separate enantomers. Representative chiral linkages include, but are not limited to, alkylphosphonates and phosphorothioates. Methods of preparation of phosphorous-containing and non-phosphorous-containing linkages are well known to those skilled in the art.

[0730] The phosphate group in the linking group can be modified by replacing one of the oxygens with a different substituent. One result of this modification can be increased resistance of the oligonucleotide to nucleolytic breakdown. Examples of modified phosphate groups include phosphorothioate, phosphoroselenates, borano phosphates, borano phosphate esters, hydrogen phosphonates, phosphoroamidates, alkyl or aryl phosphonates and phosphotriesters. In some embodiments, one of the non-bridging phosphate oxygen atoms in the linkage can be replaced by any of the following: S, Se, BR₃ (R is hydrogen, alkyl, aryl), C (i.e. an alkyl group, an aryl group, etc.,), H, NR₂ (R is hydrogen, optionally substituted alkyl, aryl), or OR (R is optionally substituted alkyl or aryl). The phosphorous atom in an unmodified phosphate group is achiral. However, replacement of one of the non-bridging oxygens with one of the above atoms or groups of atoms renders the phosphorous atom chiral; in other words a phosphorous atom in a phosphate group modified in this way is a stereogenic center. The stereogenic phosphorous atom can possess either the “R” configuration (herein Rp) or the “S” configuration (herein Sp).

[0731] Phosphorodithioates have both non-bridging oxygens replaced by sulfur. The phosphorus center in the phosphorodithioates is achiral which precludes the formation of oligonucleotides diastereomers. Thus, while not wishing to be bound by theory, modifications to both non-bridging oxygens, which eliminate the chiral center, e.g. phosphorodithioate formation, can be desirable in that they cannot produce diastereomer mixtures. Thus, the non-bridging oxygens can be independently any one of O, S, Se, B, C, H, N, or OR (R is alkyl or aryl).

[0732] The phosphate linker can also be modified by replacement of bridging oxygen, (i.e. oxygen that links the phosphate to the sugar of the monomer), with nitrogen (bridged phosphoroamidates), sulfur (bridged phosphorothioates) and carbon (bridged methylenephosphonates). The replacement can occur at the either one of the linking oxygens or at both linking oxygens. When the bridging oxygen is the 3′-oxygen of a nucleoside, replacement with carbon is preferred. When the bridging oxygen is the 5′-oxygen of a nucleoside, replacement with nitrogen is preferred.

[0733] Modified phosphate linkages where at least one of the oxygen linked to the phosphate has been replaced or the phosphate group has been replaced by a non-phosphorous group, are also referred to as “non-phosphodiester intersugar linkage” or “non-phosphodiester linker.”

[0734] In certain embodiments, the phosphate group can be replaced by non-phosphorus containing connectors, e.g. dephospho linkers. Dephospho linkers are also referred to as non-phosphodiester linkers herein. While not wishing to be bound by theory, it is believed that since the charged phosphodiester group is the reaction center in nucleolytic degradation, its replacement with neutral structural mimics should impart enhanced nuclease stability. Again, while not wishing to be bound by theory, it can be desirable, in some embodiment, to introduce alterations in which the charged phosphate group is replaced by a neutral moiety.

[0735] Examples of moieties which can replace the phosphate group include, but are not limited to, amides (for example amide-3 (3′-CH₂—C(═O)—N(H)-5′) and amide-4 (3′-CH₂—N(H)—C(═O)-5′)), hydroxylamino, siloxane (dialkylsiloxxane), carboxamide, carbonate, carboxymethyl, carbamate, carboxylate ester, thioether, ethylene oxide linker, sulfide, sulfonate, sulfonamide, sulfonate ester, thioformacetal (3′-S—CH₂—O-5′), formacetal (3′-O—CH₂—O-5′), oxime, methyleneimino, methykenecarbonylamino, methylenemethylimino (MMI, 3′-CH₂—N(CH₃)—O-5′), methylenehydrazo, methylenedimethylhydrazo, methyleneoxymethylimino, ethers (C3′-O—C5′), thioethers (C3′-S—C5′), thioacetamido (C3′-N(H)—C(═O)—CH₂—S—C5′, C3′-O—P(O)—O—SS—C5′, C3′-CH₂—NH—NH—C5′, 3′-NHP(O)(OCH₃)—O-5′ and 3′-NHP(O)(OCH₃)—O-5′ and nonionic linkages containing mixed N, O, S and CH₂ component parts. See for example, Carbohydrate Modifications in Antisense Research; Y. S. Sanghvi and P. D. Cook Eds. ACS Symposium Series 580; Chapters 3 and 4, (pp. 40-65). Preferred embodiments include methylenemethylimino (MMI), methylenecarbonylamino, amides, carbamate and ethylene oxide linker.

[0736] One skilled in the art is well aware that in certain instances replacement of a non-bridging oxygen can lead to enhanced cleavage of the intersugar linkage by the neighboring 2′-OH, thus in many instances, a modification of a non-bridging oxygen can necessitate modification of 2′-OH, e.g., a modification that does not participate in cleavage of the neighboring intersugar linkage, e.g., arabinose sugar, 2′-O-alkyl, 2′-F, LNA and ENA.

[0737] Preferred non-phosphodiester intersugar linkages include phosphorothioates, phosphorothioates with an at least 1%, 5%, 10%, 20%, 30%, 40%, 50%, 60%, 70%, 80%, 90% 95% or more enantiomeric excess of Sp isomer, phosphorothioates with an at least 1%, 5%, 10%, 20%, 30%, 40%, 50%, 60%, 70%, 80%, 90% 95% or more enantiomeric excess of Rp isomer, phosphorodithioates, phsophotriesters, aminoalkylphosphotrioesters, alkyl-phosphonaters (e.g., methyl-phosphonate), selenophosphates, phosphoramidates (e.g., N-alkylphosphoramidate), and boranophosphonates.

[0738] In some embodiments, the dsRNA agent of the invention comprises at least one (e.g., 1, 2, 3, 4, 5, 6, 7, 8, 9, 10, 11, 12, 13, 14, 15 or more and upto including all) modified or nonphosphodiester linkages. In some embodiments, the dsRNA agent of the invention comprises at least one (e.g., 1, 2, 3, 4, 5, 6, 7, 8, 9, 10, 11, 12, 13, 14, 15 or more and upto including all) phosphorothioate linkages.

[0739] The dsRNA agent of the inventions can also be constructed wherein the phosphate linker and the sugar are replaced by nuclease resistant nucleoside or nucleotide surrogates. While not wishing to be bound by theory, it is believed that the absence of a repetitively charged backbone diminishes binding to proteins that recognize polyanions (e.g. nucleases). Again, while not wishing to be bound by theory, it can be desirable in some embodiment, to introduce alterations in which the bases are tethered by a neutral surrogate backbone. Examples include the morpholino, cyclobutyl, pyrrolidine, peptide nucleic acid (PNA), aminoethylglycyl PNA (aegPNA) and backnone-extended pyrrolidine PNA (bepPNA) nucleoside surrogates. A preferred surrogate is a PNA surrogate.

[0740] The dsRNA agent of the inventions described herein can contain one or more asymmetric centers and thus give rise to enantiomers, diastereomers, and other stereoisomeric configurations that may be defined, in terms of absolute stereochemistry, as (R) or (S), such as for sugar anomers, or as (D) or (L) such as for amino acids et al. Included in the dsRNA agent of the inventions provided herein are all such possible isomers, as well as their racemic and optically pure forms.

### D. Terminal Modifications

[0741] In some embodiments, the dsRNA agent further comprises a phosphate or phosphate mimic at the 5′-end of the antisense strand. In one embodiment, the phosphate mimic is a 5′-vinyl phosphonate (VP).

[0742] In some embodiments, the 5′-end of the antisense strand of the dsRNA agent does not contain a 5′-vinyl phosphonate (VP).

[0743] Ends of the iRNA agent of the invention can be modified. Such modifications can be at one end or both ends. For example, the 3′ and/or 5′ ends of an iRNA can be conjugated to other functional molecular entities such as labeling moieties, e.g., fluorophores (e.g., pyrene, TAMRA, fluorescein, Cy3 or Cy5 dyes) or protecting groups (based e.g., on sulfur, silicon, boron or ester). The functional molecular entities can be attached to the sugar through a phosphate group and/or a linker. The terminal atom of the linker can connect to or replace the linking atom of the phosphate group or the C-3′ or C-5′ O, N, S or C group of the sugar. Alternatively, the linker can connect to or replace the terminal atom of a nucleotide surrogate (e.g., PNAs).

[0744] When a linker/phosphate-functional molecular entity-linker/phosphate array is interposed between two strands of a double stranded oligomeric compound, this array can substitute for a hairpin loop in a hairpin-type oligomeric compound.

[0745] Terminal modifications useful for modulating activity include modification of the 5′ end of iRNAs with phosphate or phosphate analogs. In certain embodiments, the 5′ end of an iRNA is phosphorylated or includes a phosphoryl analog. Exemplary 5′-phosphate modifications include those which are compatible with RISC mediated gene silencing. Modifications at the 5′-terminal end can also be useful in stimulating or inhibiting the immune system of a subject. In some embodiments, the 5′-end of the oligomeric compound comprises the modification

[chemical structure]

wherein W, X and Y are each independently selected from the group consisting of O, OR (R is hydrogen, alkyl, aryl), S, Se, BR₃ (R is hydrogen, alkyl, aryl), BH3-, C (i.e. an alkyl group, an aryl group, etc.,), H, NR₂ (R is hydrogen, alkyl, aryl), or OR (R is hydrogen, alkyl or aryl); A and Z are each independently for each occurrence absent, O, S, CH₂, NR (R is hydrogen, alkyl, aryl), or optionally substituted alkylene, wherein backbone of the alkylene can comprise one or more of O, S, SS and NR (R is hydrogen, alkyl, aryl) internally and/or at the end; and n is 0-2. In some embodiments, n is 1 or 2. It is understood that A is replacing the oxygen linked to 5′ carbon of sugar. When n is O, W and Y together with the P to which they are attached can form an optionally substituted 5-8 membered heterocyclic, wherein W an Y are each independently O, S, NR′ or alkylene. Preferably the heterocyclic is substituted with an aryl or heteroaryl. In some embodiments, one or both hydrogen on C₅′ of the 5′-terminal nucleotides are replaced with a halogen, e.g., F.

[0746] Exemplary 5′-modifications include, but are not limited to, 5′-monophosphate ((HO)₂(O)P—O-5′); 5′-diphosphate ((HO)₂(O)P—O—P(HO)(O)—O-5′); 5′-triphosphate ((HO)₂(O)P—O—(HO)(O)P—O—P(HO)(O)—O-5′); 5′-monothiophosphate (phosphorothioate; (HO)2(S)P—O-5′); 5′-monodithiophosphate (phosphorodithioate; (HO)(HS)(S)P—O-5′), 5′-phosphorothiolate ((HO)2(O)P—S-5′); 5′-alpha-thiotriphosphate; 5′-beta-thiotriphosphate; 5′-gamma-thiotriphosphate; 5′-phosphoramidates ((HO)₂(O)P—NH—5′, (HO)(NH₂)(O)P—O-5′). Other 5′-modification include 5′-alkylphosphonates (R(OH)(O)P—O-5′, R=alkyl, e.g., methyl, ethyl, isopropyl, propyl, etc.,), 5′-alkyletherphosphonates (R(OH)(O)P—O-5′, R=alkylether, e.g., methoxymethyl (CH₂OMe), ethoxymethyl, etc.,). Other exemplary 5′-modifications include where Z is optionally substituted alkyl at least once, e.g., ((HO)₂(X)P—O[—(CH₂)ₐ-O—P(X)(OH)—O]_{b}—5′, ((HO)₂(X)P—O[—(CH₂)ₐ—P(X)(OH)—O]_{b}—5′, ((HO)₂(X)P—[—(CH₂)ₐ—O—P(X)(OH)—O]_{b}—5′; dialkyl terminal phosphates and phosphate mimics: HO[—(CH₂)ₐ—O—P(X)(OH)—O]_{b}—5′, H₂N[—(CH₂)ₐ—O—P(X)(OH)—O]_{b}—5′, H[—(CH₂)ₐ—O—P(X)(OH)—O]b- 5′, Me₂N[—(CH₂)ₐ—O—P(X)(OH)—O]_{b}—5′, HO[—(CH₂)ₐ—P(X)(OH)—O]_{b}—5′, H₂N[—(CH₂)ₐ—P(X)(OH)—O]b-5′, H[—(CH₂)ₐ—P(X)(OH)—O]_{b}—5′, Me₂N[—(CH₂)ₐ—P(X)(OH)—O]_{b}—5′, wherein a and b are each independently 1-10. Other embodiments, include replacement of oxygen and/or sulfur with BH₃, BH₃⁻ and/or Se.

[0747] Terminal modifications can also be useful for monitoring distribution, and in such cases the preferred groups to be added include fluorophores, e.g., fluorescein or an Alexa dye, e.g., Alexa 488. Terminal modifications can also be useful for enhancing uptake, useful modifications for this include targeting ligands. Terminal modifications can also be useful for cross-linking an oligonucleotide to another moiety; modifications useful for this include mitomycin C, psoralen, and derivatives thereof.

### E. Thermally Destabilizing Modifications

[0748] The compounds of the invention, such as iRNAs or dsRNA agents, can be optimized for RNA interference by increasing the propensity of the iRNA duplex to disassociate or melt (decreasing the free energy of duplex association) by introducing a thermally destabilizing modification in the sense strand at a site opposite to the seed region of the antisense strand (i.e., at positions 2-8 of the 5′-end of the antisense strand). This modification can increase the propensity of the duplex to disassociate or melt in the seed region of the antisense strand.

[0749] The thermally destabilizing modifications can include abasic modification; mismatch with the opposing nucleotide in the opposing strand; and sugar modification such as 2′-deoxy modification or acyclic nucleotide, e.g., unlocked nucleic acids (UNA) or glycerol nucleic acid (GNA).

[0750] Exemplified abasic modifications are:

[chemical structure]

[0751] Exemplified sugar modifications are:

[chemical structure]

[0752] The term “acyclic nucleotide” refers to any nucleotide having an acyclic ribose sugar, for example, where any of bonds between the ribose carbons (e.g., C1′-C2′, C2′-C3′, C3′-C4′, C4′-O4′, or C1′-O4′) is absent and/or at least one of ribose carbons or oxygen (e.g., C1′, C2′, C3′, C4′ or O4′) are independently or in combination absent from the nucleotide. In some embodiments, acyclic nucleotide is

[chemical structure]

wherein B is a modified or unmodified nucleobase, R¹ and R² independently are H, halogen, OR₃, or alkyl; and R₃ is H, alkyl, cycloalkyl, aryl, aralkyl, heteroaryl or sugar). The term “UNA” refers to unlocked acyclic nucleic acid, wherein any of the bonds of the sugar has been removed, forming an unlocked “sugar” residue. In one example, UNA also encompasses monomers with bonds between C1′-C4′ being removed (i.e. the covalent carbon-oxygen-carbon bond between the C1′ and C4′ carbons). In another example, the C2′-C3′ bond (i.e. the covalent carbon-carbon bond between the C2′ and C3′ carbons) of the sugar is removed (see Mikhailov et. al., Tetrahedron Letters, 26 (17): 2059 (1985); and Fluiter et al., Mol. Biosyst., 10: 1039 (2009), which are hereby incorporated by reference in their entirety). The acyclic derivative provides greater backbone flexibility without affecting the Watson-Crick pairings. The acyclic nucleotide can be linked via 2′-5′ or 3′-5′ linkage.

[0753] The term ‘GNA’ refers to glycol nucleic acid which is a polymer similar to DNA or RNA but differing in the composition of its “backbone” in that is composed of repeating glycerol units linked by phosphodiester bonds:

[chemical structure]

[0754] The thermally destabilizing modification can be mismatches (i.e., noncomplementary base pairs) between the rmally destabilizing nucleotide and the opposing nucleotide in the opposite strand within the dsRNA duplex. Exemplary mismatch basepairs include G:G, G:A, G:U, G:T, A:A, A:C, C:C, C:U, C:T, U:U, T:T, U:T, or a combination thereof. Other mismatch base pairings known in the art are also amenable to the present invention. A mismatch can occur between nucleotides that are either naturally occurring nucleotides or modified nucleotides, i.e., the mismatch base pairing can occur between the nucleobases from respective nucleotides independent of the modifications on the ribose sugars of the nucleotides. In certain embodiments, the compounds of the invention, such as siRNA or iRNA agent, contains at least one nucleobase in the mismatch pairing that is a 2′-deoxy nucleobase; e.g., the 2′-deoxy nucleobase is in the sense strand.

[0755] More examples of abasic nucleotide, acyclic nucleotide modifications (including UNA and GNA), and mismatch modifications have been described in detail in WO 2011/133876, which is herein incorporated by reference in its entirety.

[0756] The thermally destabilizing modifications may also include universal base with reduced or abolished capability to form hydrogen bonds with the opposing bases, and phosphate modifications.

[0757] Nucleobase modifications with impaired or completely abolished capability to form hydrogen bonds with bases in the opposite strand have been evaluated for destabilization of the central region of the dsRNA duplex as described in WO 2010/0011895, which is herein incorporated by reference in its entirety. Exemplary nucleobase modifications are:

[chemical structure]

[0758] Exemplary phosphate modifications known to decrease the rmal stability of dsRNA duplexes compared to natural phosphodiester linkages are:

[chemical structure]

[0759] In some embodiments, compounds of the invention can comprise 2′-5′ linkages (with 2′-H, 2′-OH and 2′-OMe and with P═O or P═S). For example, the 2′-5′ linkages modifications can be used to promote nuclease resistance or to inhibit binding of the sense to the antisense strand, or can be used at the 5′ end of the sense strand to avoid sense strand activation by RISC.

[0760] In another embodiment, compounds of the invention can comprise L sugars (e.g., L ribose, L-arabinose with 2′-H, 2′-OH and 2′-OMe). For example, these L sugar modifications can be used to promote nuclease resistance or to inhibit binding of the sense to the antisense strand, or can be used at the 5′ end of the sense strand to avoid sense strand activation by RISC.

[0761] In one embodiment the iRNA agent of the invention is conjugated to a ligand via a carrier, wherein the carrier can be cyclic group or acyclic group; preferably, the cyclic group is selected from pyrrolidinyl, pyrazolinyl, pyrazolidinyl, imidazolinyl, imidazolidinyl, piperidinyl, piperazinyl, [1,3]dioxolane, oxazolidinyl, isoxazolidinyl, morpholinyl, thiazolidinyl, isothiazolidinyl, quinoxalinyl, pyridazinonyl, tetrahydrofuryl and decalin; preferably, the acyclic group is selected from serinol backbone or diethanolamine backbone.

[0762] In some embodiments, at least one strand of the iRNA agent of the invention disclosed herein is 5′ phosphorylated or includes a phosphoryl analog at the 5′ prime terminus. 5′-phosphate modifications include those which are compatible with RISC mediated gene silencing. Suitable modifications include: 5′-monophosphate ((HO)₂(O)P—O-5′); 5′-diphosphate ((HO)₂(O)P—O—P(HO)(O)—O-5′); 5′-triphosphate ((HO)₂(O)P—O—(HO)(O)P—O—P(HO)(O)—O-5′); 5′-guanosine cap (7-methylated or non-methylated) (7m-G-O-5′-(HO)(O)P—O—(HO)(O)P—O—P(HO)(O)—O-5′); 5′-adenosine cap (Appp), and any modified or unmodified nucleotide cap structure (N—O-5′-(HO)(O)P—O—(HO)(O)P—O—P(HO)(O)—O-5′); 5′-monothiophosphate (phosphorothioate; (HO)₂(S)P—O-5′); 5′-monodithiophosphate (phosphorodithioate; (HO)(HS)(S)P—O-5′), 5′-phosphorothiolate ((HO)₂(O)P—S-5′); any additional combination of oxygen/sulfur replaced monophosphate, diphosphate and triphosphates (e.g. 5′-alpha-thiotriphosphate, 5′-gamma-thiotriphosphate, etc.), 5′-phosphoramidates ((HO)₂(O)P—NH—5′, (HO)(NH2)(O)P—O-5′), 5′-alkylphosphonates (R=alkyl=methyl, ethyl, isopropyl, propyl, etc., e.g. RP(OH)(O)—O-5′-, 5′-alkenylphosphonates (i.e. vinyl, substituted vinyl), (OH)₂(O)P-5′-CH₂—), 5′-alkyletherphosphonates (R=alkylether=methoxymethyl (MeOCH2-), ethoxymethyl, etc., e.g. RP(OH)(O)—O-5′-).

V. Modified RNAi agents of the Invention Comprising Motifs

[0763] In certain aspects of the disclosure, the double-stranded RNAi agents of the disclosure include agents with chemical modifications as disclosed, for example, in U.S. Pat. Nos. 9,796,974 and 10,668,170, and U.S. Patent Publication Nos. 2014/288158, 2018/008724, 2019/038768, and 2020/353097, the entire contents of each of which are incorporated herein by reference. As shown therein and in PCT Publication No. WO 2013/074974 (the entire contents of which are incorporated by reference), one or more motifs of three identical modifications on three consecutive nucleotides may be introduced into a sense strand or antisense strand of an RNAi agent, particularly at or near the cleavage site. In some embodiments, the sense strand and antisense strand of the RNAi agent may otherwise be completely modified. The introduction of these motifs interrupts the modification pattern, if present, of the sense or antisense strand. The RNAi agent may be optionally modified with a (S)-glycol nucleic acid (GNA) modification, for instance on one or more residues of the antisense strand.

[0764] In one embodiment, the iRNA agent of the invention is a double ended bluntmer of 19 nt in length, wherein the sense strand contains at least one motif of three 2′-F modifications on three consecutive nucleotides at positions 7, 8, 9 from the 5′ end. The antisense strand contains at least one motif of three 2′-O-methyl modifications on three consecutive nucleotides at positions 11, 12, 13 from the 5′ end.

[0765] In one embodiment, the iRNA agent of the invention is a double ended bluntmer of 20 nt in length, wherein the sense strand contains at least one motif of three 2′-F modifications on three consecutive nucleotides at positions 8, 9, 10 from the 5′ end. The antisense strand contains at least one motif of three 2′-O-methyl modifications on three consecutive nucleotides at positions 11, 12, 13 from the 5′ end.

[0766] In one embodiment, the iRNA agent of the invention is a double ended bluntmer of 21 nt in length, wherein the sense strand contains at least one motif of three 2′-F modifications on three consecutive nucleotides at positions 9, 10, 11 from the 5′ end. The antisense strand contains at least one motif of three 2′-O-methyl modifications on three consecutive nucleotides at positions 11, 12, 13 from the 5′ end.

[0767] In one embodiment, the iRNA agent of the invention comprises a 21 nucleotides (nt) sense strand and a 23 nucleotides (nt) antisense, wherein the sense strand contains at least one motif of three 2′-F modifications on three consecutive nucleotides at positions 9, 10, 11 from the 5′ end; the antisense strand contains at least one motif of three 2′-O-methyl modifications on three consecutive nucleotides at positions 11, 12, 13 from the 5′ end, wherein one end of the iRNA is blunt, while the other end is comprises a 2 nt overhang. Preferably, the 2 nt overhang is at the 3′-end of the antisense.

[0768] In one embodiment, the iRNA agent of the invention comprises a sense and antisense strands, wherein: the sense strand is 25-30 nucleotide residues in length, wherein starting from the 5′ terminal nucleotide (position 1) positions 1 to 23 of said first strand comprise at least 8 ribonucleotides; antisense strand is 36-66 nucleotide residues in length and, starting from the 3′ terminal nucleotide, comprises at least 8 ribonucleotides in the positions paired with positions 1-23 of sense strand to form a duplex; wherein at least the 3′ terminal nucleotide of antisense strand is unpaired with sense strand, and up to 6 consecutive 3′ terminal nucleotides are unpaired with sense strand, thereby forming a 3′ single stranded overhang of 1-6 nucleotides; wherein the 5′ terminus of antisense strand comprises from 10-30 consecutive nucleotides which are unpaired with sense strand, thereby forming a 10-30 nucleotide single stranded 5′ overhang; wherein at least the sense strand 5′ terminal and 3′ terminal nucleotides are base paired with nucleotides of antisense strand when sense and antisense strands are aligned for maximum complementarity, thereby forming a substantially duplexed region between sense and antisense strands; and antisense strand is sufficiently complementary to a target RNA along at least 19 ribonucleotides of antisense strand length to reduce target gene expression when said double stranded nucleic acid is introduced into a mammalian cell; and wherein the sense strand contains at least one motif of three 2′-F modifications on three consecutive nucleotides, where at least one of the motifs occurs at or near the cleavage site. The antisense strand contains at least one motif of three 2′-O-methyl modifications on three consecutive nucleotides at or near the cleavage site.

[0769] In one embodiment, the iRNA agent of the invention comprises a sense and antisense strands, wherein said iRNA agent comprises a first strand having a length which is at least 25 and at most 29 nucleotides and a second strand having a length which is at most 30 nucleotides with at least one motif of three 2′-O-methyl modifications on three consecutive nucleotides at position 11, 12, 13 from the 5′ end; wherein said 3′ end of said first strand and said 5′ end of said second strand form a blunt end and said second strand is 1-4 nucleotides longer at its 3′ end than the first strand, wherein the duplex region region which is at least 25 nucleotides in length, and said second strand is sufficiently complemenatary to a target mRNA along at least 19 nt of said second strand length to reduce target gene expression when said iRNA agent is introduced into a mammalian cell, and wherein dicer cleavage of said iRNA preferentially results in an siRNA comprising said 3′ end of said second strand, thereby reducing expression of the target gene in the mammal.

[0770] In one embodiment, the sense strand of the iRNA agent contains at least one motif of three identical modifications on three consecutive nucleotides, where one of the motifs occurs at the cleavage site in the sense strand. For instance, the sense strand can contain at least one motif of three 2′-F modifications on three consecutive nucleotides within 7-15 positions from the 5′ end.

[0771] In one embodiment, the antisense strand of the iRNA agent can also contain at least one motif of three identical modifications on three consecutive nucleotides, where one of the motifs occurs at or near the cleavage site in the antisense strand. For instance, the antisense strand can contain at least one motif of three 2′-O-methyl modifications on three consecutive nucleotides within 9-15 positions from the 5′ end.

[0772] For iRNA agent having a duplex region of 17-23 nt in length, the cleavage site of the antisense strand is typically around the 10, 11 and 12 positions from the 5′-end. Thus the motifs of three identical modifications may occur at the 9, 10, 11 positions; 10, 11, 12 positions; 11, 12, 13 positions; 12, 13, 14 positions; or 13, 14, 15 positions of the antisense strand, the count starting from the 1^{st} nucleotide from the 5′-end of the antisense strand, or, the count starting from the 1^{st} paired nucleotide within the duplex region from the 5′-end of the antisense strand. The cleavage site in the antisense strand may also change according to the length of the duplex region of the iRNA from the 5′-end.

[0773] In some embodiments, the iRNA agent comprises a sense strand and antisense strand each having 14 to 30 nucleotides, wherein the sense strand contains at least two motifs of three identical modifications on three consecutive nucleotides, where at least one of the motifs occurs at or near the cleavage site within the strand and at least one of the motifs occurs at another portion of the strand that is separated from the motif at the cleavage site by at least one nucleotide. In one embodiment, the antisense strand also contains at least one motif of three identical modifications on three consecutive nucleotides, where at least one of the motifs occurs at or near the cleavage site within the strand. The modification in the motif occurring at or near the cleavage site in the sense strand is different than the modification in the motif occurring at or near the cleavage site in the antisense strand.

[0774] In some embodiments, the iRNA agent comprises a sense strand and antisense strand each having 14 to 30 nucleotides, wherein the sense strand contains at least one motif of three 2′-F modifications on three consecutive nucleotides, where at least one of the motifs occurs at or near the cleavage site in the strand. In one embodiment, the antisense strand also contains at least one motif of three 2′-O-methyl modifications on three consecutive nucleotides at or near the cleavage site.

[0775] In some embodiments, the iRNA agent comprises a sense strand and antisense strand each having 14 to 30 nucleotides, wherein the sense strand contains at least one motif of three 2′-F modifications on three consecutive nucleotides at positions 9, 10, 11 from the 5′ end, and wherein the antisense strand contains at least one motif of three 2′-O-methyl modifications on three consecutive nucleotides at positions 11, 12, 13 from the 5′ end.

[0776] In one embodiment, the iRNA agent of the invention comprises mismatch(es) with the target, within the duplex, or combinations thereof. The mistmatch can occur in the overhang region or the duplex region. The base pair can be ranked on the basis of their propensity to promote dissociation or melting (e.g., on the free energy of association or dissociation of a particular pairing, the simplest approach is to examine the pairs on an individual pair basis, though next neighbor or similar analysis can also be used). In terms of promoting dissociation: A:U is preferred over G:C; G:U is preferred over G:C; and I:C is preferred over G:C (I=inosine). Mismatches, e.g., non-canonical or other than canonical pairings (as described elsewhere herein) are preferred over canonical (A:T, A:U, G:C) pairings; and pairings which include a universal base are preferred over canonical pairings.

[0777] In one embodiment, the iRNA agent of the invention comprises at least one of the first 1, 2, 3, 4, or 5 base pairs within the duplex regions from the 5′-end of the antisense strand can be chosen independently from the group of: A:U, G:U, I:C, and mismatched pairs, e.g., non-canonical or other than canonical pairings or pairings which include a universal base, to promote the dissociation of the antisense strand at the 5′-end of the duplex.

[0778] In one embodiment, the nucleotide at the 1 position within the duplex region from the 5′-end in the antisense strand is selected from the group consisting of A, dA, dU, U, and dT. Alternatively, at least one of the first 1, 2 or 3 base pair within the duplex region from the 5′-end of the antisense strand is an AU base pair. For example, the first base pair within the duplex region from the 5′-end of the antisense strand is an AU base pair.

[0779] In another embodiment, the nucleotide at the 3′-end of the sense strand is deoxythimidine (dT). In another embodiment, the nucleotide at the 3′-end of the antisense strand is deoxythimidine (dT). In one embodiment, there is a short sequence of deoxythimidine nucleotides, for example, two dT nucleotides on the 3′-end of the sense or antisense strand.

[0780] In certain embodiments, the compositions and methods of the disclosure include a vinyl phosphonate (VP) modification of an RNAi agent as described herein. In exemplary embodiments, a 5′-vinyl phosphonate modified nucleotide of the disclosure has the structure:

[chemical structure]

[0781] wherein X is O or S;
[0782] R is hydrogen, hydroxy, fluoro, or C₁₋₂₀alkoxy (e.g., methoxy or n-hexadecyloxy);
[0783] R′ is =C(H)—P(O)(OH)₂ and the double bond between the C5′ carbon and R^{5′} is in the E or Z orientation (e.g., E orientation); and
[0784] B is a nucleobase or a modified nucleobase, optionally where B is adenine, guanine, cytosine, thymine, or uracil.

[0785] A vinyl phosphonate of the instant disclosure may be attached to either the antisense or the sense strand of a dsRNA of the disclosure. In certain embodiments, a vinyl phosphonate of the instant disclosure is attached to the antisense strand of a dsRNA, optionally at the 5′ end of the antisense strand of the dsRNA.

[0786] Vinyl phosphate modifications are also contemplated for the compositions and methods of the instant disclosure. An exemplary vinyl phosphate structure includes the preceding structure, where R5′ is =C(H)—OP(O)(OH)2 and the double bond between the C5′ carbon and R5′ is in the E or Z orientation (e.g., E orientation).

[0787] In one aspect, the invention relates to a double-stranded RNA (dsRNA) agent for inhibiting the expression of a target gene having reduced off-target effects as described in U.S. Pat. Nos. 10,233,448, 10, 612,024, and 10,612,027, and U.S. Patent Publication Nos. 2017/275626, 2019/241891, 2019/241893, and 2021/017519, the entire contents of each of which are incorporated herein by reference. As exemplified therein, a motif comprising, e.g., a thermally destabilizing nucleotide, e.g., i) a nucleotide that forms a mismatch pair with the opposing nucleotide in the antisense strand, ii) a nucleotide having an abasic modification, and/or iii) a nucleotide having a sugar modification, and placed at a site opposite to the seed region (positions 2-8) may be introduced into the sense strand.

[0788] In one embodiment, the dsRNA agent of the invention does not contain any 2′-F modification.

[0789] In one embodiment, the sense strand and/or antisense strand of the dsRNA agent comprises one or more blocks of phosphorothioate or methylphosphonate internucleotide linkages. In one example, the sense strand comprises one block of two phosphorothioate or methylphosphonate internucleotide linkages. In one example, the antisense strand comprises two blocks of two phosphorothioate or methylphosphonate internucleotide linkages. For example, the two blocks of phosphorothioate or methylphosphonate internucleotide linkages are separated by 16-18 phosphate internucleotide linkages.

[0790] In one embodiment, each of the sense and antisense strands of the dsRNA agent has 15-30 nucleotides. In one example, the sense strand has 19-22 nucleotides, and the antisense strand has 19-25 nucleotides. In another example, the sense strand has 21 nucleotides, and the antisense strand has 23 nucleotides.

[0791] In one embodiment, the nucleotide at position 1 of the 5′-end of the antisense strand in the duplex is selected from the group consisting of A, dA, dU, U, and dT. In one embodiment, at least one of the first, second, and third base pair from the 5′-end of the antisense strand is an AU base pair.

[0792] In one embodiment, the antisense strand of the dsRNA agent of the invention is 100% complementary to a target RNA to hybridize thereto and inhibits its expression through RNA interference. In another embodiment, the antisense strand of the dsRNA agent of the invention is at least 95%, at least 90%, at least 85%, at least 80%, at least 75%, at least 70%, at least 65%, at least 60%, at least 55%, or at least 50% complementary to a target RNA.

[0793] In one aspect, the invention relates to a dsRNA agent as defined herein capable of inhibiting the expression of a target gene. The dsRNA agent comprises a sense strand and an antisense strand, each strand having 14 to 40 nucleotides. The sense strand contains at least one thermally destabilizing nucleotide, wherein at least one of said thermally destabilizing nucleotide occurs at or near the site that is opposite to the seed region of the antisense strand (i.e. at position 2-8 of the 5′-end of the antisense strand). Each of the embodiments and aspects described in this specification relating to the dsRNA represented by formula (I) can also apply to the dsRNA containing the rmally destabilizing nucleotide.

[0794] The thermally destabilizing nucleotide can occur, for example, between positions 14-17 of the 5′-end of the sense strand when the sense strand is 21 nucleotides in length. The antisense strand contains at least two modified nucleic acids that are smaller than a sterically demanding 2′-OMe modification. Preferably, the two modified nucleic acids that are smaller than a sterically demanding 2′-OMe are separated by 11 nucleotides in length. For example, the two modified nucleic acids are at positions 2 and 14 of the 5′ end of the antisense strand.

[0795] In some embodiment, the dsRNA agent as defined herein can comprise i) a phosphorus-containing group at the 5′-end of the sense strand or antisense strand; ii) with two phosphorothioate internucleotide linkage modifications within position 1-5 of the sense strand (counting from the 5′-end of the sense strand), and two phosphorothioate internucleotide linkage modifications at positions 1 and 2 and two phosphorothioate internucleotide linkage modifications within positions 18-23 of the antisense strand (counting from the 5′-end of the antisense strand); and iii) one or more C22 hydrocarbon chains.

[0796] In a particular embodiment, the dsRNA agents of the present invention comprising one or more C22 hydrocarbon chains conjugated to one or more internal positions on at least one strand comprise:
[0797] (a) a sense strand having:
   [0798] (i) a length of 21 nucleotides;
   [0799] (ii) 2′-F modifications at positions 1, 3, 5, 7, 9 to 11, 13, 17, 19, and 21, and 2′-OMe modifications at positions 2, 4, 6, 8, 12, 14 to 16, 18, and 20 (counting from the 5′ end);
   [0800] and
[0801] (b) an antisense strand having:
   [0802] (i) a length of 23 nucleotides;
   [0803] (ii) 2′-OMe modifications at positions 1, 3, 5, 9, 11 to 13, 15, 17, 19, 21, and 23, and 2′F modifications at positions 2, 4, 6 to 8, 10, 14, 16, 18, 20, and 22 (counting from the 5′ end); and
   [0804] (iii) phosphorothioate internucleotide linkages between nucleotide positions 21 and 22, and between nucleotide positions 22 and 23 (counting from the 5′ end);
   [0805] wherein the dsRNA agents have a two nucleotide overhang at the 3′-end of the antisense strand, and a blunt end at the 5′-end of the antisense strand.

[0806] In another particular embodiment, t the dsRNA agents of the present invention comprising one or more C22 hydrocarbon chains conjugated to one or more internal positions on at least one strand comprise:
[0807] (a) a sense strand having:
   [0808] (i) a length of 21 nucleotides;
   [0809] (ii) 2′-F modifications at positions 1, 3, 5, 7, 9 to 11, 13, 15, 17, 19, and 21, and 2′-OMe modifications at positions 2, 4, 6, 8, 12, 14, 16, 18, and 20 (counting from the 5′ end); and
   [0810] (ii) phosphorothioate internucleotide linkages between nucleotide positions 1 and 2, and between nucleotide positions 2 and 3 (counting from the 5′ end);
   [0811] and
[0812] (b) an antisense strand having:
   [0813] (i) a length of 23 nucleotides;
   [0814] (ii) 2′-OMe modifications at positions 1, 3, 5, 7, 9, 11 to 13, 15, 17, 19, and 21 to 23, and 2′F modifications at positions 2, 4, 6, 8, 10, 14, 16, 18, and 20 (counting from the 5′ end); and
   [0815] (iii) phosphorothioate internucleotide linkages between nucleotide positions 1 and 2, between nucleotide positions 2 and 3, between nucleotide positions 21 and 22, and between nucleotide positions 22 and 23 (counting from the 5′ end);
[0816] wherein the dsRNA agents have a two nucleotide overhang at the 3′-end of the antisense strand, and a blunt end at the 5′-end of the antisense strand.

[0817] In another particular embodiment, the dsRNA agents of the present invention comprising one or more C22 hydrocarbon chains conjugated to one or more internal positions on at least one strand comprise:
[0818] (a) a sense strand having:
   [0819] (i) a length of 21 nucleotides;
   [0820] (ii) 2′-OMe modifications at positions 1 to 6, 8, 10, and 12 to 21, 2′-F modifications at positions 7, and 9, and a desoxy-nucleotide (e.g. dT) at position 11 (counting from the 5′ end); and
   [0821] (ii) phosphorothioate internucleotide linkages between nucleotide positions 1 and 2, and between nucleotide positions 2 and 3 (counting from the 5′ end);
   [0822] and
[0823] (b) an antisense strand having:
   [0824] (i) a length of 23 nucleotides;
   [0825] (ii) 2′-OMe modifications at positions 1, 3, 7, 9, 11, 13, 15, 17, and 19 to 23, and 2′-F modifications at positions 2, 4 to 6, 8, 10, 12, 14, 16, and 18 (counting from the 5′ end); and
   [0826] (iii) phosphorothioate internucleotide linkages between nucleotide positions 1 and 2, between nucleotide positions 2 and 3, between nucleotide positions 21 and 22, and between nucleotide positions 22 and 23 (counting from the 5′ end);
[0827] wherein the dsRNA agents have a two nucleotide overhang at the 3′-end of the antisense strand, and a blunt end at the 5′-end of the antisense strand.

[0828] In another particular embodiment, the dsRNA agents of the present invention comprising one or more C₂₂ hydrocarbon chains conjugated to one or more internal positions on at least one strand comprise:
[0829] (a) a sense strand having:
   [0830] (i) a length of 21 nucleotides;
   [0831] (ii) 2′-OMe modifications at positions 1 to 6, 8, 10, 12, 14, and 16 to 21, and 2′-F modifications at positions 7, 9, 11, 13, and 15; and
   [0832] (ii) phosphorothioate internucleotide linkages between nucleotide positions 1 and 2, and between nucleotide positions 2 and 3 (counting from the 5′ end);
   [0833] and
[0834] (b) an antisense strand having:
   [0835] (i) a length of 23 nucleotides;
   [0836] (ii) 2′-OMe modifications at positions 1, 5, 7, 9, 11, 13, 15, 17, 19, and 21 to 23, and 2′-F modifications at positions 2 to 4, 6, 8, 10, 12, 14, 16, 18, and 20 (counting from the 5′ end); and
   [0837] (iii) phosphorothioate internucleotide linkages between nucleotide positions 1 and 2, between nucleotide positions 2 and 3, between nucleotide positions 21 and 22, and between nucleotide positions 22 and 23 (counting from the 5′ end);
[0838] wherein the dsRNA agents have a two nucleotide overhang at the 3′-end of the antisense strand, and a blunt end at the 5′-end of the antisense strand.

[0839] In another particular embodiment, t the dsRNA agents of the present invention comprising one or more C₂₂ hydrocarbon chains conjugated to one or more internal positions on at least one strand comprise:
[0840] (a) a sense strand having:
   [0841] (i) a length of 21 nucleotides;
   [0842] (ii) 2′-OMe modifications at positions 1 to 9, and 12 to 21, and 2′-F modifications at positions 10, and 11; and
   [0843] (ii) phosphorothioate internucleotide linkages between nucleotide positions 1 and 2, and between nucleotide positions 2 and 3 (counting from the 5′ end);
   [0844] and
[0845] (b) an antisense strand having:
   [0846] (i) a length of 23 nucleotides;
   [0847] (ii) 2′-OMe modifications at positions 1, 3, 5, 7, 9, 11 to 13, 15, 17, 19, and 21 to 23, and 2′-F modifications at positions 2, 4, 6, 8, 10, 14, 16, 18, and 20 (counting from the 5′ end); and
   [0848] (iii) phosphorothioate internucleotide linkages between nucleotide positions 1 and 2, between nucleotide positions 2 and 3, between nucleotide positions 21 and 22, and between nucleotide positions 22 and 23 (counting from the 5′ end);
[0849] wherein the dsRNA agents have a two nucleotide overhang at the 3′-end of the antisense strand, and a blunt end at the 5′-end of the antisense strand.

[0850] In another particular embodiment, the dsRNA agents of the present invention comprising one or more C22 hydrocarbon chains conjugated to one or more internal positions on at least one strand comprise:
[0851] (a) a sense strand having:
   [0852] (i) a length of 21 nucleotides;
   [0853] (ii) 2′-F modifications at positions 1, 3, 5, 7, 9 to 11, and 13, and 2′-OMe modifications at positions 2, 4, 6, 8, 12, and 14 to 21; and
   [0854] (ii) phosphorothioate internucleotide linkages between nucleotide positions 1 and 2, and between nucleotide positions 2 and 3 (counting from the 5′ end);
   [0855] and
[0856] (b) an antisense strand having:
   [0857] (i) a length of 23 nucleotides;
   [0858] (ii) 2′-OMe modifications at positions 1, 3, 5 to 7, 9, 11 to 13, 15, 17 to 19, and 21 to 23, and 2′-F modifications at positions 2, 4, 8, 10, 14, 16, and 20 (counting from the 5′ end); and
   [0859] (iii) phosphorothioate internucleotide linkages between nucleotide positions 1 and 2, between nucleotide positions 2 and 3, between nucleotide positions 21 and 22, and between nucleotide positions 22 and 23 (counting from the 5′ end);
[0860] wherein the dsRNA agents have a two nucleotide overhang at the 3′-end of the antisense strand, and a blunt end at the 5′-end of the antisense strand.

[0861] In another particular embodiment, the dsRNA agents of the present invention comprising one or more C22 hydrocarbon chains conjugated to one or more internal positions on at least one strand comprise:
[0862] (a) a sense strand having:
   [0863] (i) a length of 21 nucleotides;
   [0864] (ii) 2′-OMe modifications at positions 1, 2, 4, 6, 8, 12, 14, 15, 17, and 19 to 21, and 2′-F modifications at positions 3, 5, 7, 9 to 11, 13, 16, and 18; and
   [0865] (ii) phosphorothioate internucleotide linkages between nucleotide positions 1 and 2, and between nucleotide positions 2 and 3 (counting from the 5′ end);
   [0866] and
[0867] (b) an antisense strand having:
   [0868] (i) a length of 25 nucleotides;
   [0869] (ii) 2′-OMe modifications at positions 1, 4, 6, 7, 9, 11 to 13, 15, 17, and 19 to 23, 2′-F modifications at positions 2, 3, 5, 8, 10, 14, 16, and 18, and desoxy-nucleotides (e.g. dT) at positions 24 and 25 (counting from the 5′ end); and
   [0870] (iii) phosphorothioate internucleotide linkages between nucleotide positions 1 and 2, between nucleotide positions 2 and 3, between nucleotide positions 21 and 22, and between nucleotide positions 22 and 23 (counting from the 5′ end);
[0871] wherein the dsRNA agents have a four nucleotide overhang at the 3′-end of the antisense strand, and a blunt end at the 5′-end of the antisense strand.

[0872] In another particular embodiment, the dsRNA agents of the present invention comprising one or more C22 hydrocarbon chains conjugated to one or more internal positions on at least one strand comprise:
[0873] (a) a sense strand having:
   [0874] (i) a length of 21 nucleotides;
   [0875] (ii) 2′-OMe modifications at positions 1 to 6, 8, and 12 to 21, and 2′-F modifications at positions 7, and 9 to 11; and
   [0876] (ii) phosphorothioate internucleotide linkages between nucleotide positions 1 and 2, and between nucleotide positions 2 and 3 (counting from the 5′ end);
   [0877] and
[0878] (b) an antisense strand having:
   [0879] (i) a length of 23 nucleotides;
   [0880] (ii) 2′-OMe modifications at positions 1, 3 to 5, 7, 8, 10 to 13, 15, and 17 to 23, and 2′-F modifications at positions 2, 6, 9, 14, and 16 (counting from the 5′ end); and (iii) phosphorothioate internucleotide linkages between nucleotide positions 1 and 2, between nucleotide positions 2 and 3, between nucleotide positions 21 and 22, and between nucleotide positions 22 and 23 (counting from the 5′ end);
[0881] wherein the dsRNA agents have a two nucleotide overhang at the 3′-end of the antisense strand, and a blunt end at the 5′-end of the antisense strand.

[0882] In another particular embodiment, the dsRNA agents of the present invention comprising one or more C22 hydrocarbon chains conjugated to one or more internal positions on at least one strand comprise:
[0883] (a) a sense strand having:
   [0884] (i) a length of 21 nucleotides;
   [0885] (ii) 2′-OMe modifications at positions 1 to 6, 8, and 12 to 21, and 2′-F modifications at positions 7, and 9 to 11; and
   [0886] (ii) phosphorothioate internucleotide linkages between nucleotide positions 1 and 2, and between nucleotide positions 2 and 3 (counting from the 5′ end);
   [0887] and
[0888] (b) an antisense strand having:
   [0889] (i) a length of 23 nucleotides;
   [0890] (ii) 2′-OMe modifications at positions 1, 3 to 5, 7, 10 to 13, 15, and 17 to 23, and 2′-F modifications at positions 2, 6, 8, 9, 14, and 16 (counting from the 5′ end); and
   [0891] (iii) phosphorothioate internucleotide linkages between nucleotide positions 1 and 2, between nucleotide positions 2 and 3, between nucleotide positions 21 and 22, and between nucleotide positions 22 and 23 (counting from the 5′ end);
[0892] wherein the dsRNA agents have a two nucleotide overhang at the 3′-end of the antisense strand, and a blunt end at the 5′-end of the antisense strand.

[0893] In another particular embodiment, the dsRNA agents of the present invention comprising one or more C22 hydrocarbon chains conjugated to one or more internal positions on at least one strand comprise:
[0894] (a) a sense strand having:
   [0895] (i) a length of 19 nucleotides;
   [0896] (ii) 2′-OMe modifications at positions 1 to 4, 6, and 10 to 19, and 2′-F modifications at positions 5, and 7 to 9; and
   [0897] (ii) phosphorothioate internucleotide linkages between nucleotide positions 1 and 2, and between nucleotide positions 2 and 3 (counting from the 5′ end);
   [0898] and
[0899] (b) an antisense strand having:
   [0900] (i) a length of 21 nucleotides;
   [0901] (ii) 2′-OMe modifications at positions 1, 3 to 5, 7, 10 to 13, 15, and 17 to 21, and 2′-F modifications at positions 2, 6, 8, 9, 14, and 16 (counting from the 5′ end); and (iii) phosphorothioate internucleotide linkages between nucleotide positions 1 and 2, between nucleotide positions 2 and 3, between nucleotide positions 19 and 20, and between nucleotide positions 20 and 21 (counting from the 5′ end);
[0902] wherein the dsRNA agents have a two nucleotide overhang at the 3′-end of the antisense strand, and a blunt end at the 5′-end of the antisense strand.

[0903] In one embodiment, the dsRNA agents of the present invention comprising one or more C22 hydrocarbon chains conjugated to one or more internal positions on at least one strand comprise:
[0904] (a) a sense strand having:
   [0905] (i) a length of 18-23 nucleotides;
   [0906] (ii) three consecutive 2′-F modifications at positions 7-15; and
[0907] (b) an antisense strand having:
   [0908] (i) a length of 18-23 nucleotides;
   [0909] (ii) at least 2′-F modifications anywhere on the strand; and
   [0910] (iii) at least two phosphorothioate internucleotide linkages at the first five nucleotides (counting from the 5′ end);
   [0911] and either have two nucleotides overhang at the 3′-end of the antisense strand, and a blunt end at the 5′-end of the antisense strand; or blunt end both ends of the duplex.

[0912] In one embodiment, the dsRNA agents of the present invention comprise:
[0913] (a) a sense strand having:
   [0914] (i) a length of 18-23 nucleotides;
   [0915] (ii) less than four 2′-F modifications;
[0916] (b) an antisense strand having:
   [0917] (i) a length of 18-23 nucleotides;
   [0918] (ii) at less than twelve 2′-F modification; and
   [0919] (iii) at least two phosphorothioate internucleotide linkages at the first five nucleotides (counting from the 5′ end);
[0920] wherein the dsRNA agents have either have two nucleotides overhang at the 3′-end of the antisense strand, and a blunt end at the 5′-end of the antisense strand; or blunt end both ends of the duplex.

[0921] In one embodiment, the dsRNA agents of the present invention comprise:
[0922] (a) a sense strand having:
   [0923] (i) a length of 19-35 nucleotides;
   [0924] (ii) less than four 2′-F modifications;
[0925] (b) an antisense strand having:
   [0926] (i) a length of 19-35 nucleotides;
   [0927] (ii) at less than twelve 2′-F modification; and
   [0928] (iii) at least two phosphorothioate internucleotide linkages at the first five nucleotides (counting from the 5′ end);
[0929] wherein the duplex region is between 19 to 25 base pairs (preferably 19, 20, 21 or 22); and wherein the dsRNA agents have either have two nucleotides overhang at the 3′-end of the antisense strand, and a blunt end at the 5′-end of the antisense strand; or blunt end both ends of the duplex.

[0930] In one embodiment, the dsRNA agents of the present invention comprise a sense strand and antisense strands having a length of 15-30 nucleotides; at least two phosphorothioate internucleotide linkages at the first five nucleotides on the antisense strand (counting from the 5′ end); wherein the duplex region is between 19 to 25 base pairs (preferably 19, 20, 21 or 22); and wherein the dsRNA agents have less than 20%, less than 15% and less than 10% non-natural nucleotide.

[0931] Examples of non-natural nucleotide includes acyclic nucleotides, LNA, HNA, CeNA, 2′-methoxyethyl, 2′-O-allyl, 2′-C-allyl, 2′-deoxy, 2′-fluoro, 2′-O—N-methylacetamido (2′-O-NMA), a 2′-O-dimethylaminoethoxyethyl (2′-O-DMAEOE), 2′-O-aminopropyl (2′-O-AP), or 2′-ara-F, and others.

[0932] In one embodiment, the dsRNA agents of the present invention comprise a sense strand and antisense strands having a length of 15-30 nucleotides; at least two phosphorothioate internucleotide linkages at the first five nucleotides on the antisense strand (counting from the 5′ end); wherein the duplex region is between 19 to 25 base pairs (preferably 19, 20, 21 or 22); wherein the dsRNA agents have greater than 80%, greater than 85% and greater than 90% natural nucleotide, such as 2′-OH, 2′-deoxy and 2′-OMe are natural nucleotides.

[0933] In one embodiment, the dsRNA agents of the present invention comprise a sense strand and antisense strands having a length of 15-30 nucleotides; at least two phosphorothioate internucleotide linkages at the first five nucleotides on the antisense strand (counting from the 5′ end); wherein the duplex region is between 19 to 25 base pairs (preferably 19, 20, 21 or 22); and wherein the dsRNA agents have 100% natural nucleotide, such as 2′-OH, 2′-deoxy and 2′-OMe are natural nucleotides.

[0934] Various publications described multimeric siRNA and can all be used with the iRNA of the invention. Such publications include WO2007/091269, U.S. Pat. No. 7,858,769, WO2010/141511, WO2007/117686, WO2009/014887 and WO2011/031520, which are hereby incorporated by reference in their entirety.

[0935] In some embodiments, 100%, 95%, 90%, 85%, 80%, 75%, 70%, 65%, 60%, 55%, 50%, 45%, 40%, 35% or 30% of the iRNA agent of the invention is modified.

[0936] In some embodiments, each of the sense and antisense strands of the iRNA agent is independently modified with acyclic nucleotides, LNA, HNA, CeNA, 2′-methoxyethyl, 2′-O-methyl, 2′-O-allyl, 2′-C-allyl, 2′-deoxy, 2′-fluoro, 2′-O—N-methylacetamido (2′-O-NMA), a 2′-O-dimethylaminoethoxyethyl (2′-O-DMAEOE), 2′-O-aminopropyl (2′-O-AP), or 2′-ara-F.

[0937] In some embodiments, each of the sense and antisense strands of the iRNA agent contains at least two different modifications.

[0938] In some embodiments, the dsRNA agent of the invention of the invention does not contain any 2′-F modification.

[0939] In some embodiments, the dsRNA agent of the invention contains one, two, three, four, five, six, seven, eight, nine, ten, eleven or twelve 2′-F modification(s). In one example, dsRNA agent of the invention contains nine or ten 2′-F modifications.

[0940] The iRNA agent of the invention may further comprise at least one phosphorothioate or methylphosphonate internucleotide linkage. The phosphorothioate or methylphosphonate internucleotide linkage modification may occur on any nucleotide of the sense strand or antisense strand or both in any position of the strand. For instance, the internucleotide linkage modification may occur on every nucleotide on the sense strand or antisense strand; each internucleotide linkage modification may occur in an alternating pattern on the sense strand or antisense strand; or the sense strand or antisense strand may contain both internucleotide linkage modifications in an alternating pattern. The alternating pattern of the internucleotide linkage modification on the sense strand may be the same or different from the antisense strand, and the alternating pattern of the internucleotide linkage modification on the sense strand may have a shift relative to the alternating pattern of the internucleotide linkage modification on the antisense strand.

[0941] In one embodiment, the iRNA comprises the phosphorothioate or methylphosphonate internucleotide linkage modification in the overhang region. For example, the overhang region may contain two nucleotides having a phosphorothioate or methylphosphonate internucleotide linkage between the two nucleotides. Internucleotide linkage modifications also may be made to link the overhang nucleotides with the terminal paired nucleotides within duplex region. For example, at least 2, 3, 4, or all the overhang nucleotides may be linked through phosphorothioate or methylphosphonate internucleotide linkage, and optionally, there may be additional phosphorothioate or methylphosphonate internucleotide linkages linking the overhang nucleotide with a paired nucleotide that is next to the overhang nucleotide. For instance, there may be at least two phosphorothioate internucleotide linkages between the terminal three nucleotides, in which two of the three nucleotides are overhang nucleotides, and the third is a paried nucleotide next to the overhang nucleotide. Preferably, these terminal three nucleotides may be at the 3′-end of the antisense strand.

[0942] In some embodiments, the sense strand and/or antisense strand of the iRNA agent comprises one or more blocks of phosphorothioate or methylphosphonate internucleotide linkages. In one example, the sense strand comprises one block of two phosphorothioate or methylphosphonate internucleotide linkages. In one example, the antisense strand comprises two blocks of two phosphorothioate or methylphosphonate internucleotide linkages. For example, the two blocks of phosphorothioate or methylphosphonate internucleotide linkages are separated by 16-18 phosphate internucleotide linkages.

[0943] In some embodiments, the antisense strand of the iRNA agent of the invention is 100% complementary to a target RNA to hybridize thereto and inhibits its expression through RNA interference. In another embodiment, the antisense strand of the iRNA agent of the invention is at least 95%, at least 90%, at least 85%, at least 80%, at least 75%, at least 70%, at least 65%, at least 60%, at least 55%, or at least 50% complementary to a target RNA.

[0944] In one aspect, the invention relates to a iRNA agent capable of inhibiting the expression of a target gene. The iRNA agent comprises a sense strand and an antisense strand, each strand having 14 to 40 nucleotides. The sense strand contains at least one thermally destabilizing nucleotide, wherein at at least one said thermally destabilizing nucleotide occurs at or near the site that is opposite to the seed region of the antisense strand (i.e. at position 2-8 of the 5′-end of the antisense strand), For example, the rmally destabilizing nucleotide occurs between positions 14-17 of the 5′-end of the sense strand when the sense strand is 21 nucleotides in length. The antisense strand contains at least two modified nucleic acids that are smaller than a sterically demanding 2′-OMe modification. Preferably, the two modified nucleic acids that is smaller than a sterically demanding 2′-OMe are separated by 11 nucleotides in length. For example, the two modified nucleic acids are at positions 2 and 14 of the 5′ end of the antisense strand.

[0945] In some embodiments, the compound of the invention disclosed herein is a miRNA mimic. In one design, miRNA mimics are double stranded molecules (e.g., with a duplex region of between about 16 and about 31 nucleotides in length) and contain one or more sequences that have identity with the mature strand of a given miRNA. Double-stranded miRNA mimics have designs similar to as described above for double-stranded iRNAs. In some embodiments, a miRNA mimic comprises a duplex region of between 16 and 31 nucleotides and one or more of the following chemical modification patterns: the sense strand contains 2′-O-methyl modifications of nucleotides 1 and 2 (counting from the 5′ end of the sense oligonucleotide), and all of the Cs and Us; the antisense strand modifications can comprise 2′ F modification of all of the Cs and Us, phosphorylation of the 5′ end of the oligonucleotide, and stabilized internucleotide linkages associated with a 2 nucleotide 3′ overhang.

### VI. Synthesis of RNAi Agents of the Invention

[0946] The nucleic acids featured in the disclosure can be synthesized or modified by methods well established in the art, such as those described in “Current protocols in nucleic acid chemistry,” Beaucage, S. L. et al. (Edrs.), John Wiley & Sons, Inc., New York, NY, USA, which is hereby incorporated herein by reference.

[0947] An siRNA can be produced, e.g., in bulk, by a variety of methods. Exemplary methods include: organic synthesis and RNA cleavage, e.g., in vitro cleavage.

### A. Organic Synthesis

[0948] An siRNA can be made by separately synthesizing a single stranded RNA molecule, or each respective strand of a double-stranded RNA molecule, after which the component strands can then be annealed.

[0949] A large machine, e.g., the OligoPilot II from Pharmacia Biotec AB (Uppsala Sweden), can be used to produce a large amount of a particular RNA strand for a given siRNA. The OligoPilotII reactor can efficiently couple a nucleotide using only a 1.5 molar excess of a phosphoramidite nucleotide. To make an RNA strand, ribonucleotides amidites are used. Standard cycles of monomer addition can be used to synthesize the 21 to 23 nucleotide strand for the siRNA. Typically, the two complementary strands are produced separately and then annealed, e.g., after release from the solid support and deprotection.

[0950] Organic synthesis can be used to produce a discrete siRNA species. The complementary of the species to a particular target gene can be precisely specified. For example, the species may be complementary to a region that includes a polymorphism, e.g., a single nucleotide polymorphism. Further the location of the polymorphism can be precisely defined. In some embodiments, the polymorphism is located in an internal region, e.g., at least 4, 5, 7, or 9 nucleotides from one or both of the termini.

B. dsiRNA Cleavage

[0951] siRNAs can also be made by cleaving a larger siRNA. The cleavage can be mediated in vitro or in vivo. For example, to produce iRNAs by cleavage in vitro, the following method can be used:

1. In vitro transcription.

[0952] dsiRNA is produced by transcribing a nucleic acid (DNA) segment in both directions. For example, the HiScribe™ RNAi transcription kit (New England Biolabs) provides a vector and a method for producing a dsiRNA for a nucleic acid segment that is cloned into the vector at a position flanked on either side by a T7 promoter. Separate templates are generated for T7 transcription of the two complementary strands for the dsiRNA. The templates are transcribed in vitro by addition of T7 RNA polymerase and dsiRNA is produced. Similar methods using PCR and/or other RNA polymerases (e.g., T3 or SP6 polymerase) can also be dotoxins that may contaminate preparations of the recombinant enzymes. In one embodiment, RNA generated by this method is carefully purified to remove endotoxins that may contaminate preparations of the recombinant enzymes.

### 2. In Vitro Cleavage.

[0953] dsRNA is cleaved in vitro into siRNAs, for example, using a Dicer or comparable RNAse III-based activity. For example, the dsiRNA can be incubated in an in vitro extract from Drosophila or using purified components, e.g., a purified RNAse or RISC complex (RNA-induced silencing complex). See, e.g., Ketting et al. Genes Dev 2001 Oct. 15; 15(20):2654-9 and Hammond Science 2001 Aug. 10; 293(5532):1146-50.

[0954] dsiRNA cleavage generally produces a plurality of siRNA species, each being a particular 21 to 23 nt fragment of a source dsiRNA molecule. For example, siRNAs that include sequences complementary to overlapping regions and adjacent regions of a source dsiRNA molecule may be present.

[0955] Regardless of the method of synthesis, the siRNA preparation can be prepared in a solution (e.g., an aqueous and/or organic solution) that is appropriate for formulation. For example, the siRNA preparation can be precipitated and redissolved in pure double-distilled water, and lyophilized. The dried siRNA can then be resuspended in a solution appropriate for the intended formulation process.

C. Making dsRNA Agents Conjugated to One or More C₂₂ Hydrocarbon Chains

[0956] In some embodiments, the one or more C₂₂ hydrocarbon chains is conjugated to the dsRNA agent via a nucleobase, sugar moiety, or internucleosidic linkage.

[0957] Conjugation to purine nucleobases or derivatives thereof can occur at any position including, endocyclic and exocyclic atoms. In some embodiments, the 2-, 6-, 7-, or 8-positions of a purine nucleobase are attached to a C₂₂ hydrocarbon chain. Conjugation to pyrimidine nucleobases or derivatives thereof can also occur at any position. In some embodiments, the 2-, 5-, and 6-positions of a pyrimidine nucleobase can be substituted with a C₂₂ hydrocarbon chain. When one or more C22 hydrocarbon chains is conjugated to a nucleobase, the preferred position is one that does not interfere with hybridization, i.e., does not interfere with the hydrogen bonding interactions needed for base pairing. In one embodiment, the one or more C₂₂ hydrocarbon chains may be conjugated to a nucleobase via a linker containing an alkyl, alkenyl or amide linkage.

[0958] Conjugation to sugar moieties of nucleosides can occur at any carbon atom. Exemplary carbon atoms of a sugar moiety that the one or more C₂₂ hydrocarbon chains can be attached to include the 2′, 3′, and 5′ carbon atoms. The one or more C₂₂ hydrocarbon chains can also be attached to the 1′ position, such as in an abasic residue. In one embodiment, the one or more C22 hydrocarbon chains may be conjugated to a sugar moiety, via a 2′-Omodification, with or without a linker.

[0959] Internucleosidic linkages can also bear the one or more C22 hydrocarbon chains. For phosphorus-containing linkages (e.g., phosphodiester, phosphorothioate, phosphorodithiotate, phosphoroamidate, and the like), the one or more C22 hydrocarbon chains can be attached directly to the phosphorus atom or to an O, N, or S atom bound to the phosphorus atom. For amine- or amide-containing internucleosidic linkages (e.g., PNA), the one or more C22 hydrocarbon chains can be attached to the nitrogen atom of the amine or amide or to an adjacent carbon atom.

[0960] There are numerous methods for preparing conjugates of oligonuclotides. Generally, an oligonucleotide is attached to a conjugate moiety by contacting a reactive group (e.g., OH, SH, amine, carboxyl, aldehyde, and the like) on the oligonucleotide with a reactive group on the conjugate moiety. In some embodiments, one reactive group is electrophilic and the other is nucleophilic.

[0961] For example, an electrophilic group can be a carbonyl-containing functionality and a nucleophilic group can be an amine or thiol. Methods for conjugation of nucleic acids and related oligomeric compounds with and without linking groups are well described in the literature such as, for example, in Manoharan in Antisense Research and Applications, Crooke and LeBleu, eds., CRC Press, Boca Raton, Fla., 1993, Chapter 17, which is incorporated herein by reference in its entirety.

[0962] In one embodiment, a first (complementary) RNA strand and a second (sense) RNA strand can be synthesized separately, wherein one of the RNA strands comprises a pendant C₂₂ hydrocarbon chain, and the first and second RNA strands can be mixed to form a dsRNA. The step of synthesizing the RNA strand preferably involves solid-phase synthesis, wherein individual nucleotides are joined end to end through the formation of internucleotide 3′-5′ phosphodiester bonds in consecutive synthesis cycles.

[0963] In one embodiment, the C₂₂ hydrocarbon chain having a phosphoramidite group is coupled to the 3′-end or 5′-end of either the first (complementary) or second (sense) RNA strand in the last synthesis cycle. In the solid-phase synthesis of an RNA, the nucleotides are initially in the form of nucleoside phosphoramidites. In each synthesis cycle, a further nucleoside phosphoramidite is linked to the —OH group of the previously incorporated nucleotide. If the one or more C22 hydrocarbon chains has a phosphoramidite group, it can be coupled in a manner similar to a nucleoside phosphoramidite to the free OH end of the RNA synthesized previously in the solid-phase synthesis. The synthesis can take place in an automated and standardized manner using a conventional RNA synthesizer. Synthesis of the molecule having the phosphoramidite group may include phosphitylation of a free hydroxyl to generate the phosphoramidite group.

[0964] Synthesis procedures of the one or more C22 hydrocarbon chain-conjugated phosphoramidites are exemplified in Example 1.

[0965] In general, the oligonucleotides can be synthesized using protocols known in the art, for example, as described in Caruthers et al., Methods in Enzymology (1992) 211:3-19; WO 99/54459; Wincott et al., Nucl. Acids Res. (1995) 23:2677-2684; Wincott et al., Methods Mol. Bio., (1997) 74:59; Brennan et al., Biotechnol. Bioeng. (1998) 61:33-45; and U.S. Pat. No. 6,001,311; each of which is hereby incorporated by reference in its entirety. In general, the synthesis of oligonucleotides involves conventional nucleic acid protecting and coupling groups, such as dimethoxytrityl at the 5′-end, and phosphoramidites at the 3′-end. In a non-limiting example, small scale syntheses are conducted on a Expedite 8909 RNA synthesizer sold by Applied Biosystems, Inc. (Weiterstadt, Germany), using ribonucleoside phosphoramidites sold by ChemGenes Corporation (Ashland, Mass.). Alternatively, syntheses can be performed on a 96-well plate synthesizer, such as the instrument produced by Protogene (Palo Alto, Calif), or by methods such as those described in Usman et al., J. Am. Chem. Soc. (1987) 109:7845; Scaringe, et al., Nucl. Acids Res. (1990) 18:5433; Wincott, et al., Nucl. Acids Res. (1990) 23:2677-2684; and Wincott, et al., Methods Mol. Bio. (1997) 74:59, each of which is hereby incorporated by reference in its entirety.

[0966] The nucleic acid molecules of the present invention may be synthesized separately and joined together post-synthetically, for example, by ligation (Moore et al., Science (1992) 256:9923; WO 93/23569; Shabarova et al., Nucl. Acids Res. (1991) 19:4247; Bellon et al., Nucleosides & Nucleotides (1997) 16:951; Bellon et al., Bioconjugate Chem. (1997) 8:204; or by hybridization following synthesis and/or deprotection. The nucleic acid molecules can be purified by gel electrophoresis using conventional methods or can be purified by high pressure liquid chromatography (HPLC; see Wincott et al., supra, the totality of which is hereby incorporated herein by reference) and re-suspended in water.

### VII. Ligands

[0967] In certain embodiments, the dsRNA agent of the invention is further modified by covalent attachment of one or more conjugate groups. In general, conjugate groups modify one or more properties of the attached dsRNA agent of the invention including but not limited to pharmacodynamic, pharmacokinetic, binding, absorption, cellular distribution, cellular uptake, charge and clearance. Conjugate groups are routinely used in the chemical arts and are linked directly or via an optional linking moiety or linking group to a parent compound such as an oligomeric compound. A preferred list of conjugate groups includes without limitation, intercalators, reporter molecules, polyamines, polyamides, polyethylene glycols, thioethers, polyethers, cholesterols, thiocholesterols, cholic acid moieties, folate, lipids, phospholipids, biotin, phenazine, phenanthridine, anthraquinone, adamantane, acridine, fluoresceins, rhodamines, coumarins and dyes.

[0968] In some embodiments, the dsRNA agent further comprises a targeting ligand that targets a receptor which mediates delivery to a specific muscle or adipose tissue. These targeting ligands can be conjugated by otself or in combination with the one or more C₂₂ hydrocarbon chains to enable specific systemic delivery.

[0969] Exemplary targeting ligands that targets the receptor mediated delivery to a muscle or adipose tissue are peptide ligands such as Angiopep-2, lipoprotein receptor related protein (LRP) ligand, bEnd.3 cell binding ligand; transferrin receptor (TfR) ligand (which can utilize iron transport system in brain and cargo transport into the brain parenchyma); manose receptor ligand (which targets olfactory ensheathing cells, glial cells), glucose transporter protein, and LDL receptor ligand.

[0970] Preferred conjugate groups amenable to the present invention include lipid moieties such as a cholesterol moiety (Letsinger et al., Proc. Natl. Acad. Sci. USA, 1989, 86, 6553); cholic acid (Manoharan et al., Bioorg. Med. Chem. Lett., 1994, 4, 1053); athioether, e.g., hexyl-S-tritylthiol (Manoharan et al., Ann. N.Y. Acad. Sci., 1992, 660, 306; Manoharan et al., Bioorg. Med. Chem. Let., 1993, 3, 2765); a thiocholesterol (Oberhauser et al., Nucl. Acids Res., 1992, 20, 533); an aliphatic chain, e.g., dodecandiol or undecyl residues (Saison-Behmoaras et al., EMBO J., 1991, 10, 111; Kabanov et al., FEBS Lett., 1990, 259, 327; Svinarchuk et al., Biochimie, 1993, 75, 49); a phospholipid, e.g., di-hexadecyl-rac-glycerol ortriethylammonium-1,2-di-O-hexadecyl-rac-glycero-3-H-phosphonate (Manoharan et al., Tetrahedron Lett., 1995, 36, 3651; Shea et al., Nucl. Acids Res., 1990, 18, 3777); a polyamine or a polyethylene glycol chain (Manoharan et al., Nucleosides & Nucleotides, 1995, 14, 969); adamantane acetic acid (Manoharan et al., Tetrahedron Lett., 1995, 36, 3651); a palmityl moiety (Mishra et al., Biochim. Biophys. Acta, 1995, 1264, 229); or an octadecylamine or hexylamino-carbonyl-oxycholesterol moiety (Crooke et al., J. Pharmacol. Exp. Ther., 1996, 277, 923).

[0971] Generally, a wide variety of entities, e.g., ligands, can be coupled to the oligomeric compounds described herein. Ligands can include naturally occurring molecules, or recombinant or synthetic molecules. Exemplary ligands include, but are not limited to, polylysine (PLL), poly L-aspartic acid, poly L-glutamic acid, styrene-maleic acid anhydride copolymer, poly(L-lactide-co-glycolied) copolymer, divinyl ether-maleic anhydride copolymer, N-(2-hydroxypropyl)methacrylamide copolymer (HMPA), polyethylene glycol (PEG, e.g., PEG-2K, PEG-5K, PEG-10K, PEG-12K, PEG-15K, PEG-20K, PEG-40K), MPEG, [MPEG]₂, polyvinyl alcohol (PVA), polyurethane, poly(2-ethylacryllic acid), N-isopropylacrylamide polymers, polyphosphazine, polyethylenimine, cationic groups, spermine, spermidine, polyamine, pseudopeptide-polyamine, peptidomimetic polyamine, dendrimer polyamine, arginine, amidine, protamine, cationic lipid, cationic porphyrin, quaternary salt of a polyamine, thyrotropin, melanotropin, lectin, glycoprotein, surfactant protein A, mucin, glycosylated polyaminoacids, transferrin, bisphosphonate, polyglutamate, polyaspartate, aptamer, asialofetuin, hyaluronan, procollagen, immunoglobulins (e.g., antibodies), insulin, transferrin, albumin, sugar-albumin conjugates, intercalating agents (e.g., acridines), cross-linkers (e.g. psoralen, mitomycin C), porphyrins (e.g., TPPC4, texaphyrin, Sapphyrin), polycyclic aromatic hydrocarbons (e.g., phenazine, dihydrophenazine), artificial endonucleases (e.g., EDTA), lipophilic molecules (e.g, steroids, bile acids, cholesterol, cholic acid, adamantane acetic acid, 1-pyrene butyric acid, dihydrotestosterone, 1,3-Bis-O(hexadecyl)qlycerol, geranyloxyhexyl group, hexadecylglycerol, borneol, menthol, 1,3-propanediol, heptadecyl group, palmitic acid, myristic acid, O3-(oleoyl)lithocholic acid, O3-(oleoyl)cholenic acid, dimethoxytrityl, or phenoxazine), peptides (e.g., an alpha helical peptide, amphipathic peptide, RGD peptide, cell permeation peptide, endosomolytic/fusogenic peptide), alkylating agents, phosphate, amino, mercapto, polyamino, alkyl, substituted alkyl, radiolabeled markers, enzymes, haptens (e.g. biotin), transport/absorption facilitators (e.g., naproxen, aspirin, vitamin E, folic acid), synthetic ribonucleases (e.g., imidazole, bisimidazole, histamine, imidazole clusters, acridine-imidazole conjugates, Eu3+ complexes oftetraazamacrocycles), dinitrophenyl, HRP, AP, antibodies, hormones and hormone receptors, lectins, carbohydrates, multivalent carbohydrates, vitamins (e.g., vitamin A, vitamin E, vitamin K, vitamin B, e.g., folic acid, B12, riboflavin, biotin and pyridoxal), vitamin cofactors, lipopolysaccharide, an activator of p38 MAP kinase, an activator of NF-κB, taxon, vincristine, vinblastine, cytochalasin, nocodazole, japlakinolide, latrunculin A, phalloidin, swinholide A, indanocine, myoservin, tumor necrosis factor alpha (TNFalpha), interleukin-1 beta, gamma interferon, natural or recombinant low density lipoprotein (LDL), natural or recombinant high-density lipoprotein (HDL), and a cell-permeation agent (e.g., a.helical cell-permeation agent).

[0972] Peptide and peptidomimetic ligands include those having naturally occurring or modified peptides, e.g., D or L peptides; α, β, or γ peptides; N-methyl peptides; azapeptides; peptides having one or more amide, i.e., peptide, linkages replaced with one or more urea, thiourea, carbamate, or sulfonyl urea linkages; or cyclic peptides. A peptidomimetic (also referred to herein as an oligopeptidomimetic) is a molecule capable of folding into a defined three-dimensional structure similar to a natural peptide. The peptide or peptidomimetic ligand can be about 5-50 amino acids long, e.g., about 5, 10, 15, 20, 25, 30, 35, 40, 45, or 50 amino acids long.

[0973] Exemplary amphipathic peptides include, but are not limited to, cecropins, lycotoxins, paradaxins, buforin, CPF, bombinin-like peptide (BLP), cathelicidins, ceratotoxins, S. clava peptides, hagfish intestinal antimicrobial peptides (HFIAPs), magainines, brevinins-2, dermaseptins, melittins, pleurocidin, H₂A peptides, Xenopus peptides, esculentinis-1, and caerins.

[0974] As used herein, the term “endosomolytic ligand” refers to molecules having endosomolytic properties. Endosomolytic ligands promote the lysis of and/or transport of the composition of the invention, or its components, from the cellular compartments such as the endosome, lysosome, endoplasmic reticulum (ER), Golgi apparatus, microtubule, peroxisome, or other vesicular bodies within the cell, to the cytoplasm of the cell. Some exemplary endosomolytic ligands include, but are not limited to, imidazoles, poly or oligoimidazoles, linear or branched polyethyleneimines (PEIs), linear and brached polyamines, e.g. spermine, cationic linear and branched polyamines, polycarboxylates, polycations, masked oligo or poly cations or anions, acetals, polyacetals, ketals/polyketals, orthoesters, linear or branched polymers with masked or unmasked cationic or anionic charges, dendrimers with masked or unmasked cationic or anionic charges, polyanionic peptides, polyanionic peptidomimetics, pH-sensitive peptides, natural and synthetic fusogenic lipids, natural and synthetic cationic lipids.

[0975] Exemplary endosomolytic/fusogenic peptides include, but are not limited to,

AALEALAEALEALAEALEALAEAAAAGGC (GALA);
AALAEALAEALAEALAEALAEALAAAAGGC (EALA);
ALEALAEALEALAEA;
GLFEAIEGFIENGWEGMIWDYG (INF-7);
GLFGAIAGFIENGWEGMIDGWYG (Inf HA-2);
GLFEAIEGFIENGWEGMIDGWYGCGLFEAIEGFIENGWEGMID GWYGC
(diINF-7);
GLFEAIEGFIENGWEGMIDGGCGLFEAIEGFIENGWEGMIDGGC
(diINF-3);
GLFGALAEALAEALAEHLAEALAEALEALAAGGSC (GLF);
GLFEAIEGFIENGWEGLAEALAEALEALAAGGSC (GALA-INF3);
GLF EAI EGFI ENGW EGnI DG K GLF EAI EGFI ENGW
EGnI DG (INF-5, n is norleucine);
LFEALLELLESLWELLLEA (JTS-1);
GLFKALLKLLKSLWKLLLKA (ppTG1);
GLFRALLRLLRSLWRLLLRA (ppTG20);
WEAKLAKALAKALAKHLAKALAKALKACEA (KALA);
GLFFEAIAEFIEGGWEGLIEGC (HA);
GIGAVLKVLTTGLPALISWIKRKRQQ (Melittin);
H₅WYG;
and
CHK₆HC.

[0976] Without wishing to be bound by theory, fusogenic lipids fuse with and consequently destabilize a membrane. Fusogenic lipids usually have small head groups and unsaturated acyl chains. Exemplary fusogenic lipids include, but are not limited to, 1,2-dileoyl-sn-3-phosphoethanolamine (DOPE), phosphatidylethanolamine (POPE), palmitoyloleoylphosphatidylcholine (POPC), (6Z,9Z,28Z,31Z)-heptatriaconta-6,9,28,31-tetraen-19-ol (Di-Lin), N-methyl(2,2-di((9Z,12Z)-octadeca-9,12-dienyl)-1,3-dioxolan-4-yl)methanamine (DLin-k-DMA) and N-methyl-2-(2,2-di((9Z,12Z)-octadeca-9,12-dienyl)-1,3-dioxolan-4-yl)ethanamine (also refered to as XTC herein).

[0977] Synthetic polymers with endosomolytic activity amenable to the present invention are described in U.S. Pat. App. Pub. Nos. 2009/0048410; 2009/0023890; 2008/0287630; 2008/0287628; 2008/0281044; 2008/0281041; 2008/0269450; 2007/0105804; 20070036865; and 2004/0198687, contents of which are hereby incorporated by reference in their entirety.

[0978] Exemplary cell permeation peptides include, but are not limited to,

RQIKIWFQNRRMKWKK (penetratin);
GRKKRRQRRRPPQC (Tat fragment 48-60);
GALFLGWLGAAGSTMGAWSQPKKKRKV (signal sequence based
peptide);
LLIILRRRIRKQAHAHSK (PVEC);
GWTLNSAGYLLKINLKALAALAKKIL (transportan);
KLALKLALKALKAALKLA (amphiphilic model peptide);
RRRRRRRRR (Arg9);
KFFKFFKFFK (Bacterial cell wall permeating
peptide);
LLGDFFRKSKEKIGKEFKRIVQRIKDFLRNLVPRTES (LL-37);
SWLSKTAKKLENSAKKRISEGIAIAIQGGPR (cecropin P1);
ACYCRIPACIAGERRYGTCIYQGRLWAFCC (α-defensin);
DHYNCVSSGGQCLYSACPIFTKIQGTCYRGKAKCCK (β-defensin);
RRRPRPPYLPRPRPPPFFPPRLPPRIPPGFPPRFPPRFPGKR-NH2
(PR-39);
ILPWKWPWWPWRR-NH2 (indolicidin);
AAVALLPAVLLALLAP (RFGF);
AALLPVLLAAP (RFGF analogue);
and
RKCRIVVIRVCR (bactenecin).

[0979] Exemplary cationic groups include, but are not limited to, protonated amino groups, derived from e.g., β-AMINE (AMINE=NH₂; alkylamino, dialkylamino, heterocyclyl, arylamino, diaryl amino, heteroaryl amino, or diheteroaryl amino, ethylene diamine, polyamino); aminoalkoxy, e.g., O(CH₂)ₙAMINE, (e.g., AMINE=NH₂; alkylamino, dialkylamino, heterocyclyl, arylamino, diaryl amino, heteroaryl amino, or diheteroaryl amino, ethylene diamine, polyamino); amino (e.g. NH₂; alkylamino, dialkylamino, heterocyclyl, arylamino, diaryl amino, heteroaryl amino, diheteroaryl amino, or amino acid); and NH(CH₂CH₂NH)˜CH₂CH₂-AMINE (AMINE=NH₂; alkylamino, dialkylamino, heterocyclyl, arylamino, diaryl amino, heteroaryl amino, or diheteroaryl amino).

[0980] As used herein the term “targeting ligand” refers to any molecule that provides an enhanced affinity for a selected target, e.g., a cell, cell type, tissue, organ, region of the body, or a compartment, e.g., a cellular, tissue or organ compartment. Some exemplary targeting ligands include, but are not limited to, antibodies, antigens, folates, receptor ligands, carbohydrates, aptamers, integrin receptor ligands, chemokine receptor ligands, transferrin, biotin, serotonin receptor ligands, PSMA, endothelin, GCPII, somatostatin, LDL and HDL ligands.

[0981] Carbohydrate based targeting ligands include, but are not limited to, D-galactose, multivalent galactose, N-acetyl-D-galactosamine (GalNAc), multivalent GalNAc, e.g. GalNAc₂ and GalNAc₃ (GalNAc and multivalent GalNAc are collectively referred to herein as GalNAc conjugates); D-mannose, multivalent mannose, multivalent lactose, N-acetyl-glucosamine, Glucose, multivalent Glucose, multivalent fucose, glycosylated polyaminoacids and lectins. The term multivalent indicates that more than one monosaccharide unit is present. Such monosaccharide subunits can be linked to each other through glycosidic linkages or linked to a scaffold molecule.

[0982] A number of folate and folate analogs amenable to the present invention as ligands are described in U.S. Pat. Nos. 2,816,110; 5,552,545; 6,335,434 and 7,128,893, contents of which are herein incorporated in their entireties by reference.

[0983] As used herein, the terms “PK modulating ligand” and “PK modulator” refers to molecules which can modulate the pharmacokinetics of the composition of the invention. Some exemplary PK modulator include, but are not limited to, lipophilic molecules, bile acids, sterols, phospholipid analogues, peptides, protein binding agents, vitamins, fatty acids, phenoxazine, aspirin, naproxen, ibuprofen, suprofen, ketoprofen, (S)-(+)-pranoprofen, carprofen, PEGs, biotin, and transthyretia-binding ligands (e.g., tetraiidothyroacetic acid, 2, 4, 6-triiodophenol and flufenamic acid). Oligomeric compounds that comprise a number of phosphorothioate intersugar linkages are also known to bind to serum protein, thus short oligomeric compounds, e.g. oligonucleotides of comprising from about 5 to 30 nucleotides (e.g., 5 to 25 nucleotides, preferably 5 to 20 nucleotides, e.g., 5, 6, 7, 8, 9, 10, 11, 12, 13, 14, 15, 16, 17, 18, 19, or 20 nucleotides), and that comprise a plurality of phosphorothioate linkages in the backbone are also amenable to the present invention as ligands (e.g. as PK modulating ligands). The PK modulating oligonucleotide can comprise at least 3, 4, 5, 6, 7, 8, 9, 10, 11, 12, 13, 14, 15 or more phosphorothioate and/or phosphorodithioate linkages. In some embodiments, all internucleotide linkages in PK modulating oligonucleotide are phosphorothioate and/or phosphorodithioates linkages. In addition, aptamers that bind serum components (e.g. serum proteins) are also amenable to the present invention as PK modulating ligands. Binding to serum components (e.g. serum proteins) can be predicted from albumin binding assays, scuh as those described in Oravcova, et al., Journal of Chromatography B (1996), 677: 1-27.

[0984] When two or more ligands are present, the ligands can all have same properties, all have different properties or some ligands have the same properties while others have different properties. For example, a ligand can have targeting properties, have endosomolytic activity or have PK modulating properties. In a preferred embodiment, all the ligands have different properties.

[0985] The ligand or tethered ligand can be present on a monomer when said monomer is incorporated into a component of the dsRNA agent of the invention (e.g., a dsRNA agent of the invention or linker). In some embodiments, the ligand can be incorporated via coupling to a “precursor” monomer after said “precursor” monomer has been incorporated into a component of the dsRNA agent of the invention (e.g., a dsRNA agent of the invention or linker). For example, a monomer having, e.g., an amino-terminated tether (i.e., having no associated ligand), e.g., monomer-linker-NH₂ can be incorporated into a component of the compounds of the invention (e.g., a dsRNA agent of the invention or linker). In a subsequent operation, i.e., after incorporation of the precursor monomer into a component of the compounds of the invention (e.g., a dsRNA agent of the invention or linker), a ligand having an electrophilic group, e.g., a pentafluorophenyl ester or aldehyde group, can subsequently be attached to the precursor monomer by coupling the electrophilic group of the ligand with the terminal nucleophilic group of the precursor monomer's tether.

[0986] In another example, a monomer having a chemical group suitable for taking part in Click Chemistry reaction can be incorporated e.g., an azide or alkyne terminated tether/linker. In a subsequent operation, i.e., after incorporation of the precursor monomer into the strand, a ligand having complementary chemical group, e.g. an alkyne or azide can be attached to the precursor monomer by coupling the alkyne and the azide together.

[0987] In some embodiments, ligand can be conjugated to nucleobases, sugar moieties, or internucleosidic linkages of the dsRNA agent of the invention. Conjugation to purine nucleobases or derivatives thereof can occur at any position including, endocyclic and exocyclic atoms. In some embodiments, the 2-, 6-, 7-, or 8-positions of a purine nucleobase are attached to a conjugate moiety. Conjugation to pyrimidine nucleobases or derivatives thereof can also occur at any position. In some embodiments, the 2-, 5-, and 6-positions of a pyrimidine nucleobase can be substituted with a conjugate moiety. When a ligand is conjugated to a nucleobase, the preferred position is one that does not interfere with hybridization, i.e., does not interfere with the hydrogen bonding interactions needed for base pairing.

[0988] Conjugation to sugar moieties of nucleosides can occur at any carbon atom. Example carbon atoms of a sugar moiety that can be attached to a conjugate moiety include the 2′, 3′, and 5′ carbon atoms. The 1′ position can also be attached to a conjugate moiety, such as in an abasic residue. Internucleosidic linkages can also bear conjugate moieties. For phosphorus-containing linkages (e.g., phosphodiester, phosphorothioate, phosphorodithiotate, phosphoroamidate, and the like), the conjugate moiety can be attached directly to the phosphorus atom or to an O, N, or S atom bound to the phosphorus atom. For amine- or amide-containing internucleosidic linkages (e.g., PNA), the conjugate moiety can be attached to the nitrogen atom of the amine or amide or to an adjacent carbon atom.

[0989] There are numerous methods for preparing conjugates of oligonuclotides. Generally, an oligonucleotide is attached to a conjugate moiety by contacting a reactive group (e.g., OH, SH, amine, carboxyl, aldehyde, and the like) on the oligonucleotide with a reactive group on the conjugate moiety. In some embodiments, one reactive group is electrophilic and the other is nucleophilic.

[0990] For example, an electrophilic group can be a carbonyl-containing functionality and a nucleophilic group can be an amine or thiol. Methods for conjugation of nucleic acids and related oligomeric compounds with and without linking groups are well described in the literature such as, for example, in Manoharan in Antisense Research and Applications, Crooke and LeBleu, eds., CRC Press, Boca Raton, Fla., 1993, Chapter 17, which is incorporated herein by reference in its entirety.

[0991] The ligand can be attached to the dsRNA agent of the inventions via a linker or a carrier monomer, e.g., a ligand carrier. The carriers include (i) at least one “backbone attachment point,” preferably two “backbone attachment points” and (ii) at least one “tethering attachment point.” A “backbone attachment point” as used herein refers to a functional group, e.g. a hydroxyl group, or generally, a bond available for, and that is suitable for incorporation of the carrier monomer into the backbone, e.g., the phosphate, or modified phosphate, e.g., sulfur containing, backbone, of an oligonucleotide. A “tethering attachment point” (TAP) in refers to an atom of the carrier monomer, e.g., a carbon atom or a heteroatom (distinct from an atom which provides a backbone attachment point), that connects a selected moiety. The selected moiety can be, e.g., a carbohydrate, e.g. monosaccharide, disaccharide, trisaccharide, tetrasaccharide, oligosaccharide and polysaccharide. Optionally, the selected moiety is connected by an intervening tether to the carrier monomer. Thus, the carrier will often include a functional group, e.g., an amino group, or generally, provide a bond, that is suitable for incorporation or tethering of another chemical entity, e.g., a ligand to the constituent atom.

[0992] Representative U.S. patents that teach the preparation of conjugates of nucleic acids include, but are not limited to, U.S. Pat. Nos. 4,828,979; 4,948,882; 5,218, 105; 5,525,465; 5,541,313; 5,545,730; 5,552,538; 5,578, 717, 5,580,731; 5,580,731; 5,591,584; 5,109,124; 5,118, 802; 5,138,045; 5,414,077; 5,486,603; 5,512,439; 5,578, 718; 5,608,046; 4,587,044; 4,605,735; 4,667,025; 4,762, 779; 4,789,737; 4,824,941; 4,835,263; 4,876,335; 4,904, 582; 4,958,013; 5,082,830; 5,112,963; 5,214,136; 5,082, 830; 5,112,963; 5,149,782; 5,214,136; 5,245,022; 5,254, 469; 5,258,506; 5,262,536; 5,272,250; 5,292,873; 5,317,098; 5,371,241, 5,391,723; 5,416,203, 5,451,463; 5,510, 475; 5,512,667; 5,514,785; 5,565,552; 5,567,810; 5,574, 142; 5,585,481; 5,587,371; 5,595,726; 5,597,696; 5,599, 923; 5,599,928; 5,672,662; 5,688,941; 5,714,166; 6,153, 737; 6,172,208; 6,300,319; 6,335,434; 6,335,437; 6,395, 437; 6,444,806; 6,486,308; 6,525,031; 6,528,631; 6,559, 279; contents of which are herein incorporated in their entireties by reference.

[0993] In some embodiments, the dsRNA agent further comprises a targeting ligand that targets a liver tissue. In some embodiments, the targeting ligand is a carbohydrate-based ligand. In one embodiment, the targeting ligand is a GalNAc conjugate.

[0994] In certain embodiments, the dsRNA agent of the invention further comprises a ligand having a structure shown below:

[chemical structure]

[0995] wherein:
   [0996] L^{G} is independently for each occurrence a ligand, e.g., carbohydrate, e.g. monosaccharide, disaccharide, trisaccharide, tetrasaccharide, polysaccharide; and
   [0997] Z′, Z″, Z″′ and Z″″ are each independently for each occurrence O or S.

[0998] In certain embodiments, the dsRNA agent of the invention comprises a ligand of Formula (II), (III), (IV) or (V):

[chemical structure]

[0999] wherein:
[1000] q^{2A}, q^{2B}, q^{3A}, q^{3B}, q^{4A}, q^{4B}, q^{5A}, q^{5B} and q^{5C} represent independently for each occurrence 0-20 and wherein the repeating unit can be the same or different;
[1001] Q and Q′ are independently for each occurrence is absent, —(P⁷-Q⁷-R⁷)ₚ-T⁷- or -T⁷-Q⁷-T^{7′}-B-T⁸′-Q⁸-T⁸;
[1002] P^{2A}, P^{2B}, P^{3A}, P^{3B}, P^{4A}, P^{4B}, P^{5A}, P^{5B}, P^{5C} P⁷, T^{2A}, T^{2B}, T^{3A}, T^{3B}, T^{4A}, T^{4B} T^{4A} T^{5B} T^{5C} T⁷, T⁷, T⁸ and T^{8′} are each independently for each occurrence absent, CO, NH, O, S, OC(O), NHC(O), CH₂, CH₂NH or CH₂O;
[1003] B is —CH₂—N(B^{L})—CH₂—;
[1004] B^{L} is -T^{B}-Q^{B}-T^{B′}-R
   [1005] Q^{2A}, Q^{2B}, Q^{3A}, Q^{3B}, Q^{4A}, Q^{4B}, Q^{5A}, Q^{5B}, Q⁵c Q⁷, Q⁸ and Q^{B} are independently for each occurrence absent, alkylene, substituted alkylene and wherein one or more methylenes can be interrupted or terminated by one or more of O, S, S(O), SO₂, N(R^{N}), C(R′)═C(R′), C—C or C(O);
   [1006] T^{B} and T^{B′} are each independently for each occurrence absent, CO, NH, O, S, OC(O), OC(O)O, NHC(O), NHC(O)NH, NHC(O)O, CH₂, CH₂NH or CH₂O;
   [1007] R^{x} is a lipophile (e.g., cholesterol, cholic acid, adamantane acetic acid, 1-pyrene butyric acid, dihydrotestosterone, 1,3-Bis-O(hexadecyl)glycerol, geranyloxyhexyl group, hexadecylglycerol, borneol, menthol, 1,3-propanediol, heptadecyl group, palmitic acid, myristic acid, O3-(oleoyl)lithocholic acid, O3-(oleoyl)cholenic acid, dimethoxytrityl, or phenoxazine), a vitamin (e.g., folate, vitamin A, vitamin E, biotin, pyridoxal), a peptide, a carbohydrate (e.g., monosaccharide, disaccharide, trisaccharide, tetrasaccharide, oligosaccharide, polysaccharide), an endosomolytic component, a steroid (e.g., uvaol, hecigenin, diosgenin), aterpene (e.g., triterpene, e.g., sarsasapogenin, Friedelin, epifriedelanol derivatized lithocholic acid), or a cationic lipid;
   [1008] R¹, R², R^{2A}, R^{2B}, R³R^{3B}, R⁴R^{4B}, R^{5A}, R^{5B}, R^{5c}, R′ are each independently for each occurrence absent, NH, O, S, CH₂, C(O)O, C(O)NH, NHCH(R^{a})C(O), —C(O)—CH(R^{a})—NH—, CO, CH═N—O,

[chemical structure]

or heterocyclyl;
[1009] L, L^{2A}, L^{2B}, L^{3A}, L^{3B}, L^{4A}, L^{4B}, L⁵A, L^{5B} and L^{5C} are each independently for each occurrence a carbohydrate, e.g., monosaccharide, disaccharide, trisaccharide, tetrasaccharide, oligosaccharide and polysaccharide;
[1010] R′ and R″ are each independently H, C₁-C₆ alkyl, OH, SH, or N(R^{N})₂;
[1011] R^{N} is independently for each occurrence H, methyl, ethyl, propyl, isopropyl, butyl or benzyl;
[1012] R^{a} is H or amino acid side chain;
[1013] Z′, Z″, Z″′ and Z″″ are each independently for each occurrence O or S;
[1014] p represent independently for each occurrence 0-20.

[1015] As discussed above, because the ligand can be conjugated to the iRNA agent via a linker or carrier, and because the linker or carrier can contain a branched linker, the iRNA agent can then contain multiple ligands via the same or different backbone attachment points to the carrier, or via the branched linker(s). For instance, the branchpoint of the branched linker may be a bivalent, trivalent, tetravalent, pentavalent, or hexavalent atom, or a group presenting such multiple valencies. In certain embodiments, the branchpoint is —N, —N(Q)-C, —O—C, —S—C, —SS—C, —C(O)N(Q)-C, —OC(O)N(Q)-C, —N(Q)C(O)—C, or —N(Q)C(O)O—C; wherein Q is independently for each occurrence H or optionally substituted alkyl. In other embodiment, the branchpoint is glycerol or glycerol derivative.

[1016] Suitable ligands for use in the compositions of the invention are described in U.S. Pat. Nos. 8,106,022, 8,450,467, 8,882,895, 9,352,048, 9,370,581, 9,370,582, 9,867,882, 10,806,791, and 11,110,174, and U.S. Patent Publication Nos. 2009/239814, 200/9247608, 2012/136042, 2013/178512, 2014/179761, 2015/011615, 2015/119444, 2015/119445, 2016/051691, 2016/375137, 2018/326070, 2019/099493, 2019/184018, and 2020/297853, the entire contents of each of which are incorporated herein by reference.

[1017] In some embodiments, a suitable ligand is a ligand disclosed in WO 2019/055633, the entire contents of which are incorporated herein by reference. In one embodiment the ligand comprises the structure below:

[chemical structure]

[1018] In certain embodiments, the dsRNA agent of the invention comprises a ligand of structure:

[chemical structure]

[1019] In certain embodiments, the dsRNA agent of the invention is conjugated with a ligand of structure:

[chemical structure]

[1020] In certain embodiments, the dsRNA agent of the invention comprises a ligand of structure:

[chemical structure]

[1021] In certain embodiments, the dsRNA agent of the invention comprises a monomer of structure:

[chemical structure]

[1022] In some embodiments, the RNAi agent is attached to the carbohydrate conjugate via a linker as shown in the following schematic, wherein X is O or S

[chemical structure]

[1023] In some embodiments, the RNAi agent is conjugated to L96 as defined in Table 1 and shown below:

[chemical structure]

[1024] Synthesis of above described ligands and monomers is described, for example, in U.S. Pat. No. 8,106,022, content of which is incorporated herein by reference in its entirety.

### VIII. Delivery of an RNAi Agent of the Disclosure

[1025] The delivery of a RNAi agent of the disclosure to a cell e.g., a cell within a subject, such as a human subject (e.g., a subject in need thereof, such as a subject having a target gene-associated disorder, can be achieved in a number of different ways. For example, delivery may be performed by contacting a cell with an RNAi agent of the disclosure either in vitro or in vivo. In vivo delivery may also be performed directly by administering a composition comprising an RNAi agent, e.g., a dsRNA, to a subject. Alternatively, in vivo delivery may be performed indirectly by administering one or more vectors that encode and direct the expression of the RNAi agent. These alternatives are discussed further below.

[1026] In general, any method of delivering a nucleic acid molecule (in vitro or in vivo) can be adapted for use with a RNAi agent of the disclosure (see e.g., Akhtar S. and Julian R L, (1992) Trends Cell. Biol. 2(5):139-144 and WO94/02595, which are incorporated herein by reference in their entireties). For in vivo delivery, factors to consider in order to deliver an RNAi agent include, for example, biological stability of the delivered agent, prevention of non-specific effects, and accumulation of the delivered agent in the target tissue. The non-specific effects of an RNAi agent can be minimized by local administration, for example, by direct injection or implantation into a tissue or topically administering the preparation. Local administration to a treatment site maximizes local concentration of the agent, limits the exposure of the agent to systemic tissues that can otherwise be harmed by the agent or that can degrade the agent, and permits a lower total dose of the RNAi agent to be administered. Several studies have shown successful knockdown of gene products when an RNAi agent is administered locally. For example, pulmonary delivery, e.g., inhalation, of a dsRNA, e.g., SOD1, has been shown to effectively knockdown gene and protein expression in lung tissue and that there is excellent uptake of the dsRNA by the bronchioles and alveoli of the lung. Intraocular delivery of a VEGF dsRNA by intravitreal injection in cynomolgus monkeys (Tolentino, M J. et al., (2004) Retina 24:132-138) and subretinal injections in mice (Reich, S J. et al. (2003) Mol. Vis. 9:210-216) were also both shown to prevent neovascularization in an experimental model of age-related macular degeneration. In addition, direct intratumoral injection of a dsRNA in mice reduces tumor volume (Pille, J. et al. (2005) Mol. Ther. 11:267-274) and can prolong survival of tumor-bearing mice (Kim, W J. et al., (2006) Mol. Ther. 14:343-350; Li, S. et al., (2007) Mol. Ther. 15:515-523). RNA interference has also shown success with local delivery to the lungs by intranasal administration (Howard, K A. et al., (2006) Mol. Ther. 14:476-484; Zhang, X. et al., (2004) J. Biol. Chem. 279:10677-10684; Bitko, V. et al., (2005) Nat. Med. 11:50-55). For administering a RNAi agent systemically for the treatment of a disease, the RNA can be modified or alternatively delivered using a drug delivery system; both methods act to prevent the rapid degradation of the dsRNA by endo- and exo-nucleases in vivo. Modification of the RNA or the pharmaceutical carrier can also permit targeting of the RNAi agent to the target tissue and avoid undesirable off-target effects (e.g., without wishing to be bound by theory, use of GNAs as described herein has been identified to destabilize the seed region of a dsRNA, resulting in enhanced preference of such dsRNAs for on-target effectiveness, relative to off-target effects, as such off-target effects are significantly weakened by such seed region destabilization). RNAi agents can be modified by chemical conjugation to lipophilic groups such as cholesterol to enhance cellular uptake and prevent degradation. For example, a RNAi agent directed against ApoB conjugated to a lipophilic cholesterol moiety was injected systemically into mice and resulted in knockdown of apoB mRNA in both the liver and jejunum (Soutschek, J. et al., (2004) Nature 432:173-178). Conjugation of an RNAi agent to an aptamer has been shown to inhibit tumor growth and mediate tumor regression in a mouse model of prostate cancer (McNamara, J O. et al., (2006) Nat. Biotechnol. 24:1005-1015). In an alternative embodiment, the RNAi agent can be delivered using drug delivery systems such as a nanoparticle, a dendrimer, a polymer, liposomes, or a cationic delivery system. Positively charged cationic delivery systems facilitate binding of molecule RNAi agent (negatively charged) and also enhance interactions at the negatively charged cell membrane to permit efficient uptake of an RNAi agent by the cell. Cationic lipids, dendrimers, or polymers can either be bound to an RNAi agent, or induced to form a vesicle or micelle (see e.g., Kim S H. et al., (2008) Journal of Controlled Release 129(2):107-116) that encases an RNAi agent. The formation of vesicles or micelles further prevents degradation of the RNAi agent when administered systemically. Methods for making and administering cationic-RNAi agent complexes are well within the abilities of one skilled in the art (see e.g., Sorensen, D R., et al. (2003) J. Mol. Biol 327:761-766; Verma, U N. et al., (2003) Clin. Cancer Res. 9:1291-1300; Arnold, A S et al. (2007) J. Hypertens. 25:197-205, which are incorporated herein by reference in their entirety). Some non-limiting examples of drug delivery systems useful for systemic delivery of RNAi agents include DOTAP (Sorensen, D R., et al (2003), supra; Verma, U N. et al., (2003), supra), Oligofectamine, “solid nucleic acid lipid particles” (Zimmermann, T S. et al., (2006) Nature 441:111-114), cardiolipin (Chien, P Y. et al., (2005) Cancer Gene Ther. 12:321-328; Pal, A. et al., (2005)IntJ. Oncol. 26:1087-1091), polyethyleneimine (Bonnet M E. et al., (2008) Pharm. Res. August 16 Epub ahead of print; Aigner, A. (2006) J Biomed. Biotechnol. 71659), Arg-Gly-Asp (RGD) peptides (Liu, S. (2006) Mol. Pharm. 3:472-487), and polyamidoamines (Tomalia, D A. et al., (2007) Biochem. Soc. Trans. 35:61-67; Yoo, H. et al., (1999) Pharm. Res. 16:1799-1804). In some embodiments, a RNAi agent forms a complex with cyclodextrin for systemic administration. Methods for administration and pharmaceutical compositions of RNAi agents and cyclodextrins can be found in U.S. Pat. No. 7,427,605, which is herein incorporated by reference in its entirety.

[1027] Certain aspects of the instant disclosure relate to a method of reducing the expression of a target gene in a cell, comprising contacting said cell with the double-stranded RNAi agent of the disclosure. In one embodiment, the cell is a skeletal muscle. In one embodiment, the cell is a cardiac muscle cell. In one embodiment, the cell is an adipocyte.

[1028] In certain embodiments, the RNAi agent is taken up on one or more tissue or cell types present in organs, e.g., liver, skeletal muscle, cardiac muscle, adipose tissue.

[1029] Another aspect of the disclosure relates to a method of reducing the expression and/or activity of a target gene in a subject, comprising administering to the subject the double-stranded RNAi agent of the disclosure.

[1030] Another aspect of the disclosure relates to a method of treating a subject having a target gene-associated disorder or at risk of having or at risk of developing a target gene-associated disorder, comprising administering to the subject a therapeutically effective amount of the double-stranded RNAi agent of the disclosure, thereby treating the subject.

[1031] In one embodiment, the double-stranded RNAi agent is administered subcutaneously.

[1032] In one embodiment, the double-stranded RNAi agent is administered intramuscularly.

[1033] In one embodiment, the double-stranded RNAi agent is administered by intravenously.

[1034] In one embodiment, the double-stranded RNAi agent is administered by pulmonary system administration, e.g., intranasal administration, or oral inhalative administration.

[1035] For ease of exposition the formulations, compositions and methods in this section are discussed largely with regard to modified siRNA compounds. It may be understood, however, that these formulations, compositions and methods can be practiced with other siRNA compounds, e.g., unmodified siRNA compounds, and such practice is within the disclosure. A composition that includes a RNAi agent can be delivered to a subject by a variety of routes. Exemplary routes include pulmonary system, intravenous, subcutaneous, oral, topical, rectal, anal, vaginal, nasal, and ocular.

[1036] The RNAi agents of the disclosure can be incorporated into pharmaceutical compositions suitable for administration. Such compositions typically include one or more species of RNAi agent and a pharmaceutically acceptable carrier. As used herein the language “pharmaceutically acceptable carrier” is intended to include any and all solvents, dispersion media, coatings, antibacterial and antifungal agents, isotonic and absorption delaying agents, and the like, compatible with pharmaceutical administration. The use of such media and agents for pharmaceutically active substances is well known in the art. Except insofar as any conventional media or agent is incompatible with the active compound, use thereof in the compositions is contemplated. Supplementary active compounds can also be incorporated into the compositions.

[1037] The pharmaceutical compositions of the present disclosure may be administered in a number of ways depending upon whether local or systemic treatment is desired and upon the area to be treated. Administration may be intratracheal, intranasal, topical (including ophthalmic, vaginal, rectal, intranasal, transdermal), oral, parenteral, or pulmonary, e.g., by inhalation or insufflation of powders or aerosols, including by nebulizer. Parenteral administration includes intravenous drip, subcutaneous, intraperitoneal, or intramuscular injection administration.

[1038] The route and site of administration may be chosen to enhance targeting. For example, to target muscle cells, intramuscular injection into the muscles of interest would be a logical choice. Lung cells might be targeted by administering the RNAi agent in powder or aerosol form. The vascular endothelial cells could be targeted by coating a balloon catheter with the RNAi agent and mechanically introducing the RNA.

[1039] Compositions for pulmonary system delivery may include aqueous solutions, e.g., for intranasal or oral inhalative administration, suitable carriers composed of, e.g., lipids (liposomes, niosomes, microemulsions, lipidic micelles, solid lipid nanoparticles) or polymers (polymer micelles, dendrimers, polymeric nanoparticles, nonogels, nanocapsules), adjuvant, e.g., for oral inhalative administration. Aqueous compositions may be sterile and may optionally contain buffers, diluents, absorbtion enhancers and other suitable additives. Such administration permits both systemic and local delivery of the double stranded RNAi agents of the invention.

[1040] Intranasal administration may include instilling or insufflating a double stranded RNAi agent into the nasal cavity with syringes or droppers by applying a few drops at a time or via atomization. Suitable dosage forms for intranasal administration include drops, powders, nebulized mists, and sprays. Nasal delivery devices include, but not limited to, vapor inhaler, nasal dropper, spray bottle, metered dose spray pump, gas driven spray atomizer, nebulizer, mechanical powder sprayer, breath actuated inhaler, and insufflator. Devices for delivery deeper into the respiratory system, e.g., into the lung, include nebulizer, pressured metered-dose inhaler, dry powder inhaler, and thermal vaporization aerosol device. Devices for delivery by inhalation are available from commercial suppliers. Devices can be fixed or variable dose, single or multidose, disposable or reusable depending on, for example, the disease or disorder to be prevented or treated, the volume of the agent to be delivered, the frequency of delivery of the agent, and other considerations in the art.

[1041] Oral inhalative administration may include use of device, e.g., a passive breath driven or active power driven single/-multiple dose dry powder inhaler (DPI), to deliver a double stranded RNAi agent to the pulmonary system. Suitable dosage forms for oral inhalative administration include powders and solutions. Suitable devices for oral inhalative administration include nebulizers, metered-dose inhalers, and dry powder inhalers. Dry powder inhalers are of the most popular devices used to deliver drugs, especially proteins to the lungs. Exemplary commercially available dry powder inhalers include Spinhaler (Fisons Pharmaceuticals, Rochester, NY) and Rotahaler (GSK, RTP, NC). Several types of nebulizers are available, namely jet nebulizers, ultrasonic nebulizers, vibrating mesh nebulizers. Jet nebulizers are driven by compressed air. Ultrasonic nebulizers use a piezoelectric transducer in order to create droplets from an open liquid reservoir. Vibrating mesh nebulizers use perforated membranes actuated by an annular piezoelement to vibrate in resonant bending mode. The holes in the membrane have a large cross-section size on the liquid supply side and a narrow cross-section size on the side from where the droplets emerge. Depending on the rapeutic application, the hole sizes and number of holes can be adjusted. Selection of a suitable device depends on parameters, such as nature of the drug and its formulation, the site of action, and pathophysiology of the lung. Aqueous suspensions and solutions are nebulized effectively. Aerosols based on mechanically generated vibration mesh technologies also have been used successfully to deliver proteins to lungs.

[1042] The amount of RNAi agent for pulmonary system administration may vary from one target gene to another target gene and the appropriate amount that has to be applied may have to be determined individually for each target gene. Typically, this amount ranges from 10 μg to 2 mg, or 50 g to 1500 μg, or 100 g to 1000 μg.

[1043] Formulations for topical administration may include transdermal patches, ointments, lotions, creams, gels, drops, suppositories, sprays, liquids, and powders. Conventional pharmaceutical carriers, aqueous, powder or oily bases, thickeners and the like may be necessary or desirable. Coated condoms, gloves, and the like may also be useful.

[1044] Compositions for oral administration include powders or granules, suspensions or solutions in water, syrups, elixirs or non-aqueous media, tablets, capsules, lozenges, or troches. In the case of tablets, carriers that can be used include lactose, sodium citrate and salts of phosphoric acid. Various disintegrants such as starch, and lubricating agents such as magnesium stearate, sodium lauryl sulfate and talc, are commonly used in tablets. For oral administration in capsule form, useful diluents are lactose and high molecular weight polyethylene glycols. When aqueous suspensions are required for oral use, the nucleic acid compositions can be combined with emulsifying and suspending agents. If desired, certain sweetening or flavoring agents can be added. Compositions suitable for oral administration of the agents of the invention are further described in PCT Application No. PCT/US20/33156, the entire contents of which are incorporated herein by reference.

[1045] Formulations for parenteral administration may include sterile aqueous solutions which may also contain buffers, diluents, and other suitable additives. For intravenous use, the total concentration of solutes may be controlled to render the preparation isotonic.

[1046] In one embodiment, the administration of the siRNA compound, e.g., a double-stranded siRNA compound, is parenteral, e.g., intravenous (e.g., as a bolus or as a diffusible infusion), intradermal, intraperitoneal, intramuscular, subcutaneous, transmucosal, buccal, sublingual, endoscopic, rectal, oral, vaginal, topical, pulmonary system, intranasal, urethral, or ocular. Administration can be provided by the subject or by another person, e.g., a health care provider. The medication can be provided in measured doses or in a dispenser which delivers a metered dose. Selected modes of delivery are discussed in more detail below.

### A. Vector Encoded RNAi Agents of the Disclosure

[1047] RNAi agents targeting the target gene can be expressed from transcription units inserted into DNA or RNA vectors (see, e.g., Couture, A, et al., TIG. (1996), 12:5-10; WO 00/22113, WO 00/22114, and U.S. Pat. No. 6,054,299). Expression can be sustained (months or longer), depending upon the specific construct used and the target tissue or cell type. These transgenes can be introduced as a linear construct, a circular plasmid, or a viral vector, which can be an integrating or non-integrating vector. The transgene can also be constructed to permit it to be inherited as an extrachromosomal plasmid (Gassmann, et al., (1995) Proc. Natl. Acad. Sci. USA 92:1292).

[1048] The individual strand or strands of a RNAi agent can be transcribed from a promoter on an expression vector. Where two separate strands are to be expressed to generate, for example, a dsRNA, two separate expression vectors can be co-introduced (e.g., by transfection or infection) into a target cell. Alternatively, each individual strand of a dsRNA can be transcribed by promoters both of which are located on the same expression plasmid. In one embodiment, a dsRNA is expressed as inverted repeat polynucleotides joined by a linker polynucleotide sequence such that the dsRNA has a stem and loop structure.

[1049] RNAi agent expression vectors are generally DNA plasmids or viral vectors. Expression vectors compatible with eukaryotic cells, such as those compatible with vertebrate cells, can be used to produce recombinant constructs for the expression of a RNAi agent as described herein. Delivery of RNAi agent expressing vectors can be systemic, such as by intravenous or intramuscular administration, by administration to target cells ex-planted from the patient followed by reintroduction into the patient, or by any other means that allows for introduction into a desired target cell.

[1050] Viral vector systems which can be utilized with the methods and compositions described herein include, but are not limited to, (a) adenovirus vectors; (b) retrovirus vectors, including but not limited to lentiviral vectors, moloney murine leukemia virus, etc.; (c) adeno-associated virus vectors; (d) herpes simplex virus vectors; (e) SV 40 vectors; (f) polyoma virus vectors; (g) papilloma virus vectors; (h) picornavirus vectors; (i) pox virus vectors such as an orthopox, e.g., vaccinia virus vectors or avipox, e.g. canary pox or fowl pox; and (j) a helper-dependent or gutless adenovirus. Replication-defective viruses can also be advantageous. Different vectors will or will not become incorporated into the cells' genome. The constructs can include viral sequences for transfection, if desired. Alternatively, the construct can be incorporated into vectors capable of episomal replication, e.g. EPV and EBV vectors. Constructs for the recombinant expression of a RNAi agent will generally require regulatory elements, e.g., promoters, enhancers, etc., to ensure the expression of the RNAi agent in target cells. Other aspects to consider for vectors and constructs are known in the art.

### IX. Pharmaceutical Compostions

[1051] The present disclosure also includes pharmaceutical compositions and formulations which include the RNAi agents of the disclosure. In one embodiment, provided herein are pharmaceutical compositions containing an RNAi agent, as described herein, and a pharmaceutically acceptable carrier. The pharmaceutical compositions containing the RNAi agent are useful for treating a subject who would benefit from inhibiting or reducing the expression of a target gene, e.g., a subject having a target gene-associated disorder. Such pharmaceutical compositions are formulated based on the mode of delivery. One example is compositions that are formulated for systemic administration via parenteral delivery, e.g., by intravenous (IV), intramuscular (IM), or for subcutaneous (subQ) delivery.

[1052] In some embodiments, the pharmaceutical compositions of the invention are pyrogen free or non-pyrogenic.

[1053] In one embodiment, the delivery vehicle can deliver an iRNA compound, e.g., a double-stranded iRNA compound, or ssiRNA compound, (e.g., a precursor thereof, e.g., a larger siRNA compound which can be processed into a ssiRNA compound, or a DNA which encodes an siRNA compound, e.g., a double-stranded siRNA compound, or ssiRNA compound, or precursor thereof) to a cell by a topical route of administration. The delivery vehicle can be microscopic vesicles. In one example the microscopic vesicles are liposomes. In some embodiments the liposomes are cationic liposomes. In another example the microscopic vesicles are micelles. In one aspect, the invention features a pharmaceutical composition including an siRNA compound, e.g., a double-stranded siRNA compound, or ssiRNA compound, (e.g., a precursor thereof, e.g., a larger siRNA compound which can be processed into a ssiRNA compound, or a DNA which encodes an siRNA compound, e.g., a double-stranded siRNA compound, or ssiRNA compound, or precursor thereof) in an injectable dosage form. In one embodiment, the injectable dosage form of the pharmaceutical composition includes sterile aqueous solutions or dispersions and sterile powders. In some embodiments the sterile solution can include a diluent such as water; saline solution; fixed oils, polyethylene glycols, glycerin, or propylene glycol.

[1054] In one aspect, the invention features a pharmaceutical composition including an siRNA compound, e.g., a double-stranded siRNA compound, or ssiRNA compound, (e.g., a precursor thereof, e.g., a larger siRNA compound which can be processed into a ssiRNA compound, or a DNA which encodes an siRNA compound, e.g., a double-stranded siRNA compound, or ssiRNA compound, or precursor thereof) in oral dosage form. In one embodiment, the oral dosage form is selected from the group consisting of tablets, capsules and gel capsules. In another embodiment, the pharmaceutical composition includes an enteric material that substantially prevents dissolution of the tablets, capsules or gel capsules in a mammalian stomach. In some embodiments the enteric material is a coating. The coating can be acetate phthalate, propylene glycol, sorbitan monoleate, cellulose acetate trimellitate, hydroxy propyl methyl cellulose phthalate or cellulose acetate phthalate. In one embodiment, the oral dosage form of the pharmaceutical composition includes a penetration enhancer, e.g., a penetration enhancer described herein.

[1055] In another embodiment, the oral dosage form of the pharmaceutical composition includes an excipient. In one example the excipient is polyethyleneglycol. In another example the excipient is precirol.

[1056] In another embodiment, the oral dosage form of the pharmaceutical composition includes a plasticizer. The plasticizer can be diethyl phthalate, triacetin dibutyl sebacate, dibutyl phthalate or triethyl citrate.

### X. Methods of the Invention

[1057] Another aspect of the invention relates to a method of reducing the expression of a target gene in a cell, comprising contacting the cell with a dsRNA agent of the invention. The methods include contacting the cell with a dsRNA of the disclosure and maintaining the cell for a time sufficient to obtain degradation of the mRNA transcripts of a target gene, thereby inhibiting expression of the target gene in the cell.

[1058] Reduction in gene expression can be assessed by any methods known in the art. For example, a reduction in the expression of a target may be determined by determining the mRNA expression level of the target gene using methods routine to one of ordinary skill in the art, e.g., northern blotting, qRT-PCR; by determining the protein level of a target protein using methods routine to one of ordinary skill in the art, such as western blotting, immunological techniques or histology based methods, such as IHC and ISH.

[1059] In the methods of the disclosure the cell may be contacted in vitro or in vivo, i.e., the cell may be within a subject. Contacting a cell in vivo with the RNAi agent includes contacting a cell or group of cells within a subject, e.g., a human subject, with the RNAi agent. Combinations of in vitro and in vivo methods of contacting a cell are also possible.

[1060] The cell may be an extra-heptic cell, such as askeletal muscle cell, a cardiac muscle cell, or an adipocyte.

[1061] A cell suitable for treatment using the methods of the disclosure may be any cell that expresses a target gene. A cell suitable for use in the methods of the disclosure may be a mammalian cell, e.g., a primate cell (such as a human cell or a non-human primate cell, e.g., a monkey cell or a chimpanzee cell), a non-primate cell (such as a rat cell, or a mouse cell. In one embodiment, the cell is a human cell, e.g., a human liver cell or a human kidney cell.

[1062] Contacting a cell may be direct or indirect, as discussed above. Furthermore, contacting a cell may be accomplished via a targeting ligand, including any ligand described herein or known in the art. In some embodiments, the targeting ligand is a carbohydrate moiety, e.g., a GalNAc ligand, or any other ligand that directs the RNAi agent to a site of interest. In certain embodiments, the RNAi agent does not include a targeting ligand.

[1063] The term “inhibiting,” as used herein, is used interchangeably with “reducing,” “silencing,” “downregulating,” “suppressing” and other similar terms, and includes any level of inhibition. In certain embodiments, a level of inhibition, e.g., for an RNAi agent of the instant disclosure, can be assessed in cell culture conditions, e.g., wherein cells in cell culture are transfected via Lipofectamine™-mediated transfection at a concentration in the vicinity of a cell of 10 nM or less, 1 nM or less, etc. Knockdown of a given RNAi agent can be determined via comparison of pre-treated levels in cell culture versus post-treated levels in cell culture, optionally also comparing against cells treated in parallel with a scrambled or other form of control RNAi agent. Knockdown in cell culture of, e.g., 50% or more, can thereby be identified as indicative of “inhibiting” or “reducing”, “downregulating” or “suppressing”, etc. having occurred. It is expressly contemplated that assessment of targeted mRNA or encoded protein levels (and therefore an extent of “inhibiting”, etc. caused by a RNAi agent of the disclosure) can also be assessed in in vivo systems for the RNAi agents of the instant disclosure, under properly controlled conditions as described in the art.

[1064] The phrase “inhibiting expression of a target gene” or “inhibiting expression of a target,” as used herein, includes inhibition of expression of any target gene (such as, e.g., a mouse target gene, a rat target gene, a monkey target gene, or a human target gene) as well as variants or mutants of a target gene that encode a target protein. Thus, the target gene may be a wild-type target gene, a mutant target gene, or a transgenic target gene in the context of a genetically manipulated cell, group of cells, or organism.

[1065] “Inhibiting expression of a target gene” includes any level of inhibition of a target gene, e.g., at least partial suppression of the expression of a target gene, such as an inhibition by at least 20%. In certain embodiments, inhibition is by at least 30%, at least 40%, at least 50%, at least about 60%, at least 70%, at least about 80%, at least 85%, at least 90%, at least 95%, at least 96%, at least 97%, at least 98%, or at least 99%; or to below the level of detection of the assay method. In certain method, inhibition is measured at a 10 nM concentration of the siRNA using the luciferase assay provided in Example 1.

[1066] The expression of a target gene may be assessed based on the level of any variable associated with target gene expression, e.g., target mRNA level or target protein level.

[1067] Inhibition may be assessed by a decrease in an absolute or relative level of one or more of these variables compared with a control level. The control level may be any type of control level that is utilized in the art, e.g., a pre-dose baseline level, or a level determined from a similar subject, cell, or sample that is untreated or treated with a control (such as, e.g., buffer only control or inactive agent control).

[1068] In some embodiments of the methods of the disclosure, expression of a target gene is inhibited by at least 20%, 30%, 40%, 50%, 60%, 70%, 80%, 85%, 90%, or 95%, or to below the level of detection of the assay. In certain embodiments, the methods include a clinically relevant inhibition of expression of a target gene, e.g. as demonstrated by a clinically relevant outcome after treatment of a subject with an agent to reduce the expression of a target gene.

[1069] Inhibition of the expression of a target gene may be manifested by a reduction of the amount of mRNA expressed by a first cell or group of cells (such cells may be present, for example, in a sample derived from a subject) in which a target gene is transcribed and which has or have been treated (e.g., by contacting the cell or cells with a RNAi agent of the disclosure, or by administering a RNAi agent of the disclosure to a subject in which the cells are or were present) such that the expression of a target gene is inhibited, as compared to a second cell or group of cells substantially identical to the first cell or group of cells but which has not or have not been so treated (control cell(s) not treated with a RNAi agent or not treated with a RNAi agent targeted to the genome of interest). The degree of inhibition may be expressed in terms of:

$$\frac{( mRNA in control cells ) - ( mRNA in treated cells )}{( mRNA in control cells )} 100 \%$$

[1070] In other embodiments, inhibition of the expression of a target gene may be assessed in terms of a reduction of a parameter that is functionally linked to a target gene expression, e.g., target protein expression. Target gene silencing may be determined in any cell expressing a target gene, either endogenous or heterologous from an expression construct, and by any assay known in the art.

[1071] Inhibition of the expression of a target protein may be manifested by a reduction in the level of the target protein that is expressed by a cell or group of cells (e.g., the level of protein expressed in a sample derived from a subject). As explained above, for the assessment of genome suppression, the inhibition of protein expression levels in a treated cell or group of cells may similarly be expressed as a percentage of the level of protein in a control cell or group of cells.

[1072] A control cell or group of cells that may be used to assess the inhibition of the expression of a target gene includes a cell or group of cells that has not yet been contacted with an RNAi agent of the disclosure. For example, the control cell or group of cells may be derived from an individual subject (e.g., a human or animal subject) prior to treatment of the subject with an RNAi agent.

[1073] The level of target gene mRNA that is expressed by a cell or group of cells may be determined using any method known in the art for assessing RNA expression. In one embodiment, the level of expression of target gene in a sample is determined by detecting a transcribed polynucleotide, or portion thereof, e.g., mRNA of the target gene. RNA may be extracted from cells using RNA extraction techniques including, for example, using acid phenol/guanidine isothiocyanate extraction (RNAzol B; Biogenesis), RNeasy™ RNA preparation kits (Qiagen®) or PAXgene (PreAnalytix, Switzerland). Typical assay formats utilizing ribonucleic acid hybridization include nuclear run-on assays, RT-PCR, RNase protection assays, northern blotting, in situ hybridization, microarray analysis, and or histology based methods such as IHC and ISH. Circulating target mRNA may be detected using methods the described in WO2012/177906, the entire contents of which are hereby incorporated herein by reference.

[1074] In some embodiments, the level of expression of target gene is determined using a nucleic acid probe. The term “probe”, as used herein, refers to any molecule that is capable of selectively binding to a specific target nucleic acid or protein, or fragment thereof. Probes can be synthesized by one of skill in the art, or derived from appropriate biological preparations. Probes may be specifically designed to be labeled. Examples of molecules that can be utilized as probes include, but are not limited to, RNA, DNA, proteins, antibodies, and organic molecules.

[1075] Isolated mRNA can be used in hybridization or amplification assays that include, but are not limited to, Southern or northern analyses, polymerase chain reaction (PCR) analyses and probe arrays. One method for the determination of RNA levels involves contacting the isolated RNA with a nucleic acid molecule (probe) that can hybridize to target RNA. In one embodiment, the RNA is immobilized on a solid surface and contacted with a probe, for example by running the isolated RNA on an agarose gel and transferring the RNA from the gel to a membrane, such as nitrocellulose. In an alternative embodiment, the probe(s) are immobilized on a solid surface and the RNA is contacted with the probe(s), for example, in an Affymetrix® gene chip array. A skilled artisan can readily adapt known RNA detection methods for use in determining the level of target mRNA.

[1076] An alternative method for determining the level of expression of target in a sample involves the process of nucleic acid amplification or reverse transcriptase (to prepare cDNA) of for example mRNA in the sample, e.g., by RT-PCR (the experimental embodiment set forth in Mullis, 1987, U.S. Pat. No. 4,683,202), ligase chain reaction (Barany (1991) Proc. Natl. Acad. Sci. USA 88:189-193), self sustained sequence replication (Guatelli et al. (1990) Proc. Natl. Acad. Sci. USA 87:1874-1878), transcriptional amplification system (Kwoh et al. (1989) Proc. Natl. Acad. Sci. USA 86:1173-1177), Q-Beta Replicase (Lizardi et al. (1988) Bio Technology 6:1197), rolling circle replication (Lizardi et al., U.S. Pat. No. 5,854,033) or any other nucleic acid amplification method, followed by the detection of the amplified molecules using techniques well known to those of skill in the art. These detection schemes are especially useful for the detection of nucleic acid molecules if such molecules are present in very low numbers. In particular aspects of the disclosure, the level of expression of target is determined by quantitative fluorogenic RT-PCR (i.e., the TaqMan™ System), by a Dual-Glo® Luciferase assay, or by other art-recognized method for measurement of target expression or mRNA level.

[1077] The expression level of target mRNA may be monitored using a membrane blot (such as used in hybridization analysis such as northern, Southern, dot, and the like), or microwells, sample tubes, gels, beads or fibers (or any solid support comprising bound nucleic acids). See U.S. Pat. Nos. 5,770,722, 5,874,219, 5,744,305, 5,677,195 and 5,445,934, which are incorporated herein by reference. The determination of target expression level may also comprise using nucleic acid probes in solution.

[1078] In some embodiments, the level of RNA expression is assessed using branched DNA (bDNA) assays or real time PCR (qPCR). The use of this PCR method is described and exemplified in the Examples presented herein. Such methods can also be used for the detection of target nucleic acids.

[1079] The level of target protein expression may be determined using any method known in the art for the measurement of protein levels. Such methods include, for example, electrophoresis, capillary electrophoresis, high performance liquid chromatography (HPLC), thin layer chromatography (TLC), hyperdiffusion chromatography, fluid or gel precipitin reactions, absorption spectroscopy, a colorimetric assays, spectrophotometric assays, flow cytometry, immunodiffusion (single or double), immunoelectrophoresis, western blotting, radioimmunoassay (RIA), enzyme-linked immunosorbent assays (ELISAs), immunofluorescent assays, electrochemiluminescence assays, and the like. Such assays can also be used for the detection of proteins indicative of the presence or replication of target proteins.

[1080] In some embodiments, the efficacy of the methods of the disclosure in the treatment of a target gene-related disease is assessed by a decrease in target mRNA level (e.g, by assessment of a blood target gene level, or otherwise).

[1081] In some embodiments, the efficacy of the methods of the disclosure in the treatment of a target gene-related disease is assessed by a decrease in target mRNA level (e.g, by assessment of a liver or kidney sample for target level, by biopsy, or otherwise).

[1082] In some embodiments of the methods of the disclosure, the RNAi agent is administered to a subject such that the RNAi agent is delivered to a specific site within the subject. The inhibition of expression of target may be assessed using measurements of the level or change in the level of target mRNA or target protein in a sample derived from a specific site within the subject, e.g., liver or kidney cells. In certain embodiments, the methods include a clinically relevant inhibition of expression of target, e.g. as demonstrated by a clinically relevant outcome after treatment of a subject with an agent to reduce the expression of target gene.

[1083] As used herein, the terms detecting or determining a level of an analyte are understood to mean performing the steps to determine if a material, e.g., protein, RNA, is present. As used herein, methods of detecting or determining include detection or determination of an analyte level that is below the level of detection for the method used.

[1084] The in vivo methods of the disclosure may include administering to a subject a composition containing a RNAi agent, where the RNAi agent includes a nucleotide sequence that is complementary to at least a part of an RNA transcript of the target gene of the subject to be treated. When the organism to be treated is a mammal such as a human, the composition can be administered by any means known in the art including, but not limited to oral, intraperitoneal, or parenteral routes, including intravenous, intramuscular, subcutaneous, transdermal, airway (aerosol), nasal, rectal, and topical (including buccal and sublingual) administration. In certain embodiments, the compositions are administered by intravenous infusion or injection. In certain embodiments, the compositions are administered by subcutaneous injection. In certain embodiments, the compositions are administered orally. In certain embodiments, the compositions are administered by pulmonary delivery, e.g., oral inhalation or intranasal delivery.

[1085] In some embodiments, the administration is via a depot injection. A depot injection may release the RNAi agent in a consistent way over a prolonged time period. Thus, a depot injection may reduce the frequency of dosing needed to obtain a desired effect, e.g., a desired inhibition of the target gene, or a therapeutic or prophylactic effect. A depot injection may also provide more consistent serum concentrations. Depot injections may include subcutaneous injections or intramuscular injections. In certain embodiments, the depot injection is a subcutaneous injection.

[1086] In one embodiment, the double-stranded RNAi agent is administered by pulmonary system administration, e.g., intranasal administration or oral inhalative administration. Pulmonary system administration may be via a syringe, a dropper, atomization, or use of device, e.g., a passive breath driven or active power driven single/-multiple dose dry powder inhaler (DPI) device.

[1087] The mode of administration may be chosen based upon whether local or systemic treatment is desired and based upon the area to be treated. The route and site of administration may be chosen to enhance targeting.

[1088] In one aspect, the present disclosure also provides methods for inhibiting the expression of a target gene in a mammal. The methods include administering to the mammal a composition comprising a dsRNA that targets a target gene in a cell of the mammal and maintaining the mammal for a time sufficient to obtain degradation of the RNA transcript of the target gene, thereby inhibiting expression of the target gene in the cell. Reduction in genome expression can be assessed by any methods known it the art and by methods, e.g. qRT-PCR, described herein. Reduction in protein production can be assessed by any methods known it the art and by methods, e.g. ELISA, described herein.

[1089] The present disclosure further provides methods of treatment of a subject in need thereof. The treatment methods of the disclosure include administering an RNAi agent of the disclosure to a subject, e.g., a subject that would benefit from inhibition of target gene expression, in a therapeutically effective amount of a RNAi agent targeting a target gene or a pharmaceutical composition comprising a RNAi agent targeting a target gene.

[1090] Target genes (described above), target gene-associated disorders, and subjects that would benefit from a reduction or inhibition of target gene expression, e.g., those having a target gene-associated disease, subjects at risk of developing a target gene-associate disease, are described below.

[1091] An RNAi agent of the disclosure may be administered as a “free RNAi agent.” A free RNAi agent is administered in the absence of a pharmaceutical composition. The naked RNAi agent may be in a suitable buffer solution. The buffer solution may comprise acetate, citrate, prolamine, carbonate, or phosphate, or any combination thereof. In one embodiment, the buffer solution is phosphate buffered saline (PBS). The pH and osmolarity of the buffer solution containing the RNAi agent can be adjusted such that it is suitable for administering to a subject. In certain embodiments, the free RNAi agent may be formulated in water or normal saline.

[1092] Alternatively, an RNAi agent of the disclosure may be administered as a pharmaceutical composition, such as a dsRNA liposomal formulation.

[1093] In one aspect, the present invention provides a method of treating a subject having a skeletal muscle disorder, a cardiac muscle disorder, or an adipose tissue disorder, comprising administering to the subject a therapeutically effective amount of a dsRNA agent of the invention, thereby treating the subject.

[1094] Exemplary cardiac muscle disorders include obstructive hypertrophic cardiomyopathy (HOCM); familial hypertrophic cardiomyopathy (FHC); Heart failure with preserved ejection fraction (HFPEF); atrial fibrillation (AFIB); ventricular fibrillation (VFIB); angina; myocardial infarction (MI); heart failure or heart failure with reduced ejection fraction (HFREF); supraventricular tachycardia (SVT); and hypertrophic cardiomyopathy (HCM).

[1095] Exemplary skeletal muscle disorders include Myostatin-related muscle hypertrophy, congenital myasthenic syndrome, and facioscapulohumeral muscular dystrophy (FSHD).

[1096] Exemplary adipose tissue disorders include a metabolic disorder, e.g. metabolic syndrome, a disorder of carbohydrates, e.g., type II diabetes, pre-diabetes, a lipid metabolism disorder, e.g., a hyperlipidemia, hypertension, a cardiovascular disease, a disorders of body weight.

[1097] The dsRNA agent of the invention can be delivered to a subject by a variety of routes, depending on the type of genes targeted and the type of disorders to be treated. In some embodiments, the dsRNA agent is administered extra-hepatically, such as intravenous, intramuscular, or subcutaneous administration.

[1098] The disclosure further provides methods for the use of a RNAi agent or a pharmaceutical composition thereof, e.g., for treating a subject that would benefit from reduction or inhibition of target gene expression, e.g., a subject having a target-gene-associated disorder, in combination with other pharmaceuticals or other therapeutic methods, e.g., with known pharmaceuticals or known therapeutic methods, such as, for example, those which are currently employed for treating these disorders.

[1099] Examples of the additional therapeutic agents which can be used with an RNAi agent of the invention include, but are not limited to, diabetes mellitus-treating agents, diabetic complication-treating agents, cardiovascular diseases-treating agents, anti-hyperlipemic agents, hypotensive or antihypertensive agents, anti-obesity agents, nonalcoholic steatohepatitis (NASH)-treating agents, chemotherapeutic agents, immunotherapeutic agents, immunosuppressive agents, nonsteroidal anti-inflammatory drugs (NSAIDs), colchicine, corticosteroids, and the like. Such combination therapies may advantageously utilize lower dosages of the administered therapeutic agents, thus avoiding possible toxicities or complications associated with the various monotherapies.

[1100] Examples of agents for treating diabetes mellitus include insulin formulations (e.g., animal insulin formulations extracted from a pancreas of a cattle or a swine; a human insulin formulation synthesized by a gene engineering technology using microorganisms or methods), insulin sensitivity enhancing agents, pharmaceutically acceptable salts, hydrates, or solvates thereof (e.g., pioglitazone, troglitazone, rosiglitazone, netoglitazone, balaglitazone, rivoglitazone, tesaglitazar, farglitazar, CLX-0921, R-483, NIP-221, NIP-223, DRF-2189, GW-7282TAK-559, T-131, RG-12525, LY-510929, LY-519818, BMS-298585, DRF-2725, GW-1536, GI-262570, KRP-297, TZD18 (Merck), DRF-2655, and the like), alpha-glycosidase inhibitors (e.g., voglibose, acarbose, miglitol, emiglitate and the like), biguanides (e.g., phenformin, metformin, buformin and the like) or sulfonylureas (e.g., tolbutamide, glibenclamide, gliclazide, chlorpropamide, tolazamide, acetohexamide, glyclopyramide, glimepiride and the like) as well as other insulin secretion-promoting agents (e.g., repaglinide, senaglinide, nateglinide, mitiglinide, GLP-1 and the like), amyrin agonist (e.g., pramlintide and the like), phosphotyrosin phosphatase inhibitor (e.g., vanadic acid and the like) and the like.

[1101] Examples of agents for treating diabetic complications include, but are not limited to, aldose reductase inhibitors (e.g., tolrestat, epalrestat, zenarestat, zopolrestat, minalrestat, fidareatat, SK-860, CT-112 and the like), neurotrophic factors (e.g., NGF, NT-3, BDNF and the like), PKC inhibitors (e.g., LY-333531 and the like), advanced glycation end-product (AGE) inhibitors (e.g., ALT946, pimagedine, pyradoxamine, phenacylthiazolium bromide (ALT766) and the like), active oxygen quenching agents (e.g., thioctic acid or derivative thereof, a bioflavonoid including flavones, isoflavones, flavonones, procyanidins, anthocyanidins, pycnogenol, lutein, lycopene, vitamins E, coenzymes Q, and the like), cerebrovascular dilating agents (e.g., tiapride, mexiletene and the like).

[1102] Anti-hyperlipemic agents include, for example, statin-based compounds which are cholesterol synthesis inhibitors (e.g., pravastatin, simvastatin, lovastatin, atorvastatin, fluvastatin, rosuvastatin and the like), squalene synthetase inhibitors or fibrate compounds having a triglyceride-lowering effect (e.g., fenofibrate, gemfibrozil, bezafibrate, clofibrate, sinfibrate, clinofibrate and the like), niacin, PCSK9 inhibitors, triglyceride lowing agents or cholesterol sequesting agents.

[1103] Hypotensive agents include, for example, angiotensin converting enzyme inhibitors (e.g., captopril, enalapril, delapril, benazepril, cilazapril, enalapril, enalaprilat, fosinopril, lisinopril, moexipril, perindopril, quinapril, ramipril, trandolapril and the like) or angiotensin II antagonists (e.g., losartan, candesartan cilexetil, olmesartan medoxomil, eprosartan, valsartan, telmisartan, irbesartan, tasosartan, pomisartan, ripisartan forasartan, and the like) or calcium channel blockers (e.g., amlodipine) or aspirin.

[1104] Nonalcoholic steatohepatitis (NASH)-treating agents include, for example, ursodiol, pioglitazone, orlistat, betaine, rosiglitazone.

[1105] Anti-obesity agents include, for example, central antiobesity agents (e.g., dexfenfluramine, fenfluramine, phentermine, sibutramine, amfepramone, dexamphetamine, mazindol, phenylpropanolamine, clobenzorex and the like), gastrointestinal lipase inhibitors (e.g., orlistat and the like), beta 3-adrenoceptor agonists (e.g., CL-316243, SR-58611-A, UL-TG-307, SB-226552, AJ-9677, BMS-196085 and the like), peptide-based appetite-suppressing agents (e.g., leptin, CNTF and the like), cholecystokinin agonists (e.g., lintitript, FPL-15849 and the like) and the like.

[1106] In addition, agents whose cachexia improving effect has been established in an animal model or at a clinical stage, such as cyclooxygenase inhibitors (e.g., indomethacin and the like), progesterone derivatives (e.g., megestrol acetate), glucosteroid (e.g., dexamethasone and the like), metoclopramide-based agents, tetrahydrocannabinol-based agents, lipid metabolism improving agents (e.g., eicosapentanoic acid and the like), growth hormones, IGF-1, antibodies against TNF-α, LIF, IL-6 and oncostatin M may also be employed concomitantly with an RNAi agent according to the present invention. Additional therapeutic agents for use in the treatment of diseases or conditions related to metabolic disorders and/or impaired neurological signaling would be apparent to the skilled artisan and are within the scope of this disclosure.

[1107] The RNAi agent and additional therapeutic agents may be administered at the same time or in the same combination, or the additional therapeutic agent can be administered as part of a separate composition or at separate times or by another method known in the art or described herein.

[1108] In one embodiment, the method includes administering a composition featured herein such that expression of the target gene is decreased, for at least one month. In some embodiments, expression is decreased for at least 2 months, 3 months, or 6 months.

[1109] In certain embodiments, administration includes a loading dose administered at a higher frequency, e.g., once per day, twice per week, once per week, for an initial dosing period, e.g., 2-4 doses.

[1110] In some embodiments, the RNAi agents useful for the methods and compositions featured herein specifically target RNAs (primary or processed) of the target gene. Compositions and methods for inhibiting the expression of these genes using RNAi agents can be prepared and performed as described herein.

[1111] Administration of the dsRNA according to the methods of the disclosure may result in a reduction of the severity, signs, symptoms, or markers of such diseases or disorders in a patient with a target gene-associated disorder. By “reduction” in this context is meant a statistically significant or clinically significant decrease in such level. The reduction can be, for example, at least 5%, 10%, 15%, 20%, 25%, 30%, 35%, 40%, 45%, 50%, 55%, 60%, 65%, 70%, 75%, 80%, 85%, 90%, 95%, or about 100%.

[1112] Efficacy of treatment or prevention of disease can be assessed, for example by measuring disease progression, disease remission, symptom severity, reduction in pain, quality of life, dose of a medication required to sustain a treatment effect, level of a disease marker or any other measurable parameter appropriate for a given disease being treated or targeted for prevention. It is well within the ability of one skilled in the art to monitor efficacy of treatment or prevention by measuring any one of such parameters, or any combination of parameters. It is well within the ability of one skilled in the art to monitor efficacy of treatment or prevention by measuring any one of such parameters, or any combination of parameters. In connection with the administration of a RNAi agent targeting a target gene of interest or pharmaceutical composition thereof, “effective against” a target gene-associated disorder indicates that administration in a clinically appropriate manner results in a beneficial effect for at least a statistically significant fraction of patients, such as an improvement of symptoms, a cure, a reduction in disease, extension of life, improvement in quality of life, or other effect generally recognized as positive by medical doctors familiar with treating target gene-associated disorders and the related causes.

[1113] A treatment or preventive effect is evident when there is a statistically significant improvement in one or more parameters of disease status, or by a failure to worsen or to develop symptoms where they would otherwise be anticipated. As an example, a favorable change of at least 10% in a measurable parameter of disease, and at least 20%, 30%, 40%, 50%, or more can be indicative of effective treatment. Efficacy for a given RNAi agent drug or formulation of that drug can also be judged using an experimental animal model for the given disease as known in the art. When using an experimental animal model, efficacy of treatment is evidenced when a statistically significant reduction in a marker or symptom is observed.

[1114] Alternatively, the efficacy can be measured by a reduction in the severity of disease as determined by one skilled in the art of diagnosis based on a clinically accepted disease severity grading scale. Any positive change resulting in e.g., lessening of severity of disease measured using the appropriate scale, represents adequate treatment using a RNAi agent or RNAi agent formulation as described herein.

[1115] Subjects can be administered a therapeutic amount of dsRNA, such as about 0.01 mg/kg to about 200 mg/kg.

[1116] The RNAi agent can be administered over a period of time, on a regular basis. In certain embodiments, after an initial treatment regimen, the treatments can be administered on a less frequent basis. Administration of the RNAi agent can reduce target gene levels, e.g., in a cell, tissue, blood sample or other compartment of the patient by at least 20%, 30%, 40%, 50%, 55%, 60%, 65%, 70,% 75%, 80%, 85%, 90%, 95%, 96%, 97%, 98%, or at least about 99% or more. In one embodiment, administration of the RNAi agent can reduce target gene levels, e.g., in a cell, tissue, blood sample, or other compartment of the patient by at least 50%.

[1117] Before administration of a full dose of the RNAi agent, patients can be administered a smaller dose, such as a 5% infusion reaction, and monitored for adverse effects, such as an allergic reaction. In another example, the patient can be monitored for unwanted immunostimulatory effects, such as increased cytokine (e.g., TNF-alpha or INF-alpha) levels.

[1118] Alternatively, the RNAi agent can be administered by oral administration, pulmonary admistration, intravenously, i.e., by intravenous injection, or subcutaneously, i.e., by subcutaneous injection. One or more injections may be used to deliver the desired, e.g., monthly dose of RNAi agent to a subject. The injections may be repeated over a period of time. The administration may be repeated on a regular basis. In certain embodiments, after an initial treatment regimen, the treatments can be administered on a less frequent basis. A repeat-dose regimen may include administration of a therapeutic amount of RNAi agent on a regular basis, such as monthly or extending to once a quarter, twice per year, once per year. In certain embodiments, the RNAi agent is administered about once per month to about once per quarter (i.e., about once every three months).

### XI. Target Genes and Target-Gene-Associated Diseases

### Target Genes

[1119] Without limitations, genes targeted by the siRNAs of the invention include, but are not limited to genes which mediate a skeletal muscle disorder, a cardiac muscle disorder, or an adipose tissue disorder.

[1120] Specific exemplary target genes that mediate a cardiac muscle disorder include, but are not limited to, adrenoceptor beta 1 (ADRB1); calcium voltage-gated channel subunit alpha1 C (CACNA1C); calcium voltage-gated channel subunit alpha1 G (CACNA1G) (T type calcium channel); angiotensin II receptor type 1 (AGTR1); Sodium Voltage-Gated Channel Alpha Subunit 2 (SCN2A); Hyperpolarization Activated Cyclic Nucleotide Gated Potassium Channel 1 (HCN1); Hyperpolarization Activated Cyclic Nucleotide Gated Potassium Channel 4 (HCN4); Hyperpolarization Activated Cyclic Nucleotide Gated Potassium Channel 3 (HCN3); Potassium Voltage-Gated Channel Subfamily A Member 5 (KCNA5); Potassium Inwardly Rectifying Channel Subfamily J Member 3 (KCNJ3); Potassium Inwardly Rectifying Channel Subfamily J Member 4 (KCNJ4); phospholamban (PLN); calcium/calmodulin dependent protein kinase II delta (CAMK2D); or Phosphodiesterase 1 (PDE1).

[1121] Specific exemplary target genes that mediate a skeletal muscle disorder include, but are not limited to, myostatin (MSTN); Cholinergic Receptor Nicotinic Alpha 1 Subunit (CHRNA1); Cholinergic Receptor Nicotinic Beta 1 Subunit (CHRNB1); Cholinergic Receptor Nicotinic Delta Subunit (CHRND); Cholinergic Receptor Nicotinic Epsilon Subunit (CHRNE); Cholinergic Receptor Nicotinic Gamma Subunit (CHRNG); Collagen Type XIII Alpha 1 Chain (COL13A1); Docking Protein 7 (DOK7); LDL Receptor Related Protein 4 (LRP4); Muscle Associated Receptor Tyrosine Kinase (MUSK); Receptor Associated Protein Of The Synapse (RAPSN); Sodium Voltage-Gated Channel Alpha Subunit 4 (SCN4A); and Double Homeobox 4 (DUX4).

[1122] Specific exemplary target genes that mediate an adipose tissue disorder include, but are not limited to, Delta 4-Desaturase, Sphingolipid 1 (DEGS1); leptin; folliculin (FLCN); Zinc Finger Protein 423 (ZFP423); Cyclin Dependent Kinase 6 (CDK6); Regulatory Associated Protein Of MTOR Complex 1 (RPTOR); Mechanistic Target Of Rapamycin Kinase, (mTOR); Forkhead Box P1 (FOXP1); Phosphodiesterase 3B (PDE3B); and Activin A Receptor Type 1C (ACVR1C).

### Targeting Cardiac Tissue

[1123] In some embodiments, the present invention provides a double-stranded iRNA agent that targets ADRB1 for the treatment of obstructive hypertrophic cardiomyopathy (HOCM); familial hypertrophic cardiomyopathy (FHC); heart failure with preserved ejection fraction (HF-pEF); atrial fibrillation (AFIB); ventricular fibrillation (VFIB); angina; myocardial infarction (MI); and/or heart failure or heart failure with reduced ejection fraction (HFREF).

[1124] In some embodiments, the present invention provides a double-stranded iRNA agent that targets CACNA1C for the treatment of supraventricular tachycardia (SVT); AFIB; Angina; and/or HOCM.

[1125] In some embodiments, the present invention provides a double-stranded iRNA agent that targets CACNA1G for the treatment of supraventricular tachycardia (SVT); and/or angina.

[1126] In some embodiments, the present invention provides a double-stranded iRNA agent that targets AGTR1 for the treatment of HOCM; hypertrophic cardiomyopathy (HCM); and/or HF-pEF.

[1127] In some embodiments, the present invention provides a double-stranded iRNA agent that targets SCN2A for the prevention and/or treatment of AFIB.

[1128] In some embodiments, the present invention provides a double-stranded iRNA agent that targets HCN1 for the prevention and/or treatment of AFIB; treatment, e.g., rate control, in HOCM.

[1129] In some embodiments, the present invention provides a double-stranded iRNA agent that targets HCN4 for the prevention and/or treatment of AFIB; treatment, e.g., rate control, in HOCM.

[1130] In some embodiments, the present invention provides a double-stranded iRNA agent that targets HCN3 for the prevention and/or treatment of AFIB; treatment, e.g., rate control, in HOCM.

[1131] In some embodiments, the present invention provides a double-stranded iRNA agent that targets KCNA5 for the prevention and/or treatment of AFIB, e.g., AFIB in congestive heart failure (CHF).

[1132] In some embodiments, the present invention provides a double-stranded iRNA agent that targets KCNJ3 for the prevention and/or treatment of AFIB.

[1133] In some embodiments, the present invention provides a double-stranded iRNA agent that targets KCNJ4 for the prevention and/or treatment of AFIB.

[1134] In some embodiments, the present invention provides a double-stranded iRNA agent that targets CAMK2D for the prevention and/or treatment of heart failure and/or AFIB.

[1135] In some embodiments, the present invention provides a double-stranded iRNA agent that targets PLN for the prevention and/or treatment of HF-rEF, arrhythmia, and/or cardiomyopathy. In some embodiments, the present invention provides a double-stranded iRNA agent that targets PDE1 for the prevention and/or treatment of CHF and/or HF-pEF.

### Targeting ADRB1 for the Prevention and or Treatment of HOCM, FHC, HFPEF, AFIB, VFIB, Angina, MI, and or HFREF

[1136] The beta-adrenergic receptors (ADRBs) are part of a family of membrane proteins known as G-protein coupled receptors where, upon binding of a catecholamine to the receptor, stimulates a conformational change in the ADRB that causes coupling with G-proteins. G-proteins consist of α, β, and γ subunits and ADRB coupling leads to the dissociation of the G-protein into active Ga and GD subunits to mediate downstream signaling.

[1137] Beta-adrenergic receptors (ADRBs) play an important role in the extrinsic control of cardiac contractility and function, and are important drug targets for cardiovascular conditions such as hypertension and congestive heart failure. Inhaled beta-receptor (e.g. “beta-blockers”) remain among the mostly commonly prescribed medications in adults to treat cardiovascular disease.

[1138] There are three subtypes ofADRBs (ADRB1, ADRB2 and ADRB3). ADRB1s are the predominant subtype expressed in the heart. Multiple ADRB1 have been described and found to be associated with various cardiovascular phenotypes, such as hypertension, heart failure, higher heart rates, or response to beta-blocker therapy. Genetic variants of the ADRB1 have also been shown to modulate the cardiac responses to catecholamine binding. In addition, ADRB1 signaling has also been shown to play an important role in heart failure (HF), where beta-blocking medications are widely used therapeutic agents. Deleterious effects of ADRB1 signaling include apoptosis, myocyte growth, fibroblast hyperplasia, myopathy, fetal gene induction and proarrhythmia (Mann D L, et al. Circulation. 1992; 85(2):790-804). As an adaptive mechanism in HF, cardiac ADRB1s become less responsive, either downregulating or uncoupling from the G protein pathway (Bristow M R, et al. N Engl J Med. 1982; 307(4):205-211). With respect to atrial fibrillation, ADRB1 variant carriers have been reported to have an increased risk of atrial fibrillation, and higher heart rates during atrial fibrillation. ADRB1 polymorphisms are also associated with ventricular fibrillation (VF) in the context of myocardial infarction (MI).

### Targeting CACNA1C for the Prevention and or Treatment of SVT, AFIB, Angina, and or HOCM

[1139] Supraventricular tachycardia (SVT) is a heterogeneous category of cardiac arrhythmias characterized by a fast or tachycardiac rhythm that originates above the atrioventricular (AV) node. The prevalence of SVT is 2.25/1000 persons with a female predominance of 2:1 across all age groups (Lee K W, et al., Curr Probl Cardiol 2008; 33:467-546). The most common SVTs include atrioventricular nodal re-entrant tachycardia, atrioventricular re-entrant tachycardia and atrial tachycardia. SVT increases patient morbidity, particularly when symptoms are frequent or incessant, and in a small cohort of patients with atrial fibrillation (AF) and ventricular pre-excitation, it can be life-threatening.

[1140] Atrial fibrillation (AF) is the most common type of cardiac arrhythmia. The prevalence of AF increases as the population ages (Dang D, et al. J Natl Med Assoc 2002; 94:1036-48). In AF, the upper chambers of the heart do not function correctly as a result of abnormal electrical signalling (Falk R H. N Engl J Med 2001; 344:1067-78). It can be characterized by rapid and irregular atrial depolarizations with a discrete lack of P waves on electrocardiograms. As a result, the blood in the atria remains static and can promote blood clot formation and increase the risk of stroke (Copley D J, et al. AACN Adv Crit Care 2016; 27:120-8). This can cause detrimental symptoms, impair functional status and reduce the quality of life.

[1141] Angina represents the most common symptom of ischaemic heart disease, which is a major cause of death and disability worldwide. Nearly 10 million US adults experience stable angina, which occurs when myocardial oxygen supply does not meet demand, resulting in myocardial ischemia. Stable angina is associated with an average annual risk of 3% to 4% for myocardial infarction or death.

[1142] Hypertrophic cardiomyopathy is another common heart disorder, usually genetic in origin, that may affect up to 600,000 people in the United States. The disorder, which is characterized by left ventricular hypertrophy, is usually not progressive, but a small subset of patients develop serious complications, such as progressive heart failure, atrial fibrillation, and sudden cardiac death.

[1143] Anti-arrhythmic drug therapies, such as calcium channel blockers, are commonly used to treat heart disorders, such as SVT, AFIB, angina and HOCM, by regulating heart function through shaping the action potential and maintaining the rhythm of cardiac contraction.

[1144] In particular, calcium channels, such as CACNA1C, play an important role in regulating heart function. CACNA1C encodes for the α-subunit of the CaV1.2 L-type calcium channel (LTCC), which is critical for the plateau phase of the cardiac action potential, cellular excitability, excitation-contraction coupling, and regulation of gene expression. The currently available calcium channel blockers (e.g., dihydropyridines, phenylalkylamines, and benzothiazepines) all act by binding to different sites on CACNA1C and blocking the calcium current.

[1145] The CACNA1C calcium channels open and close at specific times to control the flow of calcium ions into cardiomyocytes at each heartbeat. How long the channels are open and closed is regulated to maintain normal heart function. Perturbations of CACNA1C change the structure of calcium channels throughout the body and have been associated with several different cardiac arrhythmia disorders. The altered channels stay open much longer than usual, which allows calcium ions to continue flowing into cells abnormally. The resulting overload of calcium ions within cardiac muscle cells changes the way the heart beats and can cause abnormal heart muscle contraction and arrhythmia.

[1146] Increased susceptibility for arrhythmia was observed in patients with gain of function CACNA1C variants under certain conditions (PLoS One. 2014; 9(9): e106982; Splawski I, et al. Cell. 2004 Oct. 1; 119(1):19-31). Specifically, gain of function mutations of CACNA1C revealed a marked reduction in voltage-dependent inactivation. The consequent increase in calcium influx prolongs the cardiac action potential, and thus the QT interval, and can generate early afterdepolarizations capable of triggering cardiac arrhythmias, such as supraventricular tachycardia and atrial fibrillation. Other CACNA1C variants were also shown to be associated with hypertrophic cardiomyopathy, congenital heart defects, and sudden cardiac death.

### Targeting CACNA1G for the Prevention and or Treatment of SVT and or Angina

[1147] Supraventricular tachycardia (SVT) is a heterogeneous category of cardiac arrhythmias characterized by a fast or tachycardiac rhythm that originates above the atrioventricular (AV) node. The prevalence of SVT is 2.25/1000 persons with a female predominance of 2:1 across all age groups (Lee K W, et al., Curr Probl Cardiol 2008; 33:467-546). The most common SVTs include atrioventricular nodal re-entrant tachycardia, atrioventricular re-entrant tachycardia and atrial tachycardia. SVT increases patient morbidity, particularly when symptoms are frequent or incessant, and in a small cohort of patients with atrial fibrillation (AF) and ventricular pre-excitation, it can be life-threatening.

[1148] Angina represents the most common symptom of ischaemic heart disease, which is a major cause of death and disability worldwide. Nearly 10 million US adults experience stable angina, which occurs when myocardial oxygen supply does not meet demand, resulting in myocardial ischemia. Stable angina is associated with an average annual risk of 3% to 4% for myocardial infarction or death.

[1149] Anti-arrhythmic drug therapies, such as calcium channel blockers, are commonly used to treat heart diseases such as SVT and angina by regulating adult heart function through shaping the action potential and maintaining the rhythm of cardiac contraction.

[1150] CACNA1G encodes for the subunit of the CaV3,1 T-type calcium channel, which plays a role in the human sinoatrial node and the conduction system. These channels contribute to the heartbeat by influencing pacemaking and the atrioventricular node. Inactivation of CACNA1G significantly slowed the intrinsic in vivo heart rate, prolonged the sinoatrial node recovery time, and slowed pacemaker activity of individual sinoatrial node cells through a reduction of the slope of the diastolic depolarization (Mangoni, et al., Circulation Research 2006, 1422-1430). Thus, selective blockers of CaV3.1 channels hold promise for therapeutic management of the cardiac diseases that require moderate heart rate reduction, such as SVT. The T-type calcium channels also constitute a promising pharmacological target for the treatment of human diseases, such as epilepsy and chronic pain (Birch P J, et al. Drug Discov Today. 2004; 9:410-418).

### Targeting AGTR1 for the Prevention and or Treatment of HOCM, HCM, and or HFpEF

[1151] Hypertrophic cardiomyopathy (HCM) is the most common inheritable cardiac disorder with a phenotypic prevalence of 1:500. It is defined by the presence of left ventricular hypertrophy (LVH) in the absence of loading conditions (hypertension, valve disease) sufficient to cause the observed abnormality.

[1152] The obstructive HCM (hypertrophic obstructive cardiomyopathy or HOCM) is subtype of HCM. In HOCM, the wall (septum) between the bottom chambers of the heart thickens. The walls of the pumping chamber can also become stiff. The thickened septum may cause a narrowing that can block or reduce the blood flow from the left ventricle to the aorta, which is a condition called “outflow tract obstruction.”

[1153] Increased blood pressure causes a concentric pattern of LVH, which may progress to ventricular dilation and heart failure with preserved ejection fraction (HFpEF). Heart failure with preserved ejection fraction (HFpEF) is a clinical syndrome in which patients have symptoms and signs of heart failure as the result of high ventricular filling pressure despite normal or near normal left ventricular ejection fraction (LVEF≥50 percent). At a cellular level, cardiac myocytes in patients with HFpEF are thicker and shorter than normal myocytes, and collagen content is increased. At the organ level, affected individuals may have concentric remodeling with or without hypertrophy. Increases in myocyte stiffness are mediated in part by relative hypophosphorylation of the sarcomeric molecule titin, due to cyclic guanosine monophosphate (cGMP) deficiency thought to arise primarily as a consequence of increased nitroso-oxidative stress induced by comorbid conditions such as obesity, metabolic syndrome and aging. Cellular and tissue characteristics may become more pronounced as the disease progresses.

[1154] Genetic variants in the renin-angiotensin-aldosterone system (RAAS) are considered candidates for these modifying effects. The RAAS system contributes to LVH through effects mediated by circulating angiotensin as well as local activation of RAAS in the myocardium. Angiotensin (Ang) I, produced from angiotensinogen (AGT), is converted to Ang II predominantly by angiotensin-converting enzyme (ACE) and possibly by chymase 1 (CMA1). Ang II binds primarily to the Ang II type 1 receptor (AGTR1) to promote cell growth and hypertrophy. It also stimulates aldosterone by aldosterone synthase (CYP11B2) synthesis, thereby increasing the release of aldosterone, which promotes fluid retention and cardiac fibrosis.

[1155] Previous studies suggested a role for specific genetic variants in genes encoding components of the RAAS pathway in modulation of the severity of LVH in patients with HCM (Orenes-Piñero E, et al. JRenin Angiotensin Aldosterone Syst 2011; 12: 521-530; Ortlepp J R, et al., Heart 2002; 87: 270-275). In particular, a specific A>C polymorphism of the AGTR1 gene was considered as the pro-LVH allele. Carriers that harbor the pro-LVH allele had greater left ventricular muscle mass and interventricular septum thickness compared to those without the pro-LVH allele (Kolder et al. Eur J Hum Genet. 2012 October; 20(10): 1071-1077). Additional studies further demonstrated that left ventricular mass is associated with the AGTR1 polymorphism, and cardiac hypertrophy was improved by down-regulating AGTR1 (Y. Yang, et al. Exp. Ther. Med., 12 (3) (2016), pp. 1556-1562).

### Targeting SCN2A for the Prevention and or Treatment of AFIB.

[1156] Atrial fibrillation (AF) is the most common type of cardiac arrhythmia. The prevalence of AF increases as the population ages (Dang D, et al. J Natl Med Assoc 2002; 94:1036-48). In AF, the upper chambers of the heart do not function correctly as a result of abnormal electrical signalling (Falk R H. N Engl J Med 2001; 344:1067-78). It can be characterized by rapid and irregular atrial depolarisations with a discrete lack of P waves on electrocardiograms. As a result, the blood in the atria remains static and can promote blood clot formation and increase the risk of stroke (Copley D J, et al. AACN Adv Crit Care 2016; 27:120-8). This can cause detrimental symptoms, impair functional status and reduce the quality of life.

[1157] Atrial fibrillation can cause syncope or a temporary loss of consciousness caused by a fall in blood pressure. There is also a possibility of atrial fibrillation developing secondary to an epileptic seizure in cases of atrial fibrillation and transient loss of consciousness. Epileptic seizures are often associated with changes in cardiac autonomic function.

[1158] Sodium voltage-gated channel alpha subunit 2 (SCN2A) is one of the genes most commonly associated with early-onset epilepsy, and has recently been linked to autism spectrum disorder and developmental delay. SCN2A encodes the Nav1.2 subunit of voltage-gated sodium channel in neurons, which is important for action potential initiation and conduction. SCN2A gain-of-function mutations have been identified, and the phenotypes range from benign neonatal or infantile seizures to severe epileptic encephalopathy. SCN2A gene deletion acts as protective genetic modifier of sudden unexpected death in epilepsy (SUDEP) and suggest measures of brain-heart association as potential indices of SUDEP susceptibility (V Mishra et al., Hum Mol Genet. 2017 Jun. 1; 26(11):2091-2103). In addition to epilepsy and developmental delays, other manifestations of SCN2A deletion can include movement disorders such as dystonia, abnormal gait, ADHD, autism, dysautonomia (i.e. problems with heart rate, blood pressure, and temperature regulation), and GI problems such as feeding difficulties or reflux.

### Targeting HCN1 for the Prevention and or Treatment of AFIB; Treatment, e.g., Rate Control, in HOCM.

[1159] Atrial fibrillation (AF) is the most common type of cardiac arrhythmia. The prevalence of AF increases as the population ages (Dang D, et al. J Natl Med Assoc 2002; 94:1036-48). In AF, the upper chambers of the heart do not function correctly as a result of abnormal electrical signalling (Falk R H. N Engl J Med 2001; 344:1067-78). It can be characterized by rapid and irregular atrial depolarisations with a discrete lack of P waves on electrocardiograms. As a result, the blood in the atria remains static and can promote blood clot formation and increase the risk of stroke (Copley D J, et al. AACN Adv Crit Care 2016; 27:120-8). This can cause detrimental symptoms, impair functional status and reduce the quality of life.

[1160] Hypertrophic cardiomyopathy is another common heart disorder, usually genetic in origin, that may affect up to 600,000 people in the United States. The disorder, which is characterized by left ventricular hypertrophy, is usually not progressive, but a small subset of patients develop serious complications, such as progressive heart failure, atrial fibrillation, and sudden cardiac death.

[1161] Hyperpolarization-activated cyclic nucleotide-gated (HCN) channels are voltage-gated channels encoded by the HCN1-4 gene family. These channels are primarily expressed in the heart and in the central and peripheral nervous systems. HCN channels conduct K+ and Na+ ions at a ratio of 3:1 to 5:1. They are activated by hyperpolarization of membrane voltage to −50 mV or below, and conduct the hyperpolarization-activated current, termed I_{f} in heart. In the sino-atrial node (SAN), I_{f} plays an essential role in setting the heart rate and mediating its autonomic control.

[1162] HCN1 is highly expressed in the SAN and, in addition, non-pacemaking atrial and ventricular cardiomyocytes also express HCN channels, with an increase in I_{f} activity in ventricular myocytes reported in hypertrophy, ischemic cardiomyopathy and heart failure due to re-expression of HCN genes. Studies have shown that I_{f} current density and occurrence is significantly greater in hypertrophic cardiomyocytes and end-stage failing hearts and this is directly related to the arrhythmias

[1163] Genetic variants in HCN channels are linked to sinus node dysfunction, atrial fibrillation, ventricular tachycardia, atrio-ventricular block, Brugada syndrome, sudden infant death syndrome, and sudden unexpected death in epilepsy. HCN1 deficient mice display congenital sinus node dysfunction with severely reduced cardiac output.

[1164] Several HCN channel blockers including ZD7288, zatebradine, cilobradine and ivabradine are available. The first clinically approved substance from this new class of drugs is ivabradine.

### Targeting HCN4 for the Prevention and or Treatment of AFIB; Treatment, e.g., Rate Control, in HOCM.

[1165] Atrial fibrillation (AF) is the most common type of cardiac arrhythmia. The prevalence of AF increases as the population ages (Dang D, et al. JNatl Med Assoc 2002; 94:1036-48). In AF, the upper chambers of the heart do not function correctly as a result of abnormal electrical signalling (Falk R H. N Engl J Med 2001; 344:1067-78). It can be characterized by rapid and irregular atrial depolarisations with a discrete lack of P waves on electrocardiograms. As a result, the blood in the atria remains static and can promote blood clot formation and increase the risk of stroke (Copley D J, et al. AACN Adv Crit Care 2016; 27:120-8). This can cause detrimental symptoms, impair functional status and reduce the quality of life.

[1166] Hypertrophic cardiomyopathy is another common heart disorder, usually genetic in origin, that may affect up to 600,000 people in the United States. The disorder, which is characterized by left ventricular hypertrophy, is usually not progressive, but a small subset of patients develop serious complications, such as progressive heart failure, atrial fibrillation, and sudden cardiac death.

[1167] Hyperpolarization-activated cyclic nucleotide-gated (HCN) channels are voltage-gated channels encoded by the HCN1-4 gene family. These channels are primarily expressed in the heart and in the central and peripheral nervous systems. HCN channels conduct K+ and Na+ ions at a ratio of 3:1 to 5:1. They are activated by hyperpolarization of membrane voltage to −50 mV or below, and conduct the hyperpolarization-activated current, termed I_{f} in heart. In the sino-atrial node (SAN), I_{f}plays an essential role in setting the heart rate and mediating its autonomic control.

[1168] HCN4 constitutes the predominant isoform in the sino-atrial node (SAN) at both transcript and protein level.

[1169] Gain of function variants in HCN4 have been shown to cause rhythm abnormalities, including symptomatic or asymptomatic bradycardia ventricular premature beats, tachycardia-bradycardia syndrome and atrial fibrillation (AF), complete atrioventricular (AV) block, long QT syndrome (LQTS) and torsades de pointes.

[1170] Drugs that specifically block HCN channels, e.g., ivabradine, slow the diastolic depolarisation of pacemaker cells, hence cardiac rate, with limited adverse cardiovascular side effects. Selective and quantitatively controlled slowing of heart rate provides an important therapeutic advantage in a variety of cardiac conditions.

### Targeting HCN3 for the Prevention and or Treatment of AFIB; Treatment, e.g., Rate Control, in HOCM.

[1171] Atrial fibrillation (AF) is the most common type of cardiac arrhythmia. The prevalence of AF increases as the population ages (Dang D, et al. J Natl Med Assoc 2002; 94:1036-48). In AF, the upper chambers of the heart do not function correctly as a result of abnormal electrical signalling (Falk R H. N Engl J Med 2001; 344:1067-78). It can be characterized by rapid and irregular atrial depolarisations with a discrete lack of P waves on electrocardiograms. As a result, the blood in the atria remains static and can promote blood clot formation and increase the risk of stroke (Copley D J, et al. AACN Adv Crit Care 2016; 27:120-8). This can cause detrimental symptoms, impair functional status and reduce the quality of life.

[1172] Hypertrophic cardiomyopathy is another common heart disorder, usually genetic in origin, that may affect up to 600,000 people in the United States. The disorder, which is characterized by left ventricular hypertrophy, is usually not progressive, but a small subset of patients develop serious complications, such as progressive heart failure, atrial fibrillation, and sudden cardiac death.

[1173] Hyperpolarization-activated cyclic nucleotide-gated (HCN) channels are voltage-gated channels encoded by the HCN1-4 gene family. These channels are primarily expressed in the heart and in the central and peripheral nervous systems. HCN channels conduct K+ and Na+ ions at a ratio of 3:1 to 5:1. They are activated by hyperpolarization of membrane voltage to −50 mV or below, and conduct the hyperpolarization-activated current, termed I_{f} in heart. In the sino-atrial node (SAN), I_{f} plays an essential role in setting the heart rate and mediating its autonomic control.

[1174] Although the cardiac expression of HCN3 channels is low, a ventricular phenotype caused by global deletion of HCN3 has been described. Epicardial myocytes of HCN3 knockouts displayed a reduction of I_{f} density by about 30% and a shortening of action potential duration caused by changes during the late repolarization phase. ECG recordings displayed a slight prolongation of the QT interval combined with increased T-wave amplitudes. These alterations were present only at low heart rates.

[1175] Thus, HCN3 contributes to the resting membrane potential and acts as a functional antagonist of hyperpolarizing K currents in late repolarization. Lack of this activity leads to a shortening of action potential duration.

### Targeting KCNA5 for the Prevention and or Treatment of AFIB, e.g., AFIB in Congestive Heart Failure (CHF).

[1176] Atrial fibrillation (AF) is the most common cardiac rhythm disorder in clinical practice. During the lifetime of men and women aged≥40 years, there is about 25% risk for the development of AF. This arrhythmia may result in irregular ventricular response, tachycardia-mediated cardiomyopathy, heart failure and thromboembolism. AF accounts for nearly one-third of strokes in individuals above 65 years of age, and is also an independent predictor of mortality. AF is often associated with structural heart diseases or systemic disorders, such as hypertension, coronary artery disease, heart failure, rheumatic heart disease, hyperthyroidism and cardiomyopathies. However, in nearly 10-20% of cases, the underlying etiology for AF cannot be identified by routine examination, and such AF is termed ‘idiopathic’.

[1177] Heart failure (HF), including CHF and HF-pEF, affects an estimated 30-50 million patients worldwide. Despite recent therapeutic advances, its prevalence is increasing, partly due to a fall in mortality, but also from higher rates of major co-morbidities such as obesity, diabetes, and age. A major factor underlying cardiac dysfunction in HF resides in second messenger signaling defects coupled to 3′,5′-cyclic adenosine and guanosine monophosphate (cAMP, cGMP). Cyclic AMP stimulates protein kinase A (PKA) and exchange protein activated by cAMP (EPAC), acutely enhancing excitation-contraction coupling and sarcomere function. Cyclic GMP acts as a brake on this signaling by activating protein kinase G (PKG). Both cyclic-nucleotides have relevant vascular and fibroblast activity, reducing vessel tone, altering permeability and proliferation, and suppressing fibrosis. They are synthesized by adenylyl or guanylyl cyclases and degraded (hydrolyzed) by phosphodiesterases (PDEs), to provide tissue and cell specific intracellular nano-regulation.

[1178] K+ channels are members of a large family of transmembrane proteins that allow K+ to cross biological membranes selectively. Like Ca2+ and Na+ channels, voltage-gated K+ channels undergo conformational changes to open and close a gate in response to membrane depolarization. The K+ channel family is formed by a complex and diverse group of proteins that is known to exist in all three domains of organisms, eubacteria, archaebacteria, and eukaryotes. K+ channels have a wide range of functions that includes setting the resting membrane potential, modulating electrical excitability, and regulating cell volume.

[1179] Cardiac potassium channels maintain the rhythmicity of the heartbeat by repolarizing cardiomyocytes such that the electrical and contractile machineries stay in sync. They alternate between opened and closed conformations in response to the voltage difference across the membrane and form functional homotetrameric channels and heterotetrameric channels that contain variable proportions of KCNA1, KCNA2, KCNA4, KCNA5, and possibly other family members as well.

[1180] Dominant-negative mutations in KCNA5 have been demonstrated to fail to generate the ultrarapid delayed rectifier current vital for atrial repolarization and exerted an effect on wild-type current.

### KCNJ3 for the Prevention and or Treatment of AFIB.

[1181] As the population ages globally, atrial fibrillation (AF or AFIB) is predicted to affect 6-12 million people in the USA by 2050 and 17.9 million in Europe by 2060. Subjects with atrial fibrillation are 5 to 7 times more likely to have a stroke than the general population. Clots can also travel to other parts of the body (kidneys, heart, intestines), and cause other damage. Atrial fibrillation can also decrease the heart's pumping ability. The irregularity can make the heart work less efficiently. In addition, atrial fibrillation that occurs over a long period of time can significantly weaken the heart and lead to heart failure.

[1182] Sinus node cells, located in the right atrium, spontaneously produce an electric impulse (i.e., action potential) that propagates along the cardiac conduction system and causes contraction of the heart muscle. Thus, heart rate is precisely regulated within the proper range by both intrinsic and extrinsic mechanisms. The acetylcholine-activated potassium channel (I_{KACh} channel) expressed in the sinus node, atrium, and atrioventricular node contributes to heart rate slowing triggered by the parasympathetic nervous system. The IKACh channel is a heterotetramer of 2 inwardly rectifying potassium channel proteins, Kir3.1 and Kir3.4, encoded by the genes KCNJ3 and KCNJ5, respectively. As indicated above, KCNJ5 mutation has been associated with atrial fibrillation (AF). However, the molecular basis of IKACh channel pathology remains poorly understood and, to date, rare mutations showing a large effect have not been reported for cardiac diseases.

[1183] Autosomal dominant mutations in KCNJ3 have been associated with symptomatic sinus bradycardia, and chronic AF with slow ventricular response. Because I_{KACh} channels are expressed more abundantly in the atrium than in the ventricle, the blockage of IKACh is a target for atrial-selective AF therapy with a lower risk of ventricular arrhythmia.

### Targeting KCNJ4 for the Prevention and or Treatment of AFIB

[1184] As the population ages globally, atrial fibrillation (AF or AFIB) is predicted to affect 6-12 million people in the USA by 2050 and 17.9 million in Europe by 2060. Subjects with atrial fibrillation are 5 to 7 times more likely to have a stroke than the general population. Clots can also travel to other parts of the body (kidneys, heart, intestines), and cause other damage. Atrial fibrillation can also decrease the heart's pumping ability. The irregularity can make the heart work less efficiently. In addition, atrial fibrillation that occurs over a long period of time can significantly weaken the heart and lead to heart failure.

[1185] Potassium channels, such as KCNJ4, play an important role in regulating adult heart function through shaping the action potential and maintaining the rhythm of cardiac contraction.

[1186] KCNJ4 has been identified as a target for antiarrhythmic drugs, as it is expressed at ˜10-fold greater levels in the atria relative to the ventricles of animal model and expression of KCNJ4 Has been shown to be upregulated in left atrial appendage tissues from subjects having AFIB. In addition, gain-of-function mutations of KCNJ4 have been associated with familial forms of AF, and KCNJ4 upregulation contributes to the stabilization/perpetuation of AFIB.

### Targeting PLN for the Prevention and or Treatment of HF-rEF, Arrhythmia, and or Cardiomyopathy

[1187] Heart failure, such as heart failure with reduced ejection fraction (HF-rEF), is a major cause of death and disability. The hallmarks of heart failure are impaired cardiac contraction and relaxation accompanied by abnormalities in calcium handling and β-adrenergic signaling (Lou, Q, et al. Adv Exp Med Biol. 2012; 740:1145-1174). In cardiomyocytes, cytosolic calcium regulates cardiac contraction and relaxation by an excitation-contraction coupling mechanism. The Ca2+ influx via L-type calcium channels elicits Ca2+-induced Ca2+ release from sarco(endo)plasmic reticulum (SR) through ryanodine receptors, and increased cytosolic Ca2+ leads to cardiac contraction. The sequestration of Ca2+ from the cytosol into the SR, which determines active relaxation, is caused by a calcium pump on the SR called SR Ca2+ ATPase (SERCA2a), the activity of which is regulated by a small phosphoprotein, phospholamban (PLN) (Kranias, E G, et al., Circ Res. 2012; 110(12):1646-1660).

[1188] In physiological conditions, β-adrenergic receptor (PAR) stimulation enhances myocyte contraction by activating cyclic adenosine monophosphate-dependent kinase (protein kinase A [PKA]), which phosphorylates multiple Ca2+ cycling proteins, including PLN. Phospholamban inhibits SERCA2a activity through protein-protein interaction. Phosphorylation of PLN by PKA alters its interaction with SERCA2a to activate Ca2+ reuptake to the SR, resulting in enhanced SR Ca2+ loading and Ca2+ cycling. In the failing myocyte, dysfunctional PAR signaling leads to less PKA activation and activation of alternate pathways, such as calcium/calmodulin-dependent kinase II signaling to cause pathological hypertrophy. Consequently, the usefulness of positive inotropic agents in HF is strongly limited, and direct activation of Ca2+ cycling, which can circumvent dysfunctional PAR activity, is required. Thus, inhibition of PLN is one of the most promising strategies in this context. Several reports have demonstrated that PLN inhibition alleviates cardiac failure in various animal models of cardiac pathologies, including myocardial infarction in rats, genetic cardiomyopathy in hamsters, and dilated cardiomyopathy in mice (Iwanaga, Y, et al., J Clin Invest. 2004; 113(5):727-736; Hoshijima, M, et al., NatMed. 2002; 8(8):864-871; Minamisawa, S. et al., Cell. 1999; 99(3):313-322). In addition, modulation of PLN improves contractility in human cardiomyocytes from patients with advanced HF (del Monte, F, et al. Circulation. 2002; 105(8):904-907), suggesting that targeting PLN is a bona fide therapy for failing hearts.

[1189] In particular, the ablation of PLN in mice prevents SERCA2a inhibition and enhances cardiac contractility by increasing the SR Ca2+ store. The ablation of PLN also reverses heart failure in some cardiomyopathic animal models, indicating the possibility of therapeutic approaches. The overexpression of PLN in mouse heart depresses cardiac function and proves that only ˜40% of SERCA pumps are normally regulated by PLN in mouse heart. The superinhibition of SERCA by specific PLN mutants impairs cardiac function and leads to cardiac remodelling and early death if the effects of the mutation cannot be reversed by β-agonists. In human and animal models of heart failure, the PLN-SERCA inhibited complex increases. Interventions that diminish the PLN-SERCA complex have been beneficial in some mouse models of heart failure (MacLennan and Kranias. 2003. Nat Rev Mol Cell Biol 4:566-77).

[1190] Dilated cardiomyopathy (DCM) is the second most common cause of heart failure with reduced ejection fraction (HFrEF) after coronary artery disease. It has been estimated that up to 40% of DCM cases have a genetic cause. The p.(Arg14del) pathogenic variant of the PLN gene (PLN-R14del) is a Dutch founder mutation with a high prevalence in DCM and arrhythmogenic cardiomyopathy (ACM) patients. Cardiomyopathy caused by the p.(Arg14del) pathogenic variant of the PLN gene is characterized by intracardiomyocyte PLN aggregation and can lead to severe DCM. Depletion of PLN attenuated heart failure in several cardiomyopathy models. Specifically, PLN knockdown was shown to reduce protein aggregation, normalize autophagy markers, improve cardiomyopathy and survival (Eijgenraam et al. 2022. IntJMol Sci 23:2427. 4). PLN knockdown also reversed the heart failure phenotype in a genetic dilated cardiomyopathy mouse model, and prevented progression of left ventricular dilatation and improveed left ventricular contractility in rats with myocardial infarction (Grote Beverborg et al. 2021. Nat Comm 12:5180). PLN abalation was also shown to reduce susceptibility to ventricular arrhythmias in mouse model of catecholaminergic polymorphic ventricular tachycardia (Mazzocchi et al. 2016 J Physiol 594: 3005-3030).

[1191] Thus, inhibition of PLN is an effective strategy in treating and/or preventing genetic cardiomyopathy, arrhythmia, as well as heart failure, in particular HF with reduced ejection fraction (HF-rEF).

### Targeting CAMK2D for the Prevention and or Treatment of Heart Failure and or AFIB

[1192] CAMK2D has been shown to associate with the development of cardiac disease, such as heart failure, and arrhythmias (Maier and Bers, 2002, J. Mol. Cell. Cardiol. 34, 919-939; Swaminathan et al., 2012, Circ. Res. 110, 1661-1677). Animal models have shown proof-of-concept studies that transgenic overexpression of CAMK2D is sufficient to induce structural and electrical remodeling in the heart, leading to compromised contractility and increased risk for sudden cardiac death (Zhang et al., 2002, J. Biol. Chem. 277, 1261-1267; Wagner et al., 2011, Circ. Res. 108, 555-565). Likewise, genetic and chemical inhibition of CAMK2D has been shown to confer protection from the development of dilated cardiomyopathy and sustained contractile performance, following both pressure overload and ischemic stress (Backs et al., 2009, J Clin. Invest. 116, 1853-1864; Ling et al., 2009, J Clin. Invest. 119, 1230-1240). Human heart failure has also been associated with an increased expression/activity of CAMK2D (Hoch et al., 1999, Circ. Res. 84, 713-721). The central role for CAMK2D in development of disease stems from its regulation of proteins involved in critical cell functions such Ca2+ cycling. CAMK2D has been implicated in pathologic phosphorylation of a number of Ca2+ handling proteins including phospholamban, leading to activation of the sarcoplasmic reticulum (SR) ATP-driven Ca2+ pump SERCA2a (Mattiazzi and Kranias, 2014, Front. Pharmacol. 5, 5); the ryanodine receptor SR Ca2+ release channel (RyR2) (Witcher et al., 1991, J. Biol. Chem. 266, 11144-11152), promoting increased channel open probability and SR Ca2+ leak; and the L-type Ca2+ channel Cav1.2 and associated β-subunits, potentiating current amplitude and slowing inactivation (Hudmon et al., 2005, J. Cell Biol. 171, 537-547). Collectively, these events not only promote activation of hypertrophic remodeling cascades but also heighten the risk for inappropriate membrane potential depolarizations (afterdepolarizations) that serve as arrhythmia triggers (Wu et al., 2002, Circulation 106, 1288-1293).

[1193] In addition to association with heart failure, CAMK2D has also been found to be a GWAS locus for atrial fibrillation (Roselli C et al. 2018. Nat Genet; 50:1225-1233; Ramirez J et al. 2020. Am JHum Genet 106:764-78). Pathological activation of CAMK2D promotes arrhythmia and heart failure (Veitch C R et al. 2021 Front Pharmacol 12: 695401; Nassal D et al. 2020. Front Pharmacol 11:35). In humans, CAMK2D levels and activity are increased in atrial fibrillation and heart failure. In animal models, sustained CAMK2D activation induces adverse structural and electrical remodeling of the heart via phosphorylation of target proteins. Pharmacological and genetic inhibition were shown to prevent these changes. Transagenic expression in the atria of a CAMK2D inhibitory peptide was shown to prevent adverse atrial structure and electrical remodeling (Liu Z et al. 2019. Heart Rhythm 16:1080-1088). In addition, CAMK2D knockout protects against pathological cardiac hypertrophy in a mouse model of heart failure (Backs J et al. PNAS 2009; 106:7:2342-2347).

[1194] Thus, suppressing CAMK2D expression is an effective strategy in treating and/or preventing heart failure and/or atrial fibrillation.

### Targeting PDE1 for the Prevention and or Treatment of CHF and or HF-pEF

[1195] Heart failure (HF), including CHF and HF-pEF, affects an estimated 30-50 million patients worldwide. Despite recent therapeutic advances, its prevalence is increasing, partly due to a fall in mortality, but also from higher rates of major co-morbidities such as obesity, diabetes, and age. A major factor underlying cardiac dysfunction in HF resides in second messenger signaling defects coupled to 3′,5′-cyclic adenosine and guanosine monophosphate (cAMP, cGMP). Cyclic AMP stimulates protein kinase A (PKA) and exchange protein activated by cAMP (EPAC), acutely enhancing excitation-contraction coupling and sarcomere function. Cyclic GMP acts as a brake on this signaling by activating protein kinase G (PKG). Both cyclic-nucleotides have relevant vascular and fibroblast activity, reducing vessel tone, altering permeability and proliferation, and suppressing fibrosis. They are synthesized by adenylyl or guanylyl cyclases and degraded (hydrolyzed) by phosphodiesterases (PDEs), to provide tissue and cell specific intracellular nano-regulation.

[1196] PDE1 is constitutively and robustly expressed in the heart. It is activated by a Ca2+/calmodulin-binding domain and provides a substantial percent of in vitro cAMP and cGMP hydrolytic activity in mammals, including humans.

[1197] It has been shown that inhibition of PDE1 prevents phenylephrine-induced myocyte hypertrophy in neonatal and adult rat ventricular myocytes reduces angiotensin II or TGF-induced activation of rat cardiac fibroblasts, and attenuates isoproterenol-induced interstitial fibrosis in mice. Cellular senescence in vascular smooth muscle myocytes leads to elevated PDE1 expression, and PDE1 inhibition restores vasodilatory responses to sodium nitroprusside in aging mice. PDE1 expression in vascular smooth muscle cells in vitro increases with the transition from the contractile to the synthetic phenotype, and PDE1 inhibition attenuates proliferation and migration of vascular smooth muscle cells in culture. PDE1 expression is increased in mouse vascular injury models in vivo and in neointimal smooth muscle cells of human coronary arteries, and injury-induced neointimal formation is reduced by PDE1 inhibition in coronary arteries of mice. Knockout of the PDE1C gene has antihypertrophic, antifibrotic, and antiapoptotic actions in mouse hearts. These observations suggest that PDE1 is a therapeutic target for cardiovascular disease. Indeed, recently a selective small molecule PDE1 inhibitor, ITI-214, was demonstrated to improve cardiac output by increasing heart contractility and decreasing vascular resistance in a Phase I/II study of heart failure patients.

### Targeting Skeletal Muscle Tissue

[1198] In some embodiment, the present invention provides a double-stranded iRNA agent that targets myostatin for the treatment of Myostatin-related muscle dystrophy.

[1199] In some embodiments, the present invention provides a double-stranded iRNA agent that targets CHRNA1 for the treatment of congenital myasthenic syndrome (CMS).

[1200] In some embodiments, the present invention provides a double-stranded iRNA agent that targets CHRNB1 for the treatment of congenital myasthenic syndrome (CMS).

[1201] In some embodiments, the present invention provides a double-stranded iRNA agent that targets CHRBD for the treatment of congenital myasthenic syndrome (CMS).

[1202] In some embodiments, the present invention provides a double-stranded iRNA agent that targets CHRNE for the treatment of congenital myasthenic syndrome (CMS).

[1203] In some embodiments, the present invention provides a double-stranded iRNA agent that targets CHRNG for the treatment of congenital myasthenic syndrome (CMS).

[1204] In some embodiments, the present invention provides a double-stranded iRNA agent that targets COL13A1 for the treatment of congenital myasthenic syndrome (CMS).

[1205] In some embodiments, the present invention provides a double-stranded iRNA agent that targets LRP4 for the treatment of congenital myasthenic syndrome (CMS).

[1206] In some embodiments, the present invention provides a double-stranded iRNA agent that targets MUSK for the treatment of congenital myasthenic syndrome (CMS).

[1207] In some embodiments, the present invention provides a double-stranded iRNA agent that targets RAPSN for the treatment of congenital myasthenic syndrome.

[1208] In some embodiments, the present invention provides a double-stranded iRNA agent that targets SCN4A for the treatment of congenital myasthenic syndrome (CMS).

[1209] In some embodiments, the present invention provides a double-stranded iRNA agent that targets DOK7 for the treatment of congenital myasthenic syndrome (CMS).

[1210] In some embodiments, the present invention provides a double-stranded iRNA agent that targets DUX4 for the treatment of Facioscapulohumeral muscular dystrophy (FSHD).

### Targeting Myostatin for the Prevention and or Treatment of Myostatin-Related Muscle Dystrophy

[1211] Myostatin, also known as growth differentiation factor 8 (GDF8), is a negative regulator of muscle mass and a member of the TGF-0 superfamily of proteins. Myostatin is initially synthesized by myocytes as a pre-promyostatin molecule composed of an N-terminal signal sequence (for secretion), an N-prodomain region (essential for proper folding of myostatin and subsequently proteolytically processed), and the biologically active C-terminal domain. The precursor pre-promyostatin must undergo proteolytic cleavage to form the biologically active myostatin molecule, which exists as a disulfide-linked dimer of two C-terminal domains. The cleaved propeptide domain also plays a regulatory role through non-covalent binding to the active myostatin C-terminal domain to form an inactive latent myostatin complex. Myostatin is also capable of effecting a non-canonical signaling cascade involving the cellular energy-sensing enzyme AMP-activated kinase (AMPK) and a regulatory protein kinase transforming growth factor-β-activated kinase 1.

[1212] Genetic deletion of myostatin has been associated with increasing muscle mass in mice, cattle, dogs, horses, and other species, indicating its evolutionary conservation (McPherron A C, et al., Nature 1997; 387:8390). Discovery of a hypermuscular child who was homozygous for an splice site mutation, which resulted in a premature stop codon, suggested that inhibition of myostatin might confer therapeutic benefits for muscle wasting disease in humans (Schuelke M, et al. New Engl J Med 2004; 350:26822688).

[1213] Various myostatin inhibitors have been developed and evaluated as potential treatments for different types of muscular dystrophy. These inhibitors have been shown to ameliorate the phenotype of muscular dystrophy, e.g., by improving muscle mass and strength.

### Targeting CHRNA1, CHRNB1, CHRND, CHRNE and CHRNG for the Prevention and or Treatment of CMS

[1214] Congenital myasthenic syndromes (CMS) are a heterogeneous group of rare inherited neuromuscular disorders characterized by fatigable weakness of skeletal muscle owing to compromised function of the neuromuscular junction (NMJ). The phenotype is caused by failure of transmission across this synapse connecting the nerve with the muscle, whereby an incoming nerve stimulus does not consistently lead to muscle excitation and contraction. Neuromuscular transmission is mediated by the generation of an action potential causing the release of acetylcholine from the nerve terminal into the synaptic cleft, its binding to the acetylcholine receptor (AChR) with the opening of its ion channel and the enzymatic breakdown of acetylcholine by acetylcholinesterase (AChE). The AChR controls electrical signalling between nerve and muscle cells by opening and closing a gate, membrane-spanning pore to trigger muscle contraction. It has five subunits of four different types: two alpha and one each of beta, gamma (or epsilon), and delta subunits ((i.e., CHRNE, CHRNA1, CHRNB1, CHRND, and CHRNG). Mutations affecting subunits of the AChR pore cause CMS in humans.

[1215] Pathophysiological mechanisms acting on any part of this chain and resulting in a reduction in the amount of acetylcholine released, the impairment of the AChR, reduction in the number of receptors or defective breakdown of acetylcholine may lead to CMS. The majority of CMS types are caused by defects in the AChR itself, but they can also result from causative variants affecting presynaptic proteins or proteins associated with the synaptic basal lamina or variants causing defects in endplate development and maintenance or defects in protein glycosylation. Defective neuromuscular transmission presents clinically as fatigable weakness due to increasing impairment of transmission across the NMJ with repeated activation.

[1216] Generalized and fatigable skeletal muscle weakness is the most common clinical sign of CMS, but locus and allelic heterogeneity determine variable severity and additional symptoms. CMS can result from recessive missense, non-sense, or splice site and promoter region mutations in any of the AChR subunits, but most occur in the gamma (or epsilon) subunit.

[1217] Diagnosis of CMS is established with clinical and electrodiagnostic features and identification of a causative mutation. In some instances, a clinical diagnosis can be made without finding a causative gene (e.g., individuals who exhibit fatigable weakness, especially of ocular and other cranial muscles, at birth or early childhood). Clinical diagnosis may rely on history, clinical exams, blood tests, incremental or decremental responses or abnormal single-fiber EMG (SF-EMG) study results, lung function tests, polysomnography, the Tensilon test, and muscle biopsy. In rarer cases when symptoms manifest in adolescence or adulthood, symptom presentation may differ from that seen in infants and young children and can include proximal and axial muscle weakness associated with a decremental response requiring prolonged stimulation.

[1218] Mutations in about 32 genes that encode proteins involved in this signaling pathway are known to cause CMS. Eight proteins are associated with presynaptic CMS, four with synaptic CMS, fifteen with post-synaptic CMS, and five with glycosylation defects. Proteins affected in CMS have different functions, such as ion channels (AchR), structural proteins (COL13A1, RAPSN), signalling molecules (LRP4, MUSK, DOK7), catalytic enzymes, sensor proteins, or transport proteins. Various gene mutations in presynaptic, synaptic, and postsynaptic proteins have been demonstrated in patients, with more than 50% of the mutations involving aberrations in postsynaptic AChR subunits (i.e., CHRNE, CHRNA1, CHRNB1, CHRND, and CHRNG). Mutations in RAPSN, COLQ, and DOK7 comprise another 35% to 50% of cases.

[1219] The CHRNA1 gene encodes the alpha-subunit of the nicotinergic, post-synaptic AchR. CHRNA1 mRNA undergoes alternative splicing and two splice variants (P3A- and P3A+) are produced. Mutations in CHRNA1 result in imbalance between the two splice variants with an increase in P3A+. CHRNA1 mutations reduce the number of AchR at the post-synaptic membrane. The pattern of inheritance is autosomal dominant if CHRNA1 mutations cause a slow channel CMS (SCCMS), or autosomal recessive in case of primary AchR-deficiency. The first CHRNA1-related CMS were reported in 2008. Patients presented already prenatally with growth retardation, reduced movements, edema, contractures, and postnatally with dysmorphism, muscle wasting, scoliosis, contractures, and pterygia. Antisense oligonucleotides (AONs) have been shown to restore the balance between the two splice variants and are thus expected to be beneficial in patients carrying such mutations.

[1220] The CHRNB1 gene encodes for the beta-subunit of the nicotinergic, post-synaptic acetylcholine receptor (AChR). Non-synonymous mutations in the human CHRNB1 gene encoding the cholinergic receptor nicotinic beta 1 subunit are known to cause dominant and recessive forms of CMS. The first mutations in CHRNB1 causing CMS were reported in a Brazilian study in 2008. The first patient published was a 28 year old male manifesting since birth with ptosis, ophthalmoparesis, dysphagia, proximal limb muscle weakness, scapular winging, weakness of axial muscles, wasting, and scoliosis. He showed a decremental response to RNS, had double discharges, and a myopathic EMG. The course was progressive but he benefitted from fluoxetine (Mihaylova V, et al. J Neurol Neurosurg Psychiatry. 2010; 81:973-977). The second patient carrying a CHRNB1 mutation was a 3wo male manifesting with ptosis, facial weakness, severe hypotonia, and respiratory insufficiency requiring assisted ventilation (Shen X M, et al., Hum Mutat. 2016; 37:1051-1059). The response to LF-RNS was decremental. In a Spanish study of a CMS cohort, a third patient with a CHRNB1 mutation was identified but no clinical details were provided (atera-de Benito D, et al., Neuromuscul Disord 2017. pii: S0960-8966(17)30475-3).

[1221] The CHRND gene encodes the delta-subunit of the nicotinergic, post-synaptic AchR. The first mutation in CHRND causing CMS was reported in a German patient with early-onset CMS manifesting with feeding difficulties, moderate, generalised weakness, and recurrent episodes of respiratory insufficiency provoked by infections (Müller J S, et al., Brain. 2006; 129:2784-2793). The second patient was a 20 year old female with moderate to severe myasthenic manifestations since birth (Shen X M, et al., J Clin Invest. 2008 May; 118(5):1867-76). She had a marked decremental response to LF-RNS. One of her siblings with a similar presentation had died at age 11 m. Two further patients were reported in a study of CMS patients from Israel but no clinical details were provided (Aharoni S, et al., Neuromuscul Disord. 2017 February; 27(2):136-140).

[1222] The CHRNE gene encodes for the epsilon-subunit of the AchR. The first mutation in the CHRNE gene causing a CMS has been reported already in 2000 (Sieb J P, et al., Hum Genet. 2000; 107:160-164). Since then various different types of mutations have been reported and it is estimated that up to half of the patients with a CMS carry a CHRNE mutation, thus representing the gene most frequently mutated in CMS. In a study of 64 CMS patients from Spain, CHRNE mutations were detected in 27% of the patients (Natera-de Benito D, et al., Neuromuscul Disord 2017. pii: S0960-8966(17)30475-3). In a study of 45 patients from 35 Israeli CMS families, CHRNE mutations were found in 7 kinships (Aharoni S, et al., Neuromuscul Disord. 2017 February; 27(2):136-140). In a study of 23 families with CMS from Maghreb countries, the founder mutation c.1293insG was found in 60% of these patients (Richard P, et al., Neurology. 2008 Dec. 9; 71(24):1967-72). Type and severity of clinical manifestations of CHRNE mutations may vary considerably between affected families. Some patients may present with only ptosis whereas others may present with severe generalised myasthenia. Most patients present at birth with mildly progressive bulbar, respiratory, or generalized limb weakness with ptosis or ophthalmoplegia. Single patients may die prematurely in infancy from respiratory failure. Some patients may have myasthenic symptoms since birth and achieve ambulation late or not at all. Single patients present with a fluctuating course. Single patients develop severe scoliosis. RNS may be decremental or may be normal. Single-fiber EMG (SF-EMG) may reveal an increased jitter. Some patients may show repetitive CMAPs. Most patients respond favourably to AchE inhibitors.

[1223] The CHRNG gene encodes for the fetal gamma-subunit of the AchR. Mutations in the CHRNG gene cause CMS with multiple ptyerygia (lethal multiple pterygia syndrome (LMPS) or the Escobar variant of multiple pterygia syndrome (EVMPS)) (Hoffmann K, et al., Am JHum Genet. 2006; 79:303-312). In a study of seven families with Escobar syndrome (contractions, multiple pterygia, respiratory distress), mutations in the CHRNG gene were detected in 12 family members. The female to male ratio was 7:5. Some patients presented with decreased fetal movements, facial weakness, respiratory distress, arthrogryposis, short stature, kyphosis/scoliosis, dysmorphism, high-arched palate, cleft palate, arachnodactyly, or cryptorchism. None presented with myasthenic manifestations postnatally. CHRNG mutations may be also responsible for the allelic disease fetal akinesia deformation sequence (FADS). In a study of 46 CMS patients from Spain, five carried a mutation in the CHRNG gene (Natera-de Benito D, et al., Neuromuscul Disord 2017. pii: S0960-8966(17)30475-3). They all presented with arthrogryposis and delayed motor milestones, and some of them with poor sucking. Interestingly, none of them received drugs usually given for CMS. In a study of three Iranian CHRNG-related CMS patients, no drug treatment was applied. One of the patients presented with short neck, mild axillar pterygia, elbows and knees, joint contractures, clenched hands with thumbs held across palm and club feet (varus). The patient had rockerbottom feet, with almost no movement in ankles. Facial dysmorphism included hemangioma over forehead and nose, strabismus, flat nasal bridge, and downturned corners of mouth (Kariminejad A, et al., BMC Genet. 2016 May 31; 17(1):71).

[1224] Overall, CMS can result from missense, non-sense, or splice site and promoter region mutations in any of the AChR subunits, but most occur in the gamma (or epsilon) subunit. The high frequency of mutations in the epsilon subunit compared with other subunits has been attributed to phenotypic rescue by substitution of the fetal gamma subunit for the defective epsilon subunit (Ohno K, et al. Hum Mol Genet. 1997; 6:753-66). Individuals harboring null mutations in both alleles of CHRNA1, CHRNB1, or CHRND cannot survive because no substituting sub-units exist and hence these individuals probably die in utero (Engel A G, et al., Lancet Neurol. 2015; 14:420-34). Patients with heterozygous or homozygous low-expressor mutations in the non-epsilon subunit are severely affected have high mortality in infancy or early childhood. Thus, given the importance of AchR in CMS, manipulation of AchR subunits are expected to ameliorate the CMS phenotype in patients.

### Targeting COL13A1 for the Prevention and or Treatment of CMS

[1225] Mutations in gene encoding synaptic proteins can cause CMS. Collegan XIII is a non-fibrillar transmembrane collagen which has been long recognized for its critical role in synaptic maturation of the neuromuscular junction. The COL13A1 gene encodes the α-chain of collagen XIII with a single transmembrane domain. COL13A1 is localised to the NMJ, where it is responsible for clustering of the AchR during myotube differentiation. Unlike most of the collagens, COL13A1 is anchored to the plasma membrane by a hydrophobic transmembrane segment. The presence of a proprotease recognition site in the ectodomain allows the C-terminus to be proteolytically cleaved into a soluble form that is part of the basal lamina.

[1226] Mutations in this gene manifest clinically as CMS, which has been reported in three patients from two families (Logan C V, et al. Am JHum Genet. 2015; 97:878-85). Two of these patients manifested with congenital respiratory insufficiency, bulbar weakness, or facial weakness. All three patients presented with feeding difficulties, ptosis, limb weakness, and dysmorphism. Two patients each presented with spinal stiffness or distal joint laxity, and one patient with ophthalmoparesis and cognitive impairment. Two showed a decremental response to RNS and two an increased jitter. Two required non-invasive positive pressure ventilation.

[1227] COL13A1 loss-of-function mutations were also identified in six additional CMS patients from three unrelated families (Dusl M. et al., Journal ofNeurology, 2019; 255: 1107-1112). The phenotype of these cases was similar to the previously reported patients including respiratory distress and severe dysphagia at birth that often resolved or improved in the first days or weeks of life. All individuals had prominent eyelid ptosis with only minor ophthalmoparesis as well as generalized muscle weakness, predominantly affecting facial, bulbar, respiratory and axial muscles. Response to acetylcholinesterase inhibitor treatment was generally negative while salbutamol proved beneficial. These data further support the causality of COL13A1 variants for CMS and suggest that this type of CMS might be clinically homogenous and requires alternative pharmacological therapy.

### Targeting LRP4 for the Prevention and or Treatment of CMS

[1228] Some CMS are due to mutations in genes encoding post-synatic proteins. Post-synaptic CMSs represent the vast majority of the CMS subtypes. Post-synaptic CMS are subdivided into primary AchR deficiency, kinetic abnormalities of the AChR, and defects within the AChR-clustering pathway. Mutations in LRP4 cause defects within the AChR-clustering pathway.

[1229] The LRP4 gene encodes for lipoprotein receptor-related protein 4, which functions as a receptor for agrin. Agrin, which is released from motor nerve terminals, binds to LRP4 in muscle, stimulating the formation of a complex between LRP4 and muscle-specific kinase (MUSK), a receptor tyrosine kinase that acts as a master regulator of synaptic differentiation. LRP4, once clustered in the postsynaptic membrane as a consequence of MUSK activation, also signals directly back to motor axons to stimulate presynaptic differentiation. Activated MUSK together with DOK7 stimulates rapsyn to concentrate and anchor AchR at the post-synaptic membrane and interacts with other proteins implicated in the assembly and maintenance of the NMJ. LRP4 is thus essential for pre- and post-synaptic specialisation of the NMJ.

[1230] The first mutation in the LRP4 gene causing CMS was reported in 2014. A newborn female presented with respiratory arrest and feeding difficulties, and required feeding and ventilator support until 6 m of age. Motor milestones were delayed and she developed easy fatigability with temporary wheelchair-dependency. At ages 9 and 14y she presented with ptosis, ophthalmoparesis, and limb weakness. RNS evoked a decremental response, which improved upon application of edrophonium. AchE inhibitors worsened the clinical manifestations. A second kinship harbouring LRP4 mutations was reported in 2015. The two sisters, aged 34 and 20y, presented with delayed motor milestones, slight chewing and swallowing difficulties, and later developed limb weakness. Albuterol was highly effective.

### Targeting MUSK for the Prevention and or Treatment of CMS

[1231] Mutations in MUSCK cause defects within the AChR-clustering pathway. MUSK encodes for a protein that is involved in endplate maturation, maintenance of the endplate functions, proper functioning of rapsyn, and functioning of the AchR. MUSK forms a co-receptor for agrin with LRP4. Activation of MUSK by agrin and DOK7 results in the recruitment of several downstream kinases and phosphorylation of the AChR β-subunit, leading to the reorganization of the actin cytoskeleton and AChR clustering. The fundamental role of the MUSK-signaling pathway is supported by the fact that mice deficient in agrin, MUSK, rapsyn or Dok-7 lack postsynaptic differentiation and die at birth from respiratory failure.

[1232] CMS due to MUSK mutations manifests as respiratory insufficiency, neonatal ptosis, proximal limb muscle weakness, and weak bulbar, facial, or ocular muscles. A 30yo Chinese male with the LGMD-type of MUSK-related CMS developed mild atrophy of the leg muscles. LF-RNS was decremental. Pyridostigmin deteriorated the clinical manifestations. Another male infant manifested with congenital respiratory failure requiring mechanical ventilation, axial weakness with head drop, facial weakness, proximal limb weakness, and ophthalmoparesis. Salbutamol was effective but 3,4-DAP had only a mild effect, and AchE inhibitors worsened the phenotype. In a female with congenital hypotonia and respiratory distress requiring mechanical ventilation for 8 m, respiratory distress and nocturnal apnea with vocal cord paralysis recurred at age 8y. 3,4-DAP was effective. In two Turkish brothers MUSK mutations manifested as LGMD-type CMS. MUSK-related CMS may also manifest as congenital ptosis and later in life with fatigability. In another patient with MUSK-related CMS and congenital respiratory insufficiency, albuterol was moderately effective but AchE inhibitor, 3,4-DAP, and ephedrine were ineffective.

### Targeting RAPSN for the Prevention and or Treatment of CMS

[1233] Mutations in RAPSN cause defects within the AChR-clustering pathway. RAPSN encodes for rapsyn, a post-synaptic membrane protein that anchors the nicotinic AchR to the motor endplate and also binds to β-dystroglycan. Rapsyn is essential for clustering of the AchR at the post-synaptic membrane and required for the phosphorylation of CHRNB1. Mutant mice lacking rapsyn show absence of aggregation of AChRs and lack of accumulation of cytoskeletal proteins such as (3-dystroglycan, and utrophin.

[1234] RAPSN mutations are a common cause of post-synaptic CMS. Humans with mutations in the RAPSN gene are affected with a postsynaptic form of CMS characterized by impairment of the morphologic development of the postsynaptic region. The severity of symptoms in this form of CMS is variable. The most common of the RAPSN mutation is N88G, and patients are either homozygous or heterozygous for the N88K mutation (Ohno K, et al., (2002) Am JHum Genet 70(4):875-885).

[1235] Clinically, patients present with fluctuating ptosis, occasionally bulbar symptoms, neck muscle and mild proximal limb muscle weakness. Infections can precipitate exacerbation of clinical manifestations. In single patients prominent hyperlordosis can occur. Usually, the response to AchE inhibitor is favourable but can be improved by adding 3,4 DAP. Fluoxetine may worsen the decremental response in single patients. In some patients general anesthesia may exacerbate muscle weakness. The overall course is stable with intermittent worsenings.

### Targeting DOK7 for the Prevention and or Treatment of CMS

[1236] Mutations in DOK7 cause defects within the AChR-clustering pathway, and are responsible for about 10-20% of all cases of CMS. The DOK7 (downstream-of-kinase) gene encodes for the protein DOK7, which is involved in signaling downstream of receptor and non-receptor phosphotyrosine kinases. DOK7 is a cytoplasmic activator of muscle-specific receptor-tyrosine kinase (MuSK). Both DOK7 and MuSK are required for neuromuscular synaptogenesis. Mutations in DOK7 underlie a congenital myasthenic syndrome (CMS) associated with small and simplified neuromuscular synapses likely due to impaired DOK7/MuSK signaling. The overwhelming majority of patients with DOK7 CMS have at least one allele with a frameshift mutation that causes a truncation in the COOH-terminal region of DOK7 and affects MuSK activation.

[1237] Concerning the frequency of DOK7-related CMS, it was the second most frequent subtype in a Brasilian cohort. Clinical onset is characterised by gait disturbance due to muscle weakness after normal motor milestones. Proximal limb muscles are more strongly affected than distal limb muscles (LGMD-like pattern). Congenital DOK7-related CMS may manifest as stridor due to vocal cord paralysis, occasionally requiring intubation and artificial ventilation. Occasionally, patients present with ptosis but only rarely with ophthalmoparesis. Fatigability is often absent but prolonged periods of weakness may occur. Feeding difficulties may require nasogastral tube feeding or even PEG implantation. Muscle biopsy may show lipidosis and defective branching of terminal axons, which results in a unique terminal axon contacting en passant post-synaptic cups. AchE inhibitors are usually ineffective and may even worsen clinical manifestations. Ephedrine (initially 25 mg/d and increased to 75-100 mg/d) seems to be an effective alternative. Salbutamol may be effective in DOK7-related CMS as well. Single patients profit from albuterol, which can prevent progression of muscle weakness in LGMD-type DOK7-related CMS.

### Targeting SCN4A for the Prevention and or Treatment of CMS

[1238] Mutations in SCN4A cause defects within the AChR-clustering pathway. SCN4A encodes for a post-synaptic Nav1.4 voltage-gated sodium channel responsible for the initiation and propagation of the action potential in the muscle fibres that results in muscle contraction.

[1239] Several allelic disorders of skeletal muscle are caused by mutations of SCN4A. Missense mutations with gain-of-function changes (too much inward Na+ current) are found in hyperkalemic periodic paralysis (HyperPP), paramyotonia congenita, and several variants of sodium channel myotonia. Leaky channels resulting from mutations of arginine residues in the voltage sensor domain cause hypokalemic periodic paralysis (HypoPP) type 2. These traits are all dominantly inherited.

[1240] Loss-of-function (LOF) mutations of SCN4A are associated with recessively inherited phenotypes. A congenital myasthenic syndrome (CMS) has been associated with missense mutations of SCN4A that cause a LOF by markedly enhancing channel inactivation. More recently, congenital myopathy with neonatal hypotonia has been reported in patients with null mutations in SCN4A. A homozygous null is embryonic lethal, while compound heterozygous mutations (null allele plus an LOF allele) result in congenital myopathy with survival to adulthood. Remarkably, family members with a single SCN4A null allele are healthy.

[1241] Phenotypically, mutations in this gene manifest in infancy with global hypotonia, impaired sucking, dysphagia, delayed postural and motor development and later in life with episodic, fluctuating muscle weakness like in periodic paralysis, bilateral facial palsy, ptosis, and ophthalmoparesis. Episodes of periodic weakness could not be triggered by exercise, rest, potassium loading, or food, like in periodic paralysis. In older patients, SCN4A-related CMS may manifest exclusively as easy fatigability. In a 20yo normokalemic female, SCN4A-related CMS manifested as sudden attacks of respiratory and bulbar paralysis since birth, lasting 3-30 min and recurring one to three times per month, delayed motor development, easy fatigability, ptosis, ophthalmoparesis, and later as persisting facial, truncal, or limb weakness. Some patients present with dysmorphism, such as high-arched palate, adduction deformity of the knees or ankles, and increased lumbar lordosis. Some patients are mentally retarded with cerebral atrophy on MRI. RNS may be normal but higher stimulus frequency may trigger a decremental response. AchE inhibitors are only marginally effective. Acetazolamide together with potassium was ineffective.

### Targeting DUX4 for the Prevention and or Treatment of FSHD

[1242] Facioscapulohumeral muscular dystrophy (FSHD) is an autosomal dominant disorder primarily characterized by asymmetric, progressive muscle weakness beginning at the face, shoulders, and upper limbs, which spreads to the lower regions of the body with age. It is the third most common muscular dystrophy, with about 1:8,000-1:22,000 people affected worldwide. Age of onset is variable, ranging from birth to adulthood. Patients with the rare infantile form of FSHD, presenting symptoms before 5 y of age, follow a more severe and rapid course of the disease. At present, FSHD is incurable.

[1243] The majority of FSHD patients (˜95%, FSHD1) have a contraction of the D4Z4 repeat array in chromosome 4q35. Each D4Z4 repeat contains the first two exons of the double homeobox protein 4 (DUX4) gene, with its third (and final) exon located immediately downstream of the array. The D4Z4 array is normally hypermethylated in the course of development. Studies show that the contraction relaxes the chromatin and demethylates DNA in this region, resulting in aberrant DUX4 expression in skeletal muscle.

[1244] The aberrant expression of DUX4 in skeletal muscle is thought to cause FSHD. DUX4 encodes a transcription factor that activates pathways involved in muscle degeneration and apoptosis, events observed in patient muscles. DUX4 also inhibits myogenic differentiation and increases the sensitivity of muscle cells to oxidative stress. DUX4 is normally expressed during early embryonic development, and is then effectively silenced in all tissues except the testis and thymus. Its reactivation in skeletal muscle disrupts numerous signalling pathways that mostly converge on cell death. Thus, DUX4 serves as an attractive therapeutic target and inhibition of DUX4 expression represents be a potential therapy approach for FSHD.

### Targeting Adipose Tissue

[1245] In some embodiments, the present invention provides a double-stranded iRNA agent that targets DEGS1 for the treatment of a metabolic disorder.

[1246] In some embodiments, the present invention provides a double-stranded iRNA agent that targets leptin for the treatment of a metabolic disorder.

[1247] In some embodiments, the present invention provides a double-stranded iRNA agent that targets FLCN for the treatment of a metabolic disorder.

[1248] In some embodiments, the present invention provides a double-stranded iRNA agent that targets ZFP42 3 for the treatment of a metabolic disorder.

[1249] In some embodiments, the present invention provides a double-stranded iRNA agent that targets CDK6 the treatment of a metabolic disorder.

[1250] In some embodiments, the present invention provides a double-stranded iRNA agent that targets mTOR the treatment of a metabolic disorder.

[1251] In some embodiments, the present invention provides a double-stranded iRNA agent that targets RPTOR the treatment of a metabolic disorder.

[1252] In some embodiments, the present invention provides a double-stranded iRNA agent that targets FOXP1 the treatment of a metabolic disorder.

[1253] In some embodiments, the present invention provides a double-stranded iRNA agent that targets PDE3B the treatment of a metabolic disorder.

[1254] In some embodiments, the present invention provides a double-stranded iRNA agent that targets ACVR1C the treatment of a metabolic disorder.

### Targeting DEGS1 for the Prevention and or Treatment of a Metabolic Disorder

[1255] Obesity is a medical condition in which excess body fat has accumulated to the extent that it impairs health. The global epidemic of obesity is leading to unprecedented rates of diabetes and liver disease, and their late-stage complications, including cardiovascular and kidney disease.

[1256] The sphingolipid ceramide, which is a precursor to sphingomyelins and gangliosides that has both structural and signaling functions, is an important driver of the metabolic perturbations that underlie these diseases.

[1257] Dihydroceramide desaturase 1 (DEGS1), an enzyme that catalyzes the final step in the de novo synthesis of ceramide, is a particularly attractive therapeutic target. Indeed, studies in rodents reveal that inhibitors of ceramide synthesis prevent or reverse the pathogenic features of a metabolic disorder, including type 2 diabetes, nonalcoholic fatty liver disease, atherosclerosis, and cardiomyopathy. For example, Indeed, studies in rodents reveal that fenretinide, which directly targets and irreversibly inhibits DEGS1, prevented high fat diet-induced obesity and insulin resistance and hepatic steatosis without changes in energy expenditure or caloric intake (Preitner F, et al. Am J Physiol Endocrinol Metab. 2009; 279:E1420-E1429). Additionally, this DEGS1 inhibitor has been shown to sensitize obese post-menopausal women to insulin (Johansson H, et al. Cancer Res. 2008:68:9512-9518).

### Targeting Leptin for the Prevention and or Treatment of a Metabolic Disorder

[1258] Leptin, the product of the Lep gene, is a 167-residue peptide hormone. It is primarily secreted by adipose tissue. Functional inactivation of the Lep gene leads to undetectable levels of leptin in circulation.

[1259] Most common forms of obesity are associated with excessive circulating levels of leptin (coined “hyperleptinemia”), which results in a still ill-defined state of “leptin resistance”. The most accepted definition of leptin resistance is the inability of pharmacological doses of leptin to suppress food intake and body weight.

[1260] Hyperleptinemia is correlated with pro-inflammatory responses and with the chronic sub-inflammatory state observed in obesity. On one hand, leptin enhances the production of inflammatory cytokines, and on the other hand, cytokines such as IL-6 and TNF-α promote leptin production by the adipose tissue.

[1261] Increased leptin resistance associated with high levels of free fatty acid and inflammatory cytokines may contribute to the reduction in lipid oxidation in insulin-sensitive organs, leading to accumulation of lipids (lipotoxicity) and insulin resistance. In addition, leptin induces cholesterol uptake by macrophages, angiogenesis, platelet aggregation, stimulates the oxidative stress in endothelial cells and inhibits vasorelaxation, increasing the risk of atherosclerosis. Furthermore, in humans, leptin is an independent risk factor for coronary artery disease (Paz-Filho G, et al. Arq Bras Endocrinol Metab. 2012; 56/9:597-607).

### Targeting FLCN for the Prevention and or Treatment of a Metabolic Disorder

[1262] Non-alcoholic steatohepatitis (NASH) represents a major economic burden and is characterized by triglyceride accumulation, inflammation, and fibrosis. No pharmacological agents are currently approved to treat this condition.

[1263] Autophagy has been demonstrated to play a significant role in this condition, which serves to degrade intracellular lipid stores, reduce hepatocellular damage, and dampen inflammation. Autophagy is primarily regulated by the transcription factors TFEB and TFE3, which are negatively regulated by mTORC1. Given that FLCN is an mTORC1 activator via its GAP activity towards RagC/D, a liver specific Flcn knockout mouse model was generated to study its role in NASH progression. It was demonstrated that loss of FLCN results in reduced triglyceride accumulation, fibrosis, and inflammation in mice exposed to a NASH-inducing diet. (Paquette M, et al. BioRxiv. 2020).

[1264] It has also been demonstrated that FLCN regulates adipose tissue browning via mTOR and the transcription factor TFE3. Adipose-specific deletion of FLCN relieves mTOR-dependent cytoplasmic retention of TFE3, leading to direct induction of the PGC-1 transcriptional coactivators, drivers of mitochondrial biogenesis and the browning program.

### Targeting ZFP423 for the Prevention and or Treatment of a Metabolic Disorder

[1265] Obesity is a medical condition in which excess body fat has accumulated to the extent that it impairs health. The global epidemic of obesity is leading to unprecedented rates of diabetes and liver disease, and their late-stage complications, including cardiovascular and kidney disease.

[1266] Due to the global epidemic of obesity, there is an urgency to understand mechanisms regulating adipose development. Adipogenesis is initiated by the expression of ZFP423, which induces the expression of peroxisome proliferator-activated receptor γ (PPARGγ) and CCAAT-enhancer-binding proteins (C/EBPs), and genes specific for adipocytes.

[1267] Recently, ZFP423 was found to maintain white adipocyte identity by suppressing beige cell thermogenic gene progra). It has been shown in mice that adipocyte-specific inactivation of ZFP423 induced in adult mice leads to accumulation of beige-like adipocytes. The literature supports the notion that beige adipocytes can exert beneficial effects on glucose homeostasis and increase energy expenditure. Indeed, mice lacking adipocyte ZFP423 were resistant to diet-induced obesity. Furthermore, ZFP423 deficiency, combined with b3-adrenergic receptor activation, led to a reversal of weight gain and improved glucose tolerance when induced in obese animals (Shao M, et al. Cell Metabolism, 2016; 23:1167-1184).

### Targeting CDK6 for the Prevention and or Treatment of a Metabolic Disorder

[1268] Obesity has long been known to be the most important risk factor for the development of type II diabetes and other metabolic diseases. In rodents and humans, fat is deposited as energy storage in white adipose tissue (WAT), whereas fat is consumed to produce heat in the mitochondria-rich brown adipose tissues (BAT). As a thermogenic tissue, inducible-brown adipocytes (also called beige or brite cells) are found sporadically in WAT of adult animals with similar features as classical brown adipocytes. Importantly, the activation of beige cells is associated with a protection against obesity and metabolic diseases in rodent models and correlated with leanness in human

[1269] It has been shown that CDK6 regulates beige adipocyte formation and that mice lacking the CDK6 protein or its kinase domain (K43M) exhibit significant increases beige cell formation, enhanced energy expenditure, better glucose tolerance, and improved insulin sensitivity, and are more resistant to high-fat diet-induced obesity. Re-expression of CDK6 in Cdk6−/− mature or precursor cells, or ablation of RUNX1 in K43M mature or precursor cells, reverses these phenotypes (Hou X, et al. Nature Comm, 2018, 9: 1023). Additionally, overexpression of microRNA-107 (miR-107), which directly targets and downregulates CDK6, has been shown to reduce expression of CDK6 and its effectors and impairs adipocyte differentiation (Ahonen M A, et al. Molecular & Cellular Endocrin, 2019; 479:110-116). Thus, downregulation of CDK6 can potentially prevent and slow down progression of obesity.

### Targeting RPTOR for the Prevention and or Treatment of a Metabolic Disorder

[1270] Overnutrition causes hyperactivation of mTORC1-dependent negative feedback loops leading to the downregulation of insulin signaling and development of insulin resistance. Insulin signaling plays a crucial role in the control of systemic glucose homeostasis.

[1271] It has been shown that knockout of Rptor in different specific tissues of are protective against weight-gain and obesity. For example, a study in mice with Rptor conditionally deleted in osteoblast (Rptorob−/−) shows that, as compared to controls, chow-fed Rptorob−/− mice had substantially less fat mass and exhibited adipocyte hyperplasia. Remarkably, upon feeding with high-fat diet, mice with pre- and post-natal deletion of Rptor were protected from diet-induced obesity and exhibited improved glucose metabolism with lower fasting glucose and insulin levels, increased glucose tolerance and insulin sensitivity. This leanness and resistance to weight gain was not attributable to changes in food intake, physical activity or lipid absorption but instead was due to increased energy expenditure and greater whole-body substrate flexibility. RNA-seq revealed an increase in glycolysis and skeletal insulin signaling pathways, which correlated with the potentiation of insulin signaling and increased insulin-dependent glucose uptake in Rptor-knockout (Tangseefa P, et al. Bone Research, 2021; 9:10).

[1272] In another study, mice with an adipose-specific knockout of Rptor was generated, and these mice had substantially less adipose tissue, were protected against diet-induced obesity and hypercholesterolemia, and exhibited improved insulin sensitivity. Leanness was in spite of reduced physical activity and unaffected caloric intake, lipolysis, and absorption of lipids from the food (Polak P, et al. Cell Metabolism, 2008; 8(5):399-410). With similar profile, mice with Rptor knockout specifically in intestinal epithelial cells consistently gained less body weight on a high-fat diet compared to wildtype mice secondary to significantly reduced food intake. Importantly, the intestinal epithelial cell-specific Rptor knockout mice did not appear to be malnourished, demonstrated by their preservation of lean body mass, and also maintained a normal metabolic profile without significant changes in triglyceride or fasting glucose levels (Onufer E, et al. Biochem Biophys Res Comm, 2018; 505(4): 1174-1179).

Targeting mTOR for the Prevention and or Treatment of a Metabolic Disorder

[1273] The mTOR kinase is encoded by a single gene in mammals, but it exerts its main cellular functions by forming mTORC1 and mTORC2 through assembly with specific adaptor proteins. mTORC1 controls protein synthesis, cell growth and proliferation, and mTORC2 is a regulator of the actin cytoskeleton, and promotes cell survival and cell cycle progression. Cellular adenosine triphosphate (ATP) levels increase mTOR activity, and the mTOR kinase itself serves as a cellular ATP sensor. mTOR, thus, works as a critical checkpoint by which cells sense and decode changes in energy status

[1274] Overnutrition causes hyperactivation of mTORC1-dependent negative feedback loops leading to the downregulation of insulin signaling and development of insulin resistance. Insulin signaling plays a crucial role in the control of systemic glucose homeostasis.

[1275] In vitro experiments have demonstrated that mTORC1 is essential for the differentiation and maintenance of white adipocytes. Indeed, mTORC1 activation is necessary for insulin- or nutrient (amino acid)-induced adipogenesis and expression of SREBP1 and PPARγ, which are master transcriptional regulators of adipocyte differentiation and lipid homeostasis. Conversely, mTOR's inhibitor rapamycin impairs adipocyte differentiation by inhibiting PPARγ transactivation activity. In diet-induced obesity, overactivity of the mTORC1 signaling favors the expansion of the white adipose tissue mass, leading to adipocytes insulin resistance (Catania C, et al. IntJObes, 2011; 35:751-761).

### Targeting FOXP1 for the Prevention and or Treatment of a Metabolic Disorder

[1276] Obesity and its related complications such as type 2 diabetes mellitus, coronary heart disease and obstructive sleep apnea, have been considered significant health problems. Although dietary management, exercise, and pharmacological intervention have been proven to control weight, these approaches are largely inefficient for maintaining healthy long-term weight loss. Therefore, effective therapies for treating obesity and related metabolic disorders are needed.

[1277] Increasing brown adipose tissue (BAT) mass or/and activity in mice and humans has been demonstrated to help lose weight and improve whole-body metabolism.

[1278] In addition, adipose-specific deletion of FOXP1 led to an increase of brown adipose activity and browning program of white adipose tissues. The FOXP1-deficient mice showed an augmented energy expenditure and are protected from diet-induced obesity and insulin resistance. Consistently, overexpression of Foxp1 in adipocytes impaired adaptive thermogenesis and promotes diet-induced obesity.

[1279] In addition, deletion of the FOXP1 gene in osteoblasts led to augmentation of AdipoQ levels accompanied by fueled energy expenditure in adipose tissues. Adiponectin (AdipoQ) is a hormone abundantly secreted by adipose tissues, has multiple beneficial functions, including insulin sensitization as well as lipid and glucose metabolism. In contrast, overexpression of FOXP1 in bones impaired AdipoQ secretion and restrained energy consumption. Chromatin immunoprecipitation sequencing analysis revealed that AdipoQ expression, which increases as a function of bone age, is directly controlled by FOXP1 (Zhang W, et al. J Bone Miner Res, 2021).

### Targeting PDE3B for the Prevention and or Treatment of a Metabolic Disorder

[1280] The incidence of obesity in the developed world is increasing at an alarming rate. Concurrent with the increase in the incidence of obesity is an increase in the incidence of type 2 diabetes. Cyclic AMP (cAMP) and cGMP are key second messengers in all cells; for example, when it comes to processes of relevance for the regulation of energy metabolism, cAMP is a key mediator in the regulation of lipolysis, glycogenolysis, gluconeogenesis and pancreatic R cell insulin secretion.

[1281] PDE3B, one of several enzymes which hydrolyze cAMP and cGMP, is expressed in cells of importance for the regulation of energy homeostasis, including adipocytes, hepatocytes, hypothalamic cells and β cells. In adipocytes, PDE3B (phosphodiesterase 3B) is an important regulatory effector in signalling pathways controlled by insulin and cAMP-increasing hormones. Previous results from PDE3B-transgenic mice indicate that PDE3B, plays an important role in modulation of energy metabolism. In epididymal white adipose tissue of PDE3B KO mice on a SvJ129 background, cAMP/protein kinase A (PKA) and AMP-activated protein kinase (AMPK) signaling pathways are activated, resulting in “browning” phenotype, with a smaller increase in body weight under high-fat diet, smaller fat deposits, increased β-oxidation of fatty acids (FAO) and oxygen consumption (Chung Y W, et al. Scientific Report, 2017:7:40445).

[1282] In human, genome-wide analysis of array-based rare, non-synonymous variants in 184,246 individuals of UK Biobank and exome-sequence-based rare loss of function gene burden testing indicated that loss-of function of PDE3B is associated with a beneficial impact on waist-to-hip ration adjusted for BMI (WHRadjBMI).

### Targeting ACVR1C for the Prevention and or Treatment of a Metabolic Disorder

[1283] Body fat distribution strongly influences the development of type 2 diabetes. In a Mendelian randomization study of 296,291 individuals, it was previously found that a genetic predisposition to increased abdominal fat distribution was associated with elevated triglyceride levels, elevated blood pressure, and an increased risk of coronary artery disease, independent of overall adiposity. Furthermore, a genetic predisposition to increased abdominal fat distribution was strongly associated with the development of type 2 diabetes. For each 1 SD genetic increase in waist-to-hip ratio adjusted for BMI (WHRadjBMI) (a measure of body fat distribution), risk of type 2 diabetes increased by 77% (12). These findings were replicated in a separate Mendelian randomization study.

[1284] Recent studies of ALK7 indicate that ALK7's primary function in metabolic regulation is to limit catabolic activities and preserve energy. ALK7-knockout mice showed reduced diet-induced weight gain and fat accumulation when subjected to a high fat diet (Ibanez CA, FEBS J, 2021). In human, it has been demonstrated that variants predicted to lead to loss of function of the gene ACVR1C, which encodes the activin receptor-like kinase 7 (ALK7), influence body fat distribution and protect against type 2 diabetes (Emdin C A, et al. Diabetes, 2019:68(1):226-234). Genome-wide analysis of array-based rare, non-synonymous variants in 184,246 individuals of UK Biobank and exome-sequence-based rare loss of function gene burden testing indicated that loss-of function of ALK7 is associated with a beneficial impact on waist-to-hip ration adjusted for BMI (WHRadjBMI).

### XII. Kits

[1285] In certain aspects, the instant disclosure provides kits that include a suitable container containing a pharmaceutical formulation of a dsRNA agent of the invention. In certain embodiments, the individual components of the pharmaceutical formulation may be provided in one container. Alternatively, it may be desirable to provide the components of the pharmaceutical formulation separately in two or more containers, e.g., one container for a dsRNA agent and at least another for a pharmaceutically acceptable carrier, e.g., PBS. The kit may be packaged in a number of different configurations such as one or more containers in a single box. The different components can be combined, e.g., according to instructions provided with the kit. The components can be combined according to a method described herein, e.g., to prepare and administer a pharmaceutical composition. The kit can also include a delivery device.

[1286] Unless otherwise defined, all technical and scientific terms used herein have the same meaning as commonly understood by one of ordinary skill in the art to which this invention belongs. Although methods and materials similar or equivalent to those described herein can be used in the practice or testing of the RNAi agents and methods featured in the invention, suitable methods and materials are described below. All publications, patent applications, patents, and other references mentioned herein are incorporated by reference in their entirety. In case of conflict, the present specification, including definitions, will control. In addition, the materials, methods, and examples are illustrative only and not intended to be limiting.

[1287] An informal Sequence Listing is filed herewith and forms part of the specification as filed.

[1288] This invention is further illustrated by the following examples which should not be construed as limiting. The entire contents of all references, patents and published patent applications cited throughout this application, as well as the informal Sequence Listing and Figures, are hereby incorporated herein by reference.

### EXAMPLES

### Example 1: Synthesis of C₂₂-Nucleoside Phosphoramidites for the Synthesis of dsRNA Agent Conjugates

[chemical structure]

[1290] Compound 100: Adenosine (25 g, 93.6 mmol) and DMF (250 mL) were added into a 500 mL round-bottom flask, and then the suspension was warmed to 60° C. 1-Bromodocosane (54.7 g, 140 mmol) and KOH (10.5 g, 187 mmol) were added into the suspension and the reaction mixture was stirred at 60° C. overnight (16 h). The reaction was cooled to room temperature (a lot of insoluble matters were observed) and quenched by addition of NH₄Cl (10 g). The mixture, including the insoluble matter, was poured into a 2 μL separating funnel and diluted with CH₂C₁₂ and H₂O. (3 phases; organic phase, aqueous phase and emulsion phase, were observed.) The aqueous and emulsion phases were extracted with CH₂C₁₂ 3 times. TLC indicated that a major product spot was detected in the organic phase (5% MeOH in ethyl acetate, Rf=0.5). The collected organic phase was dried over anhydrous sodium sulfate and concentrated under vacuum. The crude compound was purified by column chromatography on silica gel (0-10% MeOH in CH₂Cl₂ for 60 min) to obtain a mixture of 2′-C₂₂ product (compound 100) and 3′-C₂₂ product (100a) as a white solid (28.2 g, 52%; 2′-C22/3′-C₂₂=ca. 9:1). ¹H NMR (600 MHz, DMSO-d₆) δ 8.38-8.33 (m, 1H), 8.13 (s, 1H), 7.35 (brs, 2H), 5.98 (d, J=6.3 Hz, 0.9H), 5.78 (d, J=6.2 Hz, 0.1H), 5.47-5.40 (m, 1H), 5.19-5.16 (m, 1H), 4.73 (q, J=5.8 Hz, 0.1H), 4.47 (dd, J=4.8, 6.4 Hz, 0.9H), 4.30-4.28 (m, 0.9H), 4.04-4.03 (m, 0.1H), 3.99-3.97 (m, 0.9H), 3.94-3.92 (m, 0.1H), 3.69-3.66 (m, 1H), 3.58-3.53 (m, 2H), 3.37-3.30 (m, 1H), 1.58-1.53 (m, 0.2H), 1.39-1.36 (m, 1.8H), 1.29-1.08 (m, 38H), 0.85 (t, J=6.6 Hz, 3H). LCMS (ESI) calculated for C₃₂H₅₈N₅O₄ [M+H]⁺ m/z=576.45, found 576.4.

[1291] Compound 101: To a suspension of compound 100 and 3′-C22 100a (mixture, 28 g, 48.6 mmol) in pyridine (40 mL) was added dropwise TMSCl (2.98 mL, 23.4 mmol) at 0° C. and the mixture was warmed to room temperature and stirred for 3 h. TLC indicated that compound 100 and 100a was consumed, and a new major spot was detected (50% ethyl acetate in hexane, Rf=0.7). The reaction mixture was cooled to 0° C. and benzoic anhydride (2.12 g, 9.38 mmol) was added. The resulting solution was wormed to room temperature and stirred overnight (14 h). TLC indicated that the protected intermediate with TMS was consumed, and a new major spot was detected (50% ethyl acetate in hexane, Rf=0.8). The reaction was cooled to 0° C. and quenched with H₂O. The resulting solution was warmed to room temperature and stirred for 5 h. The mixture was cooled to 0° C. and 28% ammonium hydroxide solution (40 mL) was added. The resulting mixture was warmed to room temperature and stirred for 5 h. TLC indicated that the fully protected intermediate with TMS and Bz groups was consumed, and a new major spot was detected (100% ethyl acetate, Rf=0.5). The reaction was diluted with ethyl acetate and the organic layer was washed with water, brine and dried (Na₂SO₄) and concentrated under vacuum. The crude residue was purified by column chromatography on silica gel (0-5% MeOH in CH₂Cl₂ for 30 min) to obtain a mixture of 2′-C₂₂ product (compound 101) and 3′-C₂₂ product (101a) as a white solid (24.9 g, 75%; 2′-C22/3′-C₂₂=ca. 9:1). ¹H NMR (600 MHz, DMSO-d₆) δ 11.22 (s, 1H), 8.75 (s, 1.8H), 8.73 (s, 0.2H), 8.06-8.04 (m, 2H), 7.66-7.63 (m, 1H), 7.57-7.54 (m, 2H), 6.14 (d, J=5.9 Hz, 0.9H), 6.04 (d, J=5.8 Hz, 0.1H), 5.53 (d, J=6.2 Hz, 0.1H), 5.23 (d, J=5.3 Hz, 0.9H), 5.17 (brs, 1H), 4.79 (q, J=5.5 Hz, 0.1H), 4.52 (dd, J=5.0, 6.1 Hz, 0.9H), 4.34 (q, J=4.2 Hz, 0.9H), 4.06 (q, J=3.9 Hz, 0.1H), 4.04-3.98 (m, 1H), 3.71-3.69 (m, 1H), 3.62-3.59 (m, 2H), 3.52-3.48 (m, 0.1H), 3.42-3.39 (m, 0.9H), 1.58-1.53 (m, 0.2H), 1.44-1.40 (m, 1.8H), 1.26-1.11 (m, 38H), 0.84 (t, J=6.8 Hz, 3H). LCMS (ESI) calculated for C₃₉H₆₂N5O₅ [M+H]⁺m/z=680.48, found 680.6.

[1292] Compound 102: To a solution of compound 101 and 3′-C₂₂ product 101a (mixture, 25 g, 36.8 mmol) in pyridine (300 mL) was added 4,4′-dimethoxytriphenyl chloride (12.5 g, 36.8 mmol) and the mixture was stirred at room temperature for 6 h. TLC indicated that compound 101 was consumed, and a new major spot was detected (90% ethyl acetate in hexane, Rf=0.8). The reaction was quenched with saturated NaHCO₃ (aq.) and diluted with ethyl acetate. The organic layer was washed with water, brine and dried (Na₂SO₄) and concentrated under vacuum. The crude residue was purified by column chromatography on silica gel (0-50% ethyl acetate in hexane for 10 min and then kept 50% ethyl acetate in hexane for 10 min) to obtain compound 102 as a light-yellow form (28.5 g, 79%). ¹H NMR (600 MHz, DMSO-d₆) δ 11.23 (brs, 1H), 8.66 (s, 1H), 8.60 (s, 1H), 8.06-8.04 (m, 2H), 7.66-7.63 (m, 1H), 7.56-7.54 (m, 2H), 7.38-7.36 (m, 2H), 7.27-7.18 (m, 7H), 6.85-6.82 (m, 4H), 6.15 (d, J=5.3 Hz, 1H), 5.26 (d, J=5.8 Hz, 1H), 4.66 (t, J=5.1 Hz, 1H), 4.39 (q, J=5.1 Hz, 1H), 4.12 (q, J=4.5 Hz, 1H), 3.72 (s, 6H), 3.61 (dt, J=6.5, 9.7 Hz, 1H), 3.45 (dt, J=6.5, 9.7 Hz, 1H), 3.30-3.24 (m, 2H), 1.47-1.42 (m, 2H), 1.27-1.12 (m, 38H), 0.84 (t, J=6.8 Hz, 3H). LCMS (ESI) calculated for C₆₀HoN₅O₇[M+H]⁺ m/z=982.61, found 982.6.

[1293] Compound 103: To a solution of compound 102 (5 g, 5.09 mmol) in ethyl acetate (30 mL) was added dropwise 2-cyanoethyl N,N-diisopropylchlorophosphoramidite (1.48 mL, 6.62 mmol) at 0° C. and the mixture was stirred at room temperature for 1 h. TLC indicated that compound 102 was consumed, and a new major spot was detected (40% ethyl acetate in hexane, Rf=0.4). The reaction mixture was quenched with saturated NaHCO₃ (aq.) and then the organic layer was washed with water, brine, dried (Na₂SO₄) and concentrated under vacuum. The crude residue was purified by column chromatography on silica gel (0-40% ethyl acetate in hexane for 15 min and then 40-50% ethyl acetate in hexane for 20 min) to obtain compound 103 as a white form (4.58 g, 76%). ¹H NMR (600 MHz, CD₃CN) δ 9.36 (brs, 1H), 8.62-8.60 (m, 1H), 8.31-8.29 (m, 1H), 8.02-8.00 (m, 2H), 7.67-7.64 (m, 1H), 7.57-7.55 (m, 2H), 7.47-7.43 (m, 2H), 7.35-7.21 (m, 7H), 6.86-6.82 (m, 4H), 6.14-6.13 (m, 1H), 4.84-4.81 (m, 1H), 4.74-4.69 (m, 1H), 4.37-4.31 (m, 1H), 3.95-3.63 (m, 11H), 3.56-3.52 (m, 1H), 3.50-3.45 (m, 1H), 3.39-3.33 (m, 1H), 2.74-2.65 (m, 1H), 2.52 (t, J=6.1 Hz, 1H), 1.53-1.48 (m, 2H), 1.34-1.19 (m, 47H), 1.12 (d, J=6.8 Hz, 3H), 0.90 (t, J=6.8 Hz, 3H). ³¹P NMR (243 MHz, CD₃CN) δ 149.89, 149.85, 149.81, 149.77, 149.74, 149.70, 149.48, 149.44, 149.40, 149.36, 149.32, 149.28. LCMS (ESI) calculated for C₆₉H₉₇N70₈P [M+H]⁺ m/z=1182.71, found 1182.6.

[chemical structure]

[1294] Compound 104: N-Isobutyrylguanosine (5 g, 14.2 mmol) and DMF (50 mL) were added into a 250 mL round-bottom flask, and then the solution was cooled to 0° C. NaH (60% in mineral oil; 1.42 g, 35.4 mmol) was added portion-wise into the solution and the suspension was stirred at 0° C. for 30 min. To the mixture was added 1-bromodocosane (8.27 g, 21.2 mmol). The suspension was wormed up to 90° C. and stirred for 24 h. TLC indicated that N-isobutyrylguanosine remained, and a new major spot was detected (100% ethyl acetate, Rf=0.4). The reaction mixture was cooled to 0° C. and quenched by addition of NH₄C₁ (a lot of insoluble matters were observed). The mixture, including the insoluble matter, was poured into a 1 μL separating funnel and diluted with CH₂C₁₂ and H₂O. (3 phases; organic phase, aqueous phase and emulsion phase, were observed.) The aqueous and emulsion phases were extracted with CH₂C₁₂ 3 times. The collected organic phase was dried over anhydrous sodium sulfate (Na₂SO₄) and concentrated under vacuum. The crude compound was purified by column chromatography on silica gel (0-10% MeOH in CH₂Cl₂ for 30 min) to obtain a mixture of 2′-C₂₂ (compound 104)/3′-C₂₂ products(104a), contained some other impurities, as a white solid (2.10 g, 22%). LCMS (ESI) calculated for C₃₆H₆₄N5O₆ [M+H]⁺ m/z=662.49, found 662.6. The obtained compound 104 was used for the next reaction without any further purifications.

[1295] Compound 105: To a solution of compound 104 (2.1 g, 3.17 mmol) in pyridine (30 mL) was added 4,4′-dimethoxytriphenyl chloride (1.07 g, 3.17 mmol) and the mixture was stirred at room temperature for overnight (14 h). TLC indicated that compound 104 was consumed, and a new major spot was detected (80% ethyl acetate in hexane, Rf=0.8). The reaction was quenched with saturated NaHCO₃ (aq.) and diluted with ethyl acetate. The organic layer was washed with water, brine and dried (Na₂SO₄) and concentrated under vacuum. The crude residue was purified by column chromatography on silica gel (0-45% ethyl acetate in hexane for 10 min and then kept 45% ethyl acetate in hexane for 30 min) to obtain compound 105 as a white form (2.13 g, 70%). ¹H NMR (600 MHz, DMSO-d₆) δ 12.10 (brs, 1H), 11.64 (brs, 1H), 8.12 (s, 1H), 7.36-7.34 (m, 2H), 7.27-7.19 (m, 7H), 6.85-6.81 (m, 4H), 5.93 (d, J=5.8 Hz, 1H), 5.18 (d, J=5.4 Hz, 1H), 4.40 (t, J=5.4 Hz, 1H), 4.26 (q, J=4.8 Hz, 1H), 4.05 (ddd, J=3.5, 3.5, 6.0 Hz, 1H), 3.73 (s, 6H), 3.59 (dt, J=6.4, 9.7 Hz, 1H), 3.45 (dt, J=6.4, 9.7 Hz, 1H), 3.30 (d, J=6.0, 10.5 Hz, 1H), 3.16 (d, J=3.5, 10.5 Hz, 1H), 2.76 (sept, J=6.8 Hz, 1H), 1.44-1.40 (m, 2H), 1.26-1.11 (m, 44H), 0.84 (t, J=6.8 Hz, 3H). LCMS (ESI) calculated for C₅₇H₈₂N₅O₈[M+H]⁺ m/z=964.62, found 964.6.

[1296] Compound 106: To a solution of compound 105 (2 g, 2.07 mmol) and DIPEA (0.470 mL, 2.70 mmol) in ethyl acetate (20 mL) was added dropwise 2-cyanoethyl N,N-diisopropylchlorophosphoramidite (0.601 mL, 2.70 mmol) at 0° C. and the mixture was stirred at room temperature for 1 h. TLC indicated that compound 105 was consumed, and a new major spot was detected (50% ethyl acetate in hexane, Rf=0.6). The reaction mixture was washed with saturated NaHCO₃ (aq.), water, brine, dried (Na₂SO₄) and concentrated under vacuum. The crude residue was purified by column chromatography on silica gel (0-50% ethyl acetate in hexane for 30 min and then kept 50% ethyl acetate in hexane for 10 min) to obtain compound 106 as a white form (1.76 g, 73%). ¹H NMR (600 MHz, CD₃CN) δ 11.99 (brs, 1H), 9.16 (brs, 1H), 7.89-7.87 (m, 1H), 7.49-7.23 (m, 9H), 6.87-6.83 (m, 4H), 5.92 (t, J=6.1 Hz, 1H), 4.68-4.63 (m, 1H), 4.53-4.47 (m, 1H), 4.34-4.26 (m, 1H), 3.92-3.60 (m, 11H), 3.54-3.49 (m, 1H), 3.40 (d, J=4.0 Hz, 1H), 3.35 (d, J=4.0 Hz, 1H), 2.73-2.65 (m, 1H), 2.57-2.47 (m, 2H), 1.53-1.47 (m, 2H), 1.34-1.18 (m, 47H), 1.15-1.06 (m, 9H), 0.90 (t, J=6.7 Hz, 3H). ³¹P NMR (243 MHz, CD₃CN) δ 149.80, 149.76, 149.72, 149.68, 149.64, 149.60, 149.56, 149.51, 149.48, 149.44. LCMS (ESI) calculated for C₆₆H₉₉N70₉P [M+H]⁺ m/z=1164.72, found 1164.8.

[chemical structure]

[1297] Compound 107: 2M solution of AlMe₃ (50 mL, 0.10 mol) was added slowly for ca. 15 min to a stirred suspension of 1-docosanol (108 g, 0.33 mol) in anhyd. diglyme (90 mL) under Ar atmosphere in a 2-neck 1 μL flask fitted with a magnetic stirring bar, and an outlet with a gas bubbler over a reflux condenser. After completion of the addition, the mixture was heated to 100° C. until evolution of gas through the bubbler was complete (30 min). The mixture was cooled to 65° C. and diluted with anhyd. AcOEt (150 mL) and anhyd. ACN (150 mL). The mixture was cooled down to rt in the bath overnight, a white residue formed was filtered through a 600 mL glass filtering funnel under the cushion of Ar, and washed with a 1:1 mixture of anhyd. AcOEt and anhyd. ACN (400 mL×2) under the cushion of Ar. The residue was dried on the funnel in reverse flow of nitrogen, transferred to a flask and dried in high vacuum for 24 h to afford 107.4 g of the alkoxide 107 of ca. 93% purity containing ca. 7% of 1-docosanol that was used in the next step without of further purification. The product was stored under Ar atmosphere.

[1298] Compound 108: A mixture of 5′-TBDPS-protected anhydro-uridine (18.6 g, 40 mmol), aluminum alkoxide 107 (˜93%, 47.6 g, 44 mmol) and anhyd. diglyme (60 mL) was heated to 145° C. bath temperature in a flask fitted with a magnetic stirring bar and a reflux condenser under slight positive pressure of Ar using a balloon for 48 h. The mixture was cooled down to 70° C. in the bath, diluted with AcOEt (200 mL), further cooled down 30° C. and quenched by addition of 10% H₃PO₄ (200 mL). A suspension thus formed was stirred at rt overnight, filtered through a 600 mL glass filtering funnel, and the solids were washed thoroughly with water (ca. 50 mL) and AcOEt (ca. 300 mL) mixture. Thoroughly compressed solid residue was dried in warm air to afford 25.4 g (55%) of recovered 1-docosanol. The filtrate was transferred to a separatory funnel, the organic layer was separated, washed with 1% NaCl (500 mL×2), saturated NaCl (200 mL) and dried over anhyd. Na₂SO₄. The solvent was removed in vacuo, the residue was co-evaporated with additional portion of AcOEt (300 mL) to afford 61.8 g of crude residue. The latter was dissolved in 190 mL of AcOEt-hexanes 1:4 mixture and liquid-loaded on a standard 330 g column of silica gel. The column was eluted with isocratic 20% AcOEt in hexanes followed by gradient of 20 to 40% of AcOEt in hexanes, the fractions containing product were pulled, evaporated in vacuum, co-evaporated twice with ACN-diethyl ether mixture, and dried in high vacuum to afford 11.4 g (36%) of pure product 108. ¹H NMR (600 MHz, Acetone-d6) δ 10.08 (s, 1H), 7.88 (d, J=7.8 Hz, 1H), 7.80-7.76 (m, 2H), 7.76-7.73 (m, 2H), 7.53-7.44 (m, 6H); 6.00 (d, J=3.0 Hz, 1H), 5.27 (d, J=8.4 Hz, 1H), 4.46 (q, J=5.4 Hz, 1H), 4.12 (dd, J=12.0, 2.4 Hz, 1H), 4.08-4.04 (m, 2H), 3.98 (dd, J=11.4, 2.4 Hz, 1H), 3.95 (d, J=7.2 Hz, 1H), 3.78 (dt, J=9.6, 6.6 Hz, 1H), 3.69 (dt, J=9.6, 6.6 Hz, 1H), 1.65-1.59 (m, 2H), 1.43-1.36 (m, 2H), 1.35-1.25 (m, 36H), 1.13 (s, 9H), 0.89 (t, J=6.6 Hz, 3H). MS (ESI+ APCI), calculated for C₄₇H₇₄N₂O₆Si [M+H]⁺ exact mass m/z=791.54, found 791.7.

[1299] Compound 109: A mixture of TBDPS-protected nucleoside 108 (2.25 g, 2.8 mmol), anhyd. THF (10 mL), and triethylamine trihydrofluoride (2 mL, 12 mmol) was heated at 50° C. under Ar atmosphere for 24 h. Heptane (40 mL) followed by water (40 mL) were added, the heating bath was removed, the mixture was stirred overnight at rt, filtered, and washed thoroughly by water-heptane mixture. The solid was dried in the flow of nitrogen for 2 h followed by warm air overnight to afford 1.52 g (98%) of 109 as a white solid. ¹H NMR (600 MHz, Acetone-d6) δ 10.01 (s, 1H), 7.88 (d, J=8.4 Hz, 1H), 5.97 (d, J=4.2 Hz, 1H), 5.60 (d, J=8.4 Hz, 1H), 4.37 (s, 1H), 4.35-4.29 (m, 1H), 4.06 (t, J=4.8 Hz, 1H), 4.00 (dt, J=5.4, 2.4 Hz, 1H), 3.93-3.87 (m, 1H), 3.84 (d, J=6.6 Hz, 1H), 3.83-3.78 (m, 1H), 3.74-3.63 (m, 2H), 1.64-1.56 (m, 2H), 1.43-1.23 (m, 38H), 0.89 (t, J=6.6 Hz, 3H). MS (ESI+ APCI), calculated for C₃₁H₅₆N₂O₆ [M+H]⁺ exact mass m/z=553.42, found 553.5.

[1300] Compound 110: Triethylamine (0.77 mL, 5.5 mmol) was added to a solution of nucleoside 109 (1.49 g, 2.7 mmol) and DMTrCl (1.86 g, 5.5 mmol) in anhyd. pyridine (10 mL) under Ar atmosphere. The mixture was stirred at rt overnight, quenched by addition of MeOH (0.2 mL), and diluted with ACN (25 mL). The solvents were evaporated in vacuo at 25° C., the residue was co-evaporated twice with ACN at 25° C. and partitioned between AcOEt and 5% NaCl. The organic phase was separated, washed with sat. NaCl, and dried over anhyd. Na₂SO₄. The solvent was removed in vacuo to afford 3.50 g of crude product. The latter was purified by chromatography over a standard 40 g column of silicagel with isocratic 30% of AcOEt in hexanes followed by gradient of 30 to 50% of AcOEt in hexanes. Fractions contained product were pulled evaporated in vacuum, co-evaporated twice with ACN-diethyl ether mixture, and dried in high vacuum to afford 1.98 g (86%) of product 110 as a yellowish foam. ¹H NMR (600 MHz, Acetone-d6) δ 10.08 (s, 1H), 7.93 (d, J=7.8 Hz, 1H), 7.52-7.48 (m, 2H), 7.40-7.33 (m, 6H), 7.29-7.26 (m, 1H), 6.93 (d split, J=9.0 Hz, 4H), 5.96 (d, J=2.4 Hz, 1H), 5.27 (d, J=7.8 Hz, 1H), 4.52-4.48 (m, 1H), 4.12-4.07 (m, 2H), 3.94 (d, J=7.8 Hz, 1H), 3.85-3.77 (m, 1H), 3.81 (s, 6H), 3.73-3.68 (m, 1H), 3.52 (dd, J=10.8, 3.6 Hz, 1H), 3.46 (dd, J=10.8, 3.0 Hz, 1H), 1.67-1.59 (m, 2H), 1.43-1.56 (m, 2H), 1.36-1.23 (m, 36H), 0.89 (t, J=6.6 Hz, 3H). MS (ESI+ APCI), calculated for C₅₂H₇₄N₂O₈[M+H]⁺ exact mass m/z=854.54.

[1301] Compound 111: DIPEA (0.46 mL, 2.6 mmol) followed by 2-cyanoethyl N,N-diisopropylchlorophosphoramidite (0.57 mL, 2.6 mmol) were added to a solution of compound 110 (1.71 g, 2 mmol) in anhyd. DCM (10 mL) under Ar. The mixture was stirred at rt for 14 h, cooled to 0° C., quenched by addition of sat. NaHCO₃ and extracted with AcOEt (25 mL). Organic phase was separated, washed with sat. NaCl, and dried over anhyd. sodium sulfate. Crude material (2.20 g) was purified over a standard 40 g flash column of silica gel that was eluted with isocratic 50% of AcOEt containing 0.3% of TEA in hexanes to afford 1.96 g (93%) of 111 as a white foam. ¹H NMR (500 MHz, CD3CN) δ 8.93 (s, 1H), 7.82-7.70 (m, 1H), 7.47-7.41 (m, 2H), 7.36-7.23 (m, 8H), 6.91-6.85 (m, 4H), 5.87-5.82 (m, 1H), 5.24-5.19 (m, 1H), 4.50-4.38 (m, 1H), 4.19-4.11 (m, 1H), 4.06-3.99 (m, 1H), 3.77 (s, 3H), 3.77 (s, 3H), 3.63-3.59 (m, 2H), 3.45-3.41 (m, 1H), 2.72-2.59 (m, 1H), 2.52 (t, J=6.0 Hz, 1H), 1.60-1.50 (m, 2H), 1.42-1.07 (m, 51H), 1.06 (d, J=6.8 Hz, 3H), 0.90-0.84 (m, 3H). C13 NMR (151 MHz, CD3CN) δ 163.47, 163.43, 159.33, 159.31, 159.30, 150.84, 145.32, 145.25, 140.54, 140.51, 135.99, 135.95, 135.85, 135.77, 130.76, 130.71, 130.69, 128.63, 128.60, 128.51, 127.57, 119.12, 119.00, 113.68, 113.67, 102.11, 102.02, 88.36, 88.23, 87.22, 87.18, 82.95, 82.93, 82.80, 82.76, 81.98, 81.25, 81.22, 71.24, 71.00, 70.76, 70.66, 70.59, 70.51, 62.45, 62.00, 59.15, 59.02, 58.78, 58.64, 55.48, 55.46, 43.58, 43.54, 43.50, 43.45, 32.21, 30.01, 29.99, 29.96, 29.92, 29.85, 29.73, 29.69, 29.65, 26.32, 26.30, 24.67, 24.62, 24.57, 24.52, 24.48, 24.46, 24.41, 22.96, 20.65, 20.60, 13.98. P31 NMR (202 MHz, CD3CN) δ 149.47, 149.08.

[chemical structure]

[1302] Compound 112: TMSCl (0.4 mL, 3.2 mmol) was added to a solution of 110 (1.20 g, 1.4 mmol) and NMP (1.2 mL, 11.8 mmol) in anhyd. MeCN (7 mL) under Ar atmosphere. The mixture was stirred at rt for 1 h, cooled to 0° C., and TFAA (0.5 mL, 3.6 mmol) was added slowly dropwise via syringe. The mixture was stirred at 0° C. for 40 min, and p-nitrophenol (0.56 g, 4 mmol) was added. The mixture was stirred at 0° C. for 3 h and quenched by addition of sat. sodium bicarbonate (15 mL). The cooling bath was removed, ethyl acetate (30 mL) was added, followed by minimal amount of water to dissolve inorganic precipitates. The organic phase was separated, washed with sat. NaCl, dried over anhyd. sodium sulfate and evaporated in vacuum to afford 1.94 g of oily residue. The latter was dissolved in dioxane (15 mL), the solution was transferred to a pressure bottle, saturated ammonium hydroxide solution (2.2 mL) was added, and the bottle was heated at 55° C. with stirring for 24 h. The mixture was cooled to rt, the solvent was evaporated in vacuum and the residue (2.40 g) was chromatographed over a column of silica gel with gradient of methanol in ethyl acetate (0 to 6%). The fraction containing product were pulled, evaporated in vacuum, and the residue was treated with 5 mL of ACN that triggered extensive crystallization. The mixture was kept at 0° C. for 4 h, filtered, the crystalline residue was washed with ACN, and air-dried to afford 0.73 g (60%) of C-22 cytidine 112 as a white solid. ¹H NMR (400 MHz, DMSO-d6) δ 7.77 (d, J=7.2 Hz, 1H), 7.42-7.35 (m, 2H), 7.31 (t, J=7.2 Hz, 2H), 7.28-7.22 (m, 5H), 7.22-7.12 (m, 2H), 6.89 (d, J=8.8 Hz, 4H), 5.80 (d, J=2.8 Hz, 1H), 5.48 (d, J=7.6 Hz, 1H), 4.98 (d, J=6.8 Hz, 1H), 4.19-4.11 (m, 1H), 3.99-3.90 (m, 1H), 3.77-3.69 (m, 1H), 3.73 (s, 6H), 3.68-3.52 (m, 2H), 3.30-3.22 (m, 2H), 1.55-1.45 (m, 2H), 1.34-1.14 (m, 38H), 0.83 (t, J=6.8 Hz, 3H). MS (ESI+ APCI), calculated for C₅₂H₇₅N₃₀₇ [M+H]⁺ exact mass m/z=854.57.

[1303] Compound 113: C-22-Cytidine 112 (0.68 g, 0.8 mmol) was dissolved in anhyd. DMF (4 mL) under Ar atmosphere, and acetic anhydride (0.09 mL, 0.9 mmol) was added. The mixture was stirred at rt for 48 h, cooled to 0° C., quenched by addition of 5% NaCl (10 mL), and diluted with ethyl acetate (10 mL). The organic phase was separated, washed with 5% NaCl (2×20 mL), sat. sodium bicarbonate, sat. NaCl, and dried over anhyd. sodium sulfate. The solvent was removed in vacuum and the residue was co-evaporated twice with ACN-diethyl ether mixture to afford 0.72 g (100%) of C-22 N(Ac)-cytidine 113 as a white solid. ¹H NMR (400 MHz, DMSO-d6) δ 10.90 (s, 1H), 8.28 (d, J=7.6 Hz, 1H), 7.41-7.35 (m, 2H), 7.31 (t, J=7.2 Hz, 2H), 7.28-7.21 (m, 5H), 7.00 (d, J=7.2 Hz, 1H), 6.92-6.86 (m, 4H), 5.79 (d, J=1.2 Hz, 1H), 5.05 (d, J=7.2 Hz, 1H), 4.25-4.18 (m, 1H), 4.05-3.99 (m, 1H), 3.78 (dd, J=4.8, 1.2 Hz, 1H), 3.77-3.69 (m, 1H), 3.74 (s, 6H), 3.65-3.57 (m, 1H), 3.37-3.27 (m, 2H), 2.08 (s, 3H), 1.57-1.48 (m, 2H), 1.35-1.14 (m, 38H), 0.83 (t, J=6.8 Hz, 3H). MS (ESI+ APCI), calculated for C₅₄H₇₇N₃O₅ [M+H]⁺ exact mass m/z=896.58.

[1304] Compound 114: DIPEA (0.16 mL, 0.9 mmol) followed by 2-cyanoethyl N,N-diisopropylchlorophosphoramidite (0.20 mL, 0.9 mmol) were added to a solution of compound 113 (0.63 g, 0.7 mmol) in anhyd. DCM (5 mL) under Ar. The mixture was stirred at rt for 14 h, cooled to 0° C., quenched by addition of sat. NaHCO₃ and extracted with AcOEt (15 mL). Organic phase was separated, washed with sat. NaCl, and dried over anhyd. sodium sulfate. Crude material (0.82 g) was purified over a standard 24 g flash column of silica gel that was eluted with isocratic 70% of AcOEt containing 0.3% of TEA in hexanes followed by gradient 70 to 100% of AcOEt containing 0.3% of TEA in hexanes to afford 0.69 g (90%) of 114 as a white foam. ¹H NMR (600 MHz, DMSO) δ 10.94 (s, 1H), 8.46-8.34 (m, 1H), 7.46-7.36 (m, 2H), 7.36-7.20 (m, 7H), 6.98 (t, J=8.4 Hz, 1H), 6.89 (t, J=8.6 Hz, 4H), 5.85 (d, J=13.8 Hz, 1H), 4.55-4.34 (m, 1H), 4.20-4.11 (m, 1H), 4.06-3.83 (m, 2H), 3.75 (s, 3H), 3.74 (s, 3H), 3.68-3.64 (m, 1H), 3.50-3.44 (m, 2H), 2.77-2.69 (m, 1H), 2.66-2.59 (m, 1H), 2.10 (s, 3H), 1.56-1.49 (m, 2H), 1.26-1.16 (m, 51H), 0.96 (d, J=6.7 Hz, 3H), 0.85-0.82 (m, 3H). P31 NMR (243 MHz, DMSO) δ 149.23, 147.94.

### Example 2. dsRNA Synthesis

### Source of Reagents

[1305] Where the source of a reagent is not specifically given herein, such reagent can be obtained from any supplier of reagents for molecular biology at a quality/purity standard for application in molecular biology.

siRNA Design

[1306] siRNAs targeting the human adrenoceptor beta 1 (ADRB1) gene (human: GenBank NM_000684.3, NCBI GeneID: 153) were designed using custom R and Python scripts. The human ADRB1 REFSEQ NM_000684.3 mRNA, has a length of 3039 bases.

[1307] siRNAs comprising a GalNAc conjugate targeting ligand were designed and synthesized as described below. siRNAs comprising an unsaturated C₂₂ hydrocarbon chain conjugated to the sense strand at position 6, counting from the 5′-end of the sense strand, were designed and synthesized as described above.

[1308] Detailed lists of the modified ADRB1 sense and antisense strand nucleotide sequences comprising an unsaturated C₂₂ hydrocarbon chain conjugated to the sense strand at position 6, counting from the 5′-end of the sense strand, are shown in Table 3, and the corresponding unmodified ADRB1 sense and antisense nucleotide sequences are shown in Table 2.

[1309] Detailed lists of the modified ADRB1 sense and antisense strand nucleotide sequences comprising a GalNAc conjugate targeting ligand are shown in Table 5, and the corresponding unmodified ADRB1 sense and antisense nucleotide sequences are shown in Table 4. It is to be understood that, throughout the application, a duplex name without a decimal is equivalent to a duplex name with a decimal which merely references the batch number of the duplex. For example, AD-959917 is equivalent to AD-959917.1.

siRNA Synthesis

[1310] siRNAs comprising a GalNAc conjugate targeting ligand were designed, synthesized, and prepared using methods known in the art.

[1311] Briefly, siRNA sequences were synthesized on a 1 μmol scale using a Mermade 192 synthesizer (BioAutomation) with phosphoramidite chemistry on solid supports. The solid support was controlled pore glass (500-1000 A) loaded with a custom GalNAc ligand (3′-GalNAc conjugates), universal solid support (AM Chemicals), or the first nucleotide of interest. Ancillary synthesis reagents and standard 2-cyanoethyl phosphoramidite monomers (2′-deoxy-2′-fluoro, 2′-O-methyl, RNA, DNA) were obtained from Thermo-Fisher (Milwaukee, WI), Hongene (China), or Chemgenes (Wilmington, MA, USA). Additional phosphoramidite monomers were procured from commercial suppliers, prepared in-house, or procured using custom synthesis from various CMOs. Phosphoramidites were prepared at a concentration of 100 mM in either acetonitrile or 9:1 acetonitrile:DMF and were coupled using 5-Ethylthio-1H-tetrazole (ETT, 0.25 M in acetonitrile) with a reaction time of 400 s. Phosphorothioate linkages were generated using a 100 mM solution of 3-((Dimethylamino-methylidene) amino)-3H-1,2,4-dithiazole-3-thione (DDTT, obtained from Chemgenes (Wilmington, MA, USA)) in anhydrous acetonitrile/pyridine (9:1 v/v). Oxidation time was 5 minutes. All sequences were synthesized with final removal of the DMT group (“DMT-Off”). Upon completion of the solid phase synthesis, solid-supported oligoribonucleotides were treated with 300 μL of Methylamine (40% aqueous) at room temperature in 96 well plates for approximately 2 hours to afford cleavage from the solid support and subsequent removal of all additional base-labile protecting groups. For sequences containing any natural ribonucleotide linkages (2′-OH) protected with a tert-butyl dimethyl silyl (TBDMS) group, a second deprotection step was performed using TEA.3HF (triethylamine trihydrofluoride). To each oligonucleotide solution in aqueous methylamine was added 200 μL of dimethyl sulfoxide (DMSO) and 300 μL TEA.3HF and the solution was incubated for approximately 30 mins at 60° C. After incubation, the plate was allowed to come to room temperature and crude oligonucleotides were precipitated by the addition of 1 mL of 9:1 acetontrile:ethanol or 1:1 ethanol:isopropanol. The plates were then centrifuged at 4° C. for 45 mins and the supernatant carefully decanted with the aid of a multichannel pipette. The oligonucleotide pellet was resuspended in 20 mM NaOAc and subsequently desalted using a HiTrap size exclusion column (5 mL, GE Healthcare) on an Agilent LC system equipped with an autosampler, UV detector, conductivity meter, and fraction collector. Desalted samples were collected in 96 well plates and then analyzed by LC-MS and UV spectrometry to confirm identity and quantify the amount of material, respectively.

[1312] Duplexing of single strands was performed on a Tecan liquid handling robot. Sense and antisense single strands were combined in an equimolar ratio to a final concentration of 10 μM in 1× PBS in 96 well plates, the plate sealed, incubated at 100° C. for 10 minutes, and subsequently allowed to return slowly to room temperature over a period of 2-3 hours. The concentration and identity of each duplex was confirmed and then subsequently utilized for in vitro screening assays.

### Example 3. In Vitro Screening Methods

### Cell Culture and 384-Well Transfections

[1313] Hep3b cells (ATCC, Manassas, VA) were grown to near confluence at 37° C. in an atmosphere of 5% CO₂ in Eagle's Minimum Essential Medium (Gibco) supplemented with 10% FBS (ATCC) before being released from the plate by trypsinization. Transfection was carried out by adding 7.5 l of Opti-MEM plus 0.1 μl of Lipofectamine RNAiMax per well (Invitrogen, Carlsbad CA. cat #13778-150) to 2.5 μl of each siRNA duplex to an individual well in a 384-well plate. The mixture was then incubated at room temperature for 15 minutes. Forty μl of complete growth media without antibiotic containing ˜1.5×10⁴ cells were then added to the siRNA mixture. Cells were incubated for 24 hours prior to RNA purification. Single dose experiments were performed at 10 nM, 1 nM, and 0.1 nM final duplex concentration.

### In Vitro Dual-Luciferase and Endogenous Screening Assays

[1314] Hepa1-6 cells were transfected by adding 50 μL of siRNA duplexes and 75 ng of a plasmid, comprising human ADRB1 target sequence, per well along with 100 μL of Opti-MEM plus 0.5 μL of Lipofectamine 2000 per well (Invitrogen, Carlsbad CA. cat #13778-150) and then incubated at room temperature for 15 minutes. The mixture was then added to the cells which are re-suspended in 35 μL of fresh complete media. The transfected cells were incubated at 37° C. in an atmosphere of 5% CO2. Single-dose experiments were performed at 10 nM or 50 nM.

[1315] Twenty-four hours after the siRNAs and psiCHECK2 plasmid are transfected; Firefly (transfection control) and Renilla (fused to ADRB1 target sequence) luciferase were measured. First, media was removed from cells. Then Firefly luciferase activity was measured by adding 75 μL of Dual-Glo® Luciferase Reagent equal to the culture medium volume to each well and mix. The mixture was incubated at room temperature for 30 minutes before luminescense (500 nm) was measured on a Spectramax (Molecular Devices) to detect the Firefly luciferase signal. Renilla luciferase activity was measured by adding 75 μL of room temperature of Dual-Glo® Stop & Glo® Reagent to each well and the plates were incubated for 10-15 minutes before luminescence was again measured to determine the Renilla luciferase signal. The Dual-Glo® Stop & Glo® Reagent quenches the firefly luciferase signal and sustained luminescence for the Renilla luciferase reaction. siRNA activity was determined by normalizing the Renilla (MUC5B) signal to the Firefly (control) signal within each well. The magnitude of siRNA activity was then assessed relative to cells that were transfected with the same vector but were not treated with siRNA or were treated with a non-targeting siRNA. All transfections were done with n=4.

Total RNA Isolation Using DYNABEADS mRNA Isolation Kit (Invitrogen™, Part #: 610-12)

[1316] Cells were lysed in 75 μl of Lysis/Binding Buffer containing 3 μL of beads per well and mixed for 10 minutes on an electrostatic shaker. The washing steps were automated on a Biotek EL406, using a magnetic plate support. Beads were washed (in 90 L) once in Buffer A, once in Buffer B, and twice in Buffer E, with aspiration steps in between. Following a final aspiration, complete 10 μL RT mixture was added to each well, as described below.

cDNA Synthesis Using AB High Capacity cDNA Reverse Transcription Kit (Applied Biosystems, Foster City, CA, Cat #4368813)

[1317] A master mix of 1 μl 10× Buffer, 0.4 μl 25× dNTPs, 1 μl Random primers, 0.5 μl Reverse Transcriptase, 0.5 μl RNase inhibitor and 6.6 μl of H₂O per reaction were added per well. Plates were sealed, agitated for 10 minutes on an electrostatic shaker, and then incubated at 37 degrees C. for 2 hours. Following this, the plates were agitated at 80 degrees C. for 8 minutes.

### Real Time PCR

[1318] Two microlitre (μl) of cDNA were added to a master mix containing 0.5 μl of human GAPDH TaqMan Probe (4326317E), 0.5 μl human AGT, 2 μl nuclease-free water and 5 μl Lightcycler 480 probe master mix (Roche Cat #04887301001) per well in a 384 well plates (Roche cat #04887301001). Real time PCR was done in a LightCycler480 Real Time PCR system (Roche). To calculate relative fold change, data were analyzed using the ΔΔCt method and normalized to assays performed with cells transfected with 10 nM AD-1955, or mock transfected cells. IC₅₀s were calculated using a 4 parameter fit model using XLFit and normalized to cells transfected with AD-1955 or mock-transfected. The sense and antisense sequences of AD-1955 are: sense: 5′-cuuAcGcuGAGuAcuucGAdTsdT-3′ and antisense 5′-UCGAAGuACUcAGCGuAAGdTsdT-3′.

[1319] The results of the dual-luciferase assays of the agents listed in Tables 4 and 5 are provided in Table 6.

TABLE 1
Abbreviations of nucleotide monomers used in nucleic acid sequence representation. It will
be understood that these monomers, when present in an oligonucleotide, are mutually linked by 5′-3′-
phosphodiester bonds; and it is understood that when the nucleotide contains a 2′-fluoro modification,
then the fluoro replaces the hydroxy at that position in the parent nucleotide (i.e., it is a 2′-deoxy-2′-
fluoronucleotide). It is to be further understood that the nucleotide abbreviations in the table omit the
3′-phosphate (i.e., they are 3′-OH) when placed at the 3′-terminal position of an oligonucleotide.

| Abbreviation | Nucleotide(s) |
|---|---|
| A | Adenosine-3′-phosphate |
| Ab | beta-L-adenosine-3′-phosphate |
| Abs | beta-L-adenosine-3′-phosphorothioate |
| Af | 2′-fluoroadenosine-3′-phosphate |
| Afs | 2′-fluoroadenosine-3′-phosphorothioate |
| As | adenosine-3′-phosphorothioate |
| C | cytidine-3′-phosphate |
| Cb | beta-L-cytidine-3′-phosphate |
| Cbs | beta-L-cytidine-3′-phosphorothioate |
| Cf | 2′-fluorocytidine-3′-phosphate |
| Cfs | 2′-fluorocytidine-3′-phosphorothioate |
| Cs | cytidine-3′-phosphorothioate |
| G | guanosine-3′-phosphate |
| Gb | beta-L-guanosine-3′-phosphate |
| Gbs | beta-L-guanosine-3′-phosphorothioate |
| Gf | 2′-fluoroguanosine-3′-phosphate |
| Gfs | 2′-fluoroguanosine-3′-phosphorothioate |
| Gs | guanosine-3′-phosphorothioate |
| T | 5′-methyluridine-3′-phosphate |
| Tf | 2′-fluoro-5-methyluridine-3′-phosphate |
| Tfs | 2′-fluoro-5-methyluridine-3′-phosphorothioate |
| Ts | 5-methyluridine-3′-phosphorothioate |
| U | Uridine-3′-phosphate |
| Uf | 2′-fluorouridine-3′-phosphate |
| Ufs | 2′-fluorouridine-3′-phosphorothioate |
| Us | uridine-3′-phosphorothioate |
| N | any nucleotide, modified or unmodified |
| a | 2′-O-methyladenosine-3′-phosphate |
| as | 2′-O-methyladenosine-3′-phosphorothioate |
| c | 2′-O-methylcytidine-3′-phosphate |
| CS | 2′-O-methylcytidine-3′-phosphorothioate |
| g | 2′-O-methylguanosine-3′-phosphate |
| gs | 2′-O-methylguanosine-3′-phosphorothioate |
| t | 2′-O-methyl-5-methyluridine-3′-phosphate |
| ts | 2′-O-methyl-5-methyluridine-3′-phosphorothioate |
| u | 2′-O-methyluridine-3′-phosphate |
| us | 2′-O-methyluridine-3′-phosphorothioate |
| s | phosphorothioate linkage |
| L10 | [chemical structure] |
| L96 | [chemical structure] |
| uL96 | [chemical structure] |
| Y34 | [chemical structure] |
| Y44 | [chemical structure] |
| (Agn) | Adenosine-glycol nucleic acid (GNA) S-Isomer |
| (Cgn) | Cytidine-glycol nucleic acid (GNA) S-Isomer |
| (Ggn) | Guanosine-glycol nucleic acid (GNA) S-Isomer |
| (Tgn) | Thymidine-glycol nucleic acid (GNA) S-Isomer |
| P | Phosphate |
| VP | Vinyl-phosphonate |
| dA | 2′-deoxyadenosine-3′-phosphate |
| dAs | 2′-deoxyadenosine-3′-phosphorothioate |
| dC | 2′-deoxycytidine-3′-phosphate |
| dCs | 2′-deoxycytidine-3′-phosphorothioate |
| dG | 2′-deoxyguanosine-3′-phosphate |
| dGs | 2′-deoxyguanosine-3′-phosphorothioate |
| dT | 2′-deoxythimidine-3′-phosphate |
| dTs | 2′-deoxythimidine-3′-phosphorothioate |
| dU | 2′-deoxyuridine |
| dUs | 2′-deoxyuridine-3′-phosphorothioate |
| (C2p) | cytidine-2′-phosphate |
| (G2p) | guanosine-2′-phosphate |
| (U2p) | uridine-2′-phosphate |
| (A2p) | adenosine-2′-phosphate |
| (Chd) | 2′-O-hexadecyl-cytidine-3′-phosphate |
| (Ahd) | 2′-O-hexadecyl-adenosine-3′-phosphate |
| (Ghd) | 2′-O-hexadecyl-guanosine-3′-phosphate |
| (Uhd) | 2′-O-hexadecyl-uridine-3′-phosphate |
| Ada | [chemical structure] |
| Cda | [chemical structure] |
| Gda | [chemical structure] |
| Uda | [chemical structure] |

TABLE 2
Unmodified Sense and Antisense Strand Sequences of ADRB1 dsRNA Agents

| | | SEQ ID | | Seq ID | Range in |
|---|---|---|---|---|---|
| Duplex Name | Sense Sequence 5′ to 3′ | NO: | Antisense Sequence 5′ to 3′ | NO: | NM_000684.3 |
| AD-1646600 | UAAAUUCUACUUCCUCUUGUA | | UACAAGAGGAAGUAGAAUUUACA | | 2932-2954 |
| AD-1646601 | AUUCAAACUCUACUUCUGUUA | | UAACAGAAGUAGAGUUUGAAUUU | | 2740-2762 |
| AD-1646602 | UCCUUUAUCAUGGUACUGUAA | | UUACAGUACCAUGAUAAAGGAGU | | 2811-2833 |
| AD-1646603 | AAGAAAUGUUAAGCUCUUCUA | | UAGAAGAGCUUAACAUUUCUUGA | | 2301-2323 |
| AD-1646604 | CUUUUUAUACUCCUUUAUCAA | | UUGAUAAAGGAGUAUAAAAAGGU | | 2801-2823 |
| AD-1646605 | AUUGGGAAAAUACCUUUUUAA | | UUAAAAAGGUAUUUUCCCAAUGA | | 2788-2810 |
| AD-1646606 | AAGACAUAUUUCCUUUUGCUA | | UAGCAAAAGGAAAUAUGUCUUGA | | 2184-2206 |
| AD-1646607 | CUACUUCUGUUGUCUAGUAUA | | UAUACUAGACAACAGAAGUAGAG | | 2749-2771 |
| AD-1646608 | AGUGUUAGGAAUUACAAAAUA | | UAUUUUGUAAUUCCUAACACUGU | | 2643-2665 |
| AD-1646609 | AUCACGUUUCAAGAAAUGUUA | | UAACAUUUCUUGAAACGUGAUUU | | 2291-2313 |
| AD-1646610 | GUGGUUCAAAAUGCCAUUUUA | | UAAAAUGGCAUUUUGAACCACUC | | 2618-2640 |
| AD-1646611 | CUUGUUUAUAUUAAACAGCUA | | UAGCUGUUUAAUAUAAACAAGUC | | 2441-2463 |
| AD-1646612 | GUGUUUACUUAAGACCGAUAA | | UUAUCGGUCUUAAGUAAACACAG | | 1756-1778 |
| AD-1646613 | UUCCAGAGAAAUUUCAUUUUA | | UAAAAUGAAAUUUCUCUGGAAAG | | 2204-2226 |
| AD-1646614 | UGUAACUGUAUCCAUAUUAUA | | UAUAAUAUGGAUACAGUUACAGU | | 2827-2849 |
| AD-1646615 | UGCUGUUAUGAAAGCAAAGAA | | UUCUUUGCUUUCAUAACAGCAGA | | 2244-2266 |
| AD-1646616 | UAGUAUGUUAUUGAGCUAAUA | | UAUUAGCUCAAUAACAUACUAGA | | 2763-2785 |
| AD-1646617 | UUUACCAAGUAUUUAUACUCA | | UGAGUAUAAAUACUUGGUAAAAC | | 2956-2978 |
| AD-1646618 | CCUCUUCGUCUUCUUCAACUA | | UAGUUGAAGAAGACGAAGAGGCG | | 1336-1358 |
| AD-1646619 | GUGCAAUAAAUACCAAUGAAA | | UUUCAUUGGUAUUUAUUGCACAU | | 3012-3034 |
| AD-1646620 | CUUGUGUGUUUUACCAAGUAA | | UUACUUGGUAAAACACACAAGAG | | 2947-2969 |
| AD-1646621 | CACCAACCUCUUCAUCAUGUA | | UACAUGAUGAAGAGGUUGGUGAG | | 541-563 |
| AD-1646622 | AGUAAUGAUUUCUGCUGUUAA | | UUAACAGCAGAAAUCAUUACUUA | | 2232-2254 |
| AD-1646623 | GGUGGUUUUUGACACUCUCUA | | UAGAGAGUGUCAAAAACCACCUG | | 2022-2044 |
| AD-1646624 | UGUGACAUGUGACUCUGUCAA | | UUGACAGAGUCACAUGUCACAGA | | 2510-2532 |
| AD-1646625 | UGCCAUUUUUGCACAGUGUUA | | UAACACUGUGCAAAAAUGGCAUU | | 2629-2651 |
| AD-1646626 | UAACUACUGUGUGAGGAAUUA | | UAAUUCCUCACACAGUAGUUAGU | | 2985-3007 |
| AD-1646627 | ACUUGUGUGUAAAUUCUACUA | | UAGUAGAAUUUACACACAAGUGC | | 2923-2945 |
| AD-1646628 | GAUAGAAAGACUUGUUUAUAA | | UUAUAAACAAGUCUUUCUAUCUG | | 2431-2453 |
| AD-1646629 | AAGCUCUUCUUGGAACAAGCA | | UGCUUGUUCCAAGAAGAGCUUAA | | 2311-2333 |
| AD-1646630 | CCACAGAAGAUGUUACUUGCA | | UGCAAGUAACAUCUUCUGUGGAU | | 2663-2685 |
| AD-1646631 | UCUGUCAAUUGAAGACAGGAA | | UUCCUGUCUUCAAUUGACAGAGU | | 2523-2545 |
| AD-1646632 | GAAACAGUUCAGAUUACUGCA | | UGCAGUAAUCUGAACUGUUUCUC | | 2565-2587 |
| AD-1646633 | AUUGAGCUAAUGAUUCAUUGA | | UCAAUGAAUCAUUAGCUCAAUAA | | 2772-2794 |
| AD-1646634 | CCUUUUGCUUUCCAGAGAAAA | | UUUUCUCUGGAAAGCAAAAGGAA | | 2195-2217 |
| AD-1646635 | GUGAUGCAUCUUUAGAUUUUA | | UAAAAUCUAAAGAUGCAUCACAC | | 1990-2012 |
| AD-1646636 | AAUCCUCGUCUGAAUCAUCCA | | UGGAUGAUUCAGACGAGGAUUGU | | 1797-1819 |
| AD-1646637 | AAAGUUAGCACUUGUGUGUAA | | UUACACACAAGUGCUAACUUUCA | | 2914-2936 |
| AD-1646638 | AAUUACAAAAUCCACAGAAGA | | UCUUCUGUGGAUUUUGUAAUUCC | | 2652-2674 |
| AD-1646639 | AUGACAGUUUGUCAAGACAUA | | UAUGUCUUGACAAACUGUCAUUC | | 2171-2193 |
| AD-1646640 | GGGCAGAUCUUAAAUAAAAUA | | UAUUUUAUUUAAGAUCUGCCCAG | | 2722-2744 |
| AD-1646641 | GAUUAAAAUCGAUCAUCGUGA | | UCACGAUGAUCGAUUUUAAUCCC | | 2098-2120 |
| AD-1646642 | UUGCUGAUGUUCCUUGUUGUA | | UACAACAAGGAACAUCAGCAAGC | | 1884-1906 |
| AD-1646643 | CUACCUCACACUGUGCAUUUA | | UAAAUGCACAGUGUGAGGUAGAA | | 2403-2425 |
| AD-1646644 | GUAUCAAUAUUAGUUGGAAGA | | UCUUCCAACUAAUAUUGAUACAU | | 2468-2490 |
| AD-1646645 | AGAUUACUGCACAUGUGGAUA | | UAUCCACAUGUGCAGUAAUCUGA | | 2575-2597 |
| AD-1646646 | GAGGGAUUUCUACCUCACACA | | UGUGUGAGGUAGAAAUCCCUCAG | | 2394-2416 |
| AD-1646647 | UGAAGACAGGACAUUAAAAGA | | UCUUUUAAUGUCCUGUCUUCAAU | | 2532-2554 |
| AD-1646648 | GAGGAGAUCUGUGUUUACUUA | | UAAGUAAACACAGAUCUCCUCGU | | 1746-1768 |
| AD-1646649 | ACUCUGGUGCAACUAACUACA | | UGUAGUUAGUUGCACCAGAGUAU | | 2972-2994 |
| AD-1646650 | CACCUUGCUUUCCUUGUGUAA | | UUACACAAGGAAAGCAAGGUGGG | | 2333-2355 |
| AD-1646651 | UCCGUAGUCUCCUUCUACGUA | | UACGUAGAAGGAGACUACGGACG | | 950-972 |
| AD-1646652 | UUGCUGGUGAAAGUUAGCACA | | UGUGCUAACUUUCACCAGCAAAU | | 2905-2927 |
| AD-1646653 | CUCCUUCUUCUGCGAGCUGUA | | UACAGCUCGCAGAAGAAGGAGCC | | 646-668 |
| AD-1646654 | GGAAUUGGUCCAUGUGCAAUA | | UAUUGCACAUGGACCAAUUCCUC | | 2999-3021 |
| AD-1646655 | UGAAUCAUCCGAGGCAAAGAA | | UUCUUUGCCUCGGAUGAUUCAGA | | 1807-1829 |
| AD-1646656 | AAAGCAAAGAGAAAGGAUGGA | | UCCAUCCUUUCUCUUUGCUUUCA | | 2254-2276 |
| AD-1646657 | UCUUUUGUGUGUGCGUGUGAA | | UUCACACGCACACACAAAAGAAG | | 1974-1996 |
| AD-1646658 | GCAUUUGCACAGCAGAUAGAA | | UUCUAUCUGCUGUGCAAAUGCAC | | 2417-2439 |
| AD-1646659 | AGGAAAGUUUGGGAAGGGAUA | | UAUCCCUUCCCAAACUUUCCUUU | | 1853-1875 |
| AD-1646660 | AGCCUCUCUCUGUGACAUGUA | | UACAUGUCACAGAGAGAGGCUCU | | 2500-2522 |
| AD-1646661 | GGGCGUCUUCACGCUCUGCUA | | UAGCAGAGCGUGAAGACGCCCAU | | 1255-1277 |
| AD-1646662 | AGAAAGGAUGGAGGCAAAAUA | | UAUUUUGCCUCCAUCCUUUCUCU | | 2263-2285 |
| AD-1646663 | GACAUUAAAAGAGAGCGAGAA | | UUCUCGCUCUCUUUUAAUGUCCU | | 2541-2563 |
| AD-1646664 | CGGGAACAGGAACACACUACA | | UGUAGUGUGUUCCUGUUCCCGGG | | 2134-2156 |
| AD-1646665 | AGAGAGGAGAAUGACAGUUUA | | UAAACUGUCAUUCUCCUCUCUCU | | 2161-2183 |
| AD-1646666 | CUGCGACUUCGUCACCAACCA | | UGGUUGGUGACGAAGUCGCAGCA | | 910-932 |
| AD-1646667 | GCCCUUCUUCCUGGCCAACGA | | UCGUUGGCCAGGAAGAAGGGCAG | | 1279-1301 |
| AD-1646668 | UAAGACCGAUAGCAGGUGAAA | | UUUCACCUGCUAUCGGUCUUAAG | | 1765-1787 |
| AD-1646669 | GGUGAAGAAGAUCGACAGCUA | | UAGCUGUCGAUCUUCUUCACCUG | | 1027-1049 |
| AD-1646670 | CACGUGAAUUUGCUGGUGAAA | | UUUCACCAGCAAAUUCACGUGGG | | 2896-2918 |
| AD-1646671 | AGCGAGAGAGAGAAACAGUUA | | UAACUGUUUCUCUCUCUCGCUCU | | 2554-2576 |
| AD-1646672 | GAGGCAAAGAGAAAAGCCACA | | UGUGGCUUUUCUCUUUGCCUCGG | | 1817-1839 |
| AD-1646673 | GCCCAUCCUCAUGCACUGGUA | | UACCAGUGCAUGAGGAUGGGCAG | | 841-863 |
| AD-1646674 | ACCCUGUGUGUCAUUGCCCUA | | UAGGGCAAUGACACACAGGGUCU | | 707-729 |
| AD-1646675 | UAGCAGGUGAACUCGAAGCCA | | UGGCUUCGAGUUCACCUGCUAUC | | 1774-1796 |
| AD-1646676 | GCGCUCAUCGUGCUGCUCAUA | | UAUGAGCAGCACGAUGAGCGCCA | | 461-483 |
| AD-1646677 | CUGUGCAUCAUGGCCUUCGUA | | UACGAAGGCCAUGAUGCACAGGG | | 974-996 |
| AD-1646678 | CCCAUCCCUUUCCCGGGAACA | | UGUUCCCGGGAAAGGGAUGGGAG | | 2121-2143 |
| AD-1646679 | CCUCGGAAUCCAAGGUGUAGA | | UCUACACCUUGGAUUCCGAGGCG | | 1680-1702 |
| AD-1646680 | GAAGCCCACAAUCCUCGUCUA | | UAGACGAGGAUUGUGGGCUUCGA | | 1788-1810 |
| AD-1646681 | AUGGCCUUCGUGUACCUGCGA | | UCGCAGGUACACGAAGGCCAUGA | | 983-1005 |
| AD-1646682 | UUAUGUCCAAGUGCCCACGUA | | UACGUGGGCACUUGGACAUAAAA | | 2881-2903 |
| AD-1646683 | GACACUCUCUGAGAGGACCGA | | UCGGUCCUCUCAGAGAGUGUCAA | | 2032-2054 |
| AD-1646684 | GACGACGACGAUGUCGUCGGA | | UCCGACGACAUCGUCGUCGUCGU | | 1556-1578 |
| AD-1646685 | AUCGUGGCUCCCAUCCCUUUA | | UAAAGGGAUGGGAGCCACGAUGA | | 2112-2134 |
| AD-1646686 | CUGGUGUCCUUCCUGCCCAUA | | UAUGGGCAGGAAGGACACCAGGG | | 827-849 |
| AD-1646687 | AAGGGAGAAGCAUUAGGAGGA | | UCCUCCUAAUGCUUCUCCCUUCC | | 2077-2099 |
| AD-1646688 | CGCUGUCUCAGCAGUGGACAA | | UUGUCCACUGCUGAGACAGCGGC | | 420-442 |
| AD-1646689 | UACGCCAACUCGGCCUUCAAA | | UUUGAAGGCCGAGUUGGCGUAGC | | 1364-1386 |
| AD-1646690 | CUCGCCAUCACCUCGCCCUUA | | UAAGGGCGAGGUGAUGGCGAGGU | | 737-759 |
| AD-1646691 | GUCCGGCCUUCUUUUGUGUGA | | UCACACAAAAGAAGGCCGGACCA | | 1965-1987 |
| AD-1646692 | AUCGCCUCGUCCGUAGUCUCA | | UGAGACUACGGACGAGGCGAUGG | | 941-963 |
| AD-1646693 | CGGGCAAUGUGCUGGUGAUCA | | UGAUCACCAGCACAUUGCCCGCC | | 486-508 |
| AD-1646694 | CUUCUUCAACUGGCUGGGCUA | | UAGCCCAGCCAGUUGAAGAAGAC | | 1345-1367 |
| AD-1646695 | CUUGUGUAGGGCAAACCCGCA | | UGCGGGUUUGCCCUACACAAGGA | | 2345-2367 |
| AD-1646696 | GGCCAACGUGGUGAAGGCCUA | | UAGGCCUUCACCACGUUGGCCAG | | 1291-1313 |
| AD-1646697 | GGAGUACGGCUCCUUCUUCUA | | UAGAAGAAGGAGCCGUACUCCCA | | 637-659 |
| AD-1646698 | GCCCAGAAGCAGGUGAAGAAA | | UUUCUUCACCUGCUUCUGGGCCU | | 1016-1038 |
| AD-1646699 | CAGAAGGCGCUCAAGACGCUA | | UAGCGUCUUGAGCGCCUUCUGCU | | 1223-1245 |
| AD-1646700 | UUCCGCUACCAGAGCCUGCUA | | UAGCAGGCUCUGGUAGCGGAAGG | | 755-777 |
| AD-1646701 | CUUCCGCAAGGCCUUCCAGGA | | UCCUGGAAGGCCUUGCGGAAGUC | | 1411-1433 |
| AD-1646702 | GAGUGGAAGAUGGGUGGGUUA | | UAACCCACCCAUCUUCCACUCCG | | 2052-2074 |
| AD-1646703 | GGCCAGCAUCGAGACCCUGUA | | UACAGGGUCUCGAUGCUGGCCGU | | 694-716 |
| AD-1646704 | CUGCUGGCUGCCCUUCUUCCA | | UGGAAGAAGGGCAGCCAGCAGAG | | 1270-1292 |
| AD-1646705 | GACCGCUACCUCGCCAUCACA | | UGUGAUGGCGAGGUAGCGGUCCA | | 728-750 |
| AD-1646706 | CGUGGCCAUCGCCAAGACGCA | | UGCGUCUUGGCGAUGGCCACGAU | | 505-527 |
| AD-1646707 | AUGGGUCUGCUGAUGGCGCUA | | UAGCGCCAUCAGCAGACCCAUGC | | 446-468 |
| AD-1646708 | GGGCAUCAUCAUGGGCGUCUA | | UAGACGCCCAUGAUGAUGCCCAG | | 1243-1265 |
| AD-1646709 | GAACACACUACCAGCCAGAGA | | UCUCUGGCUGGUAGUGUGUUCCU | | 2143-2165 |
| AD-1646710 | AUUGCCCUGGACCGCUACCUA | | UAGGUAGCGGUCCAGGGCAAUGA | | 719-741 |
| AD-1646711 | AUCUCGGCCCUGGUGUCCUUA | | UAAGGACACCAGGGCCGAGAUGG | | 818-840 |
| AD-1646712 | AGCUGCGAGCGCCGUUUCCUA | | UAGGAAACGGCGCUCGCAGCUGU | | 1043-1065 |
| AD-1646713 | CAUCAUCUACUGCCGCAGCCA | | UGGCUGCGGCAGUAGAUGAUGGG | | 1387-1409 |
| AD-1646714 | GCAGACGCUCACCAACCUCUA | | UAGAGGUUGGUGAGCGUCUGCAG | | 532-554 |
| AD-1646715 | CUUCCAGGGACUGCUCUGCUA | | UAGCAGAGCAGUCCCUGGAAGGC | | 1423-1445 |
| AD-1646716 | CUUCAUCAUGUCCCUGGCCAA | | UUGGCCAGGGACAUGAUGAAGAG | | 550-572 |
| AD-1646717 | AAACAUGCUGAAGUCCCGGCA | | UGCCGGGACUUCAGCAUGUUUCU | | 3-23 |
| AD-1646718 | AAGGCCUUCCACCGCGAGCUA | | UAGCUCGCGGUGGAAGGCCUUCA | | 1304-1326 |
| AD-1646719 | CAGGCGCAGAGCCUCUCUCUA | | UAGAGAGAGGCUCUGCGCCUGGU | | 2491-2513 |
| AD-1646720 | CGAGCCCGGUAACCUGUCGUA | | UACGACAGGUUACCGGGCUCGGA | | 298-320 |
| AD-1646721 | CUGUGGACCUCAGUGGACGUA | | UACGUCCACUGAGGUCCACAGCU | | 662-684 |
| AD-1646722 | GCCACGGACCGUUGCACAAAA | | UUUUGUGCAACGGUCCGUGGCUU | | 1832-1854 |
| AD-1646723 | ACCUCGCCCUUCCGCUACCAA | | UUGGUAGCGGAAGGGCGAGGUGA | | 746-768 |
| AD-1646724 | UCAAGACGCUGGGCAUCAUCA | | UGAUGAUGCCCAGCGUCUUGAGC | | 1233-1255 |
| AD-1646725 | GGAGAGUGGCUUGCUGAUGUA | | UACAUCAGCAAGCCACUCUCCCA | | 1874-1896 |
| AD-1646726 | CUGCUCAUCGUGGCGGGCAAA | | UUUGCCCGCCACGAUGAGCAGCA | | 473-495 |
| AD-1646727 | ACCAGCCAGAGAGAGGAGAAA | | UUUCUCCUCUCUCUGGCUGGUAG | | 2152-2174 |
| AD-1646728 | GCUGGUGAUCGUGGCCAUCGA | | UCGAUGGCCACGAUCACCAGCAC | | 496-518 |
| AD-1646729 | AAGUCCCGGCGGCUCUUCCAA | | UUGGAAGAGCCGCCGGGACUUCA | | 13-33 |
| AD-1646730 | GGUCAGGCUGAGGGAUUUCUA | | UAGAAAUCCCUCAGCCUGACCAC | | 2385-2407 |
| AD-1646731 | UCAGUGGACGUGCUGUGCGUA | | UACGCACAGCACGUCCACUGAGG | | 671-693 |
| AD-1646732 | UACCUGCGGGUGUUCCGCGAA | | UUCGCGGAACACCCGCAGGUACA | | 995-1017 |
| AD-1646733 | UUUCUGUUUGUGGUCCGGCCA | | UGGCCGGACCACAAACAGAAAAA | | 1953-1975 |
| AD-1646734 | ACCAACCGGGCCUACGCCAUA | | UAUGGCGUAGGCCCGGUUGGUGA | | 923-945 |

TABLE 3
Modified Sense and Antisense Strand Sequences of ADRB1 dsRNA Agents Comprising an Unsaturated C₂₂
Hydrocarbon Chain Conjugated to Position 6 on the Sense Strand, Counting from the 5′-end of the
Sense Strand

| | | SEQ | | SEQ | | SEQ |
|---|---|---|---|---|---|---|
| Duplex | | ID | | ID | mRNA Target Sequence | ID |
| Name | Sense Sequence 5′ to 3′ | NO: | Antisense Sequence 5′ to 3′ | NO: | 5′ to 3′ | NO: |
| AD- | usasaau(Uda)CfuAfCfUfuccucuugs | | VPusAfscaaGfaGfGfaaguAfgAfauuua | | UGUAAAUUCUACUUCCUCUU | |
| 1646600 | usa | | scsa | | GUG | |
| AD- | asusuca(Ada)AfcUfCfUfacuucugus | | VPusAfsacaGfaAfGfuagaGfuUfugaau | | AAAUUCAAACUCUACUUCUG | |
| 1646601 | usa | | susu | | UUG | |
| AD- | uscscuu(Uda)AfuCfAfUfgguacugus | | VPusUfsacaGfuAfCfcaugAfuAfaagga | | ACUCCUUUAUCAUGGUACUG | |
| 1646602 | asa | | sgsu | | UAA | |
| AD- | asasgaa(Ada)UfgUfUfAfagcucuucs | | VPusAfsgaaGfaGfCfuuaaCfaUfuucuu | | UCAAGAAAUGUUAAGCUCUU | |
| 1646603 | usa | | sgsa | | CUU | |
| AD- | csusuuu(Uda)AfuAfCfUfccuuuaucs | | VPusUfsgauAfaAfGfgaguAfuAfaaaag | | ACCUUUUUAUACUCCUUUAU | |
| 1646604 | asa | | sgsu | | CAU | |
| AD- | asusugg(Gda)AfaAfAfUfaccuuuuus | | VPusUfsaaaAfaGfGfuauuUfuCfccaaus | | UCAUUGGGAAAAUACCUUUU | |
| 1646605 | asa | | gsa | | UAU | |
| AD- | asasgac(Ada)UfaUfUfUfccuuuugcs | | VPusAfsgcaAfaAfGfgaaaUfaUfgucuu | | UCAAGACAUAUUUCCUUUUG | |
| 1646606 | usa | | sgsa | | CUU | |
| AD- | csusacu(Uda)CfuGfUfUfgucuaguas | | VPusAfsuacUfaGfAfcaacAfgAfaguag | | CUCUACUUCUGUUGUCUAGU | |
| 1646607 | usa | | sasg | | AUG | |
| AD- | asgsugu(Uda)AfgGfAfAfuuacaaaas | | VPusAfsuuuUfgUfAfauucCfuAfacacu | | ACAGUGUUAGGAAUUACAAA | |
| 1646608 | usa | | sgsu | | AUC | |
| AD- | asuscac(Gda)UfuUfCfAfagaaaugus | | VPusAfsacaUfuUfCfuugaAfaCfgugau | | AAAUCACGUUUCAAGAAAUG | |
| 1646609 | usa | | susu | | UUA | |
| AD- | gsusggu(Uda)CfaAfAfAfugccauuus | | VPusAfsaaaUfgGfCfauuuUfgAfaccacs | | GAGUGGUUCAAAAUGCCAUU | |
| 1646610 | usa | | usc | | UUU | |
| AD- | csusugu(Uda)UfaUfAfUfuaaacagcs | | VPusAfsgcuGfuUfUfaauaUfaAfacaag | | GACUUGUUUAUAUUAAACAG | |
| 1646611 | usa | | susc | | CUU | |
| AD- | gsusguu(Uda)AfcUfUfAfagaccgaus | | VPusUfsaucGfgUfCfuuaaGfuAfaacacs | | CUGUGUUUACUUAAGACCGA | |
| 1646612 | asa | | asg | | UAG | |
| AD- | ususcca(Gda)AfgAfAfAfuuucauuus | | VPusAfsaaaUfgAfAfauuuCfuCfuggaa | | CUUUCCAGAGAAAUUUCAUU | |
| 1646613 | usa | | sasg | | UUA | |
| AD- | usgsuaa(Cda)UfgUfAfUfccauauuas | | VPusAfsuaaUfaUfGfgauaCfaGfuuacas | | ACUGUAACUGUAUCCAUAUU | |
| 1646614 | usa | | gsu | | AUA | |
| AD- | usgscug(Uda)UfaUfGfAfaagcaaags | | VPusUfscuuUfgCfUfuucaUfaAfcagca | | UCUGCUGUUAUGAAAGCAAA | |
| 1646615 | asa | | sgsa | | GAG | |
| AD- | usasgua(Uda)GfuUfAfUfugagcuaas | | VPusAfsuuaGfcUfCfaauaAfcAfuacuas | | UCUAGUAUGUUAUUGAGCUA | |
| 1646616 | usa | | gsa | | AUG | |
| AD- | ususuac(Cda)AfaGfUfAfuuuauacus | | VPusGfsaguAfuAfAfauacUfuGfguaaa | | GUUUUACCAAGUAUUUAUAC | |
| 1646617 | csa | | sasc | | UCU | |
| AD- | cscsucu(Uda)CfgUfCfUfucuucaacs | | VPusAfsguuGfaAfGfaagaCfgAfagagg | | CGCCUCUUCGUCUUCUUCAA | |
| 1646618 | usa | | scsg | | CUG | |
| AD- | gsusgca(Ada)UfaAfAfUfaccaaugas | | VPusUfsucaUfuGfGfuauuUfaUfugcac | | AUGUGCAAUAAAUACCAAUG | |
| 1646619 | asa | | sasu | | AAG | |
| AD- | csusugu(Gda)UfgUfUfUfuaccaagus | | VPusUfsacuUfgGfUfaaaaCfaCfacaags | | CUCUUGUGUGUUUUACCAAG | |
| 1646620 | asa | | asg | | UAU | |
| AD- | csascca(Ada)CfcUfCfUfucaucaugs | | VPusAfscauGfaUfGfaagaGfgUfuggug | | CUCACCAACCUCUUCAUCAU | |
| 1646621 | usa | | sasg | | GUC | |
| AD- | asgsuaa(Uda)GfaUfUfUfcugcuguus | | VPusUfsaacAfgCfAfgaaaUfcAfuuacus | | UAAGUAAUGAUUUCUGCUGU | |
| 1646622 | asa | | usa | | UAU | |
| AD- | gsgsugg(Uda)UfuUfUfGfacacucucs | | VPusAfsgagAfgUfGfucaaAfaAfccaccs | | CAGGUGGUUUUUGACACUCU | |
| 1646623 | usa | | usg | | CUG | |
| AD- | usgsuga(Cda)AfuGfUfGfacucugucs | | VPusUfsgacAfgAfGfucacAfuGfucaca | | UCUGUGACAUGUGACUCUGU | |
| 1646624 | asa | | sgsa | | CAA | |
| AD- | usgscca(Uda)UfuUfUfGfcacagugus | | VPusAfsacaCfuGfUfgcaaAfaAfuggcas | | AAUGCCAUUUUUGCACAGUG | |
| 1646625 | usa | | usu | | UUA | |
| AD- | usasacu(Ada)CfuGfUfGfugaggaaus | | VPusAfsauuCfcUfCfacacAfgUfaguuas | | ACUAACUACUGUGUGAGGAA | |
| 1646626 | usa | | gsu | | UUG | |
| AD- | ascsuug(Uda)GfuGfUfAfaauucuacs | | VPusAfsguaGfaAfUfuuacAfcAfcaagu | | GCACUUGUGUGUAAAUUCUA | |
| 1646627 | usa | | sgsc | | CUU | |
| AD- | gsasuag(Ada)AfaGfAfCfuuguuuaus | | VPusUfsauaAfaCfAfagucUfuUfcuauc | | CAGAUAGAAAGACUUGUUUA | |
| 1646628 | asa | | susg | | UAU | |
| AD- | asasgcu(Cda)UfuCfUfUfggaacaags | | VPusGfscuuGfuUfCfcaagAfaGfagcuu | | UUAAGCUCUUCUUGGAACAA | |
| 1646629 | csa | | sasa | | GCC | |
| AD- | cscsaca(Gda)AfaGfAfUfguuacuugs | | VPusGfscaaGfuAfAfcaucUfuCfugugg | | AUCCACAGAAGAUGUUACUU | |
| 1646630 | csa | | sasu | | GCA | |
| AD- | uscsugu(Cda)AfaUfUfGfaagacaggs | | VPusUfsccuGfuCfUfucaaUfuGfacagas | | ACUCUGUCAAUUGAAGACAG | |
| 1646631 | asa | | gsu | | GAC | |
| AD- | gsasaac(Ada)GfuUfCfAfgauuacugs | | VPusGfscagUfaAfUfcugaAfcUfguuuc | | GAGAAACAGUUCAGAUUACU | |
| 1646632 | csa | | susc | | GCA | |
| AD- | asusuga(Gda)CfuAfAfUfgauucauus | | VPusCfsaauGfaAfUfcauuAfgCfucaaus | | UUAUUGAGCUAAUGAUUCAU | |
| 1646633 | gsa | | asa | | UGG | |
| AD- | cscsuuu(Uda)GfcUfUfUfccagagaas | | VPusUfsuucUfcUfGfgaaaGfcAfaaagg | | UUCCUUUUGCUUUCCAGAGA | |
| 1646634 | asa | | sasa | | AAU | |
| AD- | gsusgau(Gda)CfaUfCfUfuuagauuus | | VPusAfsaaaUfcUfAfaagaUfgCfaucacs | | GUGUGAUGCAUCUUUAGAUU | |
| 1646635 | usa | | asc | | UUU | |
| AD- | asasucc(Uda)CfgUfCfUfgaaucaucs | | VPusGfsgauGfaUfUfcagaCfgAfggauu | | ACAAUCCUCGUCUGAAUCAU | |
| 1646636 | csa | | sgsu | | CCG | |
| AD- | asasagu(Uda)AfgCfAfCfuugugugus | | VPusUfsacaCfaCfAfagugCfuAfacuuus | | UGAAAGUUAGCACUUGUGUG | |
| 1646637 | asa | | csa | | UAA | |
| AD- | asasuua(Cda)AfaAfAfUfccacagaas | | VPusCfsuucUfgUfGfgauuUfuGfuaauu | | GGAAUUACAAAAUCCACAGA | |
| 1646638 | gsa | | ScSC | | AGA | |
| AD- | asusgac(Ada)GfuUfUfGfucaagacas | | VPusAfsuguCfuUfGfacaaAfcUfgucau | | GAAUGACAGUUUGUCAAGAC | |
| 1646639 | usa | | susc | | AUA | |
| AD- | gsgsgca(Gda)AfuCfUfUfaaauaaaas | | VPusAfsuuuUfaUfUfuaagAfuCfugccc | | CUGGGCAGAUCUUAAAUAAA | |
| 1646640 | usa | | sasg | | AUU | |
| AD- | gsasuua(Ada)AfaUfCfGfaucaucgus | | VPusCfsacgAfuGfAfucgaUfuUfuaauc | | GGGAUUAAAAUCGAUCAUCG | |
| 1646641 | gsa | | scsc | | UGG | |
| AD- | ususgcu(Gda)AfuGfUfUfccuuguug | | VPusAfscaaCfaAfGfgaacAfuCfagcaas | | GCUUGCUGAUGUUCCUUGUU | |
| 1646642 | susa | | gsc | | GUU | |
| AD- | csusacc(Uda)CfaCfAfCfugugcauus | | VPusAfsaauGfcAfCfagugUfgAfgguag | | UUCUACCUCACACUGUGCAU | |
| 1646643 | usa | | sasa | | UUG | |
| AD- | gsusauc(Ada)AfuAfUfUfaguuggaas | | VPusCfsuucCfaAfCfuaauAfuUfgauacs | | AUGUAUCAAUAUUAGUUGGA | |
| 1646644 | gsa | | asu | | AGG | |
| AD- | asgsauu(Ada)CfuGfCfAfcauguggas | | VPusAfsuccAfcAfUfgugcAfgUfaaucu | | UCAGAUUACUGCACAUGUGG | |
| 1646645 | usa | | sgsa | | AUA | |
| AD- | gsasggg(Ada)UfuUfCfUfaccucacas | | VPusGfsuguGfaGfGfuagaAfaUfcccuc | | CUGAGGGAUUUCUACCUCAC | |
| 1646646 | csa | | sasg | | ACU | |
| AD- | usgsaag(Ada)CfaGfGfAfcauuaaaas | | VPusCfsuuuUfaAfUfguccUfgUfcuuca | | AUUGAAGACAGGACAUUAAA | |
| 1646647 | gsa | | sasu | | AGA | |
| AD- | gsasgga(Gda)AfuCfUfGfuguuuacus | | VPusAfsaguAfaAfCfacagAfuCfuccucs | | ACGAGGAGAUCUGUGUUUAC | |
| 1646648 | usa | | gsu | | UUA | |
| AD- | ascsucu(Gda)GfuGfCfAfacuaacuas | | VPusGfsuagUfuAfGfuugcAfcCfagagu | | AUACUCUGGUGCAACUAACU | |
| 1646649 | csa | | sasu | | ACU | |
| AD- | csasccu(Uda)GfcUfUfUfccuugugus | | VPusUfsacaCfaAfGfgaaaGfcAfaggugs | | CCCACCUUGCUUUCCUUGUG | |
| 1646650 | asa | | gsg | | UAG | |
| AD- | uscscgu(Ada)GfuCfUfCfcuucuacgs | | VPusAfscguAfgAfAfggagAfcUfacgga | | CGUCCGUAGUCUCCUUCUAC | |
| 1646651 | usa | | scsg | | GUG | |
| AD- | ususgcu(Gda)GfuGfAfAfaguuagcas | | VPusGfsugcUfaAfCfuuucAfcCfagcaas | | AUUUGCUGGUGAAAGUUAGC | |
| 1646652 | csa | | asu | | ACU | |
| AD- | csusccu(Uda)CfuUfCfUfgcgagcugs | | VPusAfscagCfuCfGfcagaAfgAfaggag | | GGCUCCUUCUUCUGCGAGCU | |
| 1646653 | usa | | scSc | | GUG | |
| AD- | gsgsaau(Uda)GfgUfCfCfaugugcaas | | VPusAfsuugCfaCfAfuggaCfcAfauucc | | GAGGAAUUGGUCCAUGUGCA | |
| 1646654 | usa | | susc | | AUA | |
| AD- | usgsaau(Cda)AfuCfCfGfaggcaaags | | VPusUfscuuUfgCfCfucggAfuGfauuca | | UCUGAAUCAUCCGAGGCAAA | |
| 1646655 | asa | | sgsa | | GAG | |
| AD- | asasagc(Ada)AfaGfAfGfaaaggaugs | | VPusCfscauCfcUfUfucucUfuUfgcuuu | | UGAAAGCAAAGAGAAAGGAU | |
| 1646656 | gsa | | scsa | | GGA | |
| AD- | uscsuuu(Uda)GfuGfUfGfugcgugug | | VPusUfscacAfcGfCfacacAfcAfaaagas | | CUUCUUUUGUGUGUGCGUGU | |
| 1646657 | sasa | | asg | | GAU | |
| AD- | gscsauu(Uda)GfcAfCfAfgcagauags | | VPusUfscuaUfcUfGfcuguGfcAfaaugc | | GUGCAUUUGCACAGCAGAUA | |
| 1646658 | asa | | sasc | | GAA | |
| AD- | asgsgaa(Ada)GfuUfUfGfggaagggas | | VPusAfsuccCfuUfCfccaaAfcUfuuccus | | AAAGGAAAGUUUGGGAAGGG | |
| 1646659 | usa | | usu | | AUG | |
| AD- | asgsccu(Cda)UfcUfCfUfgugacaugs | | VPusAfscauGfuCfAfcagaGfaGfaggcu | | AGAGCCUCUCUCUGUGACAU | |
| 1646660 | usa | | scsu | | GUG | |
| AD- | gsgsgcg(Uda)CfuUfCfAfcgcucugcs | | VPusAfsgcaGfaGfCfgugaAfgAfcgccc | | AUGGGCGUCUUCACGCUCUG | |
| 1646661 | usa | | sasu | | CUG | |
| AD- | asgsaaa(Gda)GfaUfGfGfaggcaaaas | | VPusAfsuuuUfgCfCfuccaUfcCfuuucu | | AGAGAAAGGAUGGAGGCAAA | |
| 1646662 | usa | | scsu | | AUA | |
| AD- | gsascau(Uda)AfaAfAfGfagagcgags | | VPusUfscucGfcUfCfucuuUfuAfauguc | | AGGACAUUAAAAGAGAGCGA | |
| 1646663 | asa | | scsu | | GAG | |
| AD- | csgsgga(Ada)CfaGfGfAfacacacuas | | VPusGfsuagUfgUfGfuuccUfgUfucccg | | CCCGGGAACAGGAACACACU | |
| 1646664 | csa | | sgsg | | ACC | |
| AD- | asgsaga(Gda)GfaGfAfAfugacaguus | | VPusAfsaacUfgUfCfauucUfcCfucucus | | AGAGAGAGGAGAAUGACAGU | |
| 1646665 | usa | | csu | | UUG | |
| AD- | csusgcg(Ada)CfuUfCfGfucaccaacs | | VPusGfsguuGfgUfGfacgaAfgUfcgcag | | UGCUGCGACUUCGUCACCAA | |
| 1646666 | csa | | scsa | | CCG | |
| AD- | gscsccu(Uda)CfuUfCfCfuggccaacs | | VPusCfsguuGfgCfCfaggaAfgAfagggc | | CUGCCCUUCUUCCUGGCCAA | |
| 1646667 | gsa | | sasg | | CGU | |
| AD- | usasaga(Cda)CfgAfUfAfgcaggugas | | VPusUfsucaCfcUfGfcuauCfgGfucuua | | CUUAAGACCGAUAGCAGGUG | |
| 1646668 | asa | | sasg | | AAC | |
| AD- | gsgsuga(Ada)GfaAfGfAfucgacagcs | | VPusAfsgcuGfuCfGfaucuUfcUfucacc | | CAGGUGAAGAAGAUCGACAG | |
| 1646669 | usa | | susg | | CUG | |
| AD- | csascgu(Gda)AfaUfUfUfgcuggugas | | VPusUfsucaCfcAfGfcaaaUfuCfacgugs | | CCCACGUGAAUUUGCUGGUG | |
| 1646670 | asa | | gsg | | AAA | |
| AD- | asgscga(Gda)AfgAfGfAfgaaacagus | | VPusAfsacuGfuUfUfcucuCfuCfucgcu | | AGAGCGAGAGAGAGAAACAG | |
| 1646671 | usa | | scsu | | UUC | |
| AD- | gsasggc(Ada)AfaGfAfGfaaaagccas | | VPusGfsuggCfuUfUfucucUfuUfgccuc | | CCGAGGCAAAGAGAAAAGCC | |
| 1646672 | csa | | sgsg | | ACG | |
| AD- | gscscca(Uda)CfcUfCfAfugcacuggs | | VPusAfsccaGfuGfCfaugaGfgAfugggc | | CUGCCCAUCCUCAUGCACUG | |
| 1646673 | usa | | sasg | | GUG | |
| AD- | ascsccu(Gda)UfgUfGfUfcauugcccs | | VPusAfsgggCfaAfUfgacaCfaCfagggu | | AGACCCUGUGUGUCAUUGCC | |
| 1646674 | usa | | scsu | | CUG | |
| AD- | usasgca(Gda)GfuGfAfAfcucgaagcs | | VPusGfsgcuUfcGfAfguucAfcCfugcua | | GAUAGCAGGUGAACUCGAAG | |
| 1646675 | csa | | susc | | CCC | |
| AD- | gscsgcu(Cda)AfuCfGfUfgcugcucas | | VPusAfsugaGfcAfGfcacgAfuGfagcgc | | UGGCGCUCAUCGUGCUGCUC | |
| 1646676 | usa | | scsa | | AUC | |
| AD- | csusgug(Cda)AfuCfAfUfggccuucgs | | VPusAfscgaAfgGfCfcaugAfuGfcacag | | CCCUGUGCAUCAUGGCCUUC | |
| 1646677 | usa | | sgsg | | GUG | |
| AD- | cscscau(Cda)CfcUfUfUfcccgggaasc | | VPusGfsuucCfcGfGfgaaaGfgGfauggg | | CUCCCAUCCCUUUCCCGGGA | |
| 1646678 | sa | | sasg | | ACA | |
| AD- | cscsucg(Gda)AfaUfCfCfaagguguas | | VPusCfsuacAfcCfUfuggaUfuCfcgagg | | CGCCUCGGAAUCCAAGGUGU | |
| 1646679 | gsa | | scsg | | AGG | |
| AD- | gsasagc(Cda)CfaCfAfAfuccucgucs | | VPusAfsgacGfaGfGfauugUfgGfgcuuc | | UCGAAGCCCACAAUCCUCGU | |
| 1646680 | usa | | sgsa | | CUG | |
| AD- | asusggc(Cda)UfuCfGfUfguaccugcs | | VPusCfsgcaGfgUfAfcacgAfaGfgccaus | | UCAUGGCCUUCGUGUACCUG | |
| 1646681 | gsa | | gsa | | CGG | |
| AD- | ususaug(Uda)CfcAfAfGfugcccacgs | | VPusAfscguGfgGfCfacuuGfgAfcauaa | | UUUUAUGUCCAAGUGCCCAC | |
| 1646682 | usa | | sasa | | GUG | |
| AD- | gsascac(Uda)CfuCfUfGfagaggaccs | | VPusCfsgguCfcUfCfucagAfgAfguguc | | UUGACACUCUCUGAGAGGAC | |
| 1646683 | gsa | | sasa | | CGG | |
| AD- | gsascga(Cda)GfaCfGfAfugucgucgs | | VPusCfscgaCfgAfCfaucgUfcGfucgucs | | ACGACGACGACGAUGUCGUC | |
| 1646684 | gsa | | gsu | | GGG | |
| AD- | asuscgu(Gda)GfcUfCfCfcaucccuus | | VPusAfsaagGfgAfUfgggaGfcCfacgau | | UCAUCGUGGCUCCCAUCCCU | |
| 1646685 | usa | | sgsa | | UUC | |
| AD- | csusggu(Gda)UfcCfUfUfccugcccas | | VPusAfsuggGfcAfGfgaagGfaCfaccag | | CCCUGGUGUCCUUCCUGCCC | |
| 1646686 | usa | | sgsg | | AUC | |
| AD- | asasggg(Ada)GfaAfGfCfauuaggags | | VPusCfscucCfuAfAfugcuUfcUfcccuu | | GGAAGGGAGAAGCAUUAGGA | |
| 1646687 | gsa | | scSC | | GGG | |
| AD- | csgscug(Uda)CfuCfAfGfcaguggacs | | VPusUfsgucCfaCfUfgcugAfgAfcagcg | | GCCGCUGUCUCAGCAGUGGA | |
| 1646688 | asa | | sgsc | | CAG | |
| AD- | usascgc(Cda)AfaCfUfCfggccuucas | | VPusUfsugaAfgGfCfcgagUfuGfgcgua | | GCUACGCCAACUCGGCCUUC | |
| 1646689 | asa | | sgsc | | AAC | |
| AD- | csuscgc(Cda)AfuCfAfCfcucgcccus | | VPusAfsaggGfcGfAfggugAfuGfgcgag | | ACCUCGCCAUCACCUCGCCC | |
| 1646690 | usa | | sgsu | | UUC | |
| AD- | gsusccg(Gda)CfcUfUfCfuuuugugus | | VPusCfsacaCfaAfAfagaaGfgCfcggacs | | UGGUCCGGCCUUCUUUUGUG | |
| 1646691 | gsa | | csa | | UGU | |
| AD- | asuscgc(Cda)UfcGfUfCfcguagucus | | VPusGfsagaCfuAfCfggacGfaGfgcgau | | CCAUCGCCUCGUCCGUAGUC | |
| 1646692 | csa | | sgsg | | UCC | |
| AD- | csgsggc(Ada)AfuGfUfGfcuggugaus | | VPusGfsaucAfcCfAfgcacAfuUfgcccgs | | GGCGGGCAAUGUGCUGGUGA | |
| 1646693 | csa | | CSC | | UCG | |
| AD- | csusucu(Uda)CfaAfCfUfggcugggcs | | VPusAfsgccCfaGfCfcaguUfgAfagaags | | GUCUUCUUCAACUGGCUGGG | |
| 1646694 | usa | | asc | | CUA | |
| AD- | csusugu(Gda)UfaGfGfGfcaaacccgs | | VPusGfscggGfuUfUfgcccUfaCfacaags | | UCCUUGUGUAGGGCAAACCC | |
| 1646695 | csa | | gsa | | GCU | |
| AD- | gsgscca(Ada)CfgUfGfGfugaaggccs | | VPusAfsggcCfuUfCfaccaCfgUfuggccs | | CUGGCCAACGUGGUGAAGGC | |
| 1646696 | usa | | asg | | CUU | |
| AD- | gsgsagu(Ada)CfgGfCfUfccuucuucs | | VPusAfsgaaGfaAfGfgagcCfgUfacuccs | | UGGGAGUACGGCUCCUUCUU | |
| 1646697 | usa | | csa | | CUG | |
| AD- | gscscca(Gda)AfaGfCfAfggugaagas | | VPusUfsucuUfcAfCfcugcUfuCfugggc | | AGGCCCAGAAGCAGGUGAAG | |
| 1646698 | asa | | scsu | | AAG | |
| AD- | csasgaa(Gda)GfcGfCfUfcaagacgcs | | VPusAfsgcgUfcUfUfgagcGfcCfuucug | | AGCAGAAGGCGCUCAAGACG | |
| 1646699 | usa | | scsu | | CUG | |
| AD- | ususccg(Cda)UfaCfCfAfgagccugcs | | VPusAfsgcaGfgCfUfcuggUfaGfcggaa | | CCUUCCGCUACCAGAGCCUG | |
| 1646700 | usa | | sgsg | | CUG | |
| AD- | csusucc(Gda)CfaAfGfGfccuuccags | | VPusCfscugGfaAfGfgccuUfgCfggaag | | GACUUCCGCAAGGCCUUCCA | |
| 1646701 | gsa | | susc | | GGG | |
| AD- | gsasgug(Gda)AfaGfAfUfgggugggu | | VPusAfsaccCfaCfCfcaucUfuCfcacucs | | CGGAGUGGAAGAUGGGUGGG | |
| 1646702 | susa | | csg | | UUA | |
| AD- | gsgscca(Gda)CfaUfCfGfagacccugs | | VPusAfscagGfgUfCfucgaUfgCfuggcc | | ACGGCCAGCAUCGAGACCCU | |
| 1646703 | usa | | sgsu | | GUG | |
| AD- | csusgcu(Gda)GfcUfGfCfccuucuucs | | VPusGfsgaaGfaAfGfggcaGfcCfagcags | | CUCUGCUGGCUGCCCUUCUU | |
| 1646704 | csa | | asg | | CCU | |
| AD- | gsasccg(Cda)UfaCfCfUfcgccaucasc | | VPusGfsugaUfgGfCfgaggUfaGfcgguc | | UGGACCGCUACCUCGCCAUC | |
| 1646705 | sa | | scsa | | ACC | |
| AD- | csgsugg(Cda)CfaUfCfGfccaagacgs | | VPusGfscguCfuUfGfgcgaUfgGfccacg | | AUCGUGGCCAUCGCCAAGAC | |
| 1646706 | csa | | sasu | | GCC | |
| AD- | asusggg(Uda)CfuGfCfUfgauggcgcs | | VPusAfsgcgCfcAfUfcagcAfgAfcccaus | | GCAUGGGUCUGCUGAUGGCG | |
| 1646707 | usa | | gsc | | CUC | |
| AD- | gsgsgca(Uda)CfaUfCfAfugggcgucs | | VPusAfsgacGfcCfCfaugaUfgAfugcccs | | CUGGGCAUCAUCAUGGGCGU | |
| 1646708 | usa | | asg | | CUU | |
| AD- | gsasaca(Cda)AfcUfAfCfcagccagasg | | VPusCfsucuGfgCfUfgguaGfuGfuguuc | | AGGAACACACUACCAGCCAG | |
| 1646709 | sa | | scsu | | AGA | |
| AD- | asusugc(Cda)CfuGfGfAfccgcuaccs | | VPusAfsgguAfgCfGfguccAfgGfgcaau | | UCAUUGCCCUGGACCGCUAC | |
| 1646710 | usa | | sgsa | | CUC | |
| AD- | asuscuc(Gda)GfcCfCfUfgguguccus | | VPusAfsaggAfcAfCfcaggGfcCfgagau | | CCAUCUCGGCCCUGGUGUCC | |
| 1646711 | usa | | sgsg | | UUC | |
| AD- | asgscug(Cda)GfaGfCfGfccguuuccs | | VPusAfsggaAfaCfGfgcgcUfcGfcagcu | | ACAGCUGCGAGCGCCGUUUC | |
| 1646712 | usa | | sgsu | | CUC | |
| AD- | csasuca(Uda)CfuAfCfUfgccgcagcs | | VPusGfsgcuGfcGfGfcaguAfgAfugaug | | CCCAUCAUCUACUGCCGCAG | |
| 1646713 | csa | | sgsg | | CCC | |
| AD- | gscsaga(Cda)GfcUfCfAfccaaccucsu | | VPusAfsgagGfuUfGfgugaGfcGfucugc | | CUGCAGACGCUCACCAACCU | |
| 1646714 | sa | | sasg | | CUU | |
| AD- | csusucc(Ada)GfgGfAfCfugcucugcs | | VPusAfsgcaGfaGfCfagucCfcUfggaags | | GCCUUCCAGGGACUGCUCUG | |
| 1646715 | usa | | gsc | | CUG | |
| AD- | csusuca(Uda)CfaUfGfUfcccuggccs | | VPusUfsggcCfaGfGfgacaUfgAfugaag | | CUCUUCAUCAUGUCCCUGGC | |
| 1646716 | asa | | sasg | | CAG | |
| AD- | asasaca(Uda)GfcUfGfAfagucccggs | | VPusGfsccgGfgAfCfuucaGfcAfuguuu | | AGAAACAUGCUGAAGUCCCG | |
| 1646717 | csa | | scsu | | GCG | |
| AD- | asasggc(Cda)UfuCfCfAfccgcgagcs | | VPusAfsgcuCfgCfGfguggAfaGfgccuu | | UGAAGGCCUUCCACCGCGAG | |
| 1646718 | usa | | scsa | | CUG | |
| AD- | csasggc(Gda)CfaGfAfGfccucucucs | | VPusAfsgagAfgAfGfgcucUfgCfgccug | | ACCAGGCGCAGAGCCUCUCU | |
| 1646719 | usa | | sgsu | | CUG | |
| AD- | csgsagc(Cda)CfgGfUfAfaccugucgs | | VPusAfscgaCfaGfGfuuacCfgGfgcucg | | UCCGAGCCCGGUAACCUGUC | |
| 1646720 | usa | | sgsa | | GUC | |
| AD- | csusgug(Gda)AfcCfUfCfaguggacgs | | VPusAfscguCfcAfCfugagGfuCfcacags | | AGCUGUGGACCUCAGUGGAC | |
| 1646721 | usa | | csu | | GUG | |
| AD- | gscscac(Gda)GfaCfCfGfuugcacaasa | | VPusUfsuugUfgCfAfacggUfcCfguggc | | AAGCCACGGACCGUUGCACA | |
| 1646722 | sa | | susu | | AAA | |
| AD- | ascscuc(Gda)CfcCfUfUfccgcuaccsa | | VPusUfsgguAfgCfGfgaagGfgCfgaggu | | UCACCUCGCCCUUCCGCUAC | |
| 1646723 | sa | | sgsa | | CAG | |
| AD- | uscsaag(Ada)CfgCfUfGfggcaucaus | | VPusGfsaugAfuGfCfccagCfgUfcuuga | | GCUCAAGACGCUGGGCAUCA | |
| 1646724 | csa | | sgsc | | UCA | |
| AD- | gsgsaga(Gda)UfgGfCfUfugcugaugs | | VPusAfscauCfaGfCfaagcCfaCfucuccs | | UGGGAGAGUGGCUUGCUGAU | |
| 1646725 | usa | | csa | | GUU | |
| AD- | csusgcu(Cda)AfuCfGfUfggcgggcas | | VPusUfsugcCfcGfCfcacgAfuGfagcags | | UGCUGCUCAUCGUGGCGGGC | |
| 1646726 | asa | | csa | | AAU | |
| AD- | ascscag(Cda)CfaGfAfGfagaggagas | | VPusUfsucuCfcUfCfucucUfgGfcuggu | | CUACCAGCCAGAGAGAGGAG | |
| 1646727 | asa | | sasg | | AAU | |
| AD- | gscsugg(Uda)GfaUfCfGfuggccaucs | | VPusCfsgauGfgCfCfacgaUfcAfccagcs | | GUGCUGGUGAUCGUGGCCAU | |
| 1646728 | gsa | | asc | | CGC | |
| AD- | asasguc(Cda)CfgGfCfGfgcucuuccs | | VPusUfsggaAfgAfGfccgcCfgGfgacuu | | UGAAGUCCCGGCGGCUCUUC | |
| 1646729 | asa | | scsa | | CAG | |
| AD- | gsgsuca(Gda)GfcUfGfAfgggauuucs | | VPusAfsgaaAfuCfCfcucaGfcCfugaccs | | GUGGUCAGGCUGAGGGAUUU | |
| 1646730 | usa | | asc | | CUA | |
| AD- | uscsagu(Gda)GfaCfGfUfgcugugcgs | | VPusAfscgcAfcAfGfcacgUfcCfacugas | | CCUCAGUGGACGUGCUGUGC | |
| 1646731 | usa | | gsg | | GUG | |
| AD- | usasccu(Gda)CfgGfGfUfguuccgcgs | | VPusUfscgcGfgAfAfcaccCfgCfagguas | | UGUACCUGCGGGUGUUCCGC | |
| 1646732 | asa | | csa | | GAG | |
| AD- | ususucu(Gda)UfuUfGfUfgguccggcs | | VPusGfsgccGfgAfCfcacaAfaCfagaaas | | UUUUUCUGUUUGUGGUCCGG | |
| 1646733 | csa | | asa | | CCU | |
| AD- | ascscaa(Cda)CfgGfGfCfcuacgccasu | | VPusAfsuggCfgUfAfggccCfgGfuuggu | | UCACCAACCGGGCCUACGCC | |
| 1646734 | sa | | sgsa | | AUC | |

TABLE 4
Unmodified Sense and Antisense Strand Sequences of ADRB1 dsRNA Agents Comprising a GalNAc
Conjugate Targeting Ligand

| | | | | SEQ | |
|---|---|---|---|---|---|
| | | SEQ | | ID | Range in |
| Duplex Name | Sense Sequence 5′ to 3′ | ID NO: | Antisense Sequence 5′ to 3′ | NO: | NM_000684.3 |
| AD-1637961 | AAACAUGCUGAAGUCCCGGCU | | AGCCGGGACUUCAGCAUGUUUCU | | 3-23 |
| AD-1637971 | AAGUCCCGGCGGCUCUUCCAU | | AUGGAAGAGCCGCCGGGACUUCA | | 13-33 |
| AD-1638021 | CGAGCCCGGUAACCUGUCGUU | | AACGACAGGUUACCGGGCUCGGA | | 298-320 |
| AD-1638051 | CGCUGUCUCAGCAGUGGACAU | | AUGUCCACUGCUGAGACAGCGGC | | 420-442 |
| AD-1638077 | AUGGGUCUGCUGAUGGCGCUU | | AAGCGCCAUCAGCAGACCCAUGC | | 446-468 |
| AD-1638092 | GCGCUCAUCGUGCUGCUCAUU | | AAUGAGCAGCACGAUGAGCGCCA | | 461-483 |
| AD-1638104 | CUGCUCAUCGUGGCGGGCAAU | | AUUGCCCGCCACGAUGAGCAGCA | | 473-495 |
| AD-1638117 | CGGGCAAUGUGCUGGUGAUCU | | AGAUCACCAGCACAUUGCCCGCC | | 486-508 |
| AD-1638127 | GCUGGUGAUCGUGGCCAUCGU | | ACGAUGGCCACGAUCACCAGCAC | | 496-518 |
| AD-1638136 | CGUGGCCAUCGCCAAGACGCU | | AGCGUCUUGGCGAUGGCCACGAU | | 505-527 |
| AD-1638154 | GCAGACGCUCACCAACCUCUU | | AAGAGGUUGGUGAGCGUCUGCAG | | 532-554 |
| AD-1638163 | CACCAACCUCUUCAUCAUGUU | | AACAUGAUGAAGAGGUUGGUGAG | | 541-563 |
| AD-1638172 | CUUCAUCAUGUCCCUGGCCAU | | AUGGCCAGGGACAUGAUGAAGAG | | 550-572 |
| AD-1638196 | GGAGUACGGCUCCUUCUUCUU | | AAGAAGAAGGAGCCGUACUCCCA | | 637-659 |
| AD-1638205 | CUCCUUCUUCUGCGAGCUGUU | | AACAGCUCGCAGAAGAAGGAGCC | | 646-668 |
| AD-1638221 | CUGUGGACCUCAGUGGACGUU | | AACGUCCACUGAGGUCCACAGCU | | 662-684 |
| AD-1638230 | UCAGUGGACGUGCUGUGCGUU | | AACGCACAGCACGUCCACUGAGG | | 671-693 |
| AD-1638253 | GGCCAGCAUCGAGACCCUGUU | | AACAGGGUCUCGAUGCUGGCCGU | | 694-716 |
| AD-1638266 | ACCCUGUGUGUCAUUGCCCUU | | AAGGGCAAUGACACACAGGGUCU | | 707-729 |
| AD-1638278 | AUUGCCCUGGACCGCUACCUU | | AAGGUAGCGGUCCAGGGCAAUGA | | 719-741 |
| AD-1638287 | GACCGCUACCUCGCCAUCACU | | AGUGAUGGCGAGGUAGCGGUCCA | | 728-750 |
| AD-1638296 | CUCGCCAUCACCUCGCCCUUU | | AAAGGGCGAGGUGAUGGCGAGGU | | 737-759 |
| AD-1638305 | ACCUCGCCCUUCCGCUACCAU | | AUGGUAGCGGAAGGGCGAGGUGA | | 746-768 |
| AD-1638314 | UUCCGCUACCAGAGCCUGCUU | | AAGCAGGCUCUGGUAGCGGAAGG | | 755-777 |
| AD-1638347 | AUCUCGGCCCUGGUGUCCUUU | | AAAGGACACCAGGGCCGAGAUGG | | 818-840 |
| AD-1638356 | CUGGUGUCCUUCCUGCCCAUU | | AAUGGGCAGGAAGGACACCAGGG | | 827-849 |
| AD-1638370 | GCCCAUCCUCAUGCACUGGUU | | AACCAGUGCAUGAGGAUGGGCAG | | 841-863 |
| AD-1638393 | CUGCGACUUCGUCACCAACCU | | AGGUUGGUGACGAAGUCGCAGCA | | 910-932 |
| AD-1638406 | ACCAACCGGGCCUACGCCAUU | | AAUGGCGUAGGCCCGGUUGGUGA | | 923-945 |
| AD-1638422 | AUCGCCUCGUCCGUAGUCUCU | | AGAGACUACGGACGAGGCGAUGG | | 941-963 |
| AD-1638431 | UCCGUAGUCUCCUUCUACGUU | | AACGUAGAAGGAGACUACGGACG | | 950-972 |
| AD-1638435 | CUGUGCAUCAUGGCCUUCGUU | | AACGAAGGCCAUGAUGCACAGGG | | 974-996 |
| AD-1638444 | AUGGCCUUCGUGUACCUGCGU | | ACGCAGGUACACGAAGGCCAUGA | | 983-1005 |
| AD-1638456 | UACCUGCGGGUGUUCCGCGAU | | AUCGCGGAACACCCGCAGGUACA | | 995-1017 |
| AD-1638474 | GCCCAGAAGCAGGUGAAGAAU | | AUUCUUCACCUGCUUCUGGGCCU | | 1016-1038 |
| AD-1638485 | GGUGAAGAAGAUCGACAGCUU | | AAGCUGUCGAUCUUCUUCACCUG | | 1027-1049 |
| AD-1638500 | AGCUGCGAGCGCCGUUUCCUU | | AAGGAAACGGCGCUCGCAGCUGU | | 1043-1065 |
| AD-1638529 | CAGAAGGCGCUCAAGACGCUU | | AAGCGUCUUGAGCGCCUUCUGCU | | 1223-1245 |
| AD-1638539 | UCAAGACGCUGGGCAUCAUCU | | AGAUGAUGCCCAGCGUCUUGAGC | | 1233-1255 |
| AD-1638549 | GGGCAUCAUCAUGGGCGUCUU | | AAGACGCCCAUGAUGAUGCCCAG | | 1243-1265 |
| AD-1638561 | GGGCGUCUUCACGCUCUGCUU | | AAGCAGAGCGUGAAGACGCCCAU | | 1255-1277 |
| AD-1638576 | CUGCUGGCUGCCCUUCUUCCU | | AGGAAGAAGGGCAGCCAGCAGAG | | 1270-1292 |
| AD-1638585 | GCCCUUCUUCCUGGCCAACGU | | ACGUUGGCCAGGAAGAAGGGCAG | | 1279-1301 |
| AD-1638597 | GGCCAACGUGGUGAAGGCCUU | | AAGGCCUUCACCACGUUGGCCAG | | 1291-1313 |
| AD-1638610 | AAGGCCUUCCACCGCGAGCUU | | AAGCUCGCGGUGGAAGGCCUUCA | | 1304-1326 |
| AD-1638631 | CCUCUUCGUCUUCUUCAACUU | | AAGUUGAAGAAGACGAAGAGGCG | | 1336-1358 |
| AD-1638640 | CUUCUUCAACUGGCUGGGCUU | | AAGCCCAGCCAGUUGAAGAAGAC | | 1345-1367 |
| AD-1638659 | UACGCCAACUCGGCCUUCAAU | | AUUGAAGGCCGAGUUGGCGUAGC | | 1364-1386 |
| AD-1638662 | CAUCAUCUACUGCCGCAGCCU | | AGGCUGCGGCAGUAGAUGAUGGG | | 1387-1409 |
| AD-1638666 | CUUCCGCAAGGCCUUCCAGGU | | ACCUGGAAGGCCUUGCGGAAGUC | | 1411-1433 |
| AD-1638678 | CUUCCAGGGACUGCUCUGCUU | | AAGCAGAGCAGUCCCUGGAAGGC | | 1423-1445 |
| AD-1638705 | GACGACGACGAUGUCGUCGGU | | ACCGACGACAUCGUCGUCGUCGU | | 1556-1578 |
| AD-1638732 | CCUCGGAAUCCAAGGUGUAGU | | ACUACACCUUGGAUUCCGAGGCG | | 1680-1702 |
| AD-1638752 | GAGGAGAUCUGUGUUUACUUU | | AAAGUAAACACAGAUCUCCUCGU | | 1746-1768 |
| AD-1638762 | GUGUUUACUUAAGACCGAUAU | | AUAUCGGUCUUAAGUAAACACAG | | 1756-1778 |
| AD-1638771 | UAAGACCGAUAGCAGGUGAAU | | AUUCACCUGCUAUCGGUCUUAAG | | 1765-1787 |
| AD-1638780 | UAGCAGGUGAACUCGAAGCCU | | AGGCUUCGAGUUCACCUGCUAUC | | 1774-1796 |
| AD-1638794 | GAAGCCCACAAUCCUCGUCUU | | AAGACGAGGAUUGUGGGCUUCGA | | 1788-1810 |
| AD-1638803 | AAUCCUCGUCUGAAUCAUCCU | | AGGAUGAUUCAGACGAGGAUUGU | | 1797-1819 |
| AD-1638813 | UGAAUCAUCCGAGGCAAAGAU | | AUCUUUGCCUCGGAUGAUUCAGA | | 1807-1829 |
| AD-1638823 | GAGGCAAAGAGAAAAGCCACU | | AGUGGCUUUUCUCUUUGCCUCGG | | 1817-1839 |
| AD-1638838 | GCCACGGACCGUUGCACAAAU | | AUUUGUGCAACGGUCCGUGGCUU | | 1832-1854 |
| AD-1638859 | AGGAAAGUUUGGGAAGGGAUU | | AAUCCCUUCCCAAACUUUCCUUU | | 1853-1875 |
| AD-1638876 | GGAGAGUGGCUUGCUGAUGUU | | AACAUCAGCAAGCCACUCUCCCA | | 1874-1896 |
| AD-1638886 | UUGCUGAUGUUCCUUGUUGUU | | AACAACAAGGAACAUCAGCAAGC | | 1884-1906 |
| AD-1638890 | UUUCUGUUUGUGGUCCGGCCU | | AGGCCGGACCACAAACAGAAAAA | | 1953-1975 |
| AD-1638902 | GUCCGGCCUUCUUUUGUGUGU | | ACACACAAAAGAAGGCCGGACCA | | 1965-1987 |
| AD-1638911 | UCUUUUGUGUGUGCGUGUGAU | | AUCACACGCACACACAAAAGAAG | | 1974-1996 |
| AD-1638927 | GUGAUGCAUCUUUAGAUUUUU | | AAAAAUCUAAAGAUGCAUCACAC | | 1990-2012 |
| AD-1638933 | GGUGGUUUUUGACACUCUCUU | | AAGAGAGUGUCAAAAACCACCUG | | 2022-2044 |
| AD-1638943 | GACACUCUCUGAGAGGACCGU | | ACGGUCCUCUCAGAGAGUGUCAA | | 2032-2054 |
| AD-1638961 | GAGUGGAAGAUGGGUGGGUUU | | AAACCCACCCAUCUUCCACUCCG | | 2052-2074 |
| AD-1638968 | AAGGGAGAAGCAUUAGGAGGU | | ACCUCCUAAUGCUUCUCCCUUCC | | 2077-2099 |
| AD-1638971 | GAUUAAAAUCGAUCAUCGUGU | | ACACGAUGAUCGAUUUUAAUCCC | | 2098-2120 |
| AD-1638985 | AUCGUGGCUCCCAUCCCUUUU | | AAAAGGGAUGGGAGCCACGAUGA | | 2112-2134 |
| AD-1638994 | CCCAUCCCUUUCCCGGGAACU | | AGUUCCCGGGAAAGGGAUGGGAG | | 2121-2143 |
| AD-1639007 | CGGGAACAGGAACACACUACU | | AGUAGUGUGUUCCUGUUCCCGGG | | 2134-2156 |
| AD-1639016 | GAACACACUACCAGCCAGAGU | | ACUCUGGCUGGUAGUGUGUUCCU | | 2143-2165 |
| AD-1639025 | ACCAGCCAGAGAGAGGAGAAU | | AUUCUCCUCUCUCUGGCUGGUAG | | 2152-2174 |
| AD-1639034 | AGAGAGGAGAAUGACAGUUUU | | AAAACUGUCAUUCUCCUCUCUCU | | 2161-2183 |
| AD-1639044 | AUGACAGUUUGUCAAGACAUU | | AAUGUCUUGACAAACUGUCAUUC | | 2171-2193 |
| AD-1639057 | AAGACAUAUUUCCUUUUGCUU | | AAGCAAAAGGAAAUAUGUCUUGA | | 2184-2206 |
| AD-1639068 | CCUUUUGCUUUCCAGAGAAAU | | AUUUCUCUGGAAAGCAAAAGGAA | | 2195-2217 |
| AD-1639077 | UUCCAGAGAAAUUUCAUUUUU | | AAAAAUGAAAUUUCUCUGGAAAG | | 2204-2226 |
| AD-1639087 | AGUAAUGAUUUCUGCUGUUAU | | AUAACAGCAGAAAUCAUUACUUA | | 2232-2254 |
| AD-1639099 | UGCUGUUAUGAAAGCAAAGAU | | AUCUUUGCUUUCAUAACAGCAGA | | 2244-2266 |
| AD-1639108 | AAAGCAAAGAGAAAGGAUGGU | | ACCAUCCUUUCUCUUUGCUUUCA | | 2254-2276 |
| AD-1639116 | AGAAAGGAUGGAGGCAAAAUU | | AAUUUUGCCUCCAUCCUUUCUCU | | 2263-2285 |
| AD-1639123 | AUCACGUUUCAAGAAAUGUUU | | AAACAUUUCUUGAAACGUGAUUU | | 2291-2313 |
| AD-1639133 | AAGAAAUGUUAAGCUCUUCUU | | AAGAAGAGCUUAACAUUUCUUGA | | 2301-2323 |
| AD-1639143 | AAGCUCUUCUUGGAACAAGCU | | AGCUUGUUCCAAGAAGAGCUUAA | | 2311-2333 |
| AD-1639145 | CACCUUGCUUUCCUUGUGUAU | | AUACACAAGGAAAGCAAGGUGGG | | 2333-2355 |
| AD-1639157 | CUUGUGUAGGGCAAACCCGCU | | AGCGGGUUUGCCCUACACAAGGA | | 2345-2367 |
| AD-1639174 | GGUCAGGCUGAGGGAUUUCUU | | AAGAAAUCCCUCAGCCUGACCAC | | 2385-2407 |
| AD-1639183 | GAGGGAUUUCUACCUCACACU | | AGUGUGAGGUAGAAAUCCCUCAG | | 2394-2416 |
| AD-1639192 | CUACCUCACACUGUGCAUUUU | | AAAAUGCACAGUGUGAGGUAGAA | | 2403-2425 |
| AD-1639206 | GCAUUUGCACAGCAGAUAGAU | | AUCUAUCUGCUGUGCAAAUGCAC | | 2417-2439 |
| AD-1639220 | GAUAGAAAGACUUGUUUAUAU | | AUAUAAACAAGUCUUUCUAUCUG | | 2431-2453 |
| AD-1639226 | CUUGUUUAUAUUAAACAGCUU | | AAGCUGUUUAAUAUAAACAAGUC | | 2441-2463 |
| AD-1639240 | GUAUCAAUAUUAGUUGGAAGU | | ACUUCCAACUAAUAUUGAUACAU | | 2468-2490 |
| AD-1639263 | CAGGCGCAGAGCCUCUCUCUU | | AAGAGAGAGGCUCUGCGCCUGGU | | 2491-2513 |
| AD-1639272 | AGCCUCUCUCUGUGACAUGUU | | AACAUGUCACAGAGAGAGGCUCU | | 2500-2522 |
| AD-1639282 | UGUGACAUGUGACUCUGUCAU | | AUGACAGAGUCACAUGUCACAGA | | 2510-2532 |
| AD-1639295 | UCUGUCAAUUGAAGACAGGAU | | AUCCUGUCUUCAAUUGACAGAGU | | 2523-2545 |
| AD-1639304 | UGAAGACAGGACAUUAAAAGU | | ACUUUUAAUGUCCUGUCUUCAAU | | 2532-2554 |
| AD-1639313 | GACAUUAAAAGAGAGCGAGAU | | AUCUCGCUCUCUUUUAAUGUCCU | | 2541-2563 |
| AD-1639321 | AGCGAGAGAGAGAAACAGUUU | | AAACUGUUUCUCUCUCUCGCUCU | | 2554-2576 |
| AD-1639332 | GAAACAGUUCAGAUUACUGCU | | AGCAGUAAUCUGAACUGUUUCUC | | 2565-2587 |
| AD-1639342 | AGAUUACUGCACAUGUGGAUU | | AAUCCACAUGUGCAGUAAUCUGA | | 2575-2597 |
| AD-1639362 | GUGGUUCAAAAUGCCAUUUUU | | AAAAAUGGCAUUUUGAACCACUC | | 2618-2640 |
| AD-1639373 | UGCCAUUUUUGCACAGUGUUU | | AAACACUGUGCAAAAAUGGCAUU | | 2629-2651 |
| AD-1639387 | AGUGUUAGGAAUUACAAAAUU | | AAUUUUGUAAUUCCUAACACUGU | | 2643-2665 |
| AD-1639396 | AAUUACAAAAUCCACAGAAGU | | ACUUCUGUGGAUUUUGUAAUUCC | | 2652-2674 |
| AD-1639407 | CCACAGAAGAUGUUACUUGCU | | AGCAAGUAACAUCUUCUGUGGAU | | 2663-2685 |
| AD-1639429 | GGGCAGAUCUUAAAUAAAAUU | | AAUUUUAUUUAAGAUCUGCCCAG | | 2722-2744 |
| AD-1639437 | AUUCAAACUCUACUUCUGUUU | | AAACAGAAGUAGAGUUUGAAUUU | | 2740-2762 |
| AD-1639446 | CUACUUCUGUUGUCUAGUAUU | | AAUACUAGACAACAGAAGUAGAG | | 2749-2771 |
| AD-1639460 | UAGUAUGUUAUUGAGCUAAUU | | AAUUAGCUCAAUAACAUACUAGA | | 2763-2785 |
| AD-1639469 | AUUGAGCUAAUGAUUCAUUGU | | ACAAUGAAUCAUUAGCUCAAUAA | | 2772-2794 |
| AD-1639485 | AUUGGGAAAAUACCUUUUUAU | | AUAAAAAGGUAUUUUCCCAAUGA | | 2788-2810 |
| AD-1639495 | CUUUUUAUACUCCUUUAUCAU | | AUGAUAAAGGAGUAUAAAAAGGU | | 2801-2823 |
| AD-1639505 | UCCUUUAUCAUGGUACUGUAU | | AUACAGUACCAUGAUAAAGGAGU | | 2811-2833 |
| AD-1639521 | UGUAACUGUAUCCAUAUUAUU | | AAUAAUAUGGAUACAGUUACAGU | | 2827-2849 |
| AD-1639526 | UUAUGUCCAAGUGCCCACGUU | | AACGUGGGCACUUGGACAUAAAA | | 2881-2903 |
| AD-1639541 | CACGUGAAUUUGCUGGUGAAU | | AUUCACCAGCAAAUUCACGUGGG | | 2896-2918 |
| AD-1639550 | UUGCUGGUGAAAGUUAGCACU | | AGUGCUAACUUUCACCAGCAAAU | | 2905-2927 |
| AD-1639559 | AAAGUUAGCACUUGUGUGUAU | | AUACACACAAGUGCUAACUUUCA | | 2914-2936 |
| AD-1639568 | ACUUGUGUGUAAAUUCUACUU | | AAGUAGAAUUUACACACAAGUGC | | 2923-2945 |
| AD-1639577 | UAAAUUCUACUUCCUCUUGUU | | AACAAGAGGAAGUAGAAUUUACA | | 2932-2954 |
| AD-1639591 | CUUGUGUGUUUUACCAAGUAU | | AUACUUGGUAAAACACACAAGAG | | 2947-2969 |
| AD-1639599 | UUUACCAAGUAUUUAUACUCU | | AGAGUAUAAAUACUUGGUAAAAC | | 2956-2978 |
| AD-1639615 | ACUCUGGUGCAACUAACUACU | | AGUAGUUAGUUGCACCAGAGUAU | | 2972-2994 |
| AD-1639628 | UAACUACUGUGUGAGGAAUUU | | AAAUUCCUCACACAGUAGUUAGU | | 2985-3007 |
| AD-1639642 | GGAAUUGGUCCAUGUGCAAUU | | AAUUGCACAUGGACCAAUUCCUC | | 2999-3021 |
| AD-1639655 | GUGCAAUAAAUACCAAUGAAU | | AUUCAUUGGUAUUUAUUGCACAU | | 3012-3034 |

TABLE 5
Modified Sense and Antisense Strand Sequences of ADRB1 dsRNA Agents Comprising a GalNAc
Conjugate Targeting Ligand

| | | SEQ | | SEQ | | SEQ |
|---|---|---|---|---|---|---|
| Duplex | | ID | | ID | mRNA Target Sequence | ID |
| Name | oligoSeq | NO: | Antisense Sequence 5′ to 3′ | NO: | 5′ to 3′ | NO: |
| AD-1637961 | asasacauGfcUfGfAfagucccggc | | asGfsccgGfgAfCfuucaGfcAfuguu | | AGAAACAUGCUGAAGUCCCGG | |
| | uL96 | | uscsu | | CG | |
| AD-1637971 | asasguccCfgGfCfGfgcucuucca | | asUfsggaAfgAfGfccgcCfgGfgacu | | UGAAGUCCCGGCGGCUCUUCC | |
| | uL96 | | uscsa | | AG | |
| AD-1638021 | csgsagccCfgGfUfAfaccugucgu | | asAfscgaCfaGfGfuuacCfgGfgcucg | | UCCGAGCCCGGUAACCUGUCG | |
| | uL96 | | sgsa | | UC | |
| AD-1638051 | csgscuguCfuCfAfGfcaguggaca | | asUfsgucCfaCfUfgcugAfgAfcagc | | GCCGCUGUCUCAGCAGUGGAC | |
| | uL96 | | gsgsc | | AG | |
| AD-1638077 | asusggguCfuGfCfUfgauggcgcu | | asAfsgcgCfcAfUfcagcAfgAfcccau | | GCAUGGGUCUGCUGAUGGCGC | |
| | uL96 | | sgsc | | UC | |
| AD-1638092 | gscsgcucAfuCfGfUfgcugcucau | | asAfsugaGfcAfGfcacgAfuGfagcg | | UGGCGCUCAUCGUGCUGCUCA | |
| | uL96 | | cscsa | | UC | |
| AD-1638104 | csusgcucAfuCfGfUfggcgggcaa | | asUfsugcCfcGfCfcacgAfuGfagcag | | UGCUGCUCAUCGUGGCGGGCA | |
| | uL96 | | scsa | | AU | |
| AD-1638117 | csgsggcaAfuGfUfGfcuggugauc | | asGfsaucAfcCfAfgcacAfuUfgcccg | | GGCGGGCAAUGUGCUGGUGA | |
| | uL96 | | SCSC | | UCG | |
| AD-1638127 | gscsugguGfaUfCfGfuggccaucg | | asCfsgauGfgCfCfacgaUfcAfccagc | | GUGCUGGUGAUCGUGGCCAUC | |
| | uL96 | | sasc | | GC | |
| AD-1638136 | csgsuggcCfaUfCfGfccaagacgcu | | asGfscguCfuUfGfgcgaUfgGfccac | | AUCGUGGCCAUCGCCAAGACG | |
| | L96 | | gsasu | | CC | |
| AD-1638154 | gscsagacGfcUfCfAfccaaccucuu | | asAfsgagGfuUfGfgugaGfcGfucug | | CUGCAGACGCUCACCAACCUC | |
| | L96 | | csasg | | UU | |
| AD-1638163 | csasccaaCfcUfCfUfucaucauguu | | asAfscauGfaUfGfaagaGfgUfuggu | | CUCACCAACCUCUUCAUCAUG | |
| | L96 | | gsasg | | UC | |
| AD-1638172 | csusucauCfaUfGfUfcccuggcca | | asUfsggcCfaGfGfgacaUfgAfugaa | | CUCUUCAUCAUGUCCCUGGCC | |
| | uL96 | | gsasg | | AG | |
| AD-1638196 | gsgsaguaCfgGfCfUfccuucuucu | | asAfsgaaGfaAfGfgagcCfgUfacucc | | UGGGAGUACGGCUCCUUCUUC | |
| | uL96 | | scsa | | UG | |
| AD-1638205 | csusccuuCfuUfCfUfgcgagcugu | | asAfscagCfuCfGfcagaAfgAfaggag | | GGCUCCUUCUUCUGCGAGCUG | |
| | uL96 | | SCSC | | UG | |
| AD-1638221 | csusguggAfcCfUfCfaguggacgu | | asAfscguCfcAfCfugagGfuCfcacag | | AGCUGUGGACCUCAGUGGACG | |
| | uL96 | | scsu | | UG | |
| AD-1638230 | uscsagugGfaCfGfUfgcugugcgu | | asAfscgcAfcAfGfcacgUfcCfacuga | | CCUCAGUGGACGUGCUGUGCG | |
| | uL96 | | sgsg | | UG | |
| AD-1638253 | gsgsccagCfaUfCfGfagacccugu | | asAfscagGfgUfCfucgaUfgCfuggc | | ACGGCCAGCAUCGAGACCCUG | |
| | uL96 | | csgsu | | UG | |
| AD-1638266 | ascsccugUfgUfGfUfcauugcccu | | asAfsgggCfaAfUfgacaCfaCfagggu | | AGACCCUGUGUGUCAUUGCCC | |
| | uL96 | | scsu | | UG | |
| AD-1638278 | asusugccCfuGfGfAfccgcuaccu | | asAfsgguAfgCfGfguccAfgGfgcaa | | UCAUUGCCCUGGACCGCUACC | |
| | uL96 | | usgsa | | UC | |
| AD-1638287 | gsasccgcUfaCfCfUfcgccaucacu | | asGfsugaUfgGfCfgaggUfaGfcggu | | UGGACCGCUACCUCGCCAUCA | |
| | L96 | | cscsa | | CC | |
| AD-1638296 | csuscgccAfuCfAfCfcucgcccuu | | asAfsaggGfcGfAfggugAfuGfgcga | | ACCUCGCCAUCACCUCGCCCU | |
| | uL96 | | gsgsu | | UC | |
| AD-1638305 | ascscucgCfcCfUfUfccgcuaccau | | asUfsgguAfgCfGfgaagGfgCfgagg | | UCACCUCGCCCUUCCGCUACC | |
| | L96 | | usgsa | | AG | |
| AD-1638314 | ususccgcUfaCfCfAfgagccugcu | | asAfsgcaGfgCfUfcuggUfaGfcgga | | CCUUCCGCUACCAGAGCCUGC | |
| | uL96 | | asgsg | | UG | |
| AD-1638347 | asuscucgGfcCfCfUfgguguccuu | | asAfsaggAfcAfCfcaggGfcCfgagau | | CCAUCUCGGCCCUGGUGUCCU | |
| | uL96 | | sgsg | | UC | |
| AD-1638356 | csusggugUfcCfUfUfccugcccau | | asAfsuggGfcAfGfgaagGfaCfaccag | | CCCUGGUGUCCUUCCUGCCCA | |
| | uL96 | | sgsg | | UC | |
| AD-1638370 | gscsccauCfcUfCfAfugcacuggu | | asAfsccaGfuGfCfaugaGfgAfuggg | | CUGCCCAUCCUCAUGCACUGG | |
| | uL96 | | csasg | | UG | |
| AD-1638393 | csusgcgaCfuUfCfGfucaccaaccu | | asGfsguuGfgUfGfacgaAfgUfcgca | | UGCUGCGACUUCGUCACCAAC | |
| | L96 | | gscsa | | CG | |
| AD-1638406 | ascscaacCfgGfGfCfcuacgccauu | | asAfsuggCfgUfAfggccCfgGfuugg | | UCACCAACCGGGCCUACGCCA | |
| | L96 | | usgsa | | UC | |
| AD-1638422 | asuscgccUfcGfUfCfcguagucuc | | asGfsagaCfuAfCfggacGfaGfgcgau | | CCAUCGCCUCGUCCGUAGUCU | |
| | uL96 | | sgsg | | CC | |
| AD-1638431 | uscscguaGfuCfUfCfcuucuacgu | | asAfscguAfgAfAfggagAfcUfacgg | | CGUCCGUAGUCUCCUUCUACG | |
| | uL96 | | ascsg | | UG | |
| AD-1638435 | csusgugcAfuCfAfUfggccuucgu | | asAfscgaAfgGfCfcaugAfuGfcacag | | CCCUGUGCAUCAUGGCCUUCG | |
| | uL96 | | sgsg | | UG | |
| AD-1638444 | asusggccUfuCfGfUfguaccugcg | | asCfsgcaGfgUfAfcacgAfaGfgccau | | UCAUGGCCUUCGUGUACCUGC | |
| | uL96 | | sgsa | | GG | |
| AD-1638456 | usasccugCfgGfGfUfguuccgcga | | asUfscgcGfgAfAfcaccCfgCfaggua | | UGUACCUGCGGGUGUUCCGCG | |
| | uL96 | | scsa | | AG | |
| AD-1638474 | gscsccagAfaGfCfAfggugaagaa | | asUfsucuUfcAfCfcugcUfuCfuggg | | AGGCCCAGAAGCAGGUGAAG | |
| | uL96 | | cscsu | | AAG | |
| AD-1638485 | gsgsugaaGfaAfGfAfucgacagcu | | asAfsgcuGfuCfGfaucuUfcUfucacc | | CAGGUGAAGAAGAUCGACAG | |
| | uL96 | | susg | | CUG | |
| AD-1638500 | asgscugcGfaGfCfGfccguuuccu | | asAfsggaAfaCfGfgcgcUfcGfcagcu | | ACAGCUGCGAGCGCCGUUUCC | |
| | uL96 | | sgsu | | UC | |
| AD-1638529 | csasgaagGfcGfCfUfcaagacgcuu | | asAfsgcgUfcUfUfgagcGfcCfuucu | | AGCAGAAGGCGCUCAAGACGC | |
| | L96 | | gscsu | | UG | |
| AD-1638539 | uscsaagaCfgCfUfGfggcaucauc | | asGfsaugAfuGfCfccagCfgUfcuug | | GCUCAAGACGCUGGGCAUCAU | |
| | uL96 | | asgsc | | CA | |
| AD-1638549 | gsgsgcauCfaUfCfAfugggcgucu | | asAfsgacGfcCfCfaugaUfgAfugccc | | CUGGGCAUCAUCAUGGGCGUC | |
| | uL96 | | sasg | | UU | |
| AD-1638561 | gsgsgcguCfuUfCfAfcgcucugcu | | asAfsgcaGfaGfCfgugaAfgAfcgccc | | AUGGGCGUCUUCACGCUCUGC | |
| | uL96 | | sasu | | UG | |
| AD-1638576 | csusgcugGfcUfGfCfccuucuucc | | asGfsgaaGfaAfGfggcaGfcCfagcag | | CUCUGCUGGCUGCCCUUCUUC | |
| | uL96 | | sasg | | CU | |
| AD-1638585 | gscsccuuCfuUfCfCfuggccaacg | | asCfsguuGfgCfCfaggaAfgAfaggg | | CUGCCCUUCUUCCUGGCCAAC | |
| | uL96 | | csasg | | GU | |
| AD-1638597 | gsgsccaaCfgUfGfGfugaaggccu | | asAfsggcCfuUfCfaccaCfgUfuggcc | | CUGGCCAACGUGGUGAAGGCC | |
| | uL96 | | sasg | | UU | |
| AD-1638610 | asasggccUfuCfCfAfccgcgagcu | | asAfsgcuCfgCfGfguggAfaGfgccu | | UGAAGGCCUUCCACCGCGAGC | |
| | uL96 | | uscsa | | UG | |
| AD-1638631 | cscsucuuCfgUfCfUfucuucaacu | | asAfsguuGfaAfGfaagaCfgAfagag | | CGCCUCUUCGUCUUCUUCAAC | |
| | uL96 | | gscsg | | UG | |
| AD-1638640 | csusucuuCfaAfCfUfggcugggcu | | asAfsgccCfaGfCfcaguUfgAfagaag | | GUCUUCUUCAACUGGCUGGGC | |
| | uL96 | | sasc | | UA | |
| AD-1638659 | usascgccAfaCfUfCfggccuucaau | | asUfsugaAfgGfCfcgagUfuGfgcgu | | GCUACGCCAACUCGGCCUUCA | |
| | L96 | | asgsc | | AC | |
| AD-1638662 | csasucauCfuAfCfUfgccgcagccu | | asGfsgcuGfcGfGfcaguAfgAfugau | | CCCAUCAUCUACUGCCGCAGC | |
| | L96 | | gsgsg | | CC | |
| AD-1638666 | csusuccgCfaAfGfGfccuuccagg | | asCfscugGfaAfGfgccuUfgCfggaa | | GACUUCCGCAAGGCCUUCCAG | |
| | uL96 | | gsusc | | GG | |
| AD-1638678 | csusuccaGfgGfAfCfugcucugcu | | asAfsgcaGfaGfCfagucCfcUfggaag | | GCCUUCCAGGGACUGCUCUGC | |
| | uL96 | | sgsc | | UG | |
| AD-1638705 | gsascgacGfaCfGfAfugucgucgg | | asCfscgaCfgAfCfaucgUfcGfucguc | | ACGACGACGACGAUGUCGUCG | |
| | uL96 | | sgsu | | GG | |
| AD-1638732 | cscsucggAfaUfCfCfaagguguag | | asCfsuacAfcCfUfuggaUfuCfcgagg | | CGCCUCGGAAUCCAAGGUGUA | |
| | uL96 | | scsg | | GG | |
| AD-1638752 | gsasggagAfuCfUfGfuguuuacuu | | asAfsaguAfaAfCfacagAfuCfuccuc | | ACGAGGAGAUCUGUGUUUAC | |
| | uL96 | | sgsu | | UUA | |
| AD-1638762 | gsusguuuAfcUfUfAfagaccgaua | | asUfsaucGfgUfCfuuaaGfuAfaacac | | CUGUGUUUACUUAAGACCGA | |
| | uL96 | | sasg | | UAG | |
| AD-1638771 | usasagacCfgAfUfAfgcaggugaa | | asUfsucaCfcUfGfcuauCfgGfucuua | | CUUAAGACCGAUAGCAGGUG | |
| | uL96 | | sasg | | AAC | |
| AD-1638780 | usasgcagGfuGfAfAfcucgaagcc | | asGfsgcuUfcGfAfguucAfcCfugcu | | GAUAGCAGGUGAACUCGAAG | |
| | uL96 | | asusc | | CCC | |
| AD-1638794 | gsasagccCfaCfAfAfuccucgucu | | asAfsgacGfaGfGfauugUfgGfgcuu | | UCGAAGCCCACAAUCCUCGUC | |
| | uL96 | | csgsa | | UG | |
| AD-1638803 | asasuccuCfgUfCfUfgaaucauccu | | asGfsgauGfaUfUfcagaCfgAfggau | | ACAAUCCUCGUCUGAAUCAUC | |
| | L96 | | usgsu | | CG | |
| AD-1638813 | usgsaaucAfuCfCfGfaggcaaaga | | asUfscuuUfgCfCfucggAfuGfauuc | | UCUGAAUCAUCCGAGGCAAAG | |
| | uL96 | | asgsa | | AG | |
| AD-1638823 | gsasggcaAfaGfAfGfaaaagccacu | | asGfsuggCfuUfUfucucUfuUfgccu | | CCGAGGCAAAGAGAAAAGCCA | |
| | L96 | | csgsg | | CG | |
| AD-1638838 | gscscacgGfaCfCfGfuugcacaaau | | asUfsuugUfgCfAfacggUfcCfgugg | | AAGCCACGGACCGUUGCACAA | |
| | L96 | | csusu | | AA | |
| AD-1638859 | asgsgaaaGfuUfUfGfggaagggau | | asAfsuccCfuUfCfccaaAfcUfuuccu | | AAAGGAAAGUUUGGGAAGGG | |
| | uL96 | | susu | | AUG | |
| AD-1638876 | gsgsagagUfgGfCfUfugcugaugu | | asAfscauCfaGfCfaagcCfaCfucucc | | UGGGAGAGUGGCUUGCUGAU | |
| | uL96 | | scsa | | GUU | |
| AD-1638886 | ususgcugAfuGfUfUfccuuguugu | | asAfscaaCfaAfGfgaacAfuCfagcaa | | GCUUGCUGAUGUUCCUUGUU | |
| | uL96 | | sgsc | | GUU | |
| AD-1638890 | ususucugUfuUfGfUfgguccggcc | | asGfsgccGfgAfCfcacaAfaCfagaaa | | UUUUUCUGUUUGUGGUCCGG | |
| | uL96 | | sasa | | CCU | |
| AD-1638902 | gsusccggCfcUfUfCfuuuugugug | | asCfsacaCfaAfAfagaaGfgCfcggac | | UGGUCCGGCCUUCUUUUGUGU | |
| | uL96 | | scsa | | GU | |
| AD-1638911 | uscsuuuuGfuGfUfGfugcguguga | | asUfscacAfcGfCfacacAfcAfaaaga | | CUUCUUUUGUGUGUGCGUGU | |
| | uL96 | | sasg | | GAU | |
| AD-1638927 | gsusgaugCfaUfCfUfuuagauuuu | | asAfsaaaUfcUfAfaagaUfgCfaucac | | GUGUGAUGCAUCUUUAGAUU | |
| | uL96 | | sasc | | UUU | |
| AD-1638933 | gsgsugguUfuUfUfGfacacucucu | | asAfsgagAfgUfGfucaaAfaAfccacc | | CAGGUGGUUUUUGACACUCUC | |
| | uL96 | | susg | | UG | |
| AD-1638943 | gsascacuCfuCfUfGfagaggaccg | | asCfsgguCfcUfCfucagAfgAfgugu | | UUGACACUCUCUGAGAGGACC | |
| | uL96 | | csasa | | GG | |
| AD-1638961 | gsasguggAfaGfAfUfgggugggu | | asAfsaccCfaCfCfcaucUfuCfcacuc | | CGGAGUGGAAGAUGGGUGGG | |
| | uuL96 | | scsg | | UUA | |
| AD-1638968 | asasgggaGfaAfGfCfauuaggagg | | asCfscucCfuAfAfugcuUfcUfcccuu | | GGAAGGGAGAAGCAUUAGGA | |
| | uL96 | | ScSC | | GGG | |
| AD-1638971 | gsasuuaaAfaUfCfGfaucaucgug | | asCfsacgAfuGfAfucgaUfuUfuaau | | GGGAUUAAAAUCGAUCAUCG | |
| | uL96 | | CSCSC | | UGG | |
| AD-1638985 | asuscgugGfcUfCfCfcaucccuuu | | asAfsaagGfgAfUfgggaGfcCfacga | | UCAUCGUGGCUCCCAUCCCUU | |
| | uL96 | | usgsa | | UC | |
| AD-1638994 | cscscaucCfcUfUfUfcccgggaacu | | asGfsuucCfcGfGfgaaaGfgGfaugg | | CUCCCAUCCCUUUCCCGGGAA | |
| | L96 | | gsasg | | CA | |
| AD-1639007 | csgsggaaCfaGfGfAfacacacuacu | | asGfsuagUfgUfGfuuccUfgUfuccc | | CCCGGGAACAGGAACACACUA | |
| | L96 | | gsgsg | | CC | |
| AD-1639016 | gsasacacAfcUfAfCfcagccagagu | | asCfsucuGfgCfUfgguaGfuGfuguu | | AGGAACACACUACCAGCCAGA | |
| | L96 | | cscsu | | GA | |
| AD-1639025 | ascscagcCfaGfAfGfagaggagaau | | asUfsucuCfcUfCfucucUfgGfcugg | | CUACCAGCCAGAGAGAGGAGA | |
| | L96 | | usasg | | AU | |
| AD-1639034 | asgsagagGfaGfAfAfugacaguuu | | asAfsaacUfgUfCfauucUfcCfucucu | | AGAGAGAGGAGAAUGACAGU | |
| | uL96 | | scsu | | UUG | |
| AD-1639044 | asusgacaGfuUfUfGfucaagacau | | asAfsuguCfuUfGfacaaAfcUfguca | | GAAUGACAGUUUGUCAAGAC | |
| | uL96 | | ususc | | AUA | |
| AD-1639057 | asasgacaUfaUfUfUfccuuuugcu | | asAfsgcaAfaAfGfgaaaUfaUfgucu | | UCAAGACAUAUUUCCUUUUGC | |
| | uL96 | | usgsa | | UU | |
| AD-1639068 | cscsuuuuGfcUfUfUfccagagaaa | | asUfsuucUfcUfGfgaaaGfcAfaaagg | | UUCCUUUUGCUUUCCAGAGAA | |
| | uL96 | | sasa | | AU | |
| AD-1639077 | ususccagAfgAfAfAfuuucauuuu | | asAfsaaaUfgAfAfauuuCfuCfugga | | CUUUCCAGAGAAAUUUCAUU | |
| | uL96 | | asasg | | UUA | |
| AD-1639087 | asgsuaauGfaUfUfUfcugcuguua | | asUfsaacAfgCfAfgaaaUfcAfuuacu | | UAAGUAAUGAUUUCUGCUGU | |
| | uL96 | | susa | | UAU | |
| AD-1639099 | usgscuguUfaUfGfAfaagcaaaga | | asUfscuuUfgCfUfuucaUfaAfcagca | | UCUGCUGUUAUGAAAGCAAA | |
| | uL96 | | sgsa | | GAG | |
| AD-1639108 | asasagcaAfaGfAfGfaaaggaugg | | asCfscauCfcUfUfucucUfuUfgcuu | | UGAAAGCAAAGAGAAAGGAU | |
| | uL96 | | uscsa | | GGA | |
| AD-1639116 | asgsaaag GfaUfGfGfaggcaaaau | | asAfsuuuUfgCfCfuccaUfcCfuuuc | | AGAGAAAGGAUGGAGGCAAA | |
| | uL96 | | uscsu | | AUA | |
| AD-1639123 | asuscacgUfuUfCfAfagaaauguu | | asAfsacaUfuUfCfuugaAfaCfguga | | AAAUCACGUUUCAAGAAAUG | |
| | uL96 | | ususu | | UUA | |
| AD-1639133 | asasgaaaUfgUfUfAfagcucuucu | | asAfsgaaGfaGfCfuuaaCfaUfuucuu | | UCAAGAAAUGUUAAGCUCUU | |
| | uL96 | | sgsa | | CUU | |
| AD-1639143 | asasgcucUfuCfUfUfggaacaagc | | asGfscuuGfuUfCfcaagAfaGfagcu | | UUAAGCUCUUCUUGGAACAA | |
| | uL96 | | usasa | | GCC | |
| AD-1639145 | csasccuuGfcUfUfUfccuugugua | | asUfsacaCfaAfGfgaaaGfcAfaggug | | CCCACCUUGCUUUCCUUGUGU | |
| | uL96 | | sgsg | | AG | |
| AD-1639157 | csusugugUfaGfGfGfcaaacccgc | | asGfscggGfuUfUfgcccUfaCfacaag | | UCCUUGUGUAGGGCAAACCCG | |
| | uL96 | | sgsa | | CU | |
| AD-1639174 | gsgsucagGfcUfGfAfgggauuucu | | asAfsgaaAfuCfCfcucaGfcCfugacc | | GUGGUCAGGCUGAGGGAUUU | |
| | uL96 | | sasc | | CUA | |
| AD-1639183 | gsasgggaUfuUfCfUfaccucacac | | asGfsuguGfaGfGfuagaAfaUfcccu | | CUGAGGGAUUUCUACCUCACA | |
| | uL96 | | csasg | | CU | |
| AD-1639192 | csusaccuCfaCfAfCfugugcauuu | | asAfsaauGfcAfCfagugUfgAfggua | | UUCUACCUCACACUGUGCAUU | |
| | uL96 | | gsasa | | UG | |
| AD-1639206 | gscsauuuGfcAfCfAfgcagauaga | | asUfscuaUfcUfGfcuguGfcAfaaug | | GUGCAUUUGCACAGCAGAUA | |
| | uL96 | | csasc | | GAA | |
| AD-1639220 | gsasuagaAfaGfAfCfuuguuuaua | | asUfsauaAfaCfAfagucUfuUfcuauc | | CAGAUAGAAAGACUUGUUUA | |
| | uL96 | | susg | | UAU | |
| AD-1639226 | csusuguuUfaUfAfUfuaaacagcu | | asAfsgcuGfuUfUfaauaUfaAfacaag | | GACUUGUUUAUAUUAAACAG | |
| | uL96 | | susc | | CUU | |
| AD-1639240 | gsusaucaAfuAfUfUfaguuggaag | | asCfsuucCfaAfCfuaauAfuUfgauac | | AUGUAUCAAUAUUAGUUGGA | |
| | uL96 | | sasu | | AGG | |
| AD-1639263 | csasggcgCfaGfAfGfccucucucu | | asAfsgagAfgAfGfgcucUfgCfgccu | | ACCAGGCGCAGAGCCUCUCUC | |
| | uL96 | | gsgsu | | UG | |
| AD-1639272 | asgsccucUfcUfCfUfgugacaugu | | asAfscauGfuCfAfcagaGfaGfaggcu | | AGAGCCUCUCUCUGUGACAUG | |
| | uL96 | | scsu | | UG | |
| AD-1639282 | usgsugacAfuGfUfGfacucuguca | | asUfsgacAfgAfGfucacAfuGfucaca | | UCUGUGACAUGUGACUCUGUC | |
| | uL96 | | sgsa | | AA | |
| AD-1639295 | uscsugucAfaUfUfGfaagacagga | | asUfsccuGfuCfUfucaaUfuGfacaga | | ACUCUGUCAAUUGAAGACAG | |
| | uL96 | | sgsu | | GAC | |
| AD-1639304 | usgsaagaCfaGfGfAfcauuaaaag | | asCfsuuuUfaAfUfguccUfgUfcuuc | | AUUGAAGACAGGACAUUAAA | |
| | uL96 | | asasu | | AGA | |
| AD-1639313 | gsascauuAfaAfAfGfagagcgaga | | asUfscucGfcUfCfucuuUfuAfaugu | | AGGACAUUAAAAGAGAGCGA | |
| | uL96 | | cscsu | | GAG | |
| AD-1639321 | asgscgagAfgAfGfAfgaaacaguu | | asAfsacuGfuUfUfcucuCfuCfucgc | | AGAGCGAGAGAGAGAAACAG | |
| | uL96 | | uscsu | | UUC | |
| AD-1639332 | gsasaacaGfuUfCfAfgauuacugc | | asGfscagUfaAfUfcugaAfcUfguuu | | GAGAAACAGUUCAGAUUACU | |
| | uL96 | | csusc | | GCA | |
| AD-1639342 | asgsauuaCfuGfCfAfcauguggau | | asAfsuccAfcAfUfgugcAfgUfaauc | | UCAGAUUACUGCACAUGUGG | |
| | uL96 | | usgsa | | AUA | |
| AD-1639362 | gsusgguuCfaAfAfAfugccauuuu | | asAfsaaaUfgGfCfauuuUfgAfaccac | | GAGUGGUUCAAAAUGCCAUU | |
| | uL96 | | susc | | UUU | |
| AD-1639373 | usgsccauUfuUfUfGfcacaguguu | | asAfsacaCfuGfUfgcaaAfaAfuggca | | AAUGCCAUUUUUGCACAGUG | |
| | uL96 | | susu | | UUA | |
| AD-1639387 | asgsuguuAfgGfAfAfuuacaaaau | | asAfsuuuUfgUfAfauucCfuAfacac | | ACAGUGUUAGGAAUUACAAA | |
| | uL96 | | usgsu | | AUC | |
| AD-1639396 | asasuuacAfaAfAfUfccacagaagu | | asCfsuucUfgUfGfgauuUfuGfuaau | | GGAAUUACAAAAUCCACAGA | |
| | L96 | | uscsc | | AGA | |
| AD-1639407 | cscsacagAfaGfAfUfguuacuugc | | asGfscaaGfuAfAfcaucUfuCfugug | | AUCCACAGAAGAUGUUACUU | |
| | uL96 | | gsasu | | GCA | |
| AD-1639429 | gsgsgcagAfuCfUfUfaaauaaaau | | asAfsuuuUfaUfUfuaagAfuCfugcc | | CUGGGCAGAUCUUAAAUAAA | |
| | uL96 | | csasg | | AUU | |
| AD-1639437 | asusucaaAfcUfCfUfacuucuguu | | asAfsacaGfaAfGfuagaGfuUfugaa | | AAAUUCAAACUCUACUUCUGU | |
| | uL96 | | ususu | | UG | |
| AD-1639446 | csusacuuCfuGfUfUfgucuaguau | | asAfsuacUfaGfAfcaacAfgAfaguag | | CUCUACUUCUGUUGUCUAGUA | |
| | uL96 | | sasg | | UG | |
| AD-1639460 | usasguauGfuUfAfUfugagcuaau | | asAfsuuaGfcUfCfaauaAfcAfuacua | | UCUAGUAUGUUAUUGAGCUA | |
| | uL96 | | sgsa | | AUG | |
| AD-1639469 | asusugagCfuAfAfUfgauucauug | | asCfsaauGfaAfUfcauuAfgCfucaau | | UUAUUGAGCUAAUGAUUCAU | |
| | uL96 | | sasa | | UGG | |
| AD-1639485 | asusugggAfaAfAfUfaccuuuuua | | asUfsaaaAfaGfGfuauuUfuCfccaau | | UCAUUGGGAAAAUACCUUUU | |
| | uL96 | | sgsa | | UAU | |
| AD-1639495 | csusuuuuAfuAfCfUfccuuuauca | | asUfsgauAfaAfGfgaguAfuAfaaaa | | ACCUUUUUAUACUCCUUUAUC | |
| | uL96 | | gsgsu | | AU | |
| AD-1639505 | uscscuuuAfuCfAfUfgguacugua | | asUfsacaGfuAfCfcaugAfuAfaagga | | ACUCCUUUAUCAUGGUACUGU | |
| | uL96 | | sgsu | | AA | |
| AD-1639521 | usgsuaacUfgUfAfUfccauauuau | | asAfsuaaUfaUfGfgauaCfaGfuuaca | | ACUGUAACUGUAUCCAUAUU | |
| | uL96 | | sgsu | | AUA | |
| AD-1639526 | ususauguCfcAfAfGfugcccacgu | | asAfscguGfgGfCfacuuGfgAfcaua | | UUUUAUGUCCAAGUGCCCACG | |
| | uL96 | | asasa | | UG | |
| AD-1639541 | csascgugAfaUfUfUfgcuggugaa | | asUfsucaCfcAfGfcaaaUfuCfacgug | | CCCACGUGAAUUUGCUGGUGA | |
| | uL96 | | sgsg | | AA | |
| AD-1639550 | ususgcugGfuGfAfAfaguuagcac | | asGfsugcUfaAfCfuuucAfcCfagcaa | | AUUUGCUGGUGAAAGUUAGC | |
| | uL96 | | sasu | | ACU | |
| AD-1639559 | asasaguuAfgCfAfCfuugugugua | | asUfsacaCfaCfAfagugCfuAfacuuu | | UGAAAGUUAGCACUUGUGUG | |
| | uL96 | | scsa | | UAA | |
| AD-1639568 | ascsuuguGfuGfUfAfaauucuacu | | asAfsguaGfaAfUfuuacAfcAfcaag | | GCACUUGUGUGUAAAUUCUA | |
| | uL96 | | usgsc | | CUU | |
| AD-1639577 | usasaauuCfuAfCfUfuccucuugu | | asAfscaaGfaGfGfaaguAfgAfauuu | | UGUAAAUUCUACUUCCUCUUG | |
| | uL96 | | ascsa | | UG | |
| AD-1639591 | csusugugUfgUfUfUfuaccaagua | | asUfsacuUfgGfUfaaaaCfaCfacaag | | CUCUUGUGUGUUUUACCAAG | |
| | uL96 | | sasg | | UAU | |
| AD-1639599 | ususuaccAfaGfUfAfuuuauacuc | | asGfsaguAfuAfAfauacUfuGfguaa | | GUUUUACCAAGUAUUUAUAC | |
| | uL96 | | asasc | | UCU | |
| AD-1639615 | ascsucugGfuGfCfAfacuaacuac | | asGfsuagUfuAfGfuugcAfcCfagag | | AUACUCUGGUGCAACUAACUA | |
| | uL96 | | usasu | | CU | |
| AD-1639628 | usasacuaCfuGfUfGfugaggaauu | | asAfsauuCfcUfCfacacAfgUfaguua | | ACUAACUACUGUGUGAGGAA | |
| | uL96 | | sgsu | | UUG | |
| AD-1639642 | gsgsaauuGfgUfCfCfaugugcaau | | asAfsuugCfaCfAfuggaCfcAfauucc | | GAGGAAUUGGUCCAUGUGCA | |
| | uL96 | | susc | | AUA | |
| AD-1639655 | gsusgcaaUfaAfAfUfaccaaugaa | | asUfsucaUfuGfGfuauuUfaUfugca | | AUGUGCAAUAAAUACCAAUG | |
| | uL96 | | csasu | | AAG | |

TABLE 6
Reporter Screen for Human ADRB1 in Hepa1-6 Cells

RLuc/FLuc
10 nM

| | % | |
|---|---|---|
| | Message | |
| Duplex Name | Remaining | SD |
| AD-1639655.1 | 36.084 | 2.929 |
| AD-1639642.1 | 42.211 | 1.351 |
| AD-1639628.1 | 34.874 | 1.542 |
| AD-1639615.1 | 35.502 | 2.252 |
| AD-1639599.1 | 29.675 | 2.190 |
| AD-1639591.1 | 40.543 | 1.627 |
| AD-1639577.1 | 31.585 | 2.243 |
| AD-1639568.1 | 32.152 | 2.750 |
| AD-1639559.1 | 30.767 | 2.016 |
| AD-1639550.1 | 30.100 | 1.316 |
| AD-1639541.1 | 54.998 | 0.655 |
| AD-1639526.1 | 60.064 | 6.239 |
| AD-1639521.1 | 38.648 | 2.606 |
| AD-1639505.1 | 33.810 | 2.120 |
| AD-1639495.1 | 30.011 | 3.407 |
| AD-1639485.1 | 33.311 | 1.239 |
| AD-1639469.1 | 30.608 | 3.449 |
| AD-1639460.1 | 28.107 | 1.807 |
| AD-1639446.1 | 32.926 | 1.836 |
| AD-1639437.1 | 35.594 | 0.996 |
| AD-1639429.1 | 36.858 | 0.515 |
| AD-1639407.1 | 27.111 | 1.887 |
| AD-1639396.1 | 26.091 | 0.591 |
| AD-1639387.1 | 23.177 | 1.067 |
| AD-1639373.1 | 28.514 | 1.069 |
| AD-1639362.1 | 23.057 | 1.017 |
| AD-1639342.1 | 23.441 | 1.056 |
| AD-1639332.1 | 39.829 | 1.991 |
| AD-1639321.1 | 42.864 | 3.218 |
| AD-1639313.1 | 27.956 | 1.076 |
| AD-1639304.1 | 27.695 | 1.370 |
| AD-1639295.1 | 46.853 | 1.375 |
| AD-1639282.1 | 46.448 | 3.809 |
| AD-1639272.1 | 51.909 | 4.028 |
| AD-1639263.1 | 52.664 | 2.318 |
| AD-1639240.1 | 28.741 | 1.724 |
| AD-1639226.1 | 28.551 | 1.140 |
| AD-1639220.1 | 30.348 | 1.401 |
| AD-1639206.1 | 50.474 | 3.902 |
| AD-1639192.1 | 55.729 | 3.739 |
| AD-1639183.1 | 53.680 | 1.718 |
| AD-1639174.1 | 71.248 | 4.148 |
| AD-1639157.1 | 58.249 | 1.688 |
| AD-1639145.1 | 59.585 | 1.125 |
| AD-1639143.1 | 57.108 | 3.631 |
| AD-1639133.1 | 39.929 | 1.668 |
| AD-1639123.1 | 38.089 | 0.975 |
| AD-1639116.1 | 53.771 | 2.538 |
| AD-1639108.1 | 54.713 | 1.465 |
| AD-1639099.1 | 33.124 | 1.104 |
| AD-1639087.1 | 17.831 | 0.919 |
| AD-1639077.1 | 21.644 | 1.218 |
| AD-1639068.1 | 34.199 | 1.527 |
| AD-1639057.1 | 30.434 | 0.612 |
| AD-1639044.1 | 21.603 | 1.077 |
| AD-1639034.1 | 44.290 | 0.840 |
| AD-1639025.1 | 54.566 | 3.721 |
| AD-1639016.1 | 77.977 | 2.892 |
| AD-1639007.1 | 66.117 | 4.314 |
| AD-1638994.1 | 82.085 | 6.808 |
| AD-1638985.1 | 94.681 | 4.373 |
| AD-1638971.1 | 39.182 | 3.350 |
| AD-1638968.1 | 82.886 | 5.744 |
| AD-1638961.1 | 71.673 | 6.710 |
| AD-1638943.1 | 50.576 | 1.865 |
| AD-1638933.1 | 25.070 | 1.640 |
| AD-1638927.1 | 29.333 | 1.531 |
| AD-1638911.1 | 34.023 | 1.142 |
| AD-1638902.1 | 87.193 | 1.563 |
| AD-1638890.1 | 87.995 | 4.106 |
| AD-1638886.1 | 33.282 | 1.122 |
| AD-1638876.1 | 69.635 | 4.698 |
| AD-1638859.1 | 40.500 | 3.358 |
| AD-1638838.1 | 52.523 | 2.748 |
| AD-1638823.1 | 50.377 | 1.268 |
| AD-1638813.1 | 45.052 | 3.079 |
| AD-1638803.1 | 62.258 | 2.853 |
| AD-1638794.1 | 54.294 | 1.919 |
| AD-1638780.1 | 47.039 | 2.699 |
| AD-1638771.1 | 50.779 | 4.235 |
| AD-1638762.1 | 34.324 | 2.813 |
| AD-1638752.1 | 32.510 | 2.607 |
| AD-1638732.1 | 63.193 | 3.476 |
| AD-1638705.1 | 87.981 | 8.265 |
| AD-1638678.1 | 82.539 | 8.707 |
| AD-1638666.1 | 79.422 | 6.876 |
| AD-1638662.1 | 86.689 | 6.919 |
| AD-1638659.1 | 73.164 | 6.691 |
| AD-1638640.1 | 67.176 | 5.555 |
| AD-1638631.1 | 60.178 | 2.869 |
| AD-1638610.1 | 82.033 | 7.435 |
| AD-1638597.1 | 67.660 | 4.963 |
| AD-1638585.1 | 73.917 | 3.520 |
| AD-1638576.1 | 57.774 | 6.457 |
| AD-1638561.1 | 76.720 | 5.989 |
| AD-1638549.1 | 72.374 | 3.388 |
| AD-1638539.1 | 76.908 | 6.768 |
| AD-1638529.1 | 62.888 | 5.852 |
| AD-1638500.1 | 55.562 | 4.231 |
| AD-1638485.1 | 64.806 | 4.092 |
| AD-1638474.1 | 74.497 | 3.329 |
| AD-1638456.1 | 82.647 | 10.910 |
| AD-1638444.1 | 65.271 | 7.489 |
| AD-1638435.1 | 59.200 | 4.952 |
| AD-1638431.1 | 68.084 | 4.786 |
| AD-1638422.1 | 81.550 | 7.527 |
| AD-1638406.1 | 77.835 | 6.358 |
| AD-1638393.1 | 65.579 | 4.797 |
| AD-1638370.1 | 67.546 | 2.641 |
| AD-1638356.1 | 70.953 | 2.786 |
| AD-1638347.1 | 76.982 | 7.255 |
| AD-1638314.1 | 72.999 | 5.056 |
| AD-1638305.1 | 76.084 | 6.443 |
| AD-1638296.1 | 63.672 | 3.251 |
| AD-1638287.1 | 59.750 | 4.653 |
| AD-1638278.1 | 70.698 | 6.732 |
| AD-1638266.1 | 41.929 | 6.152 |
| AD-1638253.1 | 72.481 | 3.612 |
| AD-1638230.1 | 63.118 | 6.706 |
| AD-1638221.1 | 75.254 | 6.239 |
| AD-1638205.1 | 62.400 | 3.774 |
| AD-1638196.1 | 69.535 | 5.021 |
| AD-1638172.1 | 83.596 | 6.016 |
| AD-1638163.1 | 59.876 | 3.051 |
| AD-1638154.1 | 48.625 | 3.199 |
| AD-1638136.1 | 77.997 | 3.698 |
| AD-1638127.1 | 81.215 | 3.826 |
| AD-1638117.1 | 65.762 | 5.370 |
| AD-1638104.1 | 94.098 | 7.149 |
| AD-1638092.1 | 62.706 | 1.669 |
| AD-1638077.1 | 62.318 | 4.690 |
| AD-1638051.1 | 90.974 | 6.574 |
| AD-1638021.1 | 98.145 | 5.195 |
| AD-1637971.1 | 90.755 | 4.262 |
| AD-1637961.1 | 57.582 | 1.207 |
| Positive Control | 1.420 | 0.166 |

### Example 4: SOD1 mRNA Knockdown in Mouse Cardiac and Skeletal Muscle

[1320] dsRNA single strands comprising one or more lipophilic moieties (e.g., any compound or chemical moiety having an affinity for lipids, e.g., a C₂₂ hydrocarbon chain) conjugated at various positions on the sense strand targeting mouse Superoxide Dismutase 1 (SOD1) or mouse myostatin (MTSN) were synthesized on a solid support followed by hybridization of complementary strands to form a duplex.

[1321] The modified nucleotide sequences of the sense strands used in this Example are provided in Table 8A and the modified nucleotide sequences of the duplexes used in this study are provided in Table 8B.

[1322] The effect of the agents in Table 8B was examined in vivo in wild type C57BL/6 mice (6-8 weeks old) as summarized in Table 7. Briefly, animals (n=3) were intravenously administered a single 5 mg/kg or 20 mg/kg dose of the agent on Day 0. On Day 14, animals were sacrificed and livers, heart, and quadriceps were collected.

[1323] For SOD1 analysis, RNA was isolated from powdered quadricep and heart with the PerkinElmer Chemagic system according to the supplier's guidelines. Resulting RNA was used to generate cDNA using a High-Capacity cDNA Reverse Transcription Kit (Applied Biosystems, 4368813). RT-qPCR was performed using the LightCycler® 480 Probes Master in the LightCycler®480 Instrument system using gene specific TaqMan assays for each target mouse-specific SOD1 (ThermoFisher Scientific, Mm01344233_g1) and Gapdh (ThermoFisher Scientific, Mm99999915_g1) were used for RT-qPCR analysis. Each sample was analyzed in duplicate by RT-qPCR. Data were analyzed using the ΔΔCt method normalizing to control animals treated with 1×PBS alone.

[1324] For MTSN analysis, heart and quadricep powder were homogenized and lysed in 750 μL of QIAzol Lysis Reagent for 5 minutes ×2 at 25 Hz using a TissueLyser. Chloroform (150 μL) was thoroughly mixed with each sample and lysates were centrifugated at full speed for 15 minutes at 4° C. Total RNA was isolated from the supernatant using the RNeasy® 96 Universal Tissue Kit. Resulting RNA (1500 ng) was used for cDNA synthesis using the Applied Biosystems™ High-Capacity cDNA Reverse Transcription Kit with RNase Inhibitor. For qPCR reactions, two μl of cDNA and 10 μl Fast Advanced Mastermix (ThermoFisher Scientific A44359) were added to 1× house-keeping probe and 1× target probe per well. Real time PCR was done in a QuantStudio5 Real Time PCR system (ThermoFisher Scientific). The mean level of SOD1 mRNA was normalized to the mean level of GAPDH mRNA for each sample. Group mean values were then normalized to the mean value for the PBS treated group, to obtain the relative level of SOD1 mRNA expression.

[1325] The results are shown in FIG. 1 and demonstrate that an increase in chain length of the lipophilic moiety on the sense strand at position 6 shows a strong positive correlation with SOD1 knockdown in the heart and skeletal muscle. These data also demonstrate that the most potent knockdown was observed in muscle tissue via intramuscular administration of a C₂₂ hydrocarbon chain conjugated to the sense strand at position 6 of the dsRNA agent as evidenced by the potent inhibition of AD-1427062.

TABLE 7
Study Design

| | | # | Delivery | Dose |
|---|---|---|---|---|
| Group | Duplex ID | Animals | Route | (mg/kg) |
| 1 | PBS | 3 | IV | 5 |
| 2 | AD-463791 | 3 | IV | 5 |
| 3 | AD-1427060 | 3 | IV | 5 |
| 4 | AD-224940 | 3 | IV | 5 |
| 5 | AD-454741 | 3 | IV | 5 |
| 6 | AD-454740 | 3 | IV | 5 |
| 7 | AD-401824 | 3 | IV | 5 |
| 8 | AD-1427061 | 3 | IV | 5 |
| 9 | AD-413635 | 3 | IV | 5 |
| 10 | AD-1427062 | 3 | IV | 5 |
| 11 | AD-1427062 | 3 | IV | 20 |
| 12 | AD-1427063 | 3 | IV | 5 |
| 13 | AD-1321428 | 3 | IV | 5 |
| 14 | AD-1321423 | 3 | IV | 5 |
| 15 | AD-1321429 | 3 | IV | 5 |

TABLE 8A
siRNA Sense Strands Synthesized for in vivo Studies

| | | | | Molecular | Molecular |
|---|---|---|---|---|---|
| Duplex ID | Strand | Target | Oligonucleotide Sequence 5′ to 3′ | weight | weight found |
| A-899929 | sense | SOD1 | csasuuuuAfaUfCfCfucacucuasasa | 6833.579 | 6830.02 |
| A-2219787 | sense | SOD1 | csasuuuY118AfaUfCfCfucacucuasasa | 7444.543 | 7440.52 |
| A-444399 | sense | SOD1 | csasuuuuAfaUfCfCfucacucuaaaL10 | 7506.365 | 7502.51 |
| A-637445 | sense | SOD1 | csasuuu(Ude)AfaUfCfCfucacucuasasa | 6959.826 | 6956.16 |
| A-637447 | sense | SOD1 | csasuuu(Utd)AfaUfCfCfucacucuasasa | 7015.926 | 7012.22 |
| A-637448 | sense | SOD1 | csasuuu(Uhd)AfaUfCfCfucacucuasasa | 7043.976 | 7040.25 |
| A-2356923 | sense | SOD1 | csasuuu(Uod)AfaUfCfCfucacucuasasa | 7072.031 | 7068.28 |
| A-637449 | sense | SOD1 | csasuuu(Uol)AfaUfCfCfucacucuasasa | 7070.026 | 7066.26 |
| A-2578434 | sense | SOD1 | csasuuu(Uda)AfaUfCfCfucacucuasasa | 7128.132 | 7124.35 |
| A-2248662 | sense | SOD1 | csasuuuY 158AfaUfCfCfucacucuasasa | 7121.081 | 7117.25 |
| A-2219771 | sense | SOD1 | csasuuu(Uh)AfaUfCfCfucac(Uh)cuasasa | 6973.84 | 6970.17 |
| A-2219766 | sense | SOD1 | csasuuu(Uh)AfaUfCfCfucac(Uh)cuasas(Ah) | 7043.978 | 7040.25 |
| A-2219772 | sense | SOD1 | (Chs)asuuu(Uh)AfaUfCfCfucac(Uh)(Ch)uasas(Ah) | 7184.246 | 7180.41 |
| A-3340763 | sense | SOD1 | ususggg(Cda)AfaAfGfGfuggaaaugsasa | 7468.423 | 7464.473 |
| A-3013336 | sense | Mstn | asusggc(Ada)AfaGfAfAfcaaauaausasa | 7387.441 | 7385.31 |

[chemical structure]

[chemical structure]

[chemical structure]

[chemical structure]

[chemical structure]

[chemical structure]

[chemical structure]

[chemical structure]

[chemical structure]

[chemical structure]

[chemical structure]

[chemical structure]

[chemical structure]

TABLE 8B
siRNA Duplexes Synthesized for in vivo Studies

| | | | | | | Molecular |
|---|---|---|---|---|---|---|
| | | | | | Molecular | Weight |
| Duplex ID | Oligo ID | Strand | Target | Sequence 5′ to 3′ | Weight | Found |
| AD-463791 | A-899929 | sense | SOD1 | csasuuuuAfaUfCfCfucacucuasasa | 6833.579 | 6830.02 |
| | A-444402 | antis | SOD1 | VPusUfsuagAfgUfGfaggaUfuAfaaaugsasg | 7851.156 | 7847.15 |
| AD-1427060 | A-2219787 | sense | SOD1 | csasuuuY118AfaUfCfCfucacucuasasa | 7444.543 | 7440.52 |
| | A-444402 | antis | SOD1 | VPusUfsuagAfg UfGfaggaUfuAfaaaugsasg | 7851.156 | 7847.15 |
| AD-224940 | A-444399 | sense | SOD1 | csasuuuuAfaUfCfCfucacucuaaaL10 | 7506.365 | 7502.52 |
| | A-444402 | antis | SOD1 | VPusUfsuagAfgUfGfaggaUfuAfaaaugsasg | 7851.156 | 7847.15 |
| AD-454741 | A-637445 | sense | SOD1 | csasuuu(Ude)AfaUfCfCfucacucuasasa | 6959.826 | 6956.16 |
| | A-444402 | antis | SOD1 | VPusUfsuagAfgUfGfaggaUfuAfaaaugsasg | 7851.156 | 7847.15 |
| AD-454740 | A-637447 | sense | SOD1 | csasuuu(Utd)AfaUfCfCfucacucuasasa | 7015.926 | 7012.22 |
| | A-444402 | antis | SOD1 | VPusUfsuagAfgUfGfaggaUfuAfaaaugsasg | 7851.156 | 7847.15 |
| AD-401824 | A-637448 | sense | SOD1 | csasuuu(Uhd)AfaUfCfCfucacucuasasa | 7043.976 | 7040.25 |
| | A-444402 | antis | SOD1 | VPusUfsuagAfgUfGfaggaUfuAfaaaugsasg | 7851.156 | 7847.15 |
| AD-1427061 | A-2356923 | sense | SOD1 | csasuuu(Uod)AfaUfCfCfucacucuasasa | 7072.031 | 7068.28 |
| | A-444402 | antis | SOD1 | VPusUfsuagAfgUfGfaggaUfuAfaaaugsasg | 7851.156 | 7847.15 |
| AD-413635 | A-637449 | sense | SOD1 | csasuuu(Uol)AfaUfCfCfucacucuasasa | 7070.026 | 7066.27 |
| | A-444402 | antis | SOD1 | VPusUfsuagAfgUfGfaggaUfuAfaaaugsasg | 7851.156 | 7847.15 |
| AD-1427062 | A-2578434 | sense | SOD1 | csasuuu(Uda)AfaUfCfCfucacucuasasa | 7128.132 | 7124.34 |
| | A-444402 | antis | SOD1 | VPusUfsuagAfgUfGfaggaUfuAfaaaugsasg | 7851.156 | 7847.15 |
| AD-1427063 | A-2248662 | sense | SOD1 | csasuuuY158AfaUfCfCfucacucuasasa | 7121.081 | 7117.24 |
| | A-444402 | antis | SOD1 | VPusUfsuagAfgUfGfaggaUfuAfaaaugsasg | 7851.156 | 7847.15 |
| AD-1321428 | A-2219771 | sense | SOD1 | csasuuu(Uh)AfaUfCfCfucac(Uh)cuasasa | 6973.84 | 6970.17 |
| | A-444402 | antis | SOD1 | VPusUfsuagAfgUfGfaggaUfuAfaaaugsasg | 7851.156 | 7847.15 |
| AD-1321423 | A-2219766 | sense | SOD1 | csasuuu(Uh)AfaUfCfCfucac(Uh)cuasas(Ah) | 7043.978 | 7040.25 |
| | A-444402 | antis | SOD1 | VPusUfsuagAfgUfGfaggaUfuAfaaaugsasg | 7851.156 | 7847.15 |
| AD-1321429 | A-2219772 | sense | SOD1 | (Chs)asuuu(Uh)AfaUfCfCfucac(Uh)(Ch)uasas(Ah) | 7184.246 | 7180.41 |
| | A-444402 | antis | SOD1 | VPusUfsuagAfgUfGfaggaUfuAfaaaugsasg | 7851.156 | 7847.15 |
| AD-1640773 | A-3013336 | sense | Mstn | asusggc(Ada)AfaGfAfAfcaaauaausasa | 7387.441 | 7385.31 |
| | A-135655 | antis | Mstn | VPusUfsauuAfuUfUfguucUfuUfgccaususa | 7533.956 | 7530.85 |
| AD-1812376 | A-3340763 | sense | SOD1 | ususggg(Cda)AfaAfGfGfuggaaaugsasa | | |
| | A-859296 | antis | SOD1 | VPusUfscauUfuCfCfaccuUfuGfcccaasgsu | | |
| AD-1615344 | A-2894724 | sense | MALAT1 | asascga(Cda)UfgGfAfGfuaugauuasasa | 7373.359 | 7369.449 |
| | A-1850572 | antis | MALAT1 | VPusUfsuaaucauacucCfaGfucguususc | 7593.999 | 7590.091 |
| AD-1615345 | A-2225899 | sense | MALAT1 | cscsgcugCfuAfUfUfagaaugcasusa | 6967.675 | 6964.065 |
| | A-2894725 | antis | MALAT1 | VPusAfsugcauucuaauAfg(Cda)agcggsgsa | 8104.808 | 8100.55 |

[chemical structure]

[chemical structure]

[chemical structure]

[chemical structure]

[chemical structure]

[chemical structure]

[chemical structure]

[chemical structure]

[chemical structure]

[chemical structure]

[chemical structure]

[chemical structure]

[chemical structure]

[chemical structure]

[chemical structure]

### Example 5: MALAT1 and SOD1 mRNA Knockdown in Mouse Cardiac and Skeletal Muscle

[1326] MALAT1 (metastasis associated lung adenocarcinoma transcript 1) and SOD1 (superoxide dismutase type 1) gene silencing in cardiac and skeletal muscle was studied with dsRNA agents comprising one or more C22 hydrocarbon chains conjugated to position 6 on the sense strand, counting from the 5′-end of the sense strand.

[1327] dsRNA single strands comprising one or more C22 hydrocarbon chains conjugated to position 6 on the sense strand, counting from the 5′-end of the sense strand, targeting mouse MALAT1 or mouse SOD1 were synthesized on a solid support followed by hybridization of complementary strands to form a duplex.

[1328] The modified nucleotide sequences of the duplexes used in this study are provided in Table 7.

[1329] The effect of these was examined in vivo in wild type C57BL/6 mice (6-8 weeks old) as summarized in Table 9. Animals (n=3) were intravenously administered a single 1 mg/kg, 5 mg/kg, or 20 mg/kg dose of the agent on Day 0. On Day 14 or Day 28, animals were sacrificed and tissues (e.g., livers, heart, and quadriceps) were collected and the level of MALAT1 mRNA or SOD1 mRNA was determined by quantitative RT-PCR.

[1330] The results of the effect of AD-1615344 and AD-1615345 on MALAT1 expression in skeletal muscle tissue are shown in FIGS. 2A and 2B, respectively, and demonstrate that at Day 28 post-dose the duplex AD-1615344, comprising a C₂₂ hydrocarbon chain conjugated to the sense strand at position 6, counting from the 5′-end of the sense strand, potently inhibits MALAT1 expression in skeletal muscle tissue.

TABLE 9
Study Design

| Group | N | siRNA | I.V. dose | | sac | tissues |
|---|---|---|---|---|---|---|
| 1 | 3 | PBS | NA | | D 14 | Quad, heart, |
| | | | | | | liver, kidney |
| 2 | | AD-1615344 | 1 | mg/kg | | Quad, heart |
| 3 | | AD-1615345 | | | | |
| 4 | | AD-1615344 | 5 | mg/kg | | |
| 5 | | AD-1615345 | | | | |
| 6 | | AD-1427062 | | | | Quad, heart, |
| | | | | | | liver, kidney |
| 7 | | AD-1615344 | 20 | mg/kg | | Quad, heart |
| 8 | | AD-1615345 | | | | |
| 9 | | PBS | NA | | D 28 | Quad, heart, |
| | | | | | | liver, kidney |
| 10 | | AD-1615344 | 1 | mg/kg | | Quad, heart |
| 11 | | AD-1615345 | | | | |
| 12 | | AD-1615344 | 5 | mg/kg | | |
| 13 | | AD-1615345 | | | | |
| 14 | | AD-1427062 | | | | Quad, heart, |
| | | | | | | liver, kidney |
| 15 | | AD-1615344 | 20 | mg/kg | | Quad, heart |

| | |
|---|---|
| 16 | AD-1615345 |

### Example 6: MSTN1 mRNA Knockdown in Mouse Skeletal Muscle and SOD1 mRNA Knockdown in Mouse Skeletal Muscle, Mouse Cardiac Muscle, and Mouse Adipose Tissue

[1331] The effect of route of administration on mouse myostatin (MSTN1) gene knockdown in mouse skeletal muscle and the effect of route of administration on mouse superoxide dismutase 1 (SOD1) knockdown in mouse skeletal muscle, mouse cardiac muscle, and mouse adipose tissue by dsRNA agents comprising one or more C22 hydrocarbon chains conjugated to position 6 on the sense strand, counting from the 5′-end of the sense strand were examined.

[1332] Briefly, a single 5 mg/kg dose of AD-1640773, targeting the mouse MSTN1 gene, or AD-1427062, targeting the mouse SOD1 gene, was administered to wild type C57BL/6 mice (6-8 weeks old) intravenously (IV), subcutaneously (SQ), or intramuscularly (IM) at Day 0. For the IM groups, the dsRNA agent was only administered in the left quadricep. A single 5 mg/kg dose of AD-1427062 was also administered to wild type C57BL/6 mice (6-8 weeks old) intraperitoneally (IP). PBS was intravenously administered as a control. At Day 21, animals were sacrificed, tissue including, quadricep muscle tissue from both quadriceps (left quadricep, IM injected (IM (I) and right quadricep, IM distal, not injected (IM-(D)), cardiac muscle tissue, and gonadal adipose tissue, was collected, and the level of MSTN1 or SOD1 mRNA was determined by quantitative RT-PCR.

[1333] The results of these analyses are provided in FIGS. 3A-3E.

[1334] In FIG. 3A, the data demonstrate that, although IM administration of AD-1427062 shows slightly better knockdown of SOD1 mRNA in the injected skeletal muscle, this observed knockdown is comparable to the knockdown of SOD1 mRNA observed in the distal muscle tissue and to the knockdown of SOD1 mRNA in skeletal muscle observed following administration of AD-1640773 intravenously, subcutaneously, or intraperitoneally.

[1335] FIG. 3B demonstrates that the route of administration of AD-1427062 does not affect the ability of dsRNA agents comprising one or more C₂₂ hydrocarbon chains conjugated to position 6 on the sense strand, counting from the 5′-end of the sense strand to potently knockdown SOD1 mRNA in cardiac muscle tissue.

[1336] Although the basal level of myostatin is extremely variable and all routes of administration of AD-1640773 knocked down MTSN mRNA levels, FIG. 3C demonstrates that IM administration of AD-1640773 provides the most potent knockdown of MTSN mRNA in skeletal muscle tissue.

[1337] FIGS. 3D and 3E demonstrate that the route of administration of AD-1427062 does not affect the ability of dsRNA agents comprising one or more C₂₂ hydrocarbon chains conjugated to position 6 on the sense strand, counting from the 5′-end of the sense strand to potently knockdown SOD1 mRNA in adipose tissue.

### Example 7: Dose Response of SOD1 mRNA Knockdown in Mouse Adipose Tissue Intravenously (IV) Administered SOD1 siRNA at Days 14 and 28 Post-Dose

[1338] The effect of dsRNA agents targeting SOD1 and comprising one or more C22 hydrocarbon chains conjugated to position 6 on the sense strand, counting from the 5′-end of the sense strand, were examined for knockdown in brown, gonadal, and subcutaneous adipose tissues.

[1339] Specifically, an exemplary duplex targeting SOD1, AD-1427062, was examined in vivo in wild type C57BL/6 mice (6-8 weeks old) as summarized in Table 10. Briefly, animals (n=3) were intravenously administered a single 5 mg/kg, 2 or 0.5 mg/kg dose of the dsRNA agent on Day 0. On Days 14 and 28, animals were sacrificed, and brown, gonadal, and subcutaneous adipose tissues were collected.

[1340] For SOD1 analysis, RNA was isolated by lysing the tissues in 1 mL of Qiazol in the TissueLyser II two cycles of 20 Hz for 2 minutes. Total RNA was then isolated by using the RNeasy Kit from Qiagen following manufacturer's instructions. The optional DNAse digestion step included in the kit was also performed. Resulting RNA was used to generate cDNA using ThermoFisher Scientific Superscript IV cDNA reverse transcription kit (ThermoFisher Scientific, Cat. No. 11756050). In particular, twenty μl of a ready to use master mix and 11 μl of H₂O per reaction was added to RNA isolated above. Plates were sealed, mixed, and incubated on thermal cycler at 25° C. for 10 min, followed by 42° C. for 10 minutes and inactivation step at 85° C. for 5 minutes. RT-qPCR was performed by using two μl of cDNA and 10p Fast Advanced Mastermix (ThermoFisher Scientific A44359) are added to 1× house-keeping probe (GAPDH, ThermoFisher Scientific, Mm99999915_g1) and 1× target probe (SOD1, Mm01344233_g1) per well. Real time PCR was done in a QuantStudio5 Real Time PCR system (ThermoFisher Scientific). The mean level of SOD1 mRNA was normalized to the mean level of GAPDH mRNA for each sample. Group mean values were then normalized to the mean value for the PBS treated group, to obtain the relative level of SOD1 mRNA expression.

[1341] The results are shown in FIGS. 4A-C and demonstrate that a C22 hydrocarbon chain conjugated to the sense strand at position 6 of the dsRNA agent AD-1427062 shows a strong positive correlation with SOD1 knockdown in all adipose tissues analyzed up to day 28 after intravenous injection of a dose as low as 0.5 mg/kg.

TABLE 10
Study Design

| | | # | Delivery | Dose | |
|---|---|---|---|---|---|
| Group | Duplex ID | Animals | Route | (mg/kg) | Day |
| 1 | PBS | 3 | IV | NA | 14 |
| 2 | AD-1427062 | | | 5 | |
| 3 | | | | 2 | |
| 4 | | | | 0.5 | |
| 5 | PBS | | | NA | 28 |
| 6 | AD-1427062 | | | 5 | |
| 7 | | | | 2 | |
| 8 | | | | 0.5 | |

### Example 8: Dose Response of SOD1 mRNA Knockdown in Non-Human Primates (Macaca fascicularis) Adipose Tissue Intravenously Administered SOD1 siRNA at Day 30 Post-Dose

[1342] The effect of dsRNA agents targeting SOD1 and comprising one or more C22 hydrocarbon chains conjugated to position 6 on the sense strand, counting from the 5′-end of the sense strand, were examined for knockdown in brown aortic, uterine, subcutaneous and hind limb adipose tissues.

[1343] Specifically, an exemplary duplex targeting SOD1, AD-1812376, was examined in vivo in Macaca fascicularis as summarized in Table 11. Briefly, animals (n=3) were intravenously administered a single 3 mg/kg dose of the agent on Day 0. On Day 30, animals were sacrificed, and brown aortic, uterine, subcutaneous and hind limb adipose tissues were collected.

[1344] For SOD1 analysis, RNA was isolated by lysing the tissues in 1 mL of Qiazol in the TissueLyser II two cycles of 20 Hz for 2 minutes. Total RNA was then isolated by using the RNeasy Kit from Qiagen following manufacturer's instructions. Resulting RNA was used to generate cDNA using ThermoFisher Scientific Superscript IV cDNA reverse transcription kit (ThermoFisher Scientific, Cat. No. 11756050):

[1345] Twenty μl of a ready to use master mix and 11 μl of H₂O per reaction was added to RNA isolated above. Plates were sealed, mixed, and incubated on thermal cycler at 25° C. for 10 min, followed by 42° C. for 10 min and inactivation step at 85° C. for 5 min. RT-qPCR was performed by using two μl of cDNA and 10 μl Fast Advanced Mastermix (ThermoFisher Scientific A44359) are added to 1× house-keeping probe (GAPDH, ThermoFisher Scientific, Mf04392546_g1) and 1× target probe (SOD1, Mf04363557 ml) per well. Real time PCR was done in a QuantStudio5 Real Time PCR system (ThermoFisher Scientific). The mean level of SOD1 mRNA was normalized to the mean level of GAPDH mRNA for each sample. Group mean values were then normalized to the mean value for the PBS treated group, to obtain the relative level of SOD1 mRNA expression.

[1346] The results are shown in FIG. 5 and demonstrate that a C₂₂ hydrocarbon chain conjugated to the sense strand at position 6 of the dsRNA agent AD-1812376 shows a strong positive correlation with SOD1 knockdown in all adipose tissues analyzed at day 30 post-intravenous injection of SOD siRNA.

TABLE 11
Study Design

| | | # | Delivery | Dose | |
|---|---|---|---|---|---|
| Group | Duplex ID | Animals | Route | (mg/kg) | Day |
| 1 | PBS | 3 | IV | NA | 30 |
| 2 | AD-1812376 | 3 | IV | 3 | 30 |

### Example 9: Effect of dsRNA Agents Targeting Leptin and Comprising One or More C₂₂ Hydrocarbon Chains Conjugated to Position 6 on the Sense Strand, Counting from the 5′-end of the Sense Strand on mRNA Knockdown in Adipose Tissues

[1347] Leptin gene silencing in adipose tissue was studied with dsRNA agents comprising one or more C₂₂ hydrocarbon chains conjugated to position 6 on the sense strand, counting from the 5′-end of the sense strand. Leptin is a secreted protein highly enriched in adipose tissue. Knockdown of leptin in adipose tissue will improve metabolic syndrome in mice.

[1348] dsRNA agents comprising one or more C22 hydrocarbon chains conjugated to position 6 on the sense strand, counting from the 5′-end of the sense strand, targeting human leptin were synthesized as described above.

[1349] The effect of these dsRNA agents was examined in vivo in female and male lean mice (20 weeks old) that were fed with either chow diet or high fat diet, as summarized in Table 12. The modified sense and antisense strand nucleotide sequence of AD-1888031 and AD-1888032 are provided in Table 13.

[1350] On study day 0, mice were weighed and then lightly anesthetized under isoflurane and blood was collected via retroorbital collection and processed to serum. Mice were then subcutaneously administered a single 5 mg/kg dose of AD-1888031 or AD-1888032, or PBS control in 10 μl of a solution having a concentration of 0.5 mg/mL. The modified sense and antisense strand nucleotide sequence of AD-1888031 and AD-1888032 are provided in Table 13.

[1351] Body weights and blood were then collected at Day 8, Day 14, and Day 21 post-dose to evaluate circulating leptin for each mouse. All serum was collected in the fed state.

TABLE 12
Study Design

| | | | | Subcutaneous | Serum |
|---|---|---|---|---|---|
| Group | Sex | Diet | Treatment | Dose (mg/kg) | Collection |
| 1 | Female | Chow | PBS | NA | Day 0, 8, |
| 2 | Female | Chow | AD-1888031 | 5 | 14, 21 |
| 3 | Female | Chow | AD-1888032 | 5 | |
| 4 | Male | Chow | PBS | NA | |
| 5 | Male | Chow | AD-1888031 | 5 | |
| 6 | Male | Chow | AD-1888032 | 5 | |
| 7 | Male | HFD | AD-1888031 | 5 | |
| 8 | Male | HFD | AD-1888032 | 5 | |

TABLE 13

| | | | | | Molecular |
|---|---|---|---|---|---|
| Duplex | | | | Molecular | Weight |
| ID | Strand | Target | Sequence 5′ to 3′ | Weight | Found |
| AD- | sense | LEP | ususgaa(Gda)UfgUfAfGfuuuuauacsasa | 7289.23 | 7285.35 |
| 1888031 | | | | | |
| | antis | LEP | VPusUfsguaUfaAfAfacuaCfaCfuucaasgsc | 7651.03 | 7647.12 |
| AD- | sense | LEP | gsusgac(Uda)GfgUfUfUfuguuucuasusa | 7235.11 | 7231.28 |
| 1888032 | | | | | |
| | antis | LEP | VPusAfsuagAfaAfCfaaaaCfcAfgucacscsa | 7719.17 | 7715.22 |

[1352] Mouse serum leptin levels were measured using the Mouse Serum Leptin Elisa (Crystal Chem, Catalog #90030) following the manufacturer's protocol. All serum samples were measured in duplicate using 5 mL of serum. Serum samples from HFD mice was diluted 1:10 before adding 5_L to the ELISA plate to ensure signal was within the range of the standard curve.

[1353] Changes in leptin levels were graphed in GraphPad Prism (Version 9.4.1 (681)) using the group average of serum leptin levels (FIGS. 6A, 7A, and 8A) or percent change in serum leptin (FIGS. 6B, 7B, and 8B) for each timepoint +/− standard error. Percent change was calculated with the serum concentration of leptin divided by the Day 0 Serum leptin concentration for each respective mouse. Individual serum leptin concentrations, group average leptin concentrations, and group leptin concentration standard error are listed in Table 14, Table 15, and Table 16, respectively. Individual percent change in serum leptin concentrations, group average percent change in serum leptin concentrations, and group standard error of leptin concentration are listed in Table 17, Table 18, and Table 19, respectively.

[1354] The data demonstrate that a dose of 5 mg/kg of AD-1888031.1 and AD-1888032.1, comprising a C22 hydrocarbon chain conjugated to the sense strand at position 6, counting from the 5′-end of the sense strand, was able to reduce circulating leptin by about 50% at two weeks in lean female mice (FIGS. 6A and 6B), and by about 65% at two weeks in lean male mice (FIGS. 7A and 7B). Both female and male mice showed minimal recovery of leptin expression at week 3.

[1355] The effect of C22-conjugated dsRNA agents on male mice fed with high fat diet was also evaluated and shown in FIGS. 8A and 8B. A dose of 5 mg/kg of AD-1888031.1 and AD-1888032.1 dramatically reduced circulating leptin in high fat diet mice by about 90%, with only slight recovery of leptin expression at Day 21.

[1356] The levels of inhibition of the dsRNA agents increased from female mice, to male mice, to high fat diet male mice, suggesting that body weight may be a driving factor for gene silencing. For example, the heavier the mice (i.e., more body weight), the more dsRNA agents each animal would have received, and the more inhibition on leptin expression. In general, each lean female animal would have received about 0.11 mg dsRNA agent, while each lean male animal and each high fat diet male animal would have received about 0.14 mg and about 0.23 mg dsRNA agent, respectively.

[1357] In conclusion, the C22-conjugated dsRNA agents, e.g., AD-1888031.1 and AD-1888032.1, comprising a C22 hydrocarbon chain conjugated to the sense strand at position 6, counting from the 5′-end of the sense strand, were able to target leptin, an adipocyte specific gene, and potently and durably inhibit leptin expression levels in lean female mice, lean male mice, and male mice fed with a high fat diet. Moreover, a partial reduction in leptin levels may also prevent leptin resistance in mice and, thus, improve metabolism and reduce body weight.

TABLE 14
Individual Mouse Serum Concentrations
Serum Leptin (ng/mL)

| | | | Day | Day | Day |
|---|---|---|---|---|---|
| Treatment Group | Animal ID | Day 0 | 8 | 14 | 21 |
| Lean Female PBS | 1001 | 3.57 | 4.81 | 3.84 | 4.29 |
| | 1002 | 2.01 | 1.53 | 1.77 | 3.42 |
| | 1003 | 6.66 | 7.08 | 6.76 | 8.84 |
| Lean Female | 2001 | 3.24 | 1.50 | 1.24 | 2.00 |
| Leptin AD-1888031 | 2002 | 2.60 | 1.16 | 1.29 | 1.89 |
| | 2003 | 8.91 | 5.77 | 4.22 | 4.33 |
| Lean Female | 3001 | 3.03 | 1.96 | 1.47 | 2.18 |
| Leptin AD-1888032 | 3002 | 2.23 | 0.97 | 0.88 | 1.28 |
| | 3003 | 2.67 | 1.88 | 1.44 | 1.61 |
| Lean Male Leptin PBS | 4001 | 2.77 | 3.59 | 4.09 | 6.11 |
| | 4002 | 3.50 | 4.30 | 3.19 | 4.78 |
| | 4003 | 4.60 | 6.22 | 6.13 | 6.94 |
| Lean Male | 5001 | 5.94 | 2.37 | 1.88 | 2.18 |
| Leptin AD-1888031 | 5002 | 3.60 | 1.91 | 1.44 | 2.04 |
| | 5003 | 4.20 | 2.06 | 1.65 | 1.34 |
| Lean Male | 6001 | 2.46 | 0.96 | 1.02 | 1.47 |
| Leptin AD-1888032 | 6002 | 8.34 | 2.75 | 2.20 | 1.80 |
| | 6003 | 3.63 | 0.79 | 1.27 | 2.00 |
| HFD Male | 7001 | 91.58 | 3.05 | 4.04 | 7.05 |
| Leptin AD-1888031 | 7002 | 116.72 | 3.56 | 4.12 | 6.77 |
| | 7003 | 92.96 | 5.76 | 5.65 | 6.68 |
| HFD Male | 8001 | 81.84 | 2.94 | 3.54 | 4.40 |
| Leptin AD-1888032 | 8002 | 83.77 | 4.50 | 3.91 | 6.28 |
| | 8003 | 129.14 | 3.01 | 3.96 | 4.03 |

TABLE 15
Group Average Serum Leptin Concentrations
Group Average Serum Leptin (ng/mL)

| | | | Day | Day | Day |
|---|---|---|---|---|---|
| Treatment Group | Animal ID | Day 0 | 8 | 14 | 21 |
| Lean Female PBS | 1001 | 4.08 | 4.47 | 4.12 | 5.52 |
| | 1002 | | | | |
| | 1003 | | | | |
| Lean Female | 2001 | 4.92 | 2.81 | 2.25 | 2.74 |
| Leptin AD-1888031 | 2002 | | | | |
| | 2003 | | | | |
| Lean Female | 3001 | 2.65 | 1.60 | 1.26 | 1.69 |
| Leptin AD-1888032 | 3002 | | | | |
| | 3003 | | | | |
| Lean Male Leptin PBS | 4001 | 3.62 | 4.70 | 4.47 | 5.94 |
| | 4002 | | | | |
| | 4003 | | | | |
| Lean Male | 5001 | 4.58 | 2.11 | 1.66 | 1.85 |
| Leptin AD-1888031 | 5002 | | | | |
| | 5003 | | | | |
| Lean Male | 6001 | 4.81 | 1.50 | 1.50 | 1.76 |
| Leptin AD-1888032 | 6002 | | | | |
| | 6003 | | | | |
| HFD Male | 7001 | 100.42 | 4.12 | 4.60 | 6.83 |
| Leptin AD-1888031 | 7002 | | | | |
| | 7003 | | | | |
| HFD Male | 8001 | 98.25 | 3.49 | 3.80 | 4.90 |
| Leptin AD-1888032 | 8002 | | | | |
| | 8003 | | | | |

TABLE 16
Group Standard Error for Serum Leptin
Group Standard Error Serum Leptin (ng/mL)

| Treatment | Animal | | | | |
|---|---|---|---|---|---|
| Group | ID | Day 0 | Day 8 | Day 14 | Day 21 |
| Lean | 1001 | 2.363317 | 2.789439 | 2.508842 | 2.909304 |
| Female PBS | 1002 | | | | |
| | 1003 | | | | |
| Lean Female | 2001 | 3.474091 | 2.568692 | 1.707754 | 1.377894 |
| Leptin | 2002 | | | | |
| AD-1888031 | 2003 | | | | |
| Lean Female | 3001 | 0.40135 | 0.552431 | 0.329123 | 0.457212 |
| Leptin | 3002 | | | | |
| AD-1888032 | 3003 | | | | |
| Lean Male | 4001 | 0.924664 | 1.358248 | 1.50584 | 1.094218 |
| Leptin PBS | 4002 | | | | |
| | 4003 | | | | |
| Lean Male | 5001 | 1.219495 | 0.2369 | 0.215962 | 0.448158 |
| Leptin | 5002 | | | | |
| AD-1888031 | 5003 | | | | |
| Lean Male | 6001 | 3.116211 | 1.083027 | 0.620133 | 0.265945 |
| Leptin | 6002 | | | | |
| AD-1888032 | 6003 | | | | |
| HFD Male | 7001 | 14.12996 | 1.442328 | 0.906329 | 0.191559 |
| Leptin | 7002 | | | | |
| AD-1888031 | 7003 | | | | |
| HFD Male | 8001 | 26.76696 | 0.881409 | 0.231078 | 1.203625 |
| Leptin | 8002 | | | | |
| AD-1888032 | 8003 | | | | |

TABLE 17
Percent Change in Serum Leptin for each Individual Animal
Percent Change in Serum Leptin

| | | Day | | Day | Day |
|---|---|---|---|---|---|
| Treatment Group | Animal ID | 0 | Day 8 | 14 | 21 |
| Lean Female PBS | 1001 | 100 | 134.86 | 107.66 | 104.39 |
| | 1002 | 100 | 76.06 | 87.67 | 149.70 |
| | 1003 | 100 | 106.38 | 101.55 | 145.50 |
| Lean Female | 2001 | 100 | 46.47 | 38.31 | 51.48 |
| Leptin AD-1888031 | 2002 | 100 | 44.60 | 49.66 | 63.56 |
| | 2003 | 100 | 64.76 | 47.40 | 52.33 |
| Lean Female | 3001 | 100 | 64.70 | 48.36 | 67.88 |
| Leptin AD-1888032 | 3002 | 100 | 43.38 | 39.63 | 51.34 |
| | 3003 | 100 | 70.39 | 53.90 | 52.89 |
| Lean Male Leptin PBS | 4001 | 100 | 129.83 | 147.70 | 206.10 |
| | 4002 | 100 | 122.84 | 91.31 | 115.28 |
| | 4003 | 100 | 135.04 | 133.18 | 130.02 |
| Lean Male | 5001 | 100 | 39.95 | 31.56 | 38.11 |
| Leptin AD-1888031 | 5002 | 100 | 53.15 | 40.17 | 56.38 |
| | 5003 | 100 | 48.98 | 39.20 | 41.13 |
| Lean Male | 6001 | 100 | 39.24 | 41.63 | 63.01 |
| Leptin AD-1888032 | 6002 | 100 | 32.95 | 26.38 | 25.46 |
| | 6003 | 100 | 21.90 | 35.13 | 61.44 |
| HFD Male | 7001 | 100 | 3.07 | 5.15 | 7.69 |
| Leptin AD-1888031 | 7002 | 100 | 1.49 | 3.05 | 5.80 |
| | 7003 | 100 | 5.02 | 5.52 | 7.19 |
| HFD Male | 8001 | 100 | 3.59 | 4.96 | 5.38 |
| Leptin AD-1888032 | 8002 | 100 | 4.58 | 4.31 | 7.49 |
| | 8003 | 100 | 2.12 | 2.94 | 3.12 |

TABLE 18
Group Average Percent Change in Serum Leptin
Group Average Percent Change in Serum Leptin

| | | Day | | Day | Day |
|---|---|---|---|---|---|
| Treatment Group | Animal ID | 0 | Day 8 | 14 | 21 |
| Lean Female PBS | 1001 | 100 | 105.77 | 98.96 | 133.20 |
| | 1002 | | | | |
| | 1003 | | | | |
| Lean Female | 2001 | 100 | 51.94 | 45.12 | 55.79 |
| Leptin AD-1888031 | 2002 | | | | |
| | 2003 | | | | |
| Lean Female | 3001 | 100 | 59.49 | 47.30 | 57.37 |
| Leptin AD-1888032 | 3002 | | | | |
| | 3003 | | | | |
| Lean Male Leptin PBS | 4001 | 100 | 129.23 | 124.06 | 150.47 |
| | 4002 | | | | |
| | 4003 | | | | |
| Lean Male | 5001 | 100 | 47.36 | 36.98 | 45.20 |
| Leptin AD-1888031 | 5002 | | | | |
| | 5003 | | | | |
| Lean Male | 6001 | 100 | 31.36 | 34.38 | 49.97 |
| Leptin AD-1888032 | 6002 | | | | |
| | 6003 | | | | |
| HFD Male | 7001 | 100 | 3.19 | 4.57 | 6.89 |
| Leptin AD-1888031 | 7002 | | | | |
| | 7003 | | | | |
| HFD Male | 8001 | 100 | 3.43 | 4.07 | 5.33 |
| Leptin AD-1888032 | 8002 | | | | |
| | 8003 | | | | |

TABLE 19
Group Standard Error in Percent Change of Serum Leptin
Group Standard Error Percent Change in Serum Leptin

| | Animal | Day | | | |
|---|---|---|---|---|---|
| Treatment Group | ID | 0 | Day 8 | Day 14 | Day 21 |
| Lean Female PBS | 1001 | 0 | 29.40431 | 10.24501 | 25.03372 |
| | 1002 | | | | |
| | 1003 | | | | |
| Lean Female | 2001 | 0 | 11.13863 | 6.006439 | 6.74159 |
| Leptin AD-1888031 | 2002 | | | | |
| | 2003 | | | | |
| Lean Female | 3001 | 0 | 14.23971 | 7.195551 | 9.134996 |
| Leptin AD-1888032 | 3002 | | | | |
| | 3003 | | | | |
| Lean Male | 4001 | 0 | 6.122133 | 29.28125 | 48.74046 |
| Leptin PBS | 4002 | | | | |
| | 4003 | | | | |
| Lean Male | 5001 | 0 | 6.748633 | 4.713475 | 9.792716 |
| Leptin AD-1888031 | 5002 | | | | |
| | 5003 | | | | |
| Lean Male | 6001 | 0 | 8.775138 | 7.657442 | 21.24019 |
| Leptin AD-1888032 | 6002 | | | | |
| | 6003 | | | | |
| HFD Male | 7001 | 0 | 1.765579 | 1.328912 | 0.982239 |
| Leptin AD-1888031 | 7002 | | | | |
| | 7003 | | | | |
| HFD Male | 8001 | 0 | 1.234817 | 1.030463 | 2.186293 |
| Leptin AD-1888032 | 8002 | | | | |
| | 8003 | | | | |

### Example 10: In Vivo Dose Response and Duration of Intravenously Administered Lipid Conjugated dsRNA Agents Targeting Myostatin

[1358] The effect of dsRNA agents targeting myostatin (MSTN1) on the mRNA levels of MTSN1 in skeletal and cardiac muscle was examined. The design of this study is shown in Table 20.

[1359] Briefly, female C57BL/6 mice, 6-8 weeks of age (N=3 per group), were intravenously administered a single 1 mg/kg, 2.5 mg/kg or 5 mg/kg dose of a dsRNA agent targeting MSTN1. The modified nucleotide sequences of the sense and antisense strands of the dsRNA agents are provided in Table 21.

[1360] On Day 14 or Day 56 post-dose, quadriceps, heart, lungs, liver and other tissues were collected, immediately flash-frozen in liquid nitrogen and stored at −80° C. Tissues were ground with a tissue grinder (Geno/Grinder 2010 SPEX Sample Prep) at 1250 rpm for 1.5 minute. RNA extraction and purification were conducted per protocols as described in Qiagen's RNeasy 96 Universal Tissue Handbook. Resulting RNA (1500 ng) was used for cDNA synthesis with the Applied Biosystems™ High-Capacity cDNA Reverse Transcription Kit. Levels of target mRNA were quantified by RT-qPCR using a Roche LightCycler® 480. Relative change in target mRNA expression was determined with ΔΔCt method by doubly normalizing to GAPDH and the average of controls.

[1361] The results, shown in FIGS. 9A-9B, demonstrate that dsRNA agents comprising one or more lipophilic moieties (e.g., any compound or chemical moiety having an affinity for lipids, e.g., a C₂₂ hydrocarbon chain) conjugated at various positions on the sense or antisense strand inhibit MSTN1 in muscle tissue.

TABLE 20
Study design

| Group | siRNA | N | I.V. Dose | | sac | Collection |
|---|---|---|---|---|---|---|
| 1 | PBS | 3 | NA | | D 14 | Quad, heart |
| 2 | AD-1640773 | | 5 | mg/kg | | |
| 3 | AD-1684752 | | | | | |
| 4 | AD-1684750 | | | | | |
| 5 | AD-1684751 | | | | | |
| 6 | AD-1640773 | | 2.5 | mg/kg | | |
| 7 | AD-1684750 | | | | | |
| 8 | AD-1684751 | | | | | |
| 9 | AD-1640773 | | 1 | mg/kg | | |
| 10 | AD-1684750 | | | | | |
| 11 | AD-1684751 | | | | | |
| 12 | PBS | | NA | | D 56 | Quad, heart |
| 13 | AD-68685 | | 5 | mg/kg | | |
| 14 | AD-1640773 | | | | | |
| 15 | AD-1640773 | | 2.5 | mg/kg | | |
| 16 | AD-1640773 | | 1 | mg/kg | | |

TABLE 21

| | | | | | Molecular |
|---|---|---|---|---|---|
| | | | | Molecular | Weight |
| Duplex ID | Strand | Target | Sequence 5′ to 3′ | Weight | Found |
| AD-1640773 | sense | MSTN | asusggc(Ada)AfaGfAfAfc | 7387.441 | 7383.514 |
| | | | aaauaausasa | | |
| | antis | MSTN | VPusUfsauuAfuUfUfguucU | 7538.806 | 7533.956 |
| | | | fuUfgccaususa | | |
| AD-1684752 | sense | MSTN | asusggc(Ada)AfaGfAfAfc | 7387.441 | 7383.514 |
| | | | aaauaausasa | | |
| | antis | MSTN | usUfsauuAfuUfUfguucUfu | 7461.807 | 7457.976 |
| | | | Ufgccaususa | | |
| AD-1684750 | sense | MSTN | asusggc(Ada)AfaGfAfAfc | 7387.441 | 7383.514 |
| | | | aaauaausasa | | |
| | antis | MSTN | (Pmmds)usUfsauuAfuUfUf | 7704.117 | 7699.942 |
| | | | guucUfuUfgccaususa | | |
| AD-1684751 | sense | MSTN | asusggc(Ada)AfaGfAfAfc | 7387.441 | 7383.514 |
| | | | aaauaausasa | | |
| | antis | MSTN | (tPmmds)usUfsauuAfuUfU | 7704.113 | 7699.942 |
| | | | fguucUfuUfgccaususa | | |
| AD-68685 | sense | MSTN | asusggcaAfaGfAfAfcaaau | 7765.662 | 7761.684 |
| | | | aauaaL10 | | |
| | antis | MSTN | VPusUfsauuAfuUfUfguucU | 7538.806 | 7533.956 |
| | | | fuUfgccaususa | | |

### Example 11: In Vivo Effect of Intravenously Administered Lipid Conjugated dsRNA Agents Targeting SOD1

[1362] The effect of dsRNA agents targeting SOD1 and comprising one or more C₂₂ hydrocarbon chains conjugated to position 6 on the sense strand, counting from the 5′-end of the sense strand, were examined for knockdown in muscle tissues.

[1363] The design of this study is shown in Table 22.

[1364] Briefly, female C57BL/6 mice, 6-8 weeks of age (N=3 per group), were intravenously administered a single 2 mg/kg dose of AD-1427062, a dsRNA agent targeting SOD1. The modified nucleotide sequences of the sense and antisense strands of AD-1427062 are provided in Table 23.

[1365] On Day 14 post-dose, quadriceps, heart, lungs, liver, and other tissues were collected, immediately flash-frozen in liquid nitrogen and stored at −80° C. Tissues were ground with a tissue grinder (Geno/Grinder 2010 SPEX Sample Prep) at 1250 rpm for 1.5 minute. RNA extraction and purification were conducted per protocols as described in Qiagen's RNeasy 96 Universal Tissue Handbook. Resulting RNA (1500 ng) was used for cDNA synthesis with the Applied Biosystems™ High-Capacity cDNA Reverse Transcription Kit. Levels of target mRNA were quantified by RT-qPCR using a Roche LightCycler® 480. Relative change in target mRNA expression was determined with ΔΔCt method by doubly normalizing to GAPDH and the average of controls.

[1366] The results, shown in FIG. 10, demonstrate that administration of a single dose of a dsRNA agent targeting SOD1 and comprising one or more C₂₂ hydrocarbon chains conjugated to position 6 on the sense strand, counting from the 5′-end of the sense strand, potently knocks down SOD1 expression in muscle tissues.

TABLE 22
Study Design

| Group | siRNA | N | I.V. Dose | sac | Collection |
|---|---|---|---|---|---|
| 1 | PBS | 3 | NA | D14 | Left quad, right quad, |
| 2 | AD-1427062 | | 2 mg/kg | | diaphragm, |
| | | | | | gastrocnemius |

TABLE 23

| | | | | | Molecular |
|---|---|---|---|---|---|
| Duplex | | | | Molecular | Weight |
| ID | Strand | Target | Sequence 5′ to 3′ | Weight | Found |
| AD-1427062 | sense | SOD1 | csasuuu(Uda)AfaUfCf | 7128.132 | 7124.348 |
| | | | Cfucacucuasasa | | |
| | antis | SOD1 | VPusUfsuagAfgUfGfag | 7851.156 | 7847.154 |
| | | | gaUfuAfaaaugsasg | | |

### Example 12: In Vivo Multidose Comparison of Intravenously or Subcutaneously Administered Lipid Conjugated dsRNA Agents Targeting SOD1

[1367] The effect of route of administration of lipid conjugated dsRNA agents targeting SOD1, e.g., dsRNA agents targeting SOD1 and comprising one or more C₂₂ hydrocarbon chains conjugated to position 6 on the sense strand, counting from the 5′-end of the sense strand) on the mRNA levels of SOD1 in skeletal and cardiac muscle was examined. The design of this study is shown in Table 24.

[1368] Briefly, female C57BL/6 mice, 6-8 weeks of age (N=3 per group), were intravenously or subcutaneously administered a single 2 mg/kg dose or a 1 mg/kg dose on Day 0 followed by a second 1 mg/kg dose 1 week later (1 mg/kg dose X2) of AD-1812376, a dsRNA agent targeting SOD1. The modified nucleotide sequences of the sense and antisense strands of AD-1812376 are provided in Table 25.

[1369] On Day 28 post-dose, quadriceps, heart, lungs, liver, and other tissues were collected, immediately flash-frozen in liquid nitrogen and stored at −80° C. Tissues were ground with a tissue grinder (Geno/Grinder 2010 SPEX Sample Prep) at 1250 rpm for 1.5 minute. RNA extraction and purification were conducted per protocols as described in Qiagen's RNeasy 96 Universal Tissue Handbook. Resulting RNA (1500 ng) was used for cDNA synthesis with the Applied Biosystems™ High-Capacity cDNA Reverse Transcription Kit. Levels of target mRNA were quantified by RT-qPCR using a Roche LightCycler® 480. Relative change in target mRNA expression was determined with ΔΔCt method by doubly normalizing to GAPDH and the average of controls.

[1370] The result, shown in FIGS. 11 and 12, demonstrate that dsRNA agents targeting SOD1 and comprising one or more C₂₂ hydrocarbon chains conjugated to position 6 on the sense strand, counting from the 5′-end of the sense strand, knocks down SOD1 expression in muscle tissues irrespective of intravenous or subcutaneous administration.

TABLE 24
Study design

| Group | siRNA | Route of Admin. | Dose | | sac | N | Collection |
|---|---|---|---|---|---|---|---|
| 1 | PBS | IV | NA | | D 21 | 3 | Quad, heart, |
| 2 | AD-1812376 | IV | 2 | mg/kg | D 28 | | adipose |
| 3 | AD-1812376 | Subcutaneous | 2 | mg/kg | | | |
| 4 | AD-1812376 | IV | 1 + 1 | mg/kg | | | |
| 5 | AD-1812376 | Subcutaneous | 1 + 1 | mg/kg | | | |

TABLE 25

| | | | | | Molecular |
|---|---|---|---|---|---|
| | | | | Molecular | Weight |
| Duplex ID | Strand | Target | Sequence 5′ to 3′ | Weight | Found |
| AD-1812376 | sense | SOD1 | ususggg(Cda)AfaAfGfG | 7468.423 | 7464.473 |
| | | | fuggaaaugsasa | | |
| | antis | SOD1 | VPusUfscauUfuCfCfacc | 7532.881 | 7529.035 |
| | | | uUfuGfcccaasgsu | | |

### Example 13: In Vivo Dose Response of Intravenously Administered Lipid Conjugated siRNA Agent Targeting Myostatin in Monkeys

[1371] The effect of dsRNA agents targeting Myostatin (MTSN) and comprising one or more C₂₂ hydrocarbon chains conjugated to position 6 on the sense strand, counting from the 5′-end of the sense strand, were examined for knockdown in muscle tissues.

[1372] The modified nucleotide sequences of the duplexes used in this study are provided in Table 26.

[1373] The effect of the agents in Table 26 was examined in vivo in non-human primates as summarized in Table 27. Briefly, animals were intravenously administered a single 2 mg/kg or 5 mg/kg dose of the agent on Day 0. On Day 56, animals were sacrificed and heart, gastrocnemius and quadriceps tissues were collected.

TABLE 26

| | | | | | Molecular |
|---|---|---|---|---|---|
| Duplex | | | | Molecular | Weight |
| ID | Strand | Target | Sequence 5′ to 3′ | Weight | Found |
| AD-1640773 | sense | MSTN | asusggc(Ada)AfaGfAf | 7387.441 | 7383.514 |
| | | | Afcaaauaausasa | | |
| | antis | MSTN | VPusUfsauuAfuUfUfgu | 7538.806 | 7533.956 |
| | | | ucUfuUfgccaususa | | |

TABLE 27
Study Design

| Group | siRNA | N | I.V. Dose | sac | Collection |
|---|---|---|---|---|---|
| 1 | PBS | 2 | NA | D56 | Quad, |
| 2 | AD-1640773 | 3 | 2 mg/kg | | gastrocnemius |
| 3 | AD-1640773 | 3 | 5 mg/kg | | |

[1374] For quantification of MTSN protein concentration, tissues were pulverized into powder and samples lysates were prepared in mass to volume ratio of 1:20, and clarified lysate was used for Myostatin mRNA and total protein analysis. Tissue lysates were analyzed for MTSN protein using a commercially available sandwich ELISA per the manufacturer instructions (R&D Systems, DGDF80). In brief, standards and samples were added to microplates pre-coated with a monoclonal antibody specific for mature MTSN. Mature MTSN present in samples and standards were immobilized onto microplates. Plates were washed to remove unbound material, followed by addition of horseradish peroxidase-conjugated monoclonal antibody specific for mature MTSN. Plates were washed to remove any unbound antibody-enzyme reagent, and a substrate solution was added to each well. The substrate reacts with immobilized antibody-enzyme complex to generate a color product proportional to the amount of MTSN present in the unknown samples or standards. The color development is stopped and the intensity of the color is measured. For tissue, the mean concentration of GDF-8 protein (pg/mL) was adjusted to total protein concentration (mg/mL), and values were reported in pg/mg. The mean tissue MTSN concentration for each animal was normalized to the mean GDF-8 concentration of control animals to determine the fraction of myostatin protein relative to control.

[1375] The results of administration of a single 5 mg/kg dose of AD-1640773, a dsRNA agents targeting Myostatin (MTSN) and comprising one or more C₂₂ hydrocarbon chains conjugated to position 6 on the sense strand, counting from the 5′-end of the sense strand, on MTSN protein concentrations is provided FIG. 13C and demonstrates that intravenous administration of the dsRNA agent knocksdown MTSN protein in muscle tissue.

[1376] For quantification of MTSN mRNA knockdown, heart, quadriceps, and gastrocnemius tissues were analyzed for myostatin (MSTN) mRNA using an exploratory reverse transcription quantitative polymerase chain reaction (RT-qPCR) method as outlined below.

[1377] Frozen heart, quadriceps, and gastrocnemius tissue samples were pulverized using a Genogrinder, further homogenized with a TissueLyser LT for 2 minutes with 50 cycles/sec before being lysed in 350 μL Buffer MR1 plus 6 μL reducing agent TCEP from the MACHEREY-NAGEL NucleoMag® RNA kit. Lysates were cleared by centrifugation at 5600×g for 5 minutes in atabletop centrifuge. RNA was isolated from cleared lysates using the NucleoMag® RNA kit according to the manufacturer's protocol. RNA concentration and integrity were measured using the RNA ScreenTape Analysis on an Agilent TapeStation instrument. All RNA samples were diluted to 7.14 ng/μL in nuclease-free water, from which 14 μL, or 100 ng, was used for complementary DNA (cDNA) synthesis in a reverse transcription (RT) reaction using the Invitrogen™ SuperScript™ IV VILO™ Master Mix in a total reaction volume of 20 μL. For quantitative polymerase chain reaction (qPCR) reactions, 2 μL, containing 10 ng of cDNA, was used in a total reaction volume of 20 μL. qPCR was performed using the Applied Biosystems™ TaqMan® Fast Advanced Master Mix in the Applied Biosystems™ ViiA7 Real-Time PCR System. Commercially available, Macaca fascicularis-specific MSTN, peptidyl-prolyl cis-trans isomerase B (PPIB), and glyceraldehyde-3-phosphate dehydrogenase (GAPDH) TaqMan® primer/probes were used for qPCR analysis. Each sample was analyzed in duplicate by qPCR, with each reaction a duplex of fluorescein amidite (FAM)-labeled MSTN plus VIC (Aequorea Victoria Green Fluorescent Protein)-labeled GAPDH or PPIB. Data were acquired using ThermoFisher QuantStudio v1.3 software with 40 cycles and data acquisition at the end of each cycle.

[1378] Cycle threshold (Ct) values were determined using the ThermoFisher QuantStudio v1.3 software. The cycle threshold was set to 0.2 for the 40-cycle qPCR assay. The Delta-Delta Threshold Cycle (Relative Quantification) [ΔΔCt (RQ)] method was used to calculate fold-change in MSTN mRNA between control and treated samples using Microsoft® Office Excel 2016 (Microsoft Corporation [Redmond, WA]). First, the difference between MSTN and each housekeeping gene was calculated by subtracting the average housekeeping gene Ct from the average MSTN Ct for each duplex qPCR reaction. The difference between the delta Ct of each sample and the delta Ct of the average delta Ct of the control group (vehicle treated) was used to calculate the fold-change in MSTN mRNA. The fold-change in MSTN mRNA from all housekeeping genes was then averaged using a geometric mean and was reported as the “% mRNA remaining”, where the control group “% mRNA” remaining was set to 100% remaining.

[1379] The results of administration of single 2 mg/kg or 5 mg/kg doses of AD-1640773, a dsRNA agents targeting Myostatin (MTSN) and comprising one or more C₂₂ hydrocarbon chains conjugated to position 6 on the sense strand, counting from the 5′-end of the sense strand, on MTSN mRNA knockdown are provided FIGS. 13A and B and demonstrates that intravenous administration of the dsRNA agent knocks down MTSN mRNA in muscle tissue.

### Example 14: dsRNA Synthesis

[1380] siRNAs targeting the human leptin (LEP) gene (human: GenBank NM_000230.3, NCBI GeneID: 3952) were designed using custom R and Python scripts. The human LEP REFSEQ NM_000230.3 mRNA has a length of 3427 bases. siRNAs targeting the mouse leptin (Lep) gene (mouse: GenBank NM_008493.3, NCBI GeneID: 16846 were designed using custom R and Python scripts. The mouse Lep REFSEQ NM_008493.3 mRNA has a length of 3257 bases.

[1381] siRNAs comprising a GalNAc conjugate targeting ligand were designed and synthesized as described above. siRNAs comprising an unsaturated C₂₂ hydrocarbon chain conjugated to the sense strand at position 6, counting from the 5′-end of the sense strand, were designed and synthesized as described above.

[1382] Detailed lists of the modified LEP sense and antisense strand nucleotide sequences comprising an unsaturated C₂₂ hydrocarbon chain conjugated to the sense strand at position 6, counting from the 5′-end of the sense strand, are shown in Tables 29 and 35, and the corresponding unmodified LEP sense and antisense nucleotide sequences are shown in Tables 28 and 34.

[1383] Detailed lists of the modified LEP sense and antisense strand nucleotide sequences comprising a GalNAc conjugate targeting ligand are shown in Tables 31 and 33, and the corresponding unmodified LEP sense and antisense nucleotide sequences are shown in Table 30 and 32.

[1384] It is to be understood that, throughout the application, a duplex name without a decimal is equivalent to a duplex name with a decimal which merely references the batch number of the duplex. For example, AD-959917 is equivalent to AD-959917.1.

TABLE 28
Unmodified Sense and Antisense Strand Sequences of LEP dsRNA Agents

| | | SEQ | NM_000230.3 | | | SEQ | NM_000230.3 | |
|---|---|---|---|---|---|---|---|---|
| Duplex | Sense Strand | ID | Start | End | Antisense Strand | ID | Start | End |
| Name | Sequence 5′ to 3′ | NO: | Position | Position | Sequence 5′ to 3′ | NO: | Position | Position |
| AD-1949134 | AAUGUGUUUUCUGAAUAACAA | | 1436 | 1456 | UUGUUAUUCAGAAAACACAUUCU | | 1434 | 1456 |
| AD-1949135 | UGAAUCAAAGCAGUUAACUUA | | 2158 | 2178 | UAAGUUAACUGCUUUGAUUCAAG | | 2156 | 2178 |
| AD-1949136 | GUGAAACUUCCUAAGUAUAAA | | 3024 | 3044 | UUUAUACUUAGGAAGUUUCACAC | | 3022 | 3044 |
| AD-1949137 | UCUCGUAACUGGUUUCAUUUA | | 1255 | 1275 | UAAAUGAAACCAGUUACGAGAGA | | 1253 | 1275 |
| AD-1949138 | UGCACUUUGUAACAUGUUUAA | | 2433 | 2453 | UUAAACAUGUUACAAAGUGCAAG | | 2431 | 2453 |
| AD-1949139 | CUGUCCAAGGAAACUUGAAUA | | 2143 | 2163 | UAUUCAAGUUUCCUUGGACAGAU | | 2141 | 2163 |
| AD-1949140 | UGAAGAAAACUCCUUUAGCAA | | 1951 | 1971 | UUGCUAAAGGAGUUUUCUUCACC | | 1949 | 1971 |
| AD-1949141 | GGAGUGAGAUCAUUUUCUUAA | | 1479 | 1499 | UUAAGAAAAUGAUCUCACUCCUU | | 1477 | 1499 |
| AD-1949142 | UUGUCUGUUUUUGUAACUUAA | | 3048 | 3068 | UUAAGUUACAAAAACAGACAACC | | 3046 | 3068 |
| AD-1949143 | GCAUGCCAAAUUGUAGUUCUA | | 1864 | 1884 | UAGAACUACAAUUUGGCAUGCAA | | 1862 | 1884 |
| AD-1949144 | AAGGGUAAAGAAGUUUGAUAA | | 2839 | 2859 | UUAUCAAACUUCUUUACCCUUCA | | 2837 | 2859 |
| AD-1949145 | UUAGGAUGUUUUUCAUGAAAA | | 1513 | 1533 | UUUUCAUGAAAAACAUCCUAAGC | | 1511 | 1533 |
| AD-1949146 | CCUCAUCAAGACAAUUGUCAA | | 156 | 176 | UUGACAAUUGUCUUGAUGAGGGU | | 154 | 176 |
| AD-1949147 | UCACAUUCAGGAAGAUGAAAA | | 2057 | 2077 | UUUUCAUCUUCCUGAAUGUGACC | | 2055 | 2077 |
| AD-1949148 | UUUGUCAAGUGUCAUAUGUAA | | 1363 | 1383 | UUACAUAUGACACUUGACAAAAC | | 1361 | 1383 |
| AD-1949149 | CCUUUGAAACAAGAUAACUGA | | 2490 | 2510 | UCAGUUAUCUUGUUUCAAAGGGA | | 2488 | 2510 |
| AD-1949150 | CUCCUUUUGCUUGAAACCAAA | | 727 | 747 | UUUGGUUUCAAGCAAAAGGAGGC | | 725 | 747 |
| AD-1949151 | CACCAGGAUCAAUGACAUUUA | | 174 | 194 | UAAAUGUCAUUGAUCCUGGUGAC | | 172 | 194 |
| AD-1949152 | CUUCAAAUCCAUCCAGAAUAA | | 1634 | 1654 | UUAUUCUGGAUGGAUUUGAAGCA | | 1632 | 1654 |
| AD-1949153 | GGGCUGAAAGCCAUUUGUUGA | | 1663 | 1683 | UCAACAAAUGGCUUUCAGCCCUU | | 1661 | 1683 |
| AD-1949154 | GAGCUGAACCCAUUUUGAGUA | | 1176 | 1196 | UACUCAAAAUGGGUUCAGCUCAG | | 1174 | 1196 |
| AD-1949155 | GCUGUGUUUUUGCUAUCACAA | | 2108 | 2128 | UUGUGAUAGCAAAAACACAGCAG | | 2106 | 2128 |
| AD-1949156 | AUCCAGGACUCUGUCAAUUUA | | 661 | 681 | UAAAUUGACAGAGUCCUGGAUAA | | 659 | 681 |
| AD-1949157 | UUCCAGAAACGUGAUCCAAAA | | 327 | 347 | UUUUGGAUCACGUUUCUGGAAGG | | 325 | 347 |
| AD-1949158 | CAUGGCAGUGUUCCUAUUUGA | | 1838 | 1858 | UCAAAUAGGAACACUGCCAUGUA | | 1836 | 1858 |
| AD-1949159 | AAGCCUUUUGCUCACAAAACA | | 2978 | 2998 | UGUUUUGUGAGCAAAAGGCUUAA | | 2976 | 2998 |
| AD-1949160 | CUACUGUGACUGAUGUUACAA | | 1275 | 1295 | UUGUAACAUCAGUCACAGUAGAA | | 1273 | 1295 |
| AD-1949161 | UGGAAGCACAUGUUUAUUUAA | | 1035 | 1055 | UUAAAUAAACAUGUGCUUCCAGC | | 1033 | 1055 |
| AD-1949162 | GCAUCUUAGCUUCUAUUAUAA | | 2462 | 2482 | UUAUAAUAGAAGCUAAGAUGCCC | | 2460 | 2482 |
| AD-1949163 | UUCAGCCAUCAACAAGAGUUA | | 832 | 852 | UAACUCUUGUUGAUGGCUGAAGA | | 830 | 852 |
| AD-1949164 | AGCUCACCCAAUAAACAUUAA | | 2232 | 2252 | UUAAUGUUUAUUGGGUGAGCUUC | | 2230 | 2252 |
| AD-1949165 | UGGCCCUAUCUUUUCUAUGUA | | 94 | 114 | UACAUAGAAAAGAUAGGGCCAAA | | 92 | 114 |
| AD-1949166 | GAUCACACUCUGGGUUUAUUA | | 1817 | 1837 | UAAUAAACCCAGAGUGUGAUCAA | | 1815 | 1837 |
| AD-1949167 | UCACCGGUUUGGACUUCAUUA | | 227 | 247 | UAAUGAAGUCCAAACCGGUGACU | | 225 | 247 |
| AD-1949168 | GAGCGAGAUUCCGUCUUAAAA | | 3349 | 3369 | UUUUAAGACGGAAUCUCGCUCUG | | 3347 | 3369 |
| AD-1949169 | UUAUCUUCUGCAAUUGCUUAA | | 1496 | 1516 | UUAAGCAAUUGCAGAAGAUAAGA | | 1494 | 1516 |
| AD-1949170 | GAGUAGCAAGUUCUAGAGAAA | | 2872 | 2892 | UUUCUCUAGAACUUGCUACUCUU | | 2870 | 2892 |
| AD-1949171 | CCUGUUUUGUUGGAAGGUUUA | | 2719 | 2739 | UAAACCUUCCAACAAAACAGGCU | | 2717 | 2739 |
| AD-1949172 | ACAGGAGAAUCGCUUAAACCA | | 3271 | 3291 | UGGUUUAAGCGAUUCUCCUGUCU | | 3269 | 3291 |
| AD-1949173 | ACUCUUCCAAAGGCAUAAGAA | | 699 | 719 | UUCUUAUGCCUUUGGAAGAGUGG | | 697 | 719 |
| AD-1949174 | GAUGGAUUUGAAGCAAAGCAA | | 1072 | 1092 | UUGCUUUGCUUCAAAUCCAUCCA | | 1070 | 1092 |
| AD-1949175 | CUCCUCCAAACAGAAAGUCAA | | 210 | 230 | UUGACUUUCUGUUUGGAGGAGAC | | 208 | 230 |
| AD-1949176 | CUGGAAAAGAGGAGUUUCGAA | | 2651 | 2671 | UUCGAAACUCCUCUUUUCCAGAA | | 2649 | 2671 |
| AD-1949177 | CAGUUUCCAAUCCCAUAGAUA | | 1146 | 1166 | UAUCUAUGGGAUUGGAAACUGCA | | 1144 | 1166 |
| AD-1949178 | ACCUGGCACAAUGGCUAAUUA | | 2996 | 3016 | UAAUUAGCCAUUGUGCCAGGUUU | | 2994 | 3016 |
| AD-1949179 | UCCAAGGACCAGGUUAUUUUA | | 1331 | 1351 | UAAAAUAACCUGGUCCUUGGAGA | | 1329 | 1351 |
| AD-1949180 | CCUGGGAAGGAAAAUGCAUUA | | 45 | 65 | UAAUGCAUUUUCCUUCCCAGGAU | | 43 | 65 |
| AD-1949181 | AGUCCAAGAUGACACCAAAAA | | 135 | 155 | UUUUUGGUGUCAUCUUGGACUUU | | 133 | 155 |
| AD-1949182 | UCCUCACAACCACCUAAUCAA | | 2944 | 2964 | UUGAUUAGGUGGUUGUGAGGAUC | | 2942 | 2964 |
| AD-1949183 | AGCAAGGCCAAAAUUACCAAA | | 1903 | 1923 | UUUGGUAAUUUUGGCCUUGCUUG | | 1901 | 1923 |
| AD-1949184 | CACUGAAUGCCUCAAUGUGAA | | 882 | 902 | UUCACAUUGAGGCAUUCAGUGAG | | 880 | 902 |
| AD-1949185 | UUACAUCACAGUGUUUGCAAA | | 1290 | 1310 | UUUGCAAACACUGUGAUGUAACA | | 1288 | 1310 |
| AD-1949186 | UCCAAGGAGUUCCAUGAAGAA | | 977 | 997 | UUCUUCAUGGAACUCCUUGGAAU | | 975 | 997 |
| AD-1949187 | AGGAUUGAAGAGCAUUGCAUA | | 630 | 650 | UAUGCAAUGCUCUUCAAUCCUGG | | 628 | 650 |
| AD-1949188 | AAGGGAGAAGGAUCUAGAAUA | | 1419 | 1439 | UAUUCUAGAUCCUUCUCCCUUCU | | 1417 | 1439 |
| AD-1949189 | UAUUAAAGGAGUUAAGAGUAA | | 2857 | 2877 | UUACUCUUAACUCCUUUAAUAUC | | 2855 | 2877 |
| AD-1949190 | GUGGUCUUUCCUAUCAUGGAA | | 1722 | 1742 | UUCCAUGAUAGGAAAGACCACUC | | 1720 | 1742 |
| AD-1949191 | UCUGCAUUUUAUUCUGGAUGA | | 1056 | 1076 | UCAUCCAGAAUAAAAUGCAGAAU | | 1054 | 1076 |
| AD-1949192 | UCCUGCAAGGACUACGUUAAA | | 580 | 600 | UUUAACGUAGUCCUUGCAGGAAG | | 578 | 600 |
| AD-1949193 | GUUCCCUCUGAGAAUUCCAAA | | 962 | 982 | UUUGGAAUUCUCAGAGGGAACCU | | 960 | 982 |
| AD-1949194 | GAAGCUGAUGCUUUGCUUCAA | | 1619 | 1639 | UUGAAGCAAAGCAUCAGCUUCUC | | 1617 | 1639 |
| AD-1949195 | AAAUACAUAAGACCAUAACAA | | 2527 | 2547 | UUGUUAUGGUCUUAUGUAUUUUC | | 2525 | 2547 |
| AD-1949196 | CCUUUGGAUGACCAGAACAAA | | 941 | 961 | UUUGUUCUGGUCAUCCAAAGGCU | | 939 | 961 |
| AD-1949197 | GGAGAUGCAGAGGUAAAAGUA | | 2746 | 2766 | UACUUUUACCUCUGCAUCUCCAC | | 2744 | 2766 |
| AD-1949198 | UUGGGUUCAUCUGAGCAAGAA | | 1206 | 1226 | UUCUUGCUCAGAUGAACCCAACC | | 1204 | 1226 |
| AD-1949199 | GCUCUCCAGUUAGUUCUCUCA | | 1239 | 1259 | UGAGAGAACUAACUGGAGAGCCA | | 1237 | 1259 |
| AD-1949200 | AGUGUGAGCAGUGAGUUACAA | | 2763 | 2783 | UUGUAACUCACUGCUCACACUUU | | 2761 | 2783 |
| AD-1949201 | UACACAGGAUCCUAUUCUCAA | | 754 | 774 | UUGAGAAUAGGAUCCUGUGUAUA | | 752 | 774 |
| AD-1949202 | GUGCGGAUUCUUGUGGCUUUA | | 75 | 95 | UAAAGCCACAAGAAUCCGCACAG | | 73 | 95 |
| AD-1949203 | AUCAGGCUGAGGUGUCUUAAA | | 2960 | 2980 | UUUAAGACACCUCAGCCUGAUUA | | 2958 | 2980 |
| AD-1949204 | UUCGAGGUAGAGUUUGAAGGA | | 2666 | 2686 | UCCUUCAAACUCUACCUCGAAAC | | 2664 | 2686 |
| AD-1949205 | UCCUGACCUUAUCCAAGAUGA | | 263 | 283 | UCAUCUUGGAUAAGGUCAGGAUG | | 261 | 283 |
| AD-1949206 | CCUUGAAGGUCACUCUUCCUA | | 564 | 584 | UAGGAAGAGUGACCUUCAAGGCC | | 562 | 584 |
| AD-1949207 | CUGGCUUUCUCCGACUGCUAA | | 1698 | 1718 | UUAGCAGUCGGAGAAAGCCAGAG | | 1696 | 1718 |
| AD-1949209 | UUGCAUUCCCAGUGGUCAAAA | | 2277 | 2297 | UUUUGACCACUGGGAAUGCAAGA | | 2275 | 2297 |
| AD-1949210 | CAGCUGAACAGCCAAAUGCAA | | 2337 | 2357 | UUGCAUUUGGCUGUUCAGCUGCU | | 2335 | 2357 |
| AD-1949211 | AUACCCAGAGCAUUACGUGAA | | 2589 | 2609 | UUCACGUAAUGCUCUGGGUAUCA | | 2587 | 2609 |
| AD-1949212 | CUGGCAGUCUACCAACAGAUA | | 292 | 312 | UAUCUGUUGGUAGACUGCCAGUG | | 290 | 312 |
| AD-1949213 | AGAGCUGCUCUGGAAAAUGUA | | 2916 | 2936 | UACAUUUUCCAGAGCAGCUCUCA | | 2914 | 2936 |
| AD-1949214 | GAGCACCUGCUUCAUGCUCAA | | 2185 | 2205 | UUGAGCAUGAAGCAGGUGCUCAG | | 2183 | 2205 |
| AD-1949215 | GGUGGGAAAUGGUAUGAGCUA | | 2374 | 2394 | UAGCUCAUACCAUUUCCCACCUG | | 2372 | 2394 |
| AD-1949216 | GUGUGGUGGGUUCUUUGGAAA | | 1459 | 1479 | UUUCCAAAGAACCCACCACACAA | | 1457 | 1479 |
| AD-1949217 | GUUCUUGUCUGAUUGGCUCAA | | 1879 | 1899 | UUGAGCCAAUCAGACAAGAACUA | | 1877 | 1899 |
| AD-1949218 | GAUCACAAGGUCACUAGAUGA | | 3145 | 3165 | UCAUCUAGUGACCUUGUGAUCCC | | 3143 | 3165 |
| AD-1949219 | CUCCGGGAUCUUCUUCACGUA | | 367 | 387 | UACGUGAAGAAGAUCCCGGAGGU | | 365 | 387 |
| AD-1949220 | GUCCUGGAAGCUUCAGGCUAA | | 457 | 477 | UUAGCCUGAAGCUUCCAGGACAC | | 455 | 477 |
| AD-1949221 | AUUUCCCUGACUCCUCUAAGA | | 677 | 697 | UCUUAGAGGAGUCAGGGAAAUUG | | 675 | 697 |
| AD-1949222 | UGACUGCGAUCUUCAGAGCAA | | 1760 | 1780 | UUGCUCUGAAGAUCGCAGUCACC | | 1758 | 1780 |
| AD-1949223 | CCAGCUUCUCCAGGCUCUUUA | | 1092 | 1112 | UAAAGAGCCUGGAGAAGCUGGUG | | 1090 | 1112 |
| AD-1949224 | UCUGGCUUCCAGGUAUCUCCA | | 610 | 630 | UGGAGAUACCUGGAAGCCAGAGU | | 608 | 630 |
| AD-1949225 | CCUGGCCAACAUGGUGAAACA | | 3173 | 3193 | UGUUUCACCAUGUUGGCCAGGAU | | 3171 | 3193 |
| AD-1949226 | GUUUUUACUCCAGUGGUGAAA | | 1935 | 1955 | UUUCACCACUGGAGUAAAAACCC | | 1933 | 1955 |
| AD-1949227 | AUGCAUGGUGCAGUUGACAGA | | 2352 | 2372 | UCUGUCAACUGCACCAUGCAUUU | | 2350 | 2372 |
| AD-1949228 | AGAGUACAGUGAGCCAAGAUA | | 3301 | 3321 | UAUCUUGGCUCACUGUACUCUCC | | 3299 | 3321 |
| AD-1949229 | AACACAAAAGUUAGCUGAGCA | | 3208 | 3228 | UGCUCAGCUAACUUUUGUGUUUU | | 3206 | 3228 |
| AD-1949230 | UCCCAGCAACACAAGCUGGAA | | 1019 | 1039 | UUCCAGCUUGUGUUGCUGGGAGU | | 1017 | 1039 |
| AD-1949231 | AGACCUGACAAGCACUGCUAA | | 1981 | 2001 | UUAGCAGUGCUUGUCAGGUCUCA | | 1979 | 2001 |
| AD-1949232 | AUUUCACACACGCAGUCAGUA | | 190 | 210 | UACUGACUGCGUGUGUGAAAUGU | | 188 | 210 |
| AD-1949233 | CAGGUAAUGAGGGACUGGAAA | | 2611 | 2631 | UUUCCAGUCCCUCAUUACCUGGC | | 2609 | 2631 |
| AD-1949234 | UGAGGGAUGUGAAUUGCCUGA | | 2689 | 2709 | UCAGGCAAUUCACAUCCCUCACC | | 2687 | 2709 |
| AD-1949235 | GAUCCUCACCAGUAUGCCUUA | | 309 | 329 | UAAGGCAUACUGGUGAGGAUCUG | | 307 | 329 |
| AD-1949236 | CUGGCCUUCUCUAAGAGCUGA | | 388 | 408 | UCAGCUCUUAGAGAAGGCCAGCA | | 386 | 408 |
| AD-1949237 | GAUUCCCACCAAGGUCUUCAA | | 816 | 836 | UUGAAGACCUUGGUGGGAAUCCC | | 814 | 836 |
| AD-1949238 | AUAUCCAACGACCUGGAGAAA | | 346 | 366 | UUUCUCCAGGUCGUUGGAUAUUU | | 344 | 366 |
| AD-1949239 | CAUGCUGAAGGGACCUUGAAA | | 2821 | 2841 | UUUCAAGGUCCCUUCAGCAUGGC | | 2819 | 2841 |
| AD-1949240 | UGGUGCUAUAGGCUGGAGAAA | | 2213 | 2233 | UUUCUCCAGCCUAUAGCACCAGU | | 2211 | 2233 |
| AD-1949241 | CAUCCACACACGCAGGAACUA | | 1000 | 1020 | UAGUUCCUGCGUGUGUGGAUGUG | | 998 | 1020 |
| AD-1949242 | UUGCCCUGAGUGGAUCUCCAA | | 1315 | 1335 | UUGGAGAUCCACUCAGGGCAACA | | 1313 | 1335 |
| AD-1949243 | CGCACUCACCCAUGUGCCAAA | | 2298 | 2318 | UUUGGCACAUGGGUGAGUGCGGU | | 2296 | 2318 |
| AD-1949244 | GCGGUUGCAAGGCCCAAGAAA | | 19 | 39 | UUUCUUGGGCCUUGCAACCGCUG | | 17 | 39 |
| AD-1949245 | CUGGAGAGAAGUUUCUGGCCA | | 1575 | 1595 | UGGCCAGAAACUUCUCUCCAGGG | | 1573 | 1595 |
| AD-1949246 | GCCUGCAGAGAGAAGCCUGUA | | 2704 | 2724 | UACAGGCUUCUCUCUGCAGGCAA | | 2702 | 2724 |
| AD-1949247 | CCUCUGAAUGGUCCAGGGUUA | | 1797 | 1817 | UAACCCUGGACCAUUCAGAGGGU | | 1795 | 1817 |
| AD-1949248 | CAUUAAGAUUGAGGCCUGCCA | | 2247 | 2267 | UGGCAGGCCUCAAUCUUAAUGUU | | 2245 | 2267 |
| AD-1949249 | GAGACCGAGCGCUUUCUGGAA | | 2636 | 2656 | UUCCAGAAAGCGCUCGGUCUCCC | | 2634 | 2656 |
| AD-1949250 | AGCGAGAGGCAGAGAAAGAAA | | 2782 | 2802 | UUUCUUUCUCUGCCUCUCGCUGU | | 2780 | 2802 |
| AD-1949251 | UGCCACCAUCCUGCUGCUGUA | | 2093 | 2113 | UACAGCAGCAGGAUGGUGGCAGA | | 2091 | 2113 |
| AD-1949252 | CUGCCCUCAGGGAUCUUGCAA | | 2262 | 2282 | UUGCAAGAUCCCUGAGGGCAGGC | | 2260 | 2282 |
| AD-1949253 | CCAAGCUGUGCCCAUCCAAAA | | 114 | 134 | UUUUGGAUGGGCACAGCUUGGAC | | 112 | 134 |
| AD-1949254 | CACAGGGAACCCUGCUUGCAA | | 2417 | 2437 | UUGCAAGCAGGGUUCCCUGUGGG | | 2415 | 2437 |
| AD-1949255 | AUAGCCCAGGUCCUCUGAUAA | | 2572 | 2592 | UUAUCAGAGGACCUGGGCUAUAG | | 2570 | 2592 |
| AD-1949256 | GUCUCUGCAGGACAUGCUGUA | | 513 | 533 | UACAGCAUGUCCUGCAGAGACCC | | 511 | 533 |
| AD-1949257 | ACGGUCCCACACUGGUGACUA | | 1745 | 1765 | UAGUCACCAGUGUGGGACCGUCA | | 1743 | 1765 |
| AD-1949258 | AGUGGGCUGCAUCUGGGAUUA | | 800 | 820 | UAAUCCCAGAUGCAGCCCACUCU | | 798 | 820 |
| AD-1949259 | CCUUCCCACUGGAGGUCACAA | | 2042 | 2062 | UUGUGACCUCCAGUGGGAAGGGC | | 2040 | 2062 |
| AD-1949260 | ACUGCACUCCGGCCUGAUGAA | | 3327 | 3347 | UUCAUCAGGCCGGAGUGCAGUGG | | 3325 | 3347 |
| AD-1949261 | AGUGGCCUGGAGACCUUGGAA | | 424 | 444 | UUCCAAGGUCUCCAGGCCACUGG | | 422 | 444 |
| AD-1949262 | GUCCACCCAGCAAAGAGUGGA | | 785 | 805 | UCCACUCUUUGCUGGGUGGACCC | | 783 | 805 |
| AD-1949263 | GGCUACUCCACAGAGGUGGUA | | 472 | 492 | UACCACCUCUGUGGAGUAGCCUG | | 470 | 492 |
| AD-1949264 | UGGCAGGACCAGGACUAUAGA | | 2556 | 2576 | UCUAUAGUCCUGGUCCUGCCACC | | 2554 | 2576 |
| AD-1949265 | GUUAAGGGAAGGAACUCUGGA | | 595 | 615 | UCCAGAGUUCCUUCCCUUAACGU | | 593 | 615 |
| AD-1949266 | ACAGUGGGUGGUGGAUCUGUA | | 2127 | 2147 | UACAGAUCCACCACCCACUGUGU | | 2125 | 2147 |
| AD-1949267 | GAGCUGGCAAAGGUGGCUCUA | | 1224 | 1244 | UAGAGCCACCUUUGCCAGCUCUU | | 1222 | 1244 |
| AD-1949268 | CCACUCGGGAGGCUGAGACAA | | 3254 | 3274 | UUGUCUCAGCCUCCCGAGUGGCU | | 3252 | 3274 |

TABLE 29
Modified Sense and Antisense Strand Sequences of LEP dsRNA Agents
Comprising an Unsaturated C22 Hydrocarbon Chain Conjugated
to Position 6 on the Sense Strand, Counting from the 5′-end of the Sense Strand

| | | SEQ | | SEQ | | SEQ |
|---|---|---|---|---|---|---|
| Duplex | Sense Strand | ID | | ID | mRNA target | ID |
| Name | Sequence 5′ to 3′ | NO. | Antisense Strand Sequence 5′ to 3′ | NO. | sequence 5′ to 3′ | NO. |
| AD-1949134 | asasugu(Gda)UfuUf | | VPusUfsguuAfuUfCfagaaAfaCfacauuscsu | | AGAAUGUGUUUUCUGAAUAACAU | |
| | UfCfugaauaacsasa | | | | | |
| AD-1949135 | usgsaau(Cda)AfaAf | | VPusAfsaguUfaAfCfugcuUfuGfauucasasg | | CUUGAAUCAAAGCAGUUAACUUU | |
| | GfCfaguuaacususa | | | | | |
| AD-1949136 | gsusgaa(Ada)CfuUf | | VPusUfsuauAfcUfUfaggaAfgUfuucacsasc | | GUGUGAAACUUCCUAAGUAUAAA | |
| | CfCfuaaguauasasa | | | | | |
| AD-1949137 | uscsucg(Uda)AfaCf | | VPusAfsaauGfaAfAfccagUfuAfcgagasgsa | | UCUCUCGUAACUGGUUUCAUUUC | |
| | UfGfguuucauususa | | | | | |
| AD-1949138 | usgscac(Uda)UfuGf | | VPusUfsaaaCfaUfGfuuacAfaAfgugcasasg | | CUUGCACUUUGUAACAUGUUUAC | |
| | UfAfacauguuusasa | | | | | |
| AD-1949139 | csusguc(Cda)AfaGf | | VPusAfsuucAfaGfUfuuccUfuGfgacagsasu | | AUCUGUCCAAGGAAACUUGAAUC | |
| | GfAfaacuugaasusa | | | | | |
| AD-1949140 | usgsaag(Ada)AfaAf | | VPusUfsgcuAfaAfGfgaguUfuUfcuucascsc | | GGUGAAGAAAACUCCUUUAGCAG | |
| | CfUfccuuuagcsasa | | | | | |
| AD-1949141 | gsgsagu(Gda)AfgAf | | VPusUfsaagAfaAfAfugauCfuCfacuccsusu | | AAGGAGUGAGAUCAUUUUCUUAU | |
| | UfCfauuuucuusasa | | | | | |
| AD-1949142 | ususguc(Uda)GfuUf | | VPusUfsaagUfuAfCfaaaaAfcAfgacaascsc | | GGUUGUCUGUUUUUGUAACUUAA | |
| | UfUfuguaacuusasa | | | | | |
| AD-1949143 | gscsaug(Cda)CfaAf | | VPusAfsgaaCfuAfCfaauuUfgGfcaugcsasa | | UUGCAUGCCAAAUUGUAGUUCUU | |
| | AfUfuguaguucsusa | | | | | |
| AD-1949144 | asasggg(Uda)AfaAf | | VPusUfsaucAfaAfCfuucuUfuAfcccuuscsa | | UGAAGGGUAAAGAAGUUUGAUAU | |
| | GfAfaguuugausasa | | | | | |
| AD-1949145 | ususagg(Ada)UfgUf | | VPusUfsuucAfuGfAfaaaaCfaUfccuaasgsc | | GCUUAGGAUGUUUUUCAUGAAAA | |
| | UfUfuucaugaasasa | | | | | |
| AD-1949146 | cscsuca(Uda)CfaAf | | VPusUfsgacAfaUfUfgucuUfgAfugaggsgsu | | ACCCUCAUCAAGACAAUUGUCAC | |
| | GfAfcaauugucsasa | | | | | |
| AD-1949147 | uscsaca(Uda)UfcAf | | VPusUfsuucAfuCfUfuccuGfaAfugugascsc | | GGUCACAUUCAGGAAGAUGAAAG | |
| | GfGfaagaugaasasa | | | | | |
| AD-1949148 | ususugu(Cda)AfaGf | | VPusUfsacaUfaUfGfacacUfuGfacaaasasc | | GUUUUGUCAAGUGUCAUAUGUAG | |
| | UfGfucauaugusasa | | | | | |
| AD-1949149 | cscsuuu(Gda)AfaAf | | VPusCfsaguUfaUfCfuuguUfuCfaaaggsgsa | | UCCCUUUGAAACAAGAUAACUGA | |
| | CfAfagauaacusgsa | | | | | |
| AD-1949150 | csusccu(Uda)UfuGf | | VPusUfsuggUfuUfCfaagcAfaAfaggagsgsc | | GCCUCCUUUUGCUUGAAACCAAA | |
| | CfUfugaaaccasasa | | | | | |
| AD-1949151 | csascca(Gda)GfaUf | | VPusAfsaauGfuCfAfuugaUfcCfuggugsasc | | GUCACCAGGAUCAAUGACAUUUC | |
| | CfAfaugacauususa | | | | | |
| AD-1949152 | csusuca(Ada)AfuCf | | VPusUfsauuCfuGfGfauggAfuUfugaagscsa | | UGCUUCAAAUCCAUCCAGAAUAA | |
| | CfAfuccagaausasa | | | | | |
| AD-1949153 | gsgsgcu(Gda)AfaAf | | VPusCfsaacAfaAfUfggcuUfuCfagcccsusu | | AAGGGCUGAAAGCCAUUUGUUGG | |
| | GfCfcauuuguusgsa | | | | | |
| AD-1949154 | gsasgcu(Gda)AfaCf | | VPusAfscucAfaAfAfugggUfuCfagcucsasg | | CUGAGCUGAACCCAUUUUGAGUG | |
| | CfCfauuuugagsusa | | | | | |
| AD-1949155 | gscsugu(Gda)UfuUf | | VPusUfsgugAfuAfGfcaaaAfaCfacagcsasg | | CUGCUGUGUUUUUGCUAUCACAC | |
| | UfUfgcuaucacsasa | | | | | |
| AD-1949156 | asuscca(Gda)GfaCf | | VPusAfsaauUfgAfCfagagUfcCfuggausasa | | UUAUCCAGGACUCUGUCAAUUUC | |
| | UfCfugucaauususa | | | | | |
| AD-1949157 | ususcca(Gda)AfaAf | | VPusUfsuugGfaUfCfacguUfuCfuggaasgsg | | CCUUCCAGAAACGUGAUCCAAAU | |
| | CfGfugauccaasasa | | | | | |
| AD-1949158 | csasugg(Cda)AfgUf | | VPusCfsaaaUfaGfGfaacaCfuGfccaugsusa | | UACAUGGCAGUGUUCCUAUUUGG | |
| | GfUfuccuauuusgsa | | | | | |
| AD-1949159 | asasgcc(Uda)UfuUf | | VPusGfsuuuUfgUfGfagcaAfaAfggcuusasa | | UUAAGCCUUUUGCUCACAAAACC | |
| | GfCfucacaaaascsa | | | | | |
| AD-1949160 | csusacu(Gda)UfgAf | | VPusUfsguaAfcAfUfcaguCfaCfaguagsasa | | UUCUACUGUGACUGAUGUUACAU | |
| | CfUfgauguuacsasa | | | | | |
| AD-1949161 | usgsgaa(Gda)CfaCf | | VPusUfsaaaUfaAfAfcaugUfgCfuuccasgsc | | GCUGGAAGCACAUGUUUAUUUAU | |
| | AfUfguuuauuusasa | | | | | |
| AD-1949162 | gscsauc(Uda)UfaGf | | VPusUfsauaAfuAfGfaagcUfaAfgaugcscsc | | GGGCAUCUUAGCUUCUAUUAUAG | |
| | CfUfucuauuausasa | | | | | |
| AD-1949163 | ususcag(Cda)CfaUf | | VPusAfsacuCfuUfGfuugaUfgGfcugaasgsa | | UCUUCAGCCAUCAACAAGAGUUG | |
| | CfAfacaagagususa | | | | | |
| AD-1949164 | asgscuc(Ada)CfcCf | | VPusUfsaauGfuUfUfauugGfgUfgagcususc | | GAAGCUCACCCAAUAAACAUUAA | |
| | AfAfuaaacauusasa | | | | | |
| AD-1949165 | usgsgcc(Cda)UfaUf | | VPusAfscauAfgAfAfaagaUfaGfggccasasa | | UUUGGCCCUAUCUUUUCUAUGUC | |
| | CfUfuuucuaugsusa | | | | | |
| AD-1949166 | gsasuca(Cda)AfcUf | | VPusAfsauaAfaCfCfcagaGfuGfugaucsasa | | UUGAUCACACUCUGGGUUUAUUA | |
| | CfUfggguuuaususa | | | | | |
| AD-1949167 | uscsacc(Gda)GfuUf | | VPusAfsaugAfaGfUfccaaAfcCfggugascsu | | AGUCACCGGUUUGGACUUCAUUC | |
| | UfGfgacuucaususa | | | | | |
| AD-1949168 | gsasgcg(Ada)GfaUf | | VPusUfsuuaAfgAfCfggaaUfcUfcgcucsusg | | CAGAGCGAGAUUCCGUCUUAAAA | |
| | UfCfcgucuuaasasa | | | | | |
| AD-1949169 | ususauc(Uda)UfcUf | | VPusUfsaagCfaAfUfugcaGfaAfgauaasgsa | | UCUUAUCUUCUGCAAUUGCUUAG | |
| | GfCfaauugcuusasa | | | | | |
| AD-1949170 | gsasgua(Gda)CfaAf | | VPusUfsucuCfuAfGfaacuUfgCfuacucsusu | | AAGAGUAGCAAGUUCUAGAGAAG | |
| | GfUfucuagagasasa | | | | | |
| AD-1949171 | cscsugu(Uda)UfuGf | | VPusAfsaacCfuUfCfcaacAfaAfacaggscsu | | AGCCUGUUUUGUUGGAAGGUUUG | |
| | UfUfggaagguususa | | | | | |
| AD-1949172 | ascsagg(Ada)GfaAf | | VPusGfsguuUfaAfGfcgauUfcUfccuguscsu | | AGACAGGAGAAUCGCUUAAACCU | |
| | UfCfgcuuaaacscsa | | | | | |
| AD-1949173 | ascsucu(Uda)CfcAf | | VPusUfscuuAfuGfCfcuuuGfgAfagagusgsg | | CCACUCUUCCAAAGGCAUAAGAC | |
| | AfAfggcauaagsasa | | | | | |
| AD-1949174 | gsasugg(Ada)UfuUf | | VPusUfsgcuUfuGfCfuucaAfaUfccaucscsa | | UGGAUGGAUUUGAAGCAAAGCAC | |
| | GfAfagcaaagcsasa | | | | | |
| AD-1949175 | csusccu(Cda)CfaAf | | VPusUfsgacUfuUfCfuguuUfgGfaggagsasc | | GUCUCCUCCAAACAGAAAGUCAC | |
| | AfCfagaaagucsasa | | | | | |
| AD-1949176 | csusgga(Ada)AfaGf | | VPusUfscgaAfaCfUfccucUfuUfuccagsasa | | UUCUGGAAAAGAGGAGUUUCGAG | |
| | AfGfgaguuucgsasa | | | | | |
| AD-1949177 | csasguu(Uda)CfcAf | | VPusAfsucuAfuGfGfgauuGfgAfaacugscsa | | UGCAGUUUCCAAUCCCAUAGAUG | |
| | AfUfcccauagasusa | | | | | |
| AD-1949178 | ascscug(Gda)CfaCf | | VPusAfsauuAfgCfCfauugUfgCfcaggususu | | AAACCUGGCACAAUGGCUAAUUC | |
| | AfAfuggcuaaususa | | | | | |
| AD-1949179 | uscscaa(Gda)GfaCf | | VPusAfsaaaUfaAfCfcuggUfcCfuuggasgsa | | UCUCCAAGGACCAGGUUAUUUUA | |
| | CfAfgguuauuususa | | | | | |
| AD-1949180 | cscsugg(Gda)AfaGf | | VPusAfsaugCfaUfUfuuccUfuCfccaggsasu | | AUCCUGGGAAGGAAAAUGCAUUG | |
| | GfAfaaaugcaususa | | | | | |
| AD-1949181 | asgsucc(Ada)AfgAf | | VPusUfsuuuGfgUfGfucauCfuUfggacususu | | AAAGUCCAAGAUGACACCAAAAC | |
| | UfGfacaccaaasasa | | | | | |
| AD-1949182 | uscscuc(Ada)CfaAf | | VPusUfsgauUfaGfGfugguUfgUfgaggasusc | | GAUCCUCACAACCACCUAAUCAG | |
| | CfCfaccuaaucsasa | | | | | |
| AD-1949183 | asgscaa(Gda)GfcCf | | VPusUfsuggUfaAfUfuuugGfcCfuugcususg | | CAAGCAAGGCCAAAAUUACCAAA | |
| | AfAfaauuaccasasa | | | | | |
| AD-1949184 | csascug(Ada)AfuGf | | VPusUfscacAfuUfGfaggcAfuUfcagugsasg | | CUCACUGAAUGCCUCAAUGUGAC | |
| | CfCfucaaugugsasa | | | | | |
| AD-1949185 | ususaca(Uda)CfaCf | | VPusUfsugcAfaAfCfacugUfgAfuguaascsa | | UGUUACAUCACAGUGUUUGCAAU | |
| | AfGfuguuugcasasa | | | | | |
| AD-1949186 | uscscaa(Gda)GfaGf | | VPusUfscuuCfaUfGfgaacUfcCfuuggasasu | | AUUCCAAGGAGUUCCAUGAAGAC | |
| | UfUfccaugaagsasa | | | | | |
| AD-1949187 | asgsgau(Uda)GfaAf | | VPusAfsugcAfaUfGfcucuUfcAfauccusgsg | | CCAGGAUUGAAGAGCAUUGCAUG | |
| | GfAfgcauugcasusa | | | | | |
| AD-1949188 | asasggg(Ada)GfaAf | | VPusAfsuucUfaGfAfuccuUfcUfcccuuscsu | | AGAAGGGAGAAGGAUCUAGAAUG | |
| | GfGfaucuagaasusa | | | | | |
| AD-1949189 | usasuua(Ada)AfgGf | | VPusUfsacuCfuUfAfacucCfuUfuaauasusc | | GAUAUUAAAGGAGUUAAGAGUAG | |
| | AfGfuuaagagusasa | | | | | |
| AD-1949190 | gsusggu(Cda)UfuUf | | VPusUfsccaUfgAfUfaggaAfaGfaccacsusc | | GAGUGGUCUUUCCUAUCAUGGAG | |
| | CfCfuaucauggsasa | | | | | |
| AD-1949191 | uscsugc(Ada)UfuUf | | VPusCfsaucCfaGfAfauaaAfaUfgcagasasu | | AUUCUGCAUUUUAUUCUGGAUGG | |
| | UfAfuucuggausgsa | | | | | |
| AD-1949192 | uscscug(Cda)AfaGf | | VPusUfsuaaCfgUfAfguccUfuGfcaggasasg | | CUUCCUGCAAGGACUACGUUAAG | |
| | GfAfcuacguuasasa | | | | | |
| AD-1949193 | gsusucc(Cda)UfcUf | | VPusUfsuggAfaUfUfcucaGfaGfggaacscsu | | AGGUUCCCUCUGAGAAUUCCAAG | |
| | GfAfgaauuccasasa | | | | | |
| AD-1949194 | gsasagc(Uda)GfaUf | | VPusUfsgaaGfcAfAfagcaUfcAfgcuucsusc | | GAGAAGCUGAUGCUUUGCUUCAA | |
| | GfCfuuugcuucsasa | | | | | |
| AD-1949195 | asasaua(Cda)AfuAf | | VPusUfsguuAfuGfGfucuuAfuGfuauuususc | | GAAAAUACAUAAGACCAUAACAG | |
| | AfGfaccauaacsasa | | | | | |
| AD-1949196 | cscsuuu(Gda)GfaUf | | VPusUfsuguUfcUfGfgucaUfcCfaaaggscsu | | AGCCUUUGGAUGACCAGAACAAG | |
| | GfAfccagaacasasa | | | | | |
| AD-1949197 | gsgsaga(Uda)GfcAf | | VPusAfscuuUfuAfCfcucuGfcAfucuccsasc | | GUGGAGAUGCAGAGGUAAAAGUG | |
| | GfAfgguaaaagsusa | | | | | |
| AD-1949198 | ususggg(Uda)UfcAf | | VPusUfscuuGfcUfCfagauGfaAfcccaascsc | | GGUUGGGUUCAUCUGAGCAAGAG | |
| | UfCfugagcaagsasa | | | | | |
| AD-1949199 | gscsucu(Cda)CfaGf | | VPusGfsagaGfaAfCfuaacUfgGfagagcscsa | | UGGCUCUCCAGUUAGUUCUCUCG | |
| | UfUfaguucucuscsa | | | | | |
| AD-1949200 | asgsugu(Gda)AfgCf | | VPusUfsguaAfcUfCfacugCfuCfacacususu | | AAAGUGUGAGCAGUGAGUUACAG | |
| | AfGfugaguuacsasa | | | | | |
| AD-1949201 | usascac(Ada)GfgAf | | VPusUfsgagAfaUfAfggauCfcUfguguasusa | | UAUACACAGGAUCCUAUUCUCAC | |
| | UfCfcuauucucsasa | | | | | |
| AD-1949202 | gsusgcg(Gda)AfuUf | | VPusAfsaagCfcAfCfaagaAfuCfcgcacsasg | | CUGUGCGGAUUCUUGUGGCUUUG | |
| | CfUfuguggcuususa | | | | | |
| AD-1949203 | asuscag(Gda)CfuGf | | VPusUfsuaaGfaCfAfccucAfgCfcugaususa | | UAAUCAGGCUGAGGUGUCUUAAG | |
| | AfGfgugucuuasasa | | | | | |
| AD-1949204 | ususcga(Gda)GfuAf | | VPusCfscuuCfaAfAfcucuAfcCfucgaasasc | | GUUUCGAGGUAGAGUUUGAAGGA | |
| | GfAfguuugaagsgsa | | | | | |
| AD-1949205 | uscscug(Ada)CfcUf | | VPusCfsaucUfuGfGfauaaGfgUfcaggasusg | | CAUCCUGACCUUAUCCAAGAUGG | |
| | UfAfuccaagausgsa | | | | | |
| AD-1949206 | cscsuug(Ada)AfgGf | | VPusAfsggaAfgAfGfugacCfuUfcaaggscsc | | GGCCUUGAAGGUCACUCUUCCUG | |
| | UfCfacucuuccsusa | | | | | |
| AD-1949207 | csusggc(Uda)UfuCf | | VPusUfsagcAfgUfCfggagAfaAfgccagsasg | | CUCUGGCUUUCUCCGACUGCUAG | |
| | UfCfcgacugcusasa | | | | | |
| AD-1949209 | ususgca(Uda)UfcCf | | VPusUfsuugAfcCfAfcuggGfaAfugcaasgsa | | UCUUGCAUUCCCAGUGGUCAAAC | |
| | CfAfguggucaasasa | | | | | |
| AD-1949210 | csasgcu(Gda)AfaCf | | VPusUfsgcaUfuUfGfgcugUfuCfagcugscsu | | AGCAGCUGAACAGCCAAAUGCAU | |
| | AfGfccaaaugcsasa | | | | | |
| AD-1949211 | asusacc(Cda)AfgAf | | VPusUfscacGfuAfAfugcuCfuGfgguauscsa | | UGAUACCCAGAGCAUUACGUGAG | |
| | GfCfauuacgugsasa | | | | | |
| AD-1949212 | csusggc(Ada)GfuCf | | VPusAfsucuGfuUfGfguagAfcUfgccagsusg | | CACUGGCAGUCUACCAACAGAUC | |
| | UfAfccaacagasusa | | | | | |
| AD-1949213 | asgsagc(Uda)GfcUf | | VPusAfscauUfuUfCfcagaGfcAfgcucuscsa | | UGAGAGCUGCUCUGGAAAAUGUG | |
| | CfUfggaaaaugsusa | | | | | |
| AD-1949214 | gsasgca(Cda)CfuGf | | VPusUfsgagCfaUfGfaagcAfgGfugcucsasg | | CUGAGCACCUGCUUCAUGCUCAG | |
| | CfUfucaugcucsasa | | | | | |
| AD-1949215 | gsgsugg(Gda)AfaAf | | VPusAfsgcuCfaUfAfccauUfuCfccaccsusg | | CAGGUGGGAAAUGGUAUGAGCUG | |
| | UfGfguaugagcsusa | | | | | |
| AD-1949216 | gsusgug(Gda)UfgGf | | VPusUfsuccAfaAfGfaaccCfaCfcacacsasa | | UUGUGUGGUGGGUUCUUUGGAAG | |
| | GfUfucuuuggasasa | | | | | |
| AD-1949217 | gsusucu(Uda)GfuCf | | VPusUfsgagCfcAfAfucagAfcAfagaacsusa | | UAGUUCUUGUCUGAUUGGCUCAC | |
| | UfGfauuggcucsasa | | | | | |
| AD-1949218 | gsasuca(Cda)AfaGf | | VPusCfsaucUfaGfUfgaccUfuGfugaucscsc | | GGGAUCACAAGGUCACUAGAUGG | |
| | GfUfcacuagausgsa | | | | | |
| AD-1949219 | csusccg(Gda)GfaUf | | VPusAfscguGfaAfGfaagaUfcCfcggagsgsu | | ACCUCCGGGAUCUUCUUCACGUG | |
| | CfUfucuucacgsusa | | | | | |
| AD-1949220 | gsusccu(Gda)GfaAf | | VPusUfsagcCfuGfAfagcuUfcCfaggacsasc | | GUGUCCUGGAAGCUUCAGGCUAC | |
| | GfCfuucaggcusasa | | | | | |
| AD-1949221 | asusuuc(Cda)CfuGf | | VPusCfsuuaGfaGfGfagucAfgGfgaaaususg | | CAAUUUCCCUGACUCCUCUAAGC | |
| | AfCfuccucuaasgsa | | | | | |
| AD-1949222 | usgsacu(Gda)CfgAf | | VPusUfsgcuCfuGfAfagauCfgCfagucascsc | | GGUGACUGCGAUCUUCAGAGCAG | |
| | UfCfuucagagcsasa | | | | | |
| AD-1949223 | cscsagc(Uda)UfcUf | | VPusAfsaagAfgCfCfuggaGfaAfgcuggsusg | | CACCAGCUUCUCCAGGCUCUUUG | |
| | CfCfaggcucuususa | | | | | |
| AD-1949224 | uscsugg(Cda)UfuCf | | VPusGfsgagAfuAfCfcuggAfaGfccagasgsu | | ACUCUGGCUUCCAGGUAUCUCCA | |
| | CfAfgguaucucscsa | | | | | |
| AD-1949225 | cscsugg(Cda)CfaAf | | VPusGfsuuuCfaCfCfauguUfgGfccaggsasu | | AUCCUGGCCAACAUGGUGAAACC | |
| | CfAfuggugaaascsa | | | | | |
| AD-1949226 | gsusuuu(Uda)AfcUf | | VPusUfsucaCfcAfCfuggaGfuAfaaaacscsc | | GGGUUUUUACUCCAGUGGUGAAG | |
| | CfCfaguggugasasa | | | | | |
| AD-1949227 | asusgca(Uda)GfgUf | | VPusCfsuguCfaAfCfugcaCfcAfugcaususu | | AAAUGCAUGGUGCAGUUGACAGC | |
| | GfCfaguugacasgsa | | | | | |
| AD-1949228 | asgsagu(Ada)CfaGf | | VPusAfsucuUfgGfCfucacUfgUfacucuscsc | | GGAGAGUACAGUGAGCCAAGAUC | |
| | UfGfagccaagasusa | | | | | |
| AD-1949229 | asascac(Ada)AfaAf | | VPusGfscucAfgCfUfaacuUfuUfguguususu | | AAAACACAAAAGUUAGCUGAGCG | |
| | GfUfuagcugagscsa | | | | | |
| AD-1949230 | uscscca(Gda)CfaAf | | VPusUfsccaGfcUfUfguguUfgCfugggasgsu | | ACUCCCAGCAACACAAGCUGGAA | |
| | CfAfcaagcuggsasa | | | | | |
| AD-1949231 | asgsacc(Uda)GfaCf | | VPusUfsagcAfgUfGfcuugUfcAfggucuscsa | | UGAGACCUGACAAGCACUGCUAG | |
| | AfAfgcacugcusasa | | | | | |
| AD-1949232 | asusuuc(Ada)CfaCf | | VPusAfscugAfcUfGfcgugUfgUfgaaausgsu | | ACAUUUCACACACGCAGUCAGUC | |
| | AfCfgcagucagsusa | | | | | |
| AD-1949233 | csasggu(Ada)AfuGf | | VPusUfsuccAfgUfCfccucAfuUfaccugsgsc | | GCCAGGUAAUGAGGGACUGGAAC | |
| | AfGfggacuggasasa | | | | | |
| AD-1949234 | usgsagg(Gda)AfuGf | | VPusCfsaggCfaAfUfucacAfuCfccucascsc | | GGUGAGGGAUGUGAAUUGCCUGC | |
| | UfGfaauugccusgsa | | | | | |
| AD-1949235 | gsasucc(Uda)CfaCf | | VPusAfsaggCfaUfAfcuggUfgAfggaucsusg | | CAGAUCCUCACCAGUAUGCCUUC | |
| | CfAfguaugccususa | | | | | |
| AD-1949236 | csusggc(Cda)UfuCf | | VPusCfsagcUfcUfUfagagAfaGfgccagscsa | | UGCUGGCCUUCUCUAAGAGCUGC | |
| | UfCfuaagagcusgsa | | | | | |
| AD-1949237 | gsasuuc(Cda)CfaCf | | VPusUfsgaaGfaCfCfuuggUfgGfgaaucscsc | | GGGAUUCCCACCAAGGUCUUCAG | |
| | CfAfaggucuucsasa | | | | | |
| AD-1949238 | asusauc(Cda)AfaCf | | VPusUfsucuCfcAfGfgucgUfuGfgauaususu | | AAAUAUCCAACGACCUGGAGAAC | |
| | GfAfccuggagasasa | | | | | |
| AD-1949239 | csasugc(Uda)GfaAf | | VPusUfsucaAfgGfUfcccuUfcAfgcaugsgsc | | GCCAUGCUGAAGGGACCUUGAAG | |
| | GfGfgaccuugasasa | | | | | |
| AD-1949240 | usgsgug(Cda)UfaUf | | VPusUfsucuCfcAfGfccuaUfaGfcaccasgsu | | ACUGGUGCUAUAGGCUGGAGAAG | |
| | AfGfgcuggagasasa | | | | | |
| AD-1949241 | csasucc(Ada)CfaCf | | VPusAfsguuCfcUfGfcgugUfgUfggaugsusg | | CACAUCCACACACGCAGGAACUC | |
| | AfCfgcaggaacsusa | | | | | |
| AD-1949242 | ususgcc(Cda)UfgAf | | VPusUfsggaGfaUfCfcacuCfaGfggcaascsa | | UGUUGCCCUGAGUGGAUCUCCAA | |
| | GfUfggaucuccsasa | | | | | |
| AD-1949243 | csgscac(Uda)CfaCf | | VPusUfsuggCfaCfAfugggUfgAfgugcgsgsu | | ACCGCACUCACCCAUGUGCCAAG | |
| | CfCfaugugccasasa | | | | | |
| AD-1949244 | gscsggu(Uda)GfcAf | | VPusUfsucuUfgGfGfccuuGfcAfaccgcsusg | | CAGCGGUUGCAAGGCCCAAGAAG | |
| | AfGfgcccaagasasa | | | | | |
| AD-1949245 | csusgga(Gda)AfgAf | | VPusGfsgccAfgAfAfacuuCfuCfuccagsgsg | | CCCUGGAGAGAAGUUUCUGGCCC | |
| | AfGfuuucuggcscsa | | | | | |
| AD-1949246 | gscscug(Cda)AfgAf | | VPusAfscagGfcUfUfcucuCfuGfcaggcsasa | | UUGCCUGCAGAGAGAAGCCUGUU | |
| | GfAfgaagccugsusa | | | | | |
| AD-1949247 | cscsucu(Gda)AfaUf | | VPusAfsaccCfuGfGfaccaUfuCfagaggsgsu | | ACCCUCUGAAUGGUCCAGGGUUG | |
| | GfGfuccagggususa | | | | | |
| AD-1949248 | csasuua(Ada)GfaUf | | VPusGfsgcaGfgCfCfucaaUfcUfuaaugsusu | | AACAUUAAGAUUGAGGCCUGCCC | |
| | UfGfaggccugcscsa | | | | | |
| AD-1949249 | gsasgac(Cda)GfaGf | | VPusUfsccaGfaAfAfgcgcUfcGfgucucscsc | | GGGAGACCGAGCGCUUUCUGGAA | |
| | CfGfcuuucuggsasa | | | | | |
| AD-1949250 | asgscga(Gda)AfgGf | | VPusUfsucuUfuCfUfcugcCfuCfucgcusgsu | | ACAGCGAGAGGCAGAGAAAGAAG | |
| | CfAfgagaaagasasa | | | | | |
| AD-1949251 | usgscca(Cda)CfaUf | | VPusAfscagCfaGfCfaggaUfgGfuggcasgsa | | UCUGCCACCAUCCUGCUGCUGUG | |
| | CfCfugcugcugsusa | | | | | |
| AD-1949252 | csusgcc(Cda)UfcAf | | VPusUfsgcaAfgAfUfcccuGfaGfggcagsgsc | | GCCUGCCCUCAGGGAUCUUGCAU | |
| | GfGfgaucuugcsasa | | | | | |
| AD-1949253 | cscsaag(Cda)UfgUf | | VPusUfsuugGfaUfGfggcaCfaGfcuuggsasc | | GUCCAAGCUGUGCCCAUCCAAAA | |
| | GfCfccauccaasasa | | | | | |
| AD-1949254 | csascag(Gda)GfaAf | | VPusUfsgcaAfgCfAfggguUfcCfcugugsgsg | | CCCACAGGGAACCCUGCUUGCAC | |
| | CfCfcugcuugcsasa | | | | | |
| AD-1949255 | asusagc(Cda)CfaGf | | VPusUfsaucAfgAfGfgaccUfgGfgcuausasg | | CUAUAGCCCAGGUCCUCUGAUAC | |
| | GfUfccucugausasa | | | | | |
| AD-1949256 | gsuscuc(Uda)GfcAf | | VPusAfscagCfaUfGfuccuGfcAfgagacscsc | | GGGUCUCUGCAGGACAUGCUGUG | |
| | GfGfacaugcugsusa | | | | | |
| AD-1949257 | ascsggu(Cda)CfcAf | | VPusAfsgucAfcCfAfguguGfgGfaccguscsa | | UGACGGUCCCACACUGGUGACUG | |
| | CfAfcuggugacsusa | | | | | |
| AD-1949258 | asgsugg(Gda)CfuGf | | VPusAfsaucCfcAfGfaugcAfgCfccacuscsu | | AGAGUGGGCUGCAUCUGGGAUUC | |
| | CfAfucugggaususa | | | | | |
| AD-1949259 | cscsuuc(Cda)CfaCf | | VPusUfsgugAfcCfUfccagUfgGfgaaggsgsc | | GCCCUUCCCACUGGAGGUCACAU | |
| | UfGfgaggucacsasa | | | | | |
| AD-1949260 | ascsugc(Ada)CfuCf | | VPusUfscauCfaGfGfccggAfgUfgcagusgsg | | CCACUGCACUCCGGCCUGAUGAC | |
| | CfGfgccugaugsasa | | | | | |
| AD-1949261 | asgsugg(Cda)CfuGf | | VPusUfsccaAfgGfUfcuccAfgGfccacusgsg | | CCAGUGGCCUGGAGACCUUGGAC | |
| | GfAfgaccuuggsasa | | | | | |
| AD-1949262 | gsuscca(Cda)CfcAf | | VPusCfscacUfcUfUfugcuGfgGfuggacscsc | | GGGUCCACCCAGCAAAGAGUGGG | |
| | GfCfaaagagugsgsa | | | | | |
| AD-1949263 | gsgscua(Cda)UfcCf | | VPusAfsccaCfcUfCfugugGfaGfuagccsusg | | CAGGCUACUCCACAGAGGUGGUG | |
| | AfCfagagguggsusa | | | | | |
| AD-1949264 | usgsgca(Gda)GfaCf | | VPusCfsuauAfgUfCfcuggUfcCfugccascsc | | GGUGGCAGGACCAGGACUAUAGC | |
| | CfAfggacuauasgsa | | | | | |
| AD-1949265 | gsusuaa(Gda)GfgAf | | VPusCfscagAfgUfUfccuuCfcCfuuaacsgsu | | ACGUUAAGGGAAGGAACUCUGGC | |
| | AfGfgaacucugsgsa | | | | | |
| AD-1949266 | ascsagu(Gda)GfgUf | | VPusAfscagAfuCfCfaccaCfcCfacugusgsu | | ACACAGUGGGUGGUGGAUCUGUC | |
| | GfGfuggaucugsusa | | | | | |
| AD-1949267 | gsasgcu(Gda)GfcAf | | VPusAfsgagCfcAfCfcuuuGfcCfagcucsusu | | AAGAGCUGGCAAAGGUGGCUCUC | |
| | AfAfgguggcucsusa | | | | | |
| AD-1949268 | cscsacu(Cda)GfgGf | | VPusUfsgucUfcAfGfccucCfcGfaguggscsu | | AGCCACUCGGGAGGCUGAGACAG | |
| | AfGfgcugagacsasa | | | | | |

TABLE 30
Unmodified Sense and Antisense Strand Sequences of LEP dsRNA Agents

| | | SEQ | NM_000230.3 | | | SEQ | NM_000230.3 | |
|---|---|---|---|---|---|---|---|---|
| Duplex | Sense Strand | ID | Start | End | Antisense Strand | ID | Start | End |
| Name | Sequence 5′ to 3′ | NO: | Position | Position | Sequence 5′ to 3′ | NO: | Position | Position |
| AD-1945272 | GCGGUUGCAAGGCCCAAGAAA | | 19 | 39 | UUUCUUGGGCCUUGCAACCGCUG | | 17 | 39 |
| AD-1945298 | CCUGGGAAGGAAAAUGCAUUA | | 45 | 65 | UAAUGCAUUUUCCUUCCCAGGAU | | 43 | 65 |
| AD-1945308 | GUGCGGAUUCUUGUGGCUUUA | | 75 | 95 | UAAAGCCACAAGAAUCCGCACAG | | 73 | 95 |
| AD-1945327 | UGGCCCUAUCUUUUCUAUGUA | | 94 | 114 | UACAUAGAAAAGAUAGGGCCAAA | | 92 | 114 |
| AD-1945347 | CCAAGCUGUGCCCAUCCAAAA | | 114 | 134 | UUUUGGAUGGGCACAGCUUGGAC | | 112 | 134 |
| AD-1945372 | AGUCCAAGAUGACACCAAAAA | | 135 | 155 | UUUUUGGUGUCAUCUUGGACUUU | | 133 | 155 |
| AD-1945386 | CCUCAUCAAGACAAUUGUCAA | | 156 | 176 | UUGACAAUUGUCUUGAUGAGGGU | | 154 | 176 |
| AD-1945401 | AUUUCACACACGCAGUCAGUA | | 190 | 210 | UACUGACUGCGUGUGUGAAAUGU | | 188 | 210 |
| AD-1945422 | CUCCUCCAAACAGAAAGUCAA | | 210 | 230 | UUGACUUUCUGUUUGGAGGAGAC | | 208 | 230 |
| AD-1945439 | UCACCGGUUUGGACUUCAUUA | | 227 | 247 | UAAUGAAGUCCAAACCGGUGACU | | 225 | 247 |
| AD-1945454 | UCCUGACCUUAUCCAAGAUGA | | 263 | 283 | UCAUCUUGGAUAAGGUCAGGAUG | | 261 | 283 |
| AD-1945483 | CUGGCAGUCUACCAACAGAUA | | 292 | 312 | UAUCUGUUGGUAGACUGCCAGUG | | 290 | 312 |
| AD-1945500 | GAUCCUCACCAGUAUGCCUUA | | 309 | 329 | UAAGGCAUACUGGUGAGGAUCUG | | 307 | 329 |
| AD-1945518 | UUCCAGAAACGUGAUCCAAAA | | 327 | 347 | UUUUGGAUCACGUUUCUGGAAGG | | 325 | 347 |
| AD-1945537 | AUAUCCAACGACCUGGAGAAA | | 346 | 366 | UUUCUCCAGGUCGUUGGAUAUUU | | 344 | 366 |
| AD-1945558 | CUCCGGGAUCUUCUUCACGUA | | 367 | 387 | UACGUGAAGAAGAUCCCGGAGGU | | 365 | 387 |
| AD-1945579 | CUGGCCUUCUCUAAGAGCUGA | | 388 | 408 | UCAGCUCUUAGAGAAGGCCAGCA | | 386 | 408 |
| AD-1945611 | AGUGGCCUGGAGACCUUGGAA | | 424 | 444 | UUCCAAGGUCUCCAGGCCACUGG | | 422 | 444 |
| AD-1945624 | GUCCUGGAAGCUUCAGGCUAA | | 457 | 477 | UUAGCCUGAAGCUUCCAGGACAC | | 455 | 477 |
| AD-1945639 | GGCUACUCCACAGAGGUGGUA | | 472 | 492 | UACCACCUCUGUGGAGUAGCCUG | | 470 | 492 |
| AD-1945658 | GUCUCUGCAGGACAUGCUGUA | | 513 | 533 | UACAGCAUGUCCUGCAGAGACCC | | 511 | 533 |
| AD-1945708 | CCUUGAAGGUCACUCUUCCUA | | 564 | 584 | UAGGAAGAGUGACCUUCAAGGCC | | 562 | 584 |
| AD-1945724 | UCCUGCAAGGACUACGUUAAA | | 580 | 600 | UUUAACGUAGUCCUUGCAGGAAG | | 578 | 600 |
| AD-1945739 | GUUAAGGGAAGGAACUCUGGA | | 595 | 615 | UCCAGAGUUCCUUCCCUUAACGU | | 593 | 615 |
| AD-1945754 | UCUGGCUUCCAGGUAUCUCCA | | 610 | 630 | UGGAGAUACCUGGAAGCCAGAGU | | 608 | 630 |
| AD-1945774 | AGGAUUGAAGAGCAUUGCAUA | | 630 | 650 | UAUGCAAUGCUCUUCAAUCCUGG | | 628 | 650 |
| AD-1945785 | AUCCAGGACUCUGUCAAUUUA | | 661 | 681 | UAAAUUGACAGAGUCCUGGAUAA | | 659 | 681 |
| AD-1945801 | AUUUCCCUGACUCCUCUAAGA | | 677 | 697 | UCUUAGAGGAGUCAGGGAAAUUG | | 675 | 697 |
| AD-1945823 | ACUCUUCCAAAGGCAUAAGAA | | 699 | 719 | UUCUUAUGCCUUUGGAAGAGUGG | | 697 | 719 |
| AD-1945851 | CUCCUUUUGCUUGAAACCAAA | | 727 | 747 | UUUGGUUUCAAGCAAAAGGAGGC | | 725 | 747 |
| AD-1945878 | UACACAGGAUCCUAUUCUCAA | | 754 | 774 | UUGAGAAUAGGAUCCUGUGUAUA | | 752 | 774 |
| AD-1945888 | GUCCACCCAGCAAAGAGUGGA | | 785 | 805 | UCCACUCUUUGCUGGGUGGACCC | | 783 | 805 |
| AD-1945903 | AGUGGGCUGCAUCUGGGAUUA | | 800 | 820 | UAAUCCCAGAUGCAGCCCACUCU | | 798 | 820 |
| AD-1945919 | GAUUCCCACCAAGGUCUUCAA | | 816 | 836 | UUGAAGACCUUGGUGGGAAUCCC | | 814 | 836 |
| AD-1945935 | UUCAGCCAUCAACAAGAGUUA | | 832 | 852 | UAACUCUUGUUGAUGGCUGAAGA | | 830 | 852 |
| AD-1945947 | CACUGAAUGCCUCAAUGUGAA | | 882 | 902 | UUCACAUUGAGGCAUUCAGUGAG | | 880 | 902 |
| AD-1945966 | CCUUUGGAUGACCAGAACAAA | | 941 | 961 | UUUGUUCUGGUCAUCCAAAGGCU | | 939 | 961 |
| AD-1945987 | GUUCCCUCUGAGAAUUCCAAA | | 962 | 982 | UUUGGAAUUCUCAGAGGGAACCU | | 960 | 982 |
| AD-1946002 | UCCAAGGAGUUCCAUGAAGAA | | 977 | 997 | UUCUUCAUGGAACUCCUUGGAAU | | 975 | 997 |
| AD-1946025 | CAUCCACACACGCAGGAACUA | | 1000 | 1020 | UAGUUCCUGCGUGUGUGGAUGUG | | 998 | 1020 |
| AD-1946044 | UCCCAGCAACACAAGCUGGAA | | 1019 | 1039 | UUCCAGCUUGUGUUGCUGGGAGU | | 1017 | 1039 |
| AD-1946060 | UGGAAGCACAUGUUUAUUUAA | | 1035 | 1055 | UUAAAUAAACAUGUGCUUCCAGC | | 1033 | 1055 |
| AD-1946076 | UCUGCAUUUUAUUCUGGAUGA | | 1056 | 1076 | UCAUCCAGAAUAAAAUGCAGAAU | | 1054 | 1076 |
| AD-1946092 | GAUGGAUUUGAAGCAAAGCAA | | 1072 | 1092 | UUGCUUUGCUUCAAAUCCAUCCA | | 1070 | 1092 |
| AD-1946112 | CCAGCUUCUCCAGGCUCUUUA | | 1092 | 1112 | UAAAGAGCCUGGAGAAGCUGGUG | | 1090 | 1112 |
| AD-1946129 | CAGUUUCCAAUCCCAUAGAUA | | 1146 | 1166 | UAUCUAUGGGAUUGGAAACUGCA | | 1144 | 1166 |
| AD-1946159 | GAGCUGAACCCAUUUUGAGUA | | 1176 | 1196 | UACUCAAAAUGGGUUCAGCUCAG | | 1174 | 1196 |
| AD-1946189 | UUGGGUUCAUCUGAGCAAGAA | | 1206 | 1226 | UUCUUGCUCAGAUGAACCCAACC | | 1204 | 1226 |
| AD-1946207 | GAGCUGGCAAAGGUGGCUCUA | | 1224 | 1244 | UAGAGCCACCUUUGCCAGCUCUU | | 1222 | 1244 |
| AD-1946222 | GCUCUCCAGUUAGUUCUCUCA | | 1239 | 1259 | UGAGAGAACUAACUGGAGAGCCA | | 1237 | 1259 |
| AD-1946238 | UCUCGUAACUGGUUUCAUUUA | | 1255 | 1275 | UAAAUGAAACCAGUUACGAGAGA | | 1253 | 1275 |
| AD-1946258 | CUACUGUGACUGAUGUUACAA | | 1275 | 1295 | UUGUAACAUCAGUCACAGUAGAA | | 1273 | 1295 |
| AD-1946273 | UUACAUCACAGUGUUUGCAAA | | 1290 | 1310 | UUUGCAAACACUGUGAUGUAACA | | 1288 | 1310 |
| AD-1946298 | UUGCCCUGAGUGGAUCUCCAA | | 1315 | 1335 | UUGGAGAUCCACUCAGGGCAACA | | 1313 | 1335 |
| AD-1946314 | UCCAAGGACCAGGUUAUUUUA | | 1331 | 1351 | UAAAAUAACCUGGUCCUUGGAGA | | 1329 | 1351 |
| AD-1946336 | UUUGUCAAGUGUCAUAUGUAA | | 1363 | 1383 | UUACAUAUGACACUUGACAAAAC | | 1361 | 1383 |
| AD-1946366 | AAGGGAGAAGGAUCUAGAAUA | | 1419 | 1439 | UAUUCUAGAUCCUUCUCCCUUCU | | 1417 | 1439 |
| AD-1946383 | AAUGUGUUUUCUGAAUAACAA | | 1436 | 1456 | UUGUUAUUCAGAAAACACAUUCU | | 1434 | 1456 |
| AD-1946402 | GUGUGGUGGGUUCUUUGGAAA | | 1459 | 1479 | UUUCCAAAGAACCCACCACACAA | | 1457 | 1479 |
| AD-1946422 | GGAGUGAGAUCAUUUUCUUAA | | 1479 | 1499 | UUAAGAAAAUGAUCUCACUCCUU | | 1477 | 1499 |
| AD-1946438 | UUAUCUUCUGCAAUUGCUUAA | | 1496 | 1516 | UUAAGCAAUUGCAGAAGAUAAGA | | 1494 | 1516 |
| AD-1946455 | UUAGGAUGUUUUUCAUGAAAA | | 1513 | 1533 | UUUUCAUGAAAAACAUCCUAAGC | | 1511 | 1533 |
| AD-1946472 | CUGGAGAGAAGUUUCUGGCCA | | 1575 | 1595 | UGGCCAGAAACUUCUCUCCAGGG | | 1573 | 1595 |
| AD-1946496 | GAAGCUGAUGCUUUGCUUCAA | | 1619 | 1639 | UUGAAGCAAAGCAUCAGCUUCUC | | 1617 | 1639 |
| AD-1946511 | CUUCAAAUCCAUCCAGAAUAA | | 1634 | 1654 | UUAUUCUGGAUGGAUUUGAAGCA | | 1632 | 1654 |
| AD-1946540 | GGGCUGAAAGCCAUUUGUUGA | | 1663 | 1683 | UCAACAAAUGGCUUUCAGCCCUU | | 1661 | 1683 |
| AD-1946555 | CUGGCUUUCUCCGACUGCUAA | | 1698 | 1718 | UUAGCAGUCGGAGAAAGCCAGAG | | 1696 | 1718 |
| AD-1946579 | GUGGUCUUUCCUAUCAUGGAA | | 1722 | 1742 | UUCCAUGAUAGGAAAGACCACUC | | 1720 | 1742 |
| AD-1946602 | ACGGUCCCACACUGGUGACUA | | 1745 | 1765 | UAGUCACCAGUGUGGGACCGUCA | | 1743 | 1765 |
| AD-1946617 | UGACUGCGAUCUUCAGAGCAA | | 1760 | 1780 | UUGCUCUGAAGAUCGCAGUCACC | | 1758 | 1780 |
| AD-1946634 | CCUCUGAAUGGUCCAGGGUUA | | 1797 | 1817 | UAACCCUGGACCAUUCAGAGGGU | | 1795 | 1817 |
| AD-1946654 | GAUCACACUCUGGGUUUAUUA | | 1817 | 1837 | UAAUAAACCCAGAGUGUGAUCAA | | 1815 | 1837 |
| AD-1946675 | CAUGGCAGUGUUCCUAUUUGA | | 1838 | 1858 | UCAAAUAGGAACACUGCCAUGUA | | 1836 | 1858 |
| AD-1946681 | GCAUGCCAAAUUGUAGUUCUA | | 1864 | 1884 | UAGAACUACAAUUUGGCAUGCAA | | 1862 | 1884 |
| AD-1946696 | GUUCUUGUCUGAUUGGCUCAA | | 1879 | 1899 | UUGAGCCAAUCAGACAAGAACUA | | 1877 | 1899 |
| AD-1946720 | AGCAAGGCCAAAAUUACCAAA | | 1903 | 1923 | UUUGGUAAUUUUGGCCUUGCUUG | | 1901 | 1923 |
| AD-1946729 | GUUUUUACUCCAGUGGUGAAA | | 1935 | 1955 | UUUCACCACUGGAGUAAAAACCC | | 1933 | 1955 |
| AD-1946745 | UGAAGAAAACUCCUUUAGCAA | | 1951 | 1971 | UUGCUAAAGGAGUUUUCUUCACC | | 1949 | 1971 |
| AD-1946775 | AGACCUGACAAGCACUGCUAA | | 1981 | 2001 | UUAGCAGUGCUUGUCAGGUCUCA | | 1979 | 2001 |
| AD-1946816 | CCUUCCCACUGGAGGUCACAA | | 2042 | 2062 | UUGUGACCUCCAGUGGGAAGGGC | | 2040 | 2062 |
| AD-1946831 | UCACAUUCAGGAAGAUGAAAA | | 2057 | 2077 | UUUUCAUCUUCCUGAAUGUGACC | | 2055 | 2077 |
| AD-1946845 | UGCCACCAUCCUGCUGCUGUA | | 2093 | 2113 | UACAGCAGCAGGAUGGUGGCAGA | | 2091 | 2113 |
| AD-1946860 | GCUGUGUUUUUGCUAUCACAA | | 2108 | 2128 | UUGUGAUAGCAAAAACACAGCAG | | 2106 | 2128 |
| AD-1946879 | ACAGUGGGUGGUGGAUCUGUA | | 2127 | 2147 | UACAGAUCCACCACCCACUGUGU | | 2125 | 2147 |
| AD-1946895 | CUGUCCAAGGAAACUUGAAUA | | 2143 | 2163 | UAUUCAAGUUUCCUUGGACAGAU | | 2141 | 2163 |
| AD-1946910 | UGAAUCAAAGCAGUUAACUUA | | 2158 | 2178 | UAAGUUAACUGCUUUGAUUCAAG | | 2156 | 2178 |
| AD-1946937 | GAGCACCUGCUUCAUGCUCAA | | 2185 | 2205 | UUGAGCAUGAAGCAGGUGCUCAG | | 2183 | 2205 |
| AD-1946965 | UGGUGCUAUAGGCUGGAGAAA | | 2213 | 2233 | UUUCUCCAGCCUAUAGCACCAGU | | 2211 | 2233 |
| AD-1946984 | AGCUCACCCAAUAAACAUUAA | | 2232 | 2252 | UUAAUGUUUAUUGGGUGAGCUUC | | 2230 | 2252 |
| AD-1946998 | CAUUAAGAUUGAGGCCUGCCA | | 2247 | 2267 | UGGCAGGCCUCAAUCUUAAUGUU | | 2245 | 2267 |
| AD-1947013 | CUGCCCUCAGGGAUCUUGCAA | | 2262 | 2282 | UUGCAAGAUCCCUGAGGGCAGGC | | 2260 | 2282 |
| AD-1947028 | UUGCAUUCCCAGUGGUCAAAA | | 2277 | 2297 | UUUUGACCACUGGGAAUGCAAGA | | 2275 | 2297 |
| AD-1947049 | CGCACUCACCCAUGUGCCAAA | | 2298 | 2318 | UUUGGCACAUGGGUGAGUGCGGU | | 2296 | 2318 |
| AD-1947068 | CAGCUGAACAGCCAAAUGCAA | | 2337 | 2357 | UUGCAUUUGGCUGUUCAGCUGCU | | 2335 | 2357 |
| AD-1947083 | AUGCAUGGUGCAGUUGACAGA | | 2352 | 2372 | UCUGUCAACUGCACCAUGCAUUU | | 2350 | 2372 |
| AD-1947105 | GGUGGGAAAUGGUAUGAGCUA | | 2374 | 2394 | UAGCUCAUACCAUUUCCCACCUG | | 2372 | 2394 |
| AD-1947113 | CACAGGGAACCCUGCUUGCAA | | 2417 | 2437 | UUGCAAGCAGGGUUCCCUGUGGG | | 2415 | 2437 |
| AD-1947129 | UGCACUUUGUAACAUGUUUAA | | 2433 | 2453 | UUAAACAUGUUACAAAGUGCAAG | | 2431 | 2453 |
| AD-1947158 | GCAUCUUAGCUUCUAUUAUAA | | 2462 | 2482 | UUAUAAUAGAAGCUAAGAUGCCC | | 2460 | 2482 |
| AD-1947186 | CCUUUGAAACAAGAUAACUGA | | 2490 | 2510 | UCAGUUAUCUUGUUUCAAAGGGA | | 2488 | 2510 |
| AD-1947204 | AAAUACAUAAGACCAUAACAA | | 2527 | 2547 | UUGUUAUGGUCUUAUGUAUUUUC | | 2525 | 2547 |
| AD-1947233 | UGGCAGGACCAGGACUAUAGA | | 2556 | 2576 | UCUAUAGUCCUGGUCCUGCCACC | | 2554 | 2576 |
| AD-1947249 | AUAGCCCAGGUCCUCUGAUAA | | 2572 | 2592 | UUAUCAGAGGACCUGGGCUAUAG | | 2570 | 2592 |
| AD-1947266 | AUACCCAGAGCAUUACGUGAA | | 2589 | 2609 | UUCACGUAAUGCUCUGGGUAUCA | | 2587 | 2609 |
| AD-1947288 | CAGGUAAUGAGGGACUGGAAA | | 2611 | 2631 | UUUCCAGUCCCUCAUUACCUGGC | | 2609 | 2631 |
| AD-1947313 | GAGACCGAGCGCUUUCUGGAA | | 2636 | 2656 | UUCCAGAAAGCGCUCGGUCUCCC | | 2634 | 2656 |
| AD-1947328 | CUGGAAAAGAGGAGUUUCGAA | | 2651 | 2671 | UUCGAAACUCCUCUUUUCCAGAA | | 2649 | 2671 |
| AD-1947343 | UUCGAGGUAGAGUUUGAAGGA | | 2666 | 2686 | UCCUUCAAACUCUACCUCGAAAC | | 2664 | 2686 |
| AD-1947366 | UGAGGGAUGUGAAUUGCCUGA | | 2689 | 2709 | UCAGGCAAUUCACAUCCCUCACC | | 2687 | 2709 |
| AD-1947381 | GCCUGCAGAGAGAAGCCUGUA | | 2704 | 2724 | UACAGGCUUCUCUCUGCAGGCAA | | 2702 | 2724 |
| AD-1947396 | CCUGUUUUGUUGGAAGGUUUA | | 2719 | 2739 | UAAACCUUCCAACAAAACAGGCU | | 2717 | 2739 |
| AD-1947423 | GGAGAUGCAGAGGUAAAAGUA | | 2746 | 2766 | UACUUUUACCUCUGCAUCUCCAC | | 2744 | 2766 |
| AD-1947440 | AGUGUGAGCAGUGAGUUACAA | | 2763 | 2783 | UUGUAACUCACUGCUCACACUUU | | 2761 | 2783 |
| AD-1947459 | AGCGAGAGGCAGAGAAAGAAA | | 2782 | 2802 | UUUCUUUCUCUGCCUCUCGCUGU | | 2780 | 2802 |
| AD-1947489 | CAUGCUGAAGGGACCUUGAAA | | 2821 | 2841 | UUUCAAGGUCCCUUCAGCAUGGC | | 2819 | 2841 |
| AD-1947507 | AAGGGUAAAGAAGUUUGAUAA | | 2839 | 2859 | UUAUCAAACUUCUUUACCCUUCA | | 2837 | 2859 |
| AD-1947522 | UAUUAAAGGAGUUAAGAGUAA | | 2857 | 2877 | UUACUCUUAACUCCUUUAAUAUC | | 2855 | 2877 |
| AD-1947537 | GAGUAGCAAGUUCUAGAGAAA | | 2872 | 2892 | UUUCUCUAGAACUUGCUACUCUU | | 2870 | 2892 |
| AD-1947581 | AGAGCUGCUCUGGAAAAUGUA | | 2916 | 2936 | UACAUUUUCCAGAGCAGCUCUCA | | 2914 | 2936 |
| AD-1947609 | UCCUCACAACCACCUAAUCAA | | 2944 | 2964 | UUGAUUAGGUGGUUGUGAGGAUC | | 2942 | 2964 |
| AD-1947625 | AUCAGGCUGAGGUGUCUUAAA | | 2960 | 2980 | UUUAAGACACCUCAGCCUGAUUA | | 2958 | 2980 |
| AD-1947643 | AAGCCUUUUGCUCACAAAACA | | 2978 | 2998 | UGUUUUGUGAGCAAAAGGCUUAA | | 2976 | 2998 |
| AD-1947661 | ACCUGGCACAAUGGCUAAUUA | | 2996 | 3016 | UAAUUAGCCAUUGUGCCAGGUUU | | 2994 | 3016 |
| AD-1947689 | GUGAAACUUCCUAAGUAUAAA | | 3024 | 3044 | UUUAUACUUAGGAAGUUUCACAC | | 3022 | 3044 |
| AD-1947713 | UUGUCUGUUUUUGUAACUUAA | | 3048 | 3068 | UUAAGUUACAAAAACAGACAACC | | 3046 | 3068 |
| AD-1947724 | CCUGGCCAACAUGGUGAAACA | | 15292 | 15312 | UGUUUCACCAUGUUGGCCAGGAU | | 15290 | 15312 |
| AD-1947747 | GAUCACAAGGUCACUAGAUGA | | 3145 | 3165 | UCAUCUAGUGACCUUGUGAUCCC | | 3143 | 3165 |
| AD-1947787 | AACACAAAAGUUAGCUGAGCA | | 3208 | 3228 | UGCUCAGCUAACUUUUGUGUUUU | | 3206 | 3228 |
| AD-1947821 | CCACUCGGGAGGCUGAGACAA | | 3254 | 3274 | UUGUCUCAGCCUCCCGAGUGGCU | | 3252 | 3274 |
| AD-1947838 | ACAGGAGAAUCGCUUAAACCA | | 3271 | 3291 | UGGUUUAAGCGAUUCUCCUGUCU | | 3269 | 3291 |
| AD-1947868 | AGAGUACAGUGAGCCAAGAUA | | 3301 | 3321 | UAUCUUGGCUCACUGUACUCUCC | | 3299 | 3321 |
| AD-1947891 | ACUGCACUCCGGCCUGAUGAA | | 3327 | 3347 | UUCAUCAGGCCGGAGUGCAGUGG | | 3325 | 3347 |
| AD-1947913 | GAGCGAGAUUCCGUCUUAAAA | | 3349 | 3369 | UUUUAAGACGGAAUCUCGCUCUG | | 3347 | 3369 |

TABLE 31
Modified Sense and Antisense Strand Sequences of LEP
dsRNA Agents Comprising a GalNAc Conjugate Targeting Ligand

| | | SEQ | | SEQ | | SEQ |
|---|---|---|---|---|---|---|
| Duplex | Sense Strand | ID | Antisense Strand | ID | mRNA target | ID |
| Name | Sequence 5′ to 3′ | NO. | Sequence 5′ to 3′ | NO. | sequence 5′ to 3′ | NO. |
| AD-1945272 | gscsgguuGfcAfAfGf | | VPusUfsucuUfgGfGfccuuGfcAfaccgcsusg | | CAGCGGUUGCAAGGCCCAAGAAG | |
| | gcccaagaaaL96 | | | | | |
| AD-1945298 | cscsugggAfaGfGfAf | | VPusAfsaugCfaUfUfuuccUfuCfccaggsasu | | AUCCUGGGAAGGAAAAUGCAUUG | |
| | aaaugcauuaL96 | | | | | |
| AD-1945308 | gsusgcggAfuUfCfUf | | VPusAfsaagCfcAfCfaagaAfuCfcgcacsasg | | CUGUGCGGAUUCUUGUGGCUUUG | |
| | uguggcuuuaL96 | | | | | |
| AD-1945327 | usgsgcccUfaUfCfUf | | VPusAfscauAfgAfAfaagaUfaGfggccasasa | | UUUGGCCCUAUCUUUUCUAUGUC | |
| | uuucuauguaL96 | | | | | |
| AD-1945347 | cscsaagcUfgUfGfCf | | VPusUfsuugGfaUfGfggcaCfaGfcuuggsasc | | GUCCAAGCUGUGCCCAUCCAAAA | |
| | ccauccaaaaL96 | | | | | |
| AD-1945372 | asgsuccaAfgAfUfGf | | VPusUfsuuuGfgUfGfucauCfuUfggacususu | | AAAGUCCAAGAUGACACCAAAAC | |
| | acaccaaaaaL96 | | | | | |
| AD-1945386 | cscsucauCfaAfGfAf | | VPusUfsgacAfaUfUfgucuUfgAfugaggsgsu | | ACCCUCAUCAAGACAAUUGUCAC | |
| | caauugucaaL96 | | | | | |
| AD-1945401 | asusuucaCfaCfAfCf | | VPusAfscugAfcUfGfcgugUfgUfgaaausgsu | | ACAUUUCACACACGCAGUCAGUC | |
| | gcagucaguaL96 | | | | | |
| AD-1945422 | csusccucCfaAfAfCf | | VPusUfsgacUfuUfCfuguuUfgGfaggagsasc | | GUCUCCUCCAAACAGAAAGUCAC | |
| | agaaagucaaL96 | | | | | |
| AD-1945439 | uscsaccgGfuUfUfGf | | VPusAfsaugAfaGfUfccaaAfcCfggugascsu | | AGUCACCGGUUUGGACUUCAUUC | |
| | gacuucauuaL96 | | | | | |
| AD-1945454 | uscscugaCfcUfUfAf | | VPusCfsaucUfuGfGfauaaGfgUfcaggasusg | | CAUCCUGACCUUAUCCAAGAUGG | |
| | uccaagaugaL96 | | | | | |
| AD-1945483 | csusggcaGfuCfUfAf | | VPusAfsucuGfuUfGfguagAfcUfgccagsusg | | CACUGGCAGUCUACCAACAGAUC | |
| | ccaacagauaL96 | | | | | |
| AD-1945500 | gsasuccuCfaCfCfAf | | VPusAfsaggCfaUfAfcuggUfgAfggaucsusg | | CAGAUCCUCACCAGUAUGCCUUC | |
| | guaugccuuaL96 | | | | | |
| AD-1945518 | ususccagAfaAfCfGf | | VPusUfsuugGfaUfCfacguUfuCfuggaasgsg | | CCUUCCAGAAACGUGAUCCAAAU | |
| | ugauccaaaaL96 | | | | | |
| AD-1945537 | asusauccAfaCfGfAf | | VPusUfsucuCfcAfGfgucgUfuGfgauaususu | | AAAUAUCCAACGACCUGGAGAAC | |
| | ccuggagaaaL96 | | | | | |
| AD-1945558 | csusccggGfaUfCfUf | | VPusAfscguGfaAfGfaagaUfcCfcggagsgsu | | ACCUCCGGGAUCUUCUUCACGUG | |
| | ucuucacguaL96 | | | | | |
| AD-1945579 | csusggccUfuCfUfCf | | VPusCfsagcUfcUfUfagagAfaGfgccagscsa | | UGCUGGCCUUCUCUAAGAGCUGC | |
| | uaagagcugaL96 | | | | | |
| AD-1945611 | asgsuggcCfuGfGfAf | | VPusUfsccaAfgGfUfcuccAfgGfccacusgsg | | CCAGUGGCCUGGAGACCUUGGAC | |
| | gaccuuggaaL96 | | | | | |
| AD-1945624 | gsusccugGfaAfGfCf | | VPusUfsagcCfuGfAfagcuUfcCfaggacsasc | | GUGUCCUGGAAGCUUCAGGCUAC | |
| | uucaggcuaaL96 | | | | | |
| AD-1945639 | gsgscuacUfcCfAfCf | | VPusAfsccaCfcUfCfugugGfaGfuagccsusg | | CAGGCUACUCCACAGAGGUGGUG | |
| | agaggugguaL96 | | | | | |
| AD-1945658 | gsuscucuGfcAfGfGf | | VPusAfscagCfaUfGfuccuGfcAfgagacscsc | | GGGUCUCUGCAGGACAUGCUGUG | |
| | acaugcuguaL96 | | | | | |
| AD-1945708 | cscsuugaAfgGfUfCf | | VPusAfsggaAfgAfGfugacCfuUfcaaggscsc | | GGCCUUGAAGGUCACUCUUCCUG | |
| | acucuuccuaL96 | | | | | |
| AD-1945724 | uscscugcAfaGfGfAf | | VPusUfsuaaCfgUfAfguccUfuGfcaggasasg | | CUUCCUGCAAGGACUACGUUAAG | |
| | cuacguuaaaL96 | | | | | |
| AD-1945739 | gsusuaagGfgAfAfGf | | VPusCfscagAfgUfUfccuuCfcCfuuaacsgsu | | ACGUUAAGGGAAGGAACUCUGGC | |
| | gaacucuggaL96 | | | | | |
| AD-1945754 | uscsuggcUfuCfCfAf | | VPusGfsgagAfuAfCfcuggAfaGfccagasgsu | | ACUCUGGCUUCCAGGUAUCUCCA | |
| | gguaucuccaL96 | | | | | |
| AD-1945774 | asgsgauuGfaAfGfAf | | VPusAfsugcAfaUfGfcucuUfcAfauccusgsg | | CCAGGAUUGAAGAGCAUUGCAUG | |
| | gcauugcauaL96 | | | | | |
| AD-1945785 | asusccagGfaCfUfCf | | VPusAfsaauUfgAfCfagagUfcCfuggausasa | | UUAUCCAGGACUCUGUCAAUUUC | |
| | ugucaauuuaL96 | | | | | |
| AD-1945801 | asusuuccCfuGfAfCf | | VPusCfsuuaGfaGfGfagucAfgGfgaaaususg | | CAAUUUCCCUGACUCCUCUAAGC | |
| | uccucuaagaL96 | | | | | |
| AD-1945823 | ascsucuuCfcAfAfAf | | VPusUfscuuAfuGfCfcuuuGfgAfagagusgsg | | CCACUCUUCCAAAGGCAUAAGAC | |
| | ggcauaagaaL96 | | | | | |
| AD-1945851 | csusccuuUfuGfCfUf | | VPusUfsuggUfuUfCfaagcAfaAfaggagsgsc | | GCCUCCUUUUGCUUGAAACCAAA | |
| | ugaaaccaaaL96 | | | | | |
| AD-1945878 | usascacaGfgAfUfCf | | VPusUfsgagAfaUfAfggauCfcUfguguasusa | | UAUACACAGGAUCCUAUUCUCAC | |
| | cuauucucaaL96 | | | | | |
| AD-1945888 | gsusccacCfcAfGfCf | | VPusCfscacUfcUfUfugcuGfgGfuggacscsc | | GGGUCCACCCAGCAAAGAGUGGG | |
| | aaagaguggaL96 | | | | | |
| AD-1945903 | asgsugggCfuGfCfAf | | VPusAfsaucCfcAfGfaugcAfgCfccacuscsu | | AGAGUGGGCUGCAUCUGGGAUUC | |
| | ucugggauuaL96 | | | | | |
| AD-1945919 | gsasuuccCfaCfCfAf | | VPusUfsgaaGfaCfCfuuggUfgGfgaaucscsc | | GGGAUUCCCACCAAGGUCUUCAG | |
| | aggucuucaaL96 | | | | | |
| AD-1945935 | ususcagcCfaUfCfAf | | VPusAfsacuCfuUfGfuugaUfgGfcugaasgsa | | UCUUCAGCCAUCAACAAGAGUUG | |
| | acaagaguuaL96 | | | | | |
| AD-1945947 | csascugaAfuGfCfCf | | VPusUfscacAfuUfGfaggcAfuUfcagugsasg | | CUCACUGAAUGCCUCAAUGUGAC | |
| | ucaaugugaaL96 | | | | | |
| AD-1945966 | cscsuuugGfaUfGfAf | | VPusUfsuguUfcUfGfgucaUfcCfaaaggscsu | | AGCCUUUGGAUGACCAGAACAAG | |
| | ccagaacaaaL96 | | | | | |
| AD-1945987 | gsusucccUfcUfGfAf | | VPusUfsuggAfaUfUfcucaGfaGfggaacscsu | | AGGUUCCCUCUGAGAAUUCCAAG | |
| | gaauuccaaaL96 | | | | | |
| AD-1946002 | uscscaagGfaGfUfUf | | VPusUfscuuCfaUfGfgaacUfcCfuuggasasu | | AUUCCAAGGAGUUCCAUGAAGAC | |
| | ccaugaagaaL96 | | | | | |
| AD-1946025 | csasuccaCfaCfAfCf | | VPusAfsguuCfcUfGfcgugUfgUfggaugsusg | | CACAUCCACACACGCAGGAACUC | |
| | gcaggaacuaL96 | | | | | |
| AD-1946044 | uscsccagCfaAfCfAf | | VPusUfsccaGfcUfUfguguUfgCfugggasgsu | | ACUCCCAGCAACACAAGCUGGAA | |
| | caagcuggaaL96 | | | | | |
| AD-1946060 | usgsgaagCfaCfAfUf | | VPusUfsaaaUfaAfAfcaugUfgCfuuccasgsc | | GCUGGAAGCACAUGUUUAUUUAU | |
| | guuuauuuaaL96 | | | | | |
| AD-1946076 | uscsugcaUfuUfUfAf | | VPusCfsaucCfaGfAfauaaAfaUfgcagasasu | | AUUCUGCAUUUUAUUCUGGAUGG | |
| | uucuggaugaL96 | | | | | |
| AD-1946092 | gsasuggaUfuUfGfAf | | VPusUfsgcuUfuGfCfuucaAfaUfccaucscsa | | UGGAUGGAUUUGAAGCAAAGCAC | |
| | agcaaagcaaL96 | | | | | |
| AD-1946112 | cscsagcuUfcUfCfCf | | VPusAfsaagAfgCfCfuggaGfaAfgcuggsusg | | CACCAGCUUCUCCAGGCUCUUUG | |
| | aggcucuuuaL96 | | | | | |
| AD-1946129 | csasguuuCfcAfAfUf | | VPusAfsucuAfuGfGfgauuGfgAfaacugscsa | | UGCAGUUUCCAAUCCCAUAGAUG | |
| | cccauagauaL96 | | | | | |
| AD-1946159 | gsasgcugAfaCfCfCf | | VPusAfscucAfaAfAfugggUfuCfagcucsasg | | CUGAGCUGAACCCAUUUUGAGUG | |
| | auuuugaguaL96 | | | | | |
| AD-1946189 | ususggguUfcAfUfCf | | VPusUfscuuGfcUfCfagauGfaAfcccaascsc | | GGUUGGGUUCAUCUGAGCAAGAG | |
| | ugagcaagaaL96 | | | | | |
| AD-1946207 | gsasgcugGfcAfAfAf | | VPusAfsgagCfcAfCfcuuuGfcCfagcucsusu | | AAGAGCUGGCAAAGGUGGCUCUC | |
| | gguggcucuaL96 | | | | | |
| AD-1946222 | gscsucucCfaGfUfUf | | VPusGfsagaGfaAfCfuaacUfgGfagagcscsa | | UGGCUCUCCAGUUAGUUCUCUCG | |
| | aguucucucaL96 | | | | | |
| AD-1946238 | uscsucguAfaCfUfGf | | VPusAfsaauGfaAfAfccagUfuAfcgagasgsa | | UCUCUCGUAACUGGUUUCAUUUC | |
| | guuucauuuaL96 | | | | | |
| AD-1946258 | csusacugUfgAfCfUf | | VPusUfsguaAfcAfUfcaguCfaCfaguagsasa | | UUCUACUGUGACUGAUGUUACAU | |
| | gauguuacaaL96 | | | | | |
| AD-1946273 | ususacauCfaCfAfGf | | VPusUfsugcAfaAfCfacugUfgAfuguaascsa | | UGUUACAUCACAGUGUUUGCAAU | |
| | uguuugcaaaL96 | | | | | |
| AD-1946298 | ususgcccUfgAfGfUf | | VPusUfsggaGfaUfCfcacuCfaGfggcaascsa | | UGUUGCCCUGAGUGGAUCUCCAA | |
| | ggaucuccaaL96 | | | | | |
| AD-1946314 | uscscaagGfaCfCfAf | | VPusAfsaaaUfaAfCfcuggUfcCfuuggasgsa | | UCUCCAAGGACCAGGUUAUUUUA | |
| | gguuauuuuaL96 | | | | | |
| AD-1946336 | ususugucAfaGfUfGf | | VPusUfsacaUfaUfGfacacUfuGfacaaasasc | | GUUUUGUCAAGUGUCAUAUGUAG | |
| | ucauauguaaL96 | | | | | |
| AD-1946366 | asasgggaGfaAfGfGf | | VPusAfsuucUfaGfAfuccuUfcUfcccuuscsu | | AGAAGGGAGAAGGAUCUAGAAUG | |
| | aucuagaauaL96 | | | | | |
| AD-1946383 | asasugugUfuUfUfCf | | VPusUfsguuAfuUfCfagaaAfaCfacauuscsu | | AGAAUGUGUUUUCUGAAUAACAU | |
| | ugaauaacaaL96 | | | | | |
| AD-1946402 | gsusguggUfgGfGfUf | | VPusUfsuccAfaAfGfaaccCfaCfcacacsasa | | UUGUGUGGUGGGUUCUUUGGAAG | |
| | ucuuuggaaaL96 | | | | | |
| AD-1946422 | gsgsagugAfgAfUfCf | | VPusUfsaagAfaAfAfugauCfuCfacuccsusu | | AAGGAGUGAGAUCAUUUUCUUAU | |
| | auuuucuuaaL96 | | | | | |
| AD-1946438 | ususaucuUfcUfGfCf | | VPusUfsaagCfaAfUfugcaGfaAfgauaasgsa | | UCUUAUCUUCUGCAAUUGCUUAG | |
| | aauugcuuaaL96 | | | | | |
| AD-1946455 | ususaggaUfgUfUfUf | | VPusUfsuucAfuGfAfaaaaCfaUfccuaasgsc | | GCUUAGGAUGUUUUUCAUGAAAA | |
| | uucaugaaaaL96 | | | | | |
| AD-1946472 | csusggagAfgAfAfGf | | VPusGfsgccAfgAfAfacuuCfuCfuccagsgsg | | CCCUGGAGAGAAGUUUCUGGCCC | |
| | uuucuggccaL96 | | | | | |
| AD-1946496 | gsasagcuGfaUfGfCf | | VPusUfsgaaGfcAfAfagcaUfcAfgcuucsusc | | GAGAAGCUGAUGCUUUGCUUCAA | |
| | uuugcuucaaL96 | | | | | |
| AD-1946511 | csusucaaAfuCfCfAf | | VPusUfsauuCfuGfGfauggAfuUfugaagscsa | | UGCUUCAAAUCCAUCCAGAAUAA | |
| | uccagaauaaL96 | | | | | |
| AD-1946540 | gsgsgcugAfaAfGfCf | | VPusCfsaacAfaAfUfggcuUfuCfagcccsusu | | AAGGGCUGAAAGCCAUUUGUUGG | |
| | cauuuguugaL96 | | | | | |
| AD-1946555 | csusggcuUfuCfUfCf | | VPusUfsagcAfgUfCfggagAfaAfgccagsasg | | CUCUGGCUUUCUCCGACUGCUAG | |
| | cgacugcuaaL96 | | | | | |
| AD-1946579 | gsusggucUfuUfCfCf | | VPusUfsccaUfgAfUfaggaAfaGfaccacsusc | | GAGUGGUCUUUCCUAUCAUGGAG | |
| | uaucauggaaL96 | | | | | |
| AD-1946602 | ascsggucCfcAfCfAf | | VPusAfsgucAfcCfAfguguGfgGfaccguscsa | | UGACGGUCCCACACUGGUGACUG | |
| | cuggugacuaL96 | | | | | |
| AD-1946617 | usgsacugCfgAfUfCf | | VPusUfsgcuCfuGfAfagauCfgCfagucascsc | | GGUGACUGCGAUCUUCAGAGCAG | |
| | uucagagcaaL96 | | | | | |
| AD-1946634 | cscsucugAfaUfGfGf | | VPusAfsaccCfuGfGfaccaUfuCfagaggsgsu | | ACCCUCUGAAUGGUCCAGGGUUG | |
| | uccaggguuaL96 | | | | | |
| AD-1946654 | gsasucacAfcUfCfUf | | VPusAfsauaAfaCfCfcagaGfuGfugaucsasa | | UUGAUCACACUCUGGGUUUAUUA | |
| | ggguuuauuaL96 | | | | | |
| AD-1946675 | csasuggcAfgUfGfUf | | VPusCfsaaaUfaGfGfaacaCfuGfccaugsusa | | UACAUGGCAGUGUUCCUAUUUGG | |
| | uccuauuugaL96 | | | | | |
| AD-1946681 | gscsaugcCfaAfAfUf | | VPusAfsgaaCfuAfCfaauuUfgGfcaugcsasa | | UUGCAUGCCAAAUUGUAGUUCUU | |
| | uguaguucuaL96 | | | | | |
| AD-1946696 | gsusucuuGfuCfUfGf | | VPusUfsgagCfcAfAfucagAfcAfagaacsusa | | UAGUUCUUGUCUGAUUGGCUCAC | |
| | auuggcucaaL96 | | | | | |
| AD-1946720 | asgscaagGfcCfAfAf | | VPusUfsuggUfaAfUfuuugGfcCfuugcususg | | CAAGCAAGGCCAAAAUUACCAAA | |
| | aauuaccaaaL96 | | | | | |
| AD-1946729 | gsusuuuuAfcUfCfCf | | VPusUfsucaCfcAfCfuggaGfuAfaaaacscsc | | GGGUUUUUACUCCAGUGGUGAAG | |
| | aguggugaaaL96 | | | | | |
| AD-1946745 | usgsaagaAfaAfCfUf | | VPusUfsgcuAfaAfGfgaguUfuUfcuucascsc | | GGUGAAGAAAACUCCUUUAGCAG | |
| | ccuuuagcaaL96 | | | | | |
| AD-1946775 | asgsaccuGfaCfAfAf | | VPusUfsagcAfgUfGfcuugUfcAfggucuscsa | | UGAGACCUGACAAGCACUGCUAG | |
| | gcacugcuaaL96 | | | | | |
| AD-1946816 | cscsuuccCfaCfUfGf | | VPusUfsgugAfcCfUfccagUfgGfgaaggsgsc | | GCCCUUCCCACUGGAGGUCACAU | |
| | gaggucacaaL96 | | | | | |
| AD-1946831 | uscsacauUfcAfGfGf | | VPusUfsuucAfuCfUfuccuGfaAfugugascsc | | GGUCACAUUCAGGAAGAUGAAAG | |
| | aagaugaaaaL96 | | | | | |
| AD-1946845 | usgsccacCfaUfCfCf | | VPusAfscagCfaGfCfaggaUfgGfuggcasgsa | | UCUGCCACCAUCCUGCUGCUGUG | |
| | ugcugcuguaL96 | | | | | |
| AD-1946860 | gscsugugUfuUfUfUf | | VPusUfsgugAfuAfGfcaaaAfaCfacagcsasg | | CUGCUGUGUUUUUGCUAUCACAC | |
| | gcuaucacaaL96 | | | | | |
| AD-1946879 | ascsagugGfgUfGfGf | | VPusAfscagAfuCfCfaccaCfcCfacugusgsu | | ACACAGUGGGUGGUGGAUCUGUC | |
| | uggaucuguaL96 | | | | | |
| AD-1946895 | csusguccAfaGfGfAf | | VPusAfsuucAfaGfUfuuccUfuGfgacagsasu | | AUCUGUCCAAGGAAACUUGAAUC | |
| | aacuugaauaL96 | | | | | |
| AD-1946910 | usgsaaucAfaAfGfCf | | VPusAfsaguUfaAfCfugcuUfuGfauucasasg | | CUUGAAUCAAAGCAGUUAACUUU | |
| | aguuaacuuaL96 | | | | | |
| AD-1946937 | gsasgcacCfuGfCfUf | | VPusUfsgagCfaUfGfaagcAfgGfugcucsasg | | CUGAGCACCUGCUUCAUGCUCAG | |
| | ucaugcucaaL96 | | | | | |
| AD-1946965 | usgsgugcUfaUfAfGf | | VPusUfsucuCfcAfGfccuaUfaGfcaccasgsu | | ACUGGUGCUAUAGGCUGGAGAAG | |
| | gcuggagaaaL96 | | | | | |
| AD-1946984 | asgscucaCfcCfAfAf | | VPusUfsaauGfuUfUfauugGfgUfgagcususc | | GAAGCUCACCCAAUAAACAUUAA | |
| | uaaacauuaaL96 | | | | | |
| AD-1946998 | csasuuaaGfaUfUfGf | | VPusGfsgcaGfgCfCfucaaUfcUfuaaugsusu | | AACAUUAAGAUUGAGGCCUGCCC | |
| | aggccugccaL96 | | | | | |
| AD-1947013 | csusgcccUfcAfGfGf | | VPusUfsgcaAfgAfUfcccuGfaGfggcagsgsc | | GCCUGCCCUCAGGGAUCUUGCAU | |
| | gaucuugcaaL96 | | | | | |
| AD-1947028 | ususgcauUfcCfCfAf | | VPusUfsuugAfcCfAfcuggGfaAfugcaasgsa | | UCUUGCAUUCCCAGUGGUCAAAC | |
| | guggucaaaaL96 | | | | | |
| AD-1947049 | csgscacuCfaCfCfCf | | VPusUfsuggCfaCfAfugggUfgAfgugcgsgsu | | ACCGCACUCACCCAUGUGCCAAG | |
| | augugccaaaL96 | | | | | |
| AD-1947068 | csasgcugAfaCfAfGf | | VPusUfsgcaUfuUfGfgcugUfuCfagcugscsu | | AGCAGCUGAACAGCCAAAUGCAU | |
| | ccaaaugcaaL96 | | | | | |
| AD-1947083 | asusgcauGfgUfGfCf | | VPusCfsuguCfaAfCfugcaCfcAfugcaususu | | AAAUGCAUGGUGCAGUUGACAGC | |
| | aguugacagaL96 | | | | | |
| AD-1947105 | gsgsugggAfaAfUfGf | | VPusAfsgcuCfaUfAfccauUfuCfccaccsusg | | CAGGUGGGAAAUGGUAUGAGCUG | |
| | guaugagcuaL96 | | | | | |
| AD-1947113 | csascaggGfaAfCfCf | | VPusUfsgcaAfgCfAfggguUfcCfcugugsgsg | | CCCACAGGGAACCCUGCUUGCAC | |
| | cugcuugcaaL96 | | | | | |
| AD-1947129 | usgscacuUfuGfUfAf | | VPusUfsaaaCfaUfGfuuacAfaAfgugcasasg | | CUUGCACUUUGUAACAUGUUUAC | |
| | acauguuuaaL96 | | | | | |
| AD-1947158 | gscsaucuUfaGfCfUf | | VPusUfsauaAfuAfGfaagcUfaAfgaugescsc | | GGGCAUCUUAGCUUCUAUUAUAG | |
| | ucuauuauaaL96 | | | | | |
| AD-1947186 | cscsuuugAfaAfCfAf | | VPusCfsaguUfaUfCfuuguUfuCfaaaggsgsa | | UCCCUUUGAAACAAGAUAACUGA | |
| | agauaacugaL96 | | | | | |
| AD-1947204 | asasauacAfuAfAfGf | | VPusUfsguuAfuGfGfucuuAfuGfuauuususc | | GAAAAUACAUAAGACCAUAACAG | |
| | accauaacaaL96 | | | | | |
| AD-1947233 | usgsgcagGfaCfCfAf | | VPusCfsuauAfgUfCfcuggUfcCfugccascsc | | GGUGGCAGGACCAGGACUAUAGC | |
| | ggacuauagaL96 | | | | | |
| AD-1947249 | asusagccCfaGfGfUf | | VPusUfsaucAfgAfGfgaccUfgGfgcuausasg | | CUAUAGCCCAGGUCCUCUGAUAC | |
| | ccucugauaaL96 | | | | | |
| AD-1947266 | asusacccAfgAfGfCf | | VPusUfscacGfuAfAfugcuCfuGfgguauscsa | | UGAUACCCAGAGCAUUACGUGAG | |
| | auuacgugaaL96 | | | | | |
| AD-1947288 | csasgguaAfuGfAfGf | | VPusUfsuccAfgUfCfccucAfuUfaccugsgsc | | GCCAGGUAAUGAGGGACUGGAAC | |
| | ggacuggaaaL96 | | | | | |
| AD-1947313 | gsasgaccGfaGfCfGf | | VPusUfsccaGfaAfAfgcgcUfcGfgucucscsc | | GGGAGACCGAGCGCUUUCUGGAA | |
| | cuuucuggaaL96 | | | | | |
| AD-1947328 | csusggaaAfaGfAfGf | | VPusUfscgaAfaCfUfccucUfuUfuccagsasa | | UUCUGGAAAAGAGGAGUUUCGAG | |
| | gaguuucgaaL96 | | | | | |
| AD-1947343 | ususcgagGfuAfGfAf | | VPusCfscuuCfaAfAfcucuAfcCfucgaasasc | | GUUUCGAGGUAGAGUUUGAAGGA | |
| | guuugaaggaL96 | | | | | |
| AD-1947366 | usgsagggAfuGfUfGf | | VPusCfsaggCfaAfUfucacAfuCfccucascsc | | GGUGAGGGAUGUGAAUUGCCUGC | |
| | aauugccugaL96 | | | | | |
| AD-1947381 | gscscugcAfgAfGfAf | | VPusAfscagGfcUfUfcucuCfuGfcaggcsasa | | UUGCCUGCAGAGAGAAGCCUGUU | |
| | gaagccuguaL96 | | | | | |
| AD-1947396 | cscsuguuUfuGfUfUf | | VPusAfsaacCfuUfCfcaacAfaAfacaggscsu | | AGCCUGUUUUGUUGGAAGGUUUG | |
| | ggaagguuuaL96 | | | | | |
| AD-1947423 | gsgsagauGfcAfGfAf | | VPusAfscuuUfuAfCfcucuGfcAfucuccsasc | | GUGGAGAUGCAGAGGUAAAAGUG | |
| | gguaaaaguaL96 | | | | | |
| AD-1947440 | asgsugugAfgCfAfGf | | VPusUfsguaAfcUfCfacugCfuCfacacususu | | AAAGUGUGAGCAGUGAGUUACAG | |
| | ugaguuacaaL96 | | | | | |
| AD-1947459 | asgscgagAfgGfCfAf | | VPusUfsucuUfuCfUfcugcCfuCfucgcusgsu | | ACAGCGAGAGGCAGAGAAAGAAG | |
| | gagaaagaaaL96 | | | | | |
| AD-1947489 | csasugcuGfaAfGfGf | | VPusUfsucaAfgGfUfcccuUfcAfgcaugsgsc | | GCCAUGCUGAAGGGACCUUGAAG | |
| | gaccuugaaaL96 | | | | | |
| AD-1947507 | asasggguAfaAfGfAf | | VPusUfsaucAfaAfCfuucuUfuAfcccuuscsa | | UGAAGGGUAAAGAAGUUUGAUAU | |
| | aguuugauaaL96 | | | | | |
| AD-1947522 | usasuuaaAfgGfAfGf | | VPusUfsacuCfuUfAfacucCfuUfuaauasusc | | GAUAUUAAAGGAGUUAAGAGUAG | |
| | uuaagaguaaL96 | | | | | |
| AD-1947537 | gsasguagCfaAfGfUf | | VPusUfsucuCfuAfGfaacuUfgCfuacucsusu | | AAGAGUAGCAAGUUCUAGAGAAG | |
| | ucuagagaaaL96 | | | | | |
| AD-1947581 | asgsagcuGfcUfCfUf | | VPusAfscauUfuUfCfcagaGfcAfgcucuscsa | | UGAGAGCUGCUCUGGAAAAUGUG | |
| | ggaaaauguaL96 | | | | | |
| AD-1947609 | uscscucaCfaAfCfCf | | VPusUfsgauUfaGfGfugguUfgUfgaggasusc | | GAUCCUCACAACCACCUAAUCAG | |
| | accuaaucaaL96 | | | | | |
| AD-1947625 | asuscaggCfuGfAfGf | | VPusUfsuaaGfaCfAfccucAfgCfcugaususa | | UAAUCAGGCUGAGGUGUCUUAAG | |
| | gugucuuaaaL96 | | | | | |
| AD-1947643 | asasgccuUfuUfGfCf | | VPusGfsuuuUfgUfGfagcaAfaAfggcuusasa | | UUAAGCCUUUUGCUCACAAAACC | |
| | ucacaaaacaL96 | | | | | |
| AD-1947661 | ascscuggCfaCfAfAf | | VPusAfsauuAfgCfCfauugUfgCfcaggususu | | AAACCUGGCACAAUGGCUAAUUC | |
| | uggcuaauuaL96 | | | | | |
| AD-1947689 | gsusgaaaCfuUfCfCf | | VPusUfsuauAfcUfUfaggaAfgUfuucacsasc | | GUGUGAAACUUCCUAAGUAUAAA | |
| | uaaguauaaaL96 | | | | | |
| AD-1947713 | ususgucuGfuUfUfUf | | VPusUfsaagUfuAfCfaaaaAfcAfgacaascsc | | GGUUGUCUGUUUUUGUAACUUAA | |
| | uguaacuuaaL96 | | | | | |
| AD-1947724 | cscsuggcCfaAfCfAf | | VPusGfsuuuCfaCfCfauguUfgGfccaggsasu | | AGCCUGGCCAACAUGGUGAAACC | |
| | uggugaaacaL96 | | | | | |
| AD-1947747 | gsasucacAfaGfGfUf | | VPusCfsaucUfaGfUfgaccUfuGfugaucscsc | | GGGAUCACAAGGUCACUAGAUGG | |
| | cacuagaugaL96 | | | | | |
| AD-1947787 | asascacaAfaAfGfUf | | VPusGfscucAfgCfUfaacuUfuUfguguususu | | AAAACACAAAAGUUAGCUGAGCG | |
| | uagcugagcaL96 | | | | | |
| AD-1947821 | cscsacucGfgGfAfGf | | VPusUfsgucUfcAfGfccucCfcGfaguggscsu | | AGCCACUCGGGAGGCUGAGACAG | |
| | gcugagacaaL96 | | | | | |
| AD-1947838 | ascsaggaGfaAfUfCf | | VPusGfsguuUfaAfGfcgauUfcUfccuguscsu | | AGACAGGAGAAUCGCUUAAACCU | |
| | gcuuaaaccaL96 | | | | | |
| AD-1947868 | asgsaguaCfaGfUfGf | | VPusAfsucuUfgGfCfucacUfgUfacucuscsc | | GGAGAGUACAGUGAGCCAAGAUC | |
| | agccaagauaL96 | | | | | |
| AD-1947891 | ascsugcaCfuCfCfGf | | VPusUfscauCfaGfGfccggAfgUfgcagusgsg | | CCACUGCACUCCGGCCUGAUGAC | |
| | gccugaugaaL96 | | | | | |
| AD-1947913 | gsasgcgaGfaUfUfCf | | VPusUfsuuaAfgAfCfggaaUfcUfcgcucsusg | | CAGAGCGAGAUUCCGUCUUAAAA | |
| | cgucuuaaaaL96 | | | | | |

TABLE 32
Unmodified Sense and Antisense Strand Sequences of LEP dsRNA Agents Comprising
a GalNAc Conjugate Targeting Ligand NM_008493.3

| | | SEQ | NM_008493.3 | | | SEQ | NM_008493.3 | |
|---|---|---|---|---|---|---|---|---|
| | Sense Strand | ID | Start | End | Antisense Strand | ID | Start | End |
| Duplex Name | Sequence 5′ to 3′ | NO: | Position | Position | Sequence 5′ to 3′ | NO: | Position | Position |
| AD-1646889 | CACCAGGAUCAAUGACAUUUA | | 176 | 196 | UAAAUGUCAUUGAUCCUGGUGAC | | 174 | 196 |

TABLE 33
Modified Sense and Antisense Strand Sequences of LEP dsRNA Agents
Comprising a GalNAc Conjugate Targeting Ligand

| | | SEQ | | SEQ | | SEQ |
|---|---|---|---|---|---|---|
| Duplex | Sense Strand | ID | Antisense Strand | ID | mRNA target | ID |
| Name | Sequence 5′ to 3′ | NO. | Sequence 5′ to 3′ | NO. | sequence 5′ to 3′ | NO. |
| AD-1646889 | csasccagGfaUfCfAf | | VPusAfsaauGfuCfAfu | | GUCACCAGGAUCAAUGACAUUUC | |
| | augacauuuaL96 | | ugaUfcCfuggugsasc | | | |

TABLE 34
Unmodified Sense and Antisense Strand Sequences of LEP dsRNA Agents
Comprising an Unsaturated C22 Hydrocarbon Chain Conjugated to
Position 6 on the Sense Strand, Counting from the 5′-end of the Sense Strand

| | | SEQ | NM_08493.3 | | | SEQ | NM_008493.3 | |
|---|---|---|---|---|---|---|---|---|
| Duplex | Sense Strand | ID | Start | End | Antisense Strand | ID | Start | End |
| Name | Sequence 5′ to 3′ | NO: | Position | Position | Sequence 5′ to 3′ | NO: | Position | Position |
| AD-1888031 | UUGAAGUGUAGUUUUAUACAA | | | | UUGUAUAAAACUACACUUCAAGC | | | |
| AD-1888032 | GUGACUGGUUUUGUUUCUAUA | | | | UAUAGAAACAAAACCAGUCACCA | | | |

TABLE 35
Modified Sense and Antisense Strand Sequences of LEP dsRNA Agents
Comprising an Unsaturated C22 Hydrocarbon Chain Conjugated
to Position 6 on the Sense Strand, Counting from the 5′-end of the Sense Strand

| | | SEQ | | SEQ |
|---|---|---|---|---|
| | | ID | | ID |
| Duplex Name | Sense Strand Sequence 5′ to 3′ | NO. | Antisense Strand Sequence 5′ to 3′ | NO. |
| AD-1888031 | ususgaa(Gda)UfgUfAfGfuuuuauacsasa | | VPusUfsguaUfaAfAfacuaCfaCfuucaasgsc | |
| AD-1888032 | gsusgac(Uda)GfgUfUfUfuguuucuasusa | | VPusAfuagAfaAfCfaaaaCfcAfgucacscsa | |

### Example 15: In Vitro Screening of dsRNA Agents Targeting Leptin

### In Vitro Dual-Luciferase and Endogenous Screening Assays

[1385] Hepa1-6 cells cells were transfected by adding 50 μL of siRNA duplexes and 75 ng of a plasmid, comprising partial sequences of human LEP (NM_000230.3), per well along with 100 μL of Opti-MEM plus 0.5 μL of Lipofectamine 2000 per well (Invitrogen, Carlsbad CA. cat #13778-150) and then incubated at room temperature for 15 minutes. The mixture was then added to the cells which are re-suspended in 35 μL of fresh complete media. The transfected cells were incubated at 37° C. in an atmosphere of 5% CO2. Single-dose experiments were performed at 10 nM.

[1386] Twenty-four hours after the siRNAs and pV205 plasmid are transfected; Firefly (transfection control) and Renilla (fused to LEP target sequence) luciferase were measured. First, media was removed from cells. Then Firefly luciferase activity was measured by adding 75 μL of Dual-Glo® Luciferase Reagent equal to the culture medium volume to each well and mix. The mixture was incubated at room temperature for 30 minutes before luminescense (500 nm) was measured on a Spectramax (Molecular Devices) to detect the Firefly luciferase signal. Renilla luciferase activity was measured by adding 75 μL of room temperature of Dual-Glo® Stop & Glo® Reagent to each well and the plates were incubated for 10-15 minutes before luminescence was again measured to determine the Renilla luciferase signal. The Dual-Glo® Stop & Glo® Reagent quenches the firefly luciferase signal and sustained luminescence for the Renilla luciferase reaction. siRNA activity was determined by normalizing the Renilla (LEP) signal to the Firefly (control) signal within each well. The magnitude of siRNA activity was then assessed relative to cells that were transfected with the same vector but were not treated with siRNA or were treated with a non-targeting siRNA. All transfections were done with n=4.

Total RNA Isolation Using DYNABEADS mRNA Isolation Kit (Invitrogen™, Part #: 610-12)

[1387] Cells were lysed in 75 μl of Lysis/Binding Buffer containing 3 μL of beads per well and mixed for 10 minutes on an electrostatic shaker. The washing steps were automated on a Biotek EL406, using a magnetic plate support. Beads were washed (in 90 L) once in Buffer A, once in Buffer B, and twice in Buffer E, with aspiration steps in between. Following a final aspiration, complete 10 μL RT mixture was added to each well, as described below.

cDNA Synthesis Using ABI High Capacity cDNA Reverse Transcription Kit (Applied Biosystems, Foster City, CA, Cat #4368813)

[1388] A master mix of 1 μl 10× Buffer, 0.4 μl 25× dNTPs, 1 μl Random primers, 0.5 μl Reverse Transcriptase, 0.5 μl RNase inhibitor and 6.6 μl of H₂O per reaction were added per well. Plates were sealed, agitated for 10 minutes on an electrostatic shaker, and then incubated at 37 degrees C. for 2 hours. Following this, the plates were agitated at 80 degrees C. for 8 minutes.

### Real Time PCR

[1389] Two microlitre (μl) of cDNA were added to a master mix containing 0.5 μl of human GAPDH TaqMan Probe (4326317E), 0.5 μl human AGT, 2 μl nuclease-free water and 5 μl Lightcycler 480 probe master mix (Roche Cat #04887301001) per well in a 384 well plates (Roche cat #04887301001). Real time PCR was done in a LightCycler480 Real Time PCR system (Roche).

[1390] To calculate relative fold change, data were analyzed using the ΔΔCt method and normalized to assays performed with cells transfected with 10 nM AD-1955, or mock transfected cells. IC₅₀s were calculated using a 4 parameter fit model using XLFit and normalized to cells transfected with AD-1955 or mock-transfected. The sense and antisense sequences of AD-1955 are: sense: 5′-cuuAcGcuGAGuAcuucGAdTsdT-3′ and antisense 5′-UCGAAGuACUcAGCGuAAGdTsdT-3′. The results of the dual-luciferase assays of the agents listed in Tables 30 and 31 are provided in Table 36.

TABLE 36
Single Dose Reporter Screen for Human LEP in Hepa1-6 Cells

RLuc/FLuc
10 nM

| | % Message | |
|---|---|---|
| Duplex Name | Remaining | SD |
| AD-1947913.1 | 43.603 | 2.447 |
| AD-1947891.1 | 58.640 | 1.210 |
| AD-1947868.1 | 31.474 | 0.969 |
| AD-1947838.1 | 46.521 | 2.454 |
| AD-1947821.1 | 83.789 | 4.438 |
| AD-1947787.1 | 36.331 | 1.427 |
| AD-941419.1 | 47.050 | 2.614 |
| AD-1947724.1 | 30.677 | 0.743 |
| AD-1947747.1 | 34.652 | 1.368 |
| AD-1947713.1 | 40.581 | 2.760 |
| AD-1947689.1 | 43.628 | 1.151 |
| AD-1947661.1 | 37.525 | 1.138 |
| AD-1947643.1 | 38.039 | 3.247 |
| AD-1947625.1 | 38.507 | 1.343 |
| AD-1947609.1 | 72.801 | 1.141 |
| AD-1947581.1 | 79.702 | 1.776 |
| AD-1947537.1 | 37.364 | 2.772 |
| AD-1947522.1 | 35.942 | 0.882 |
| AD-1947507.1 | 36.951 | 0.626 |
| AD-1947489.1 | 46.426 | 1.774 |
| AD-1947459.1 | 81.536 | 2.751 |
| AD-1947440.1 | 61.008 | 1.210 |
| AD-1947423.1 | 53.159 | 1.375 |
| AD-1947396.1 | 56.099 | 1.389 |
| AD-1947381.1 | 61.241 | 3.458 |
| AD-1947366.1 | 50.593 | 2.097 |
| AD-1947343.1 | 42.641 | 1.768 |
| AD-1947328.1 | 43.813 | 1.044 |
| AD-1947313.1 | 40.401 | 2.279 |
| AD-1947288.1 | 46.571 | 2.579 |
| AD-1947266.1 | 46.348 | 0.904 |
| AD-1947249.1 | 53.461 | 2.807 |
| AD-1947233.1 | 81.878 | 3.064 |
| AD-1947204.1 | 41.342 | 0.563 |
| AD-1947186.1 | 35.394 | 1.249 |
| AD-1947158.1 | 41.903 | 1.667 |
| AD-1947129.1 | 45.153 | 1.855 |
| AD-1947113.1 | 42.953 | 2.207 |
| AD-1947105.1 | 52.166 | 2.202 |
| AD-1947083.1 | 42.067 | 2.123 |
| AD-1947068.1 | 41.200 | 0.885 |
| AD-1947049.1 | 50.618 | 2.650 |
| AD-1947028.1 | 51.813 | 2.991 |
| AD-1947013.1 | 61.578 | 2.017 |
| AD-1946998.1 | 60.723 | 0.755 |
| AD-1946984.1 | 49.100 | 0.725 |
| AD-1946965.1 | 47.300 | 1.205 |
| AD-1946937.1 | 58.866 | 1.661 |
| AD-1946910.1 | 31.610 | 1.426 |
| AD-1946895.1 | 23.692 | 0.569 |
| AD-1946879.1 | 65.108 | 2.337 |
| AD-1946860.1 | 65.307 | 2.102 |
| AD-1946845.1 | 79.606 | 0.818 |
| AD-1946831.1 | 33.578 | 0.286 |
| AD-1946816.1 | 72.449 | 3.972 |
| AD-1946775.1 | 50.696 | 1.851 |
| AD-1946745.1 | 54.226 | 2.705 |
| AD-1946729.1 | 48.246 | 1.728 |
| AD-1946720.1 | 60.826 | 1.540 |
| AD-1946696.1 | 29.266 | 1.250 |
| AD-1946681.1 | 38.420 | 1.814 |
| AD-1946675.1 | 47.619 | 1.832 |
| AD-1946654.1 | 39.292 | 1.833 |
| AD-1946634.1 | 45.094 | 2.684 |
| AD-1946617.1 | 38.242 | 1.563 |
| AD-1946602.1 | 51.676 | 1.117 |
| AD-1946579.1 | 41.965 | 3.569 |
| AD-1946555.1 | 44.655 | 3.361 |
| AD-1946540.1 | 50.290 | 2.364 |
| AD-1946511.1 | 36.491 | 4.415 |
| AD-1946496.1 | 35.628 | 0.542 |
| AD-1946472.1 | 40.298 | 0.781 |
| AD-1946455.1 | 15.510 | 0.230 |
| AD-1946438.1 | 28.956 | 0.710 |
| AD-1946422.1 | 19.287 | 0.467 |
| AD-1946402.1 | 29.636 | 1.066 |
| AD-1946383.1 | 8.690 | 0.152 |
| AD-1946366.1 | 23.871 | 1.745 |
| AD-1946336.1 | 6.380 | 0.297 |
| AD-1946314.1 | 38.183 | 1.490 |
| AD-1946298.1 | 35.136 | 0.953 |
| AD-1946273.1 | 7.719 | 0.650 |
| AD-1946258.1 | 6.801 | 0.428 |
| AD-1946238.1 | 10.955 | 0.470 |
| AD-1946222.1 | 13.814 | 1.065 |
| AD-1946207.1 | 29.775 | 1.684 |
| AD-1946189.1 | 21.264 | 1.258 |
| AD-1946159.1 | 28.747 | 2.396 |
| AD-1946129.1 | 32.971 | 1.969 |
| AD-1946112.1 | 48.966 | 2.897 |
| AD-1946092.1 | 23.863 | 1.513 |
| AD-1946076.1 | 40.021 | 4.141 |
| AD-1946060.1 | 14.895 | 0.784 |
| AD-1946044.1 | 48.890 | 1.195 |
| AD-1946025.1 | 37.091 | 0.805 |
| AD-1946002.1 | 10.544 | 0.417 |
| AD-1945987.1 | 16.883 | 0.930 |
| AD-1945966.1 | 15.010 | 0.264 |
| AD-1945947.1 | 7.818 | 0.374 |
| AD-1945935.1 | 11.128 | 0.309 |
| AD-1945919.1 | 16.097 | 0.745 |
| AD-1945903.1 | 41.216 | 1.166 |
| AD-1945888.1 | 80.942 | 4.615 |
| AD-1945878.1 | 8.663 | 0.727 |
| AD-1945851.1 | 12.559 | 1.161 |
| AD-1945823.1 | 57.799 | 1.818 |
| AD-1945801.1 | 9.824 | 0.799 |
| AD-1945785.1 | 11.348 | 0.382 |
| AD-1945774.1 | 9.080 | 0.648 |
| AD-1945754.1 | 19.588 | 1.001 |
| AD-1945739.1 | 19.742 | 1.110 |
| AD-1945724.1 | 25.956 | 0.638 |
| AD-1945708.1 | 76.824 | 4.360 |
| AD-1945658.1 | 59.073 | 2.903 |
| AD-1945639.1 | 33.564 | 1.280 |
| AD-1945624.1 | 38.002 | 1.267 |
| AD-1945611.1 | 82.959 | 2.823 |
| AD-1945579.1 | 12.399 | 0.311 |
| AD-1945558.1 | 40.552 | 2.467 |
| AD-1945537.1 | 77.963 | 1.551 |
| AD-1945518.1 | 9.156 | 0.630 |
| AD-1945500.1 | 20.272 | 1.212 |
| AD-1945483.1 | 15.547 | 0.946 |
| AD-1945454.1 | 13.943 | 0.452 |
| AD-1945439.1 | 10.560 | 0.408 |
| AD-1945422.1 | 13.636 | 1.277 |
| AD-1945401.1 | 11.282 | 0.322 |
| AD-1646889.1 | 10.741 | 0.392 |
| AD-1945386.1 | 9.855 | 0.659 |
| AD-1945372.1 | 21.061 | 0.495 |
| AD-1945347.1 | 15.416 | 0.808 |
| AD-1945327.1 | 6.105 | 0.196 |
| AD-1945308.1 | 17.009 | 0.767 |
| AD-1945298.1 | 7.306 | 0.188 |
| AD-1945272.1 | 89.310 | 1.201 |
| Positive control | 0.522 | 0.077 |
| (Rluc directed | | |
| siRNA) | | |

### Example 16: dsRNA Synthesis

[1391] siRNAs targeting the human phospholamban (PLN) gene (human: GenBank NM_002667.5, NCBI GeneID: 5350) and the human calcium/calmodulin dependent protein kinase II delta (CAMK2D) gene (human: GenBank NM_001321571.2, NCBI GeneID: 817) were designed using custom R and Python scripts.

[1392] The human PLN REFSEQ NM_002667.5 mRNA has a length of 2989 bases.

[1393] The human CAMK2D REFSEQ NM_001321571.2 mRNA has a length of 5785 bases.

[1394] siRNAs comprising a GalNAc conjugate targeting ligand were designed and synthesized as described above. siRNAs comprising an unsaturated C₂₂ hydrocarbon chain conjugated to the sense strand at position 6, counting from the 5′-end of the sense strand, were designed and synthesized as described above.

[1395] Detailed lists of the modified PLN sense and antisense strand nucleotide sequences comprising an unsaturated C₂₂ hydrocarbon chain conjugated to the sense strand at position 6, counting from the 5′-end of the sense strand, are shown in Table 38, and the corresponding unmodified PLN sense and antisense nucleotide sequences are shown in Table 37.

[1396] Detailed lists of the modified PLN sense and antisense strand nucleotide sequences comprising a GalNAc conjugate targeting ligand are shown in Table 40, and the corresponding unmodified PLN sense and antisense nucleotide sequences are shown in Table 39.

[1397] Detailed lists of the modified CAMK2D sense and antisense strand nucleotide sequences comprising an unsaturated C₂₂ hydrocarbon chain conjugated to the sense strand at position 6, counting from the 5′-end of the sense strand, are shown in Table 42, and the corresponding unmodified CAMK2D sense and antisense nucleotide sequences are shown in Table 41.

[1398] Detailed lists of the modified CAMK2D sense and antisense strand nucleotide sequences comprising a GalNAc conjugate targeting ligand are shown in Table 44, and the corresponding unmodified CAMK2D sense and antisense nucleotide sequences are shown in Table 43.

[1399] It is to be understood that, throughout the application, a duplex name without a decimal is equivalent to a duplex name with a decimal which merely references the batch number of the duplex. For example, AD-959917 is equivalent to AD-959917.1.

TABLE 37
Unmodified Sense and Antisense Strand Sequences of PLN dsRNA Agents
Comprising an Unsaturated C22 Hydrocarbon Chain Conjugated to
Position 6 on the Sense Strand, Counting from the 5′-end of the Sense Strand

| | | SEQ | Range in | | | SEQ | Range in | |
|---|---|---|---|---|---|---|---|---|
| Duplex | Sense Strand | ID | NM_00266.75 | | Antisense Strand | ID | NM_00266.75 | |
| Name | Sequence 5′ to 3′ | NO. | Start | End | Sequence 5′ to 3′ | NO. | Start | End |
| AD-2011169 | CUAUUUUUCUUCCUCUAUCAU | | 1888 | 1908 | AUGAUAGAGGAAGAAAAAUAGCU | | 1886 | 1908 |
| AD-2011170 | UAUCAAUUUCUGUCUCAUCUU | | 290 | 310 | AAGAUGAGACAGAAAUUGAUAAA | | 288 | 310 |
| AD-2011171 | AACAUAAAAGUCUUCAUUCUU | | 1694 | 1714 | AAGAAUGAAGACUUUUAUGUUGA | | 1692 | 1714 |
| AD-2011172 | UCUCAGUAAACAGAAAUAACU | | 2624 | 2644 | AGUUAUUUCUGUUUACUGAGAAA | | 2622 | 2644 |
| AD-2011173 | AUCUUAAUAUGUCUCUUGCUU | | 306 | 326 | AAGCAAGAGACAUAUUAAGAUGA | | 304 | 326 |
| AD-2011174 | CACAAAUUUCUAUCCCAAAUU | | 619 | 639 | AAUUUGGGAUAGAAAUUUGUGAG | | 617 | 639 |
| AD-2011175 | CUUCCAAUAACUCAUAAAACU | | 2034 | 2054 | AGUUUUAUGAGUUAUUGGAAGAU | | 2032 | 2054 |
| AD-2011176 | UAUCAGAAUCUACAUUCUAAU | | 890 | 910 | AUUAGAAUGUAGAUUCUGAUAGU | | 888 | 910 |
| AD-2011177 | UAUGAAUUCUCUCUCCAAAUU | | 1368 | 1388 | AAUUUGGAGAGAGAAUUCAUAUA | | 1366 | 1388 |
| AD-2011178 | UAACAACAGAAUCUAAUCUUU | | 1148 | 1168 | AAAGAUUAGAUUCUGUUGUUAGU | | 1146 | 1168 |
| AD-2011179 | CCUCACAUCUGUUAUCUUAUU | | 847 | 867 | AAUAAGAUAACAGAUGUGAGGAG | | 845 | 867 |
| AD-2011180 | CACUUAAAACUUCAGACUUCU | | 159 | 179 | AGAAGUCUGAAGUUUUAAGUGGU | | 157 | 179 |
| AD-2011181 | CAUUCUCAUUGUCUUCACAUU | | 1708 | 1728 | AAUGUGAAGACAAUGAGAAUGAA | | 1706 | 1728 |
| AD-2011182 | GACCAUUUCAGAACAUCUUCU | | 2018 | 2038 | AGAAGAUGUUCUGAAAUGGUCAG | | 2016 | 2038 |
| AD-2011183 | CCUUACUGAUAACAUAAACAU | | 1538 | 1558 | AUGUUUAUGUUAUCAGUAAGGUU | | 1536 | 1558 |
| AD-2011184 | UCUCUGAAGUUCUGCUACAAU | | 347 | 367 | AUUGUAGCAGAACUUCAGAGAAG | | 345 | 367 |
| AD-2011185 | CUACAGAAUCUAUUUAUCAAU | | 276 | 296 | AUUGAUAAAUAGAUUCUGUAGCU | | 274 | 296 |
| AD-2011186 | UAAGACUUCAGAAUGAUUUUU | | 1246 | 1266 | AAAAAUCAUUCUGAAGUCUUAAG | | 1244 | 1266 |
| AD-2011187 | AAGUAUUUUUCAGGUCUUCAU | | 769 | 789 | AUGAAGACCUGAAAAAUACUUAG | | 767 | 789 |
| AD-2011188 | ACUGUUGAUUUCCUCAACAUU | | 595 | 615 | AAUGUUGAGGAAAUCAACAGUUG | | 593 | 615 |
| AD-2011189 | CCUAUACUGCAUAAUCCAACU | | 2148 | 2168 | AGUUGGAUUAUGCAGUAUAGGUG | | 2146 | 2168 |
| AD-2011190 | CUGUUCUAAGACAUAUGAUCU | | 1069 | 1089 | AGAUCAUAUGUCUUAGAACAGAU | | 1067 | 1089 |
| AD-2011191 | UCUACUAUAGAAUAAGUUCUU | | 2834 | 2854 | AAGAACUUAUUCUAUAGUAGAAC | | 2832 | 2854 |
| AD-2011192 | AUGCUCAAAUAUGUUCUACUU | | 2820 | 2840 | AAGUAGAACAUAUUUGAGCAUUU | | 2818 | 2840 |
| AD-2011193 | UUCUAAAACAUGGUUACUAAU | | 2245 | 2265 | AUUAGUAACCAUGUUUUAGAAGA | | 2243 | 2265 |
| AD-2011194 | GGAAAAUAUAUUCACCAAACU | | 2076 | 2096 | AGUUUGGUGAAUAUAUUUUCCAG | | 2074 | 2096 |
| AD-2011195 | CAAAAUCUUAACUACCUAAUU | | 1498 | 1518 | AAUUAGGUAGUUAAGAUUUUGCG | | 1496 | 1518 |
| AD-2011196 | UUUUCAAUUUCUCCUCUGACU | | 2001 | 2021 | AGUCAGAGGAGAAAUUGAAAAUU | | 1999 | 2021 |
| AD-2011197 | UCUUUCUCUCGACCACUUAAU | | 146 | 166 | AUUAAGUGGUCGAGAGAAAGAUA | | 144 | 166 |
| AD-2011198 | GCUUACCAUACUAUAUCUUUU | | 1211 | 123 | AAAAGAUAUAGUAUGGUAAGCUA | | 1209 | 1231 |
| AD-2011199 | UUCACCAAGUAUCAAAGUAAU | | 785 | 805 | AUUACUUUGAUACUUGGUGAAGA | | 783 | 805 |
| AD-2011200 | CAUCAGCUUAAAAUCUGUCAU | | 389 | 409 | AUGACAGAUUUUAAGCUGAUGUG | | 387 | 409 |
| AD-2011201 | ACUAUUGACCAUAAACCUUAU | | 1523 | 1543 | AUAAGGUUUAUGGUCAAUAGUAG | | 1521 | 1543 |
| AD-2011202 | CUAUAUUCCUACAAUAAAGUU | | 1598 | 1618 | AACUUUAUUGUAGGAAUAUAGUG | | 1596 | 1618 |
| AD-2011203 | UACAAGCUGGAAAUUCCUAAU | | 2448 | 2468 | AUUAGGAAUUUCCAGCUUGUAGA | | 2446 | 2468 |
| AD-2011204 | UACUGAGCUAAAUUAUAGAUU | | 1942 | 1962 | AAUCUAUAAUUUAGCUCAGUAGA | | 1940 | 1962 |
| AD-2011205 | UGCCAACAAGUUCACUUCAUU | | 677 | 697 | AAUGAAGUGAACUUGUUGGCAGU | | 675 | 697 |
| AD-2011206 | CUACCUAAAAGAAGACAGUUU | | 99 | 119 | AAACUGUCUUCUUUUAGGUAGCC | | 97 | 119 |
| AD-2011207 | AGACAUGUUACUAAUAUAACU | | 2186 | 2206 | AGUUAUAUUAGUAACAUGUCUUC | | 2184 | 2206 |
| AD-2011208 | UUCAUACAACACAAUACUCUU | | 52 | 72 | AAGAGUAUUGUGUUGUAUGAAGU | | 50 | 72 |
| AD-2011209 | AUGCCACAUUAACAUCUUUUU | | 931 | 951 | AAAAAGAUGUUAAUGUGGCAUAG | | 929 | 951 |
| AD-2011210 | CACUGGUUUUAGUAAAUUACU | | 2511 | 2531 | AGUAAUUUACUAAAACCAGUGAG | | 2509 | 2531 |
| AD-2011211 | CUCGCUCAGCUAUAAGAAGAU | | 217 | 237 | AUCUUCUUAUAGCUGAGCGAGUG | | 215 | 237 |
| AD-2011212 | UCUUCAUUCUUUGAUAGAAAU | | 2656 | 2676 | AUUUCUAUCAAAGAAUGAAGAAC | | 2654 | 2676 |
| AD-2011213 | CAAGAUUAAGACUAAAACUUU | | 482 | 502 | AAAGUUUUAGUCUUAAUCUUGAC | | 480 | 502 |
| AD-2011214 | AAGCUAGAGAAAAUGUUAUUU | | 1618 | 1638 | AAAUAACAUUUUCUCUAGCUUAC | | 1616 | 1638 |
| AD-2011215 | AAACUUUGGUAAUUUAAGUUU | | 2092 | 2112 | AAACUUAAAUUACCAAAGUUUGG | | 2090 | 2112 |
| AD-2011216 | CAUAUCACUAAUAUACUAACU | | 1132 | 1152 | AGUUAGUAUAUUAGUGAUAUGAC | | 1130 | 1152 |
| AD-2011217 | UUGCUGAUCUGUAUCAUCGUU | | 321 | 341 | AACGAUGAUACAGAUCAGCAAGA | | 319 | 341 |
| AD-2011218 | AUCUGUUGGAUCUUGUAAACU | | 521 | 541 | AGUUUACAAGAUCCAACAGAUGA | | 519 | 541 |
| AD-2011219 | AUGUAGGUAAAUCAUAAAUCU | | 1050 | 1070 | AGAUUUAUGAUUUACCUACAUGU | | 1048 | 1070 |
| AD-2011220 | CUGAUUAGUCAUAUUCCUUUU | | 2578 | 2598 | AAAAGGAAUAUGACUAAUCAGUU | | 2576 | 2598 |
| AD-2011221 | CAUCUAUUACAUCUACAGCUU | | 1432 | 1452 | AAGCUGUAGAUGUAAUAGAUGGG | | 1430 | 1452 |
| AD-2011222 | AAAAUAGUUUACACCUAUACU | | 2135 | 2155 | AGUAUAGGUGUAAACUAUUUUAG | | 2133 | 2155 |
| AD-2011223 | GGAGACACUAUUAAAUUUUCU | | 2329 | 2349 | AGAAAAUUUAAUAGUGUCUCCUU | | 2327 | 2349 |
| AD-2011224 | AGUAGAAAGCUUAUAAACAAU | | 2473 | 2493 | AUUGUUUAUAAGCUUUCUACUUG | | 2471 | 2493 |
| AD-2011225 | UCUUACACAAGUGUUGCUAAU | | 2297 | 2317 | AUUAGCAACACUUGUGUAAGAAA | | 2295 | 2317 |
| AD-2011226 | AACUAUUUGUAGUAACUAUCU | | 874 | 894 | AGAUAGUUACUACAAAUAGUUCU | | 872 | 894 |
| AD-2011227 | UUACUAAAAGAAUAUGUAACU | | 2258 | 2278 | AGUUACAUAUUCUUUUAGUAACC | | 2256 | 2278 |
| AD-2011228 | UCAAAAUAGUCCACUGACUCU | | 828 | 848 | AGAGUCAGUGGACUAUUUUGAAU | | 826 | 848 |
| AD-2011229 | ACAGGAAAACAAUAUUGUAUU | | 419 | 439 | AAUACAAUAUUGUUUUCCUGUCU | | 417 | 439 |
| AD-2011230 | GUGUAUAAAAUGCAACUGUUU | | 581 | 601 | AAACAGUUGCAUUUUAUACACUU | | 579 | 601 |
| AD-2011231 | CUAUACUGUGAUGAUCACAGU | | 70 | 90 | ACUGUGAUCAUCACAGUAUAGAG | | 68 | 90 |
| AD-2011232 | GCCAUACUCUUACAUAAUAAU | | 984 | 1004 | AUUAUUAUGUAAGAGUAUGGCCU | | 982 | 1004 |
| AD-2011233 | GAAUCACAGAAUUCUAGUACU | | 1030 | 1050 | AGUACUAGAAUUCUGUGAUUCUU | | 1028 | 1050 |
| AD-2011234 | ACACAUAUUUUGCGUGUUAUU | | 1566 | 1586 | AAUAACACGCAAAAUAUGUGUUA | | 1564 | 1586 |
| AD-2011235 | UUGAUUACACUGUUUGUUACU | | 2596 | 2616 | AGUAACAAACAGUGUAAUCAAAG | | 2594 | 2616 |
| AD-2011236 | CCAGCUAUGCUAUUUAUAAUU | | 1962 | 1982 | AAUUAUAAAUAGCAUAGCUGGAU | | 1960 | 1982 |
| AD-2011237 | CAACUGAAGUAAAAUUGAGUU | | 2053 | 2073 | AACUCAAUUUUACUUCAGUUGUU | | 2051 | 2073 |
| AD-2011238 | GUGUAAUUAACCAUAUCUUCU | | 2228 | 2248 | AGAAGAUAUGGUUAAUUACACAU | | 2226 | 2248 |
| AD-2011239 | UCUAUCAACCAAAUGGUAAGU | | 1901 | 1921 | ACUUACCAUUUGGUUGAUAGAGG | | 1899 | 1921 |
| AD-2011240 | UGAGGAUUACAGAAUACUAUU | | 2692 | 2712 | AAUAGUAUUCUGUAAUCCUCACA | | 2690 | 2712 |
| AD-2011241 | GUGGAAAAUUUGAACUGAUUU | | 2564 | 2584 | AAAUCAGUUCAAAUUUUCCACUU | | 2562 | 2584 |
| AD-2011242 | AUGGAGAAAGUCCAAUACCUU | | 195 | 215 | AAGGUAUUGGACUUUCUCCAUGA | | 193 | 215 |
| AD-2011243 | AAAUCAGAAUCACUAUAUUAU | | 2947 | 2967 | AUAAUAUAGUGAUUCUGAUUUGC | | 2945 | 2967 |
| AD-2011244 | CUUCCAUUCCAGCCUAACAUU | | 1275 | 1295 | AAUGUUAGGCUGGAAUGGAAGAC | | 1273 | 1295 |
| AD-2011245 | AAUGAAGUGUCAUUAUUCAAU | | 812 | 832 | AUUGAAUAAUGACACUUCAUUUG | | 810 | 832 |
| AD-2011246 | CUUCAUCAUAAAGUGUAAAGU | | 2754 | 2774 | ACUUUACACUUUAUGAUGAAGAA | | 2752 | 2774 |
| AD-2011247 | CCAAAUCUUUUCUGAAGAUGU | | 633 | 653 | ACAUCUUCAGAAAAGAUUUGGGA | | 631 | 653 |
| AD-2011248 | UUUGGAAUCAUGAAACCUUAU | | 1228 | 1248 | AUAAGGUUUCAUGAUUCCAAAGA | | 1226 | 1248 |
| AD-2011249 | AAACACCCGUAAGACUUCAUU | | 37 | 57 | AAUGAAGUCUUACGGGUGUUUAG | | 35 | 57 |
| AD-2011250 | AACUCAAUAGUGAAGGAGACU | | 2315 | 2335 | AGUCUCCUUCACUAUUGAGUUAG | | 2313 | 2335 |
| AD-2011251 | UCUUCAUUUAAGGCACUGUAU | | 1164 | 1184 | AUACAGUGCCUUAAAUGAAGAUU | | 1162 | 1184 |
| AD-2011252 | GGUCUUGCAGUCUUGUCUUAU | | 1773 | 1793 | AUAAGACAAGACUGCAAGACCAA | | 1771 | 1793 |
| AD-2011253 | UAUCUGAGCUAGAGUUACCUU | | 1190 | 1210 | AAGGUAACUCUAGCUCAGAUAAU | | 1188 | 1210 |
| AD-2011254 | AACUGUAAUAGGAUAUAGCUU | | 1870 | 1890 | AAGCUAUAUCCUAUUACAGUUGA | | 1868 | 1890 |
| AD-2011255 | AUGAAAAGGGCUUUAUUUUCU | | 541 | 561 | AGAAAAUAAAGCCCUUUUCAUGU | | 539 | 561 |
| AD-2011256 | CAGAAAGUAUCCCUAGUCUUU | | 2536 | 2556 | AAAGACUAGGGAUACUUUCUGUA | | 2534 | 2556 |
| AD-2011257 | UGCCAGCUUUUUAUCUUUCUU | | 133 | 153 | AAGAAAGAUAAAAAGCUGGCAGC | | 131 | 153 |
| AD-2011258 | CUUUUGAGGUGAAUAUAAUUU | | 718 | 738 | AAAUUAUAUUCACCUCAAAAGAG | | 716 | 738 |
| AD-2011259 | UCAGGGAUAUCUGAAGAACAU | | 2395 | 2415 | AUGUUCUUCAGAUAUCCCUGAAC | | 2393 | 2415 |
| AD-2011260 | CAACAAGCACGUCAAAAGCUU | | 258 | 278 | AAGCUUUUGACGUGCUUGUUGAG | | 256 | 278 |
| AD-2011261 | AUUGUAUAACAGACCACUUCU | | 432 | 452 | AGAAGUGGUCUGUUAUACAAUAU | | 430 | 452 |
| AD-2011262 | UUAAUGUUGCCUUUUAUAUUU | | 2894 | 2914 | AAAUAUAAAAGGCAACAUUAAGC | | 2892 | 2914 |
| AD-2011263 | AUUGACCUUGGUUUCUUACAU | | 2284 | 2304 | AUGUAAGAAACCAAGGUCAAUAU | | 2282 | 2304 |
| AD-2011264 | UAUGAUCAACAGAUGAGAACU | | 1082 | 1102 | AGUUCUCAUCUGUUGAUCAUAUG | | 1080 | 1102 |
| AD-2011265 | GCAGAGAUUUCUUAAGUGACU | | 2420 | 2440 | AGUCACUUAAGAAAUCUCUGCCC | | 2418 | 2440 |
| AD-2011266 | GAAGAGUUUCUUUGUGAAAAU | | 459 | 479 | AUUUUCACAAAGAAACUCUUCUA | | 457 | 479 |
| AD-2011267 | CAACCAUUGAAAUGCCUCAAU | | 241 | 261 | AUUGAGGCAUUUCAAUGGUUGAG | | 239 | 261 |
| AD-2011268 | AUCUAUUUUGCAGUCCACUCU | | 1922 | 1942 | AGAGUGGACUGCAAAAUAGAUGC | | 1920 | 1942 |
| AD-2011269 | GUUACCAUAUGUAUUCAUCUU | | 505 | 525 | AAGAUGAAUACAUAUGGUAACAA | | 503 | 525 |
| AD-2011270 | UUCUUAUCUUAAUUUACAGGU | | 2850 | 2870 | ACCUGUAAAUUAAGAUAAGAACU | | 2848 | 2870 |
| AD-2011271 | ACAGUUAUCUCAUAUUUGGCU | | 113 | 133 | AGCCAAAUAUGAGAUAACUGUCU | | 111 | 133 |
| AD-2011272 | AACAAUUUUAAUUUCAGUUGU | | 2165 | 2185 | ACAACUGAAAUUAAAAUUGUUGG | | 2163 | 2185 |
| AD-2011273 | GGCAAGGAAAAUAAAAGAUUU | | 1303 | 1323 | AAAUCUUUUAUUUUCCUUGCCUG | | 1301 | 1323 |
| AD-2011274 | UCAUCGUGAUGCUUCUCUGAU | | 334 | 354 | AUCAGAGAAGCAUCACGAUGAUA | | 332 | 354 |
| AD-2011275 | AAGAUGAAGAGUUUAGUUUUU | | 647 | 667 | AAAAACUAAACUCUUCAUCUUCA | | 645 | 667 |
| AD-2011276 | CACUGUAGUGAAUUAUCUGAU | | 1177 | 1197 | AUCAGAUAAUUCACUACAGUGCC | | 1175 | 1197 |
| AD-2011277 | CUACAACCUCUAGAUCUGCAU | | 361 | 381 | AUGCAGAUCUAGAGGUUGUAGCA | | 359 | 381 |
| AD-2011278 | AUGAGAAUCAAGUAUGGAAAU | | 958 | 978 | AUUUCCAUACUUGAUUCUCAUCA | | 956 | 978 |
| AD-2011279 | UUGUUCAAGGGUCAACUGUAU | | 1857 | 1877 | AUACAGUUGACCCUUGAACAACA | | 1855 | 1877 |
| AD-2011280 | GAACCCAUGAGAGAUACUAGU | | 2350 | 2370 | ACUAGUAUCUCUCAUGGGUUCAG | | 2348 | 2370 |
| AD-2011281 | AUGUGACAGUGAGAUUAGUCU | | 1113 | 1133 | AGACUAAUCUCACUGUCACAUAU | | 1111 | 1133 |
| AD-2011282 | CUAUUCAUUAAAUGGAAGUGU | | 1670 | 1690 | ACACUUCCAUUUAAUGAAUAGUA | | 1668 | 1690 |
| AD-2011283 | UCUUUUAAAGUUGAUGAGAAU | | 945 | 965 | AUUCUCAUCAACUUUAAAAGAUG | | 943 | 965 |
| AD-2011284 | GGUGACAGAGUCAGAAAACUU | | 9 | 29 | AAGUUUUCUGACUCUGUCACCCA | | 7 | 29 |
| AD-2011285 | AAACAACAGGUGAUACACUCU | | 2487 | 2507 | AGAGUGUAUCACCUGUUGUUUAU | | 2485 | 2507 |
| AD-2011286 | CCACUUCCUGAGUAGAAGAGU | | 445 | 465 | ACUCUUCUACUCAGGAAGUGGUC | | 443 | 465 |
| AD-2011287 | AAAUCUUAUUCUGUGAGGAUU | | 2679 | 2699 | AAUCCUCACAGAAUAAGAUUUUA | | 2677 | 2699 |
| AD-2011288 | AGUGGAAAGUGUUUGGUUCAU | | 2378 | 2398 | AUGAACCAAACACUUUCCACUCC | | 2376 | 2398 |
| AD-2011289 | UUGUAUUUUUUCUAUGCCACU | | 918 | 938 | AGUGGCAUAGAAAAAAUACAAUU | | 916 | 938 |
| AD-2011290 | GUGUUAUAUGUAUUAUACACU | | 1579 | 1599 | AGUGUAUAAUACAUAUAACACGC | | 1577 | 1599 |
| AD-2011291 | AAAGAGUAGAGGAUGUGUAAU | | 2214 | 2234 | AUUACACAUCCUCUACUCUUUUA | | 2212 | 2234 |
| AD-2011292 | AGUUUUAAAACUGCACUGCCU | | 661 | 681 | AGGCAGUGCAGUUUUAAAACUAA | | 659 | 681 |
| AD-2011293 | AAGAUUUCCAGUGACAGAAAU | | 1317 | 1337 | AUUUCUGUCACUGGAAAUCUUUU | | 1315 | 1337 |
| AD-2011294 | ACUGGUGGUUAAUAUGUGACU | | 1100 | 1120 | AGUCACAUAUUAACCACCAGUUC | | 1098 | 1120 |
| AD-2011295 | UUGCAAUUCAAGCCCUUGUUU | | 1839 | 1859 | AAACAAGGGCUUGAAUUGCAAGG | | 1837 | 1859 |
| AD-2011296 | AAGUGACGCCUCAUCUACAAU | | 2433 | 2453 | AUUGUAGAUGAGGCGUCACUUAA | | 2431 | 2453 |
| AD-2011297 | AUUUUGCAGGUUGUCUUCCAU | | 1261 | 1281 | AUGGAAGACAACCUGCAAAAUCA | | 1259 | 1281 |
| AD-2011298 | AUGUAACAUCAAUAUUGACCU | | 2271 | 2291 | AGGUCAAUAUUGAUGUUACAUAU | | 2269 | 2291 |
| AD-2011299 | AAAGAAUAUUCAUGUAUAAGU | | 1812 | 1832 | ACUUAUACAUGAAUAUUCUUUCC | | 1810 | 1832 |
| AD-2011300 | AAGUAAUAACACAAAUGAAGU | | 799 | 819 | ACUUCAUUUGUGUUAUUACUUUG | | 797 | 819 |
| AD-2011301 | UACAGCUGACCCUUGAACAUU | | 1445 | 1465 | AAUGUUCAAGGGUCAGCUGUAGA | | 1443 | 1465 |
| AD-2011302 | AUGGAAAAGUAAGGCCAUACU | | 971 | 991 | AGUAUGGCCUUACUUUUCCAUAC | | 969 | 991 |
| AD-2011303 | GAACUUGUUGGCCCAUCUAUU | | 1419 | 1439 | AAUAGAUGGGCCAACAAGUUCAU | | 1417 | 1439 |

TABLE 38
Modified Sense and Antisense Strand Sequences of PLN dsRNA Agents
Comprising an Unsaturated C22 Hydrocarbon Chain Conjugated
to Position 6 on the Sense Strand, Counting from the 5′-end of the Sense Strand

| Duplex Name | Sense Strand Sequence 5′ to 3′ | SEQ ID NO. | Antisense Strand Sequence 5′ to 3′ | SEQ ID NO. | mRNA target sequence | SEQ ID NO. |
|---|---|---|---|---|---|---|
| AD-2011169 | csusauu(Uda)UfuCfUfUfccucuaucauL96 | | asUfsgauAfgAfGfgaagAfaAfaauagscsu | | AGCUAUUUUUCUUCCUCUAUCAA | |
| AD-2011170 | usasuca(Ada)UfuUfCfUfgucucaucuuL96 | | asAfsgauGfaGfAfcagaAfaUfugauasasa | | UUUAUCAAUUUCUGUCUCAUCUU | |
| AD-2011171 | asascau(Ada)AfaAfGfUfcuucauucuuL96 | | asAfsgaaUfgAfAfgacuUfuUfauguusgsa | | UCAACAUAAAAGUCUUCAUUCUC | |
| AD-2011172 | uscsuca(Gda)UfaAfAfCfagaaauaacuL96 | | asGfsuuaUfuUfCfuguuUfaCfugagasasa | | UUUCUCAGUAAACAGAAAUAACU | |
| AD-2011173 | asuscuu(Ada)AfuAfUfGfucucuugcuuL96 | | asAfsgcaAfgAfGfacauAfuUfaagausgsa | | UCAUCUUAAUAUGUCUCUUGCUG | |
| AD-2011174 | csascaa(Ada)UfuUfCfUfaucccaaauuL96 | | asAfsuuuGfgGfAfuagaAfaUfuugugsasg | | CUCACAAAUUUCUAUCCCAAAUC | |
| AD-2011175 | csusucc(Ada)AfuAfAfCfucauaaaacuL96 | | asGfsuuuUfaUfGfaguuAfuUfggaagsasu | | AUCUUCCAAUAACUCAUAAAACA | |
| AD-2011176 | usasuca(Gda)AfaUfCfUfacauucuaauL96 | | asUfsuagAfaUfGfuagaUfuCfugauasgsu | | ACUAUCAGAAUCUACAUUCUAAA | |
| AD-2011177 | usasuga(Ada)UfuCfUfCfucuccaaauuL96 | | asAfsuuuGfgAfGfagagAfaUfucauasusa | | UAUAUGAAUUCUCUCUCCAAAUA | |
| AD-2011178 | usasaca(Ada)CfaGfAfAfucuaaucuuuL96 | | asAfsagaUfuAfGfauucUfgUfuguuasgsu | | ACUAACAACAGAAUCUAAUCUUC | |
| AD-2011179 | cscsuca(Cda)AfuCfUfGfuuaucuuauuL96 | | asAfsuaaGfaUfAfacagAfuGfugaggsasg | | CUCCUCACAUCUGUUAUCUUAUU | |
| AD-2011180 | csascuu(Ada)AfaAfCfUfucagacuucuL96 | | asGfsaagUfcUfGfaaguUfuUfaagugsgsu | | ACCACUUAAAACUUCAGACUUCC | |
| AD-2011181 | csasuuc(Uda)CfaUfUfGfucuucacauuL96 | | | | | |
| AD-2011182 | gsascca(Uda)UfuCfAfGfaacaucuucuL96 | | asGfsaagAfuGfUfucugAfaAfuggucsasg | | CUGACCAUUUCAGAACAUCUUCC | |
| AD-2011183 | cscsuua(Cda)UfgAfUfAfacauaaacauL96 | | asUfsguuUfaUfGfuuauCfaGfuaaggsusu | | AACCUUACUGAUAACAUAAACAG | |
| AD-2011184 | uscsucu(Gda)AfaGfUfUfcugcuacaauL96 | | asUfsuguAfgCfAfgaacUfuCfagagasasg | | CUUCUCUGAAGUUCUGCUACAAC | |
| AD-2011185 | csusaca(Gda)AfaUfCfUfauuuaucaauL96 | | asUfsugaUfaAfAfuagaUfuCfuguagscsu | | AGCUACAGAAUCUAUUUAUCAAU | |
| AD-2011186 | usasaga(Cda)UfuCfAfGfaaugauuuuuL96 | | asAfsaaaUfcAfUfucugAfaGfucuuasasg | | CUUAAGACUUCAGAAUGAUUUUG | |
| AD-2011187 | asasgua(Uda)UfuUfUfCfaggucuucauL96 | | asUfsgaaGfaCfCfugaaAfaAfuacuusasg | | CUAAGUAUUUUUCAGGUCUUCAC | |
| AD-2011188 | ascsugu(Uda)GfaUfUfUfccucaacauuL96 | | asAfsuguUfgAfGfgaaaUfcAfacagususg | | CAACUGUUGAUUUCCUCAACAUG | |
| AD-2011189 | cscsuau(Ada)CfuGfCfAfuaauccaacuL96 | | asGfsuugGfaUfUfaugcAfgUfauaggsusg | | CACCUAUACUGCAUAAUCCAACA | |
| AD-2011190 | csusguu(Cda)UfaAfGfAfcauaugaucuL96 | | asGfsaucAfuAfUfgucuUfaGfaacagsasu | | AUCUGUUCUAAGACAUAUGAUCA | |
| AD-2011191 | uscsuac(Uda)AfuAfGfAfauaaguucuuL96 | | asAfsgaaCfuUfAfuucuAfuAfguagasasc | | GUUCUACUAUAGAAUAAGUUCUU | |
| AD-2011192 | asusgcu(Cda)AfaAfUfAfuguucuacuuL96 | | asAfsguaGfaAfCfauauUfuGfagcaususu | | AAAUGCUCAAAUAUGUUCUACUA | |
| AD-2011193 | ususcua(Ada)AfaCfAfUfgguuacuaauL96 | | asUfsuagUfaAfCfcaugUfuUfuagaasgsa | | UCUUCUAAAACAUGGUUACUAAA | |
| AD-2011194 | gsgsaaa(Ada)UfaUfAfUfucaccaaacuL96 | | asGfsuuuGfgUfGfaauaUfaUfuuuccsasg | | CUGGAAAAUAUAUUCACCAAACU | |
| AD-2011195 | csasaaa(Uda)CfuUfAfAfcuaccuaauuL96 | | asAfsuuaGfgUfAfguuaAfgAfuuuugscsg | | CGCAAAAUCUUAACUACCUAAUA | |
| AD-2011196 | ususuuc(Ada)AfuUfUfCfuccucugacuL96 | | asGfsucaGfaGfGfagaaAfuUfgaaaasusu | | AAUUUUCAAUUUCUCCUCUGACC | |
| AD-2011197 | uscsuuu(Cda)UfcUfCfGfaccacuuaauL96 | | asUfsuaaGfuGfGfucgaGfaGfaaagasusa | | UAUCUUUCUCUCGACCACUUAAA | |
| AD-2011198 | gscsuua(Cda)CfaUfAfCfuauaucuuuuL96 | | asAfsaagAfuAfUfaguaUfgGfuaagcsusa | | UAGCUUACCAUACUAUAUCUUUG | |
| AD-2011199 | ususcac(Cda)AfaGfUfAfucaaaguaauL96 | | asUfsuacUfuUfGfauacUfuGfgugaasgsa | | UCUUCACCAAGUAUCAAAGUAAU | |
| AD-2011200 | csasuca(Gda)CfuUfAfAfaaucugucauL96 | | asUfsgacAfgAfUfuuuaAfgCfugaugsusg | | CACAUCAGCUUAAAAUCUGUCAU | |
| AD-2011201 | ascsuau(Uda)GfaCfCfAfuaaaccuuauL96 | | asUfsaagGfuUfUfauggUfcAfauagusasg | | CUACUAUUGACCAUAAACCUUAC | |
| AD-2011202 | csusaua(Uda)UfcCfUfAfcaauaaaguuL96 | | asAfscuuUfaUfUfguagGfaAfuauagsusg | | CACUAUAUUCCUACAAUAAAGUA | |
| AD-2011203 | usascaa(Gda)CfuGfGfAfaauuccuaauL96 | | asUfsuagGfaAfUfuuccAfgCfuuguasgsa | | UCUACAAGCUGGAAAUUCCUAAA | |
| AD-2011204 | usascug(Ada)GfcUfAfAfauuauagauuL96 | | asAfsucuAfuAfAfuuuaGfcUfcaguasgsa | | UCUACUGAGCUAAAUUAUAGAUC | |
| AD-2011205 | usgscca(Ada)CfaAfGfUfucacuucauuL96 | | asAfsugaAfgUfGfaacuUfgUfuggcasgsu | | ACUGCCAACAAGUUCACUUCAUA | |
| AD-2011206 | csusacc(Uda)AfaAfAfGfaagacaguuuL96 | | asAfsacuGfuCfUfucuuUfuAfgguagscsc | | GGCUACCUAAAAGAAGACAGUUA | |
| AD-2011207 | asgsaca(Uda)GfuUfAfCfuaauauaacuL96 | | asGfsuuaUfaUfUfaguaAfcAfugucususc | | GAAGACAUGUUACUAAUAUAACU | |
| AD-2011208 | ususcau(Ada)CfaAfCfAfcaauacucuuL96 | | asAfsgagUfaUfUfguguUfgUfaugaasgsu | | ACUUCAUACAACACAAUACUCUA | |
| AD-2011209 | asusgcc(Ada)CfaUfUfAfacaucuuuuuL96 | | asAfsaaaGfaUfGfuuaaUfgUfggcausasg | | CUAUGCCACAUUAACAUCUUUUA | |
| AD-2011210 | csascug(Gda)UfuUfUfAfguaaauuacuL96 | | asGfsuaaUfuUfAfcuaaAfaCfcagugsasg | | CUCACUGGUUUUAGUAAAUUACC | |
| AD-2011211 | csuscgc(Uda)CfaGfCfUfauaagaagauL96 | | asUfscuuCfuUfAfuagcUfgAfgcgagsusg | | CACUCGCUCAGCUAUAAGAAGAG | |
| AD-2011212 | uscsuuc(Ada)UfuCfUfUfugauagaaauL96 | | asUfsuucUfaUfCfaaagAfaUfgaagasasc | | GUUCUUCAUUCUUUGAUAGAAAU | |
| AD-2011213 | csasaga(Uda)UfaAfGfAfcuaaaacuuuL96 | | asAfsaguUfuUfAfgucuUfaAfucuugsasc | | GUCAAGAUUAAGACUAAAACUUA | |
| AD-2011214 | asasgcu(Ada)GfaGfAfAfaauguuauuuL96 | | asAfsauaAfcAfUfuuucUfcUfagcuusasc | | GUAAGCUAGAGAAAAUGUUAUUU | |
| AD-2011215 | asasacu(Uda)UfgGfUfAfauuuaaguuuL96 | | asAfsacuUfaAfAfuuacCfaAfaguuusgsg | | CCAAACUUUGGUAAUUUAAGUUG | |
| AD-2011216 | csasuau(Cda)AfcUfAfAfuauacuaacuL96 | | asGfsuuaGfuAfUfauuaGfuGfauaugsasc | | GUCAUAUCACUAAUAUACUAACA | |
| AD-2011217 | ususgcu(Gda)AfuCfUfGfuaucaucguuL96 | | asAfscgaUfgAfUfacagAfuCfagcaasgsa | | UCUUGCUGAUCUGUAUCAUCGUG | |
| AD-2011218 | asuscug(Uda)UfgGfAfUfcuuguaaacuL96 | | asGfsuuuAfcAfAfgaucCfaAfcagausgsa | | UCAUCUGUUGGAUCUUGUAAACA | |
| AD-2011219 | asusgua(Gda)GfuAfAfAfucauaaaucuL96 | | asGfsauuUfaUfGfauuuAfcCfuacausgsu | | ACAUGUAGGUAAAUCAUAAAUCU | |
| AD-2011220 | csusgau(Uda)AfgUfCfAfuauuccuuuuL96 | | asAfsaagGfaAfUfaugaCfuAfaucagsusu | | AACUGAUUAGUCAUAUUCCUUUG | |
| AD-2011221 | csasucu(Ada)UfuAfCfAfucuacagcuuL96 | | asAfsgcuGfuAfGfauguAfaUfagaugsgsg | | CCCAUCUAUUACAUCUACAGCUG | |
| AD-2011222 | asasaau(Ada)GfuUfUfAfcaccuauacuL96 | | asGfsuauAfgGfUfguaaAfcUfauuuusasg | | CUAAAAUAGUUUACACCUAUACU | |
| AD-2011223 | gsgsaga(Cda)AfcUfAfUfuaaauuuucuL96 | | asGfsaaaAfuUfUfaauaGfuGfucuccsusu | | AAGGAGACACUAUUAAAUUUUCU | |
| AD-2011224 | asgsuag(Ada)AfaGfCfUfuauaaacaauL96 | | asUfsuguUfuAfUfaagcUfuUfcuacususg | | CAAGUAGAAAGCUUAUAAACAAC | |
| AD-2011225 | uscsuua(Cda)AfcAfAfGfuguugcuaauL96 | | asUfsuagCfaAfCfacuuGfuGfuaagasasa | | UUUCUUACACAAGUGUUGCUAAC | |
| AD-2011226 | asascua(Uda)UfuGfUfAfguaacuaucuL96 | | asGfsauaGfuUfAfcuacAfaAfuaguuscsu | | AGAACUAUUUGUAGUAACUAUCA | |
| AD-2011227 | ususacu(Ada)AfaAfGfAfauauguaacuL96 | | asGfsuuaCfaUfAfuucuUfuUfaguaascsc | | GGUUACUAAAAGAAUAUGUAACA | |
| AD-2011228 | uscsaaa(Ada)UfaGfUfCfcacugacucuL96 | | asGfsaguCfaGfUfggacUfaUfuuugasasu | | AUUCAAAAUAGUCCACUGACUCC | |
| AD-2011229 | ascsagg(Ada)AfaAfCfAfauauuguauuL96 | | asAfsuacAfaUfAfuuguUfuUfccuguscsu | | AGACAGGAAAACAAUAUUGUAUA | |
| AD-2011230 | gsusgua(Uda)AfaAfAfUfgcaacuguuuL96 | | asAfsacaGfuUfGfcauuUfuAfuacacsusu | | AAGUGUAUAAAAUGCAACUGUUG | |
| AD-2011231 | csusaua(Cda)UfgUfGfAfugaucacaguL96 | | asCfsuguGfaUfCfaucaCfaGfuauagsasg | | CUCUAUACUGUGAUGAUCACAGC | |
| AD-2011232 | gscscau(Ada)CfuCfUfUfacauaauaauL96 | | asUfsuauUfaUfGfuaagAfgUfauggcscsu | | AGGCCAUACUCUUACAUAAUAAA | |
| AD-2011233 | gsasauc(Ada)CfaGfAfAfuucuaguacuL96 | | asGfsuacUfaGfAfauucUfgUfgauucsusu | | AAGAAUCACAGAAUUCUAGUACA | |
| AD-2011234 | ascsaca(Uda)AfuUfUfUfgcguguuauuL96 | | asAfsuaaCfaCfGfcaaaAfuAfugugususa | | UAACACAUAUUUUGCGUGUUAUA | |
| AD-2011235 | ususgau(Uda)AfcAfCfUfguuuguuacuL96 | | asGfsuaaCfaAfAfcaguGfuAfaucaasasg | | CUUUGAUUACACUGUUUGUUACA | |
| AD-2011236 | cscsagc(Uda)AfuGfCfUfauuuauaauuL96 | | asAfsuuaUfaAfAfuagcAfuAfgcuggsasu | | AUCCAGCUAUGCUAUUUAUAAUU | |
| AD-2011237 | csasacu(Gda)AfaGfUfAfaaauugaguuL96 | | asAfscucAfaUfUfuuacUfuCfaguugsusu | | AACAACUGAAGUAAAAUUGAGUG | |
| AD-2011238 | gsusgua(Ada)UfuAfAfCfcauaucuucuL96 | | asGfsaagAfuAfUfgguuAfaUfuacacsasu | | AUGUGUAAUUAACCAUAUCUUCU | |
| AD-2011239 | uscsuau(Cda)AfaCfCfAfaaugguaaguL96 | | asCfsuuaCfcAfUfuuggUfuGfauagasgsg | | CCUCUAUCAACCAAAUGGUAAGC | |
| AD-2011240 | usgsagg(Ada)UfuAfCfAfgaauacuauuL96 | | asAfsuagUfaUfUfcuguAfaUfccucascsa | | UGUGAGGAUUACAGAAUACUAUA | |
| AD-2011241 | gsusgga(Ada)AfaUfUfUfgaacugauuuL96 | | asAfsaucAfgUfUfcaaaUfuUfuccacsusu | | AAGUGGAAAAUUUGAACUGAUUA | |
| AD-2011242 | asusgga(Gda)AfaAfGfUfccaauaccuuL96 | | asAfsgguAfuUfGfgacuUfuCfuccausgsa | | UCAUGGAGAAAGUCCAAUACCUC | |
| AD-2011243 | asasauc(Ada)GfaAfUfCfacuauauuauL96 | | asUfsaauAfuAfGfugauUfcUfgauuusgsc | | GCAAAUCAGAAUCACUAUAUUAA | |
| AD-2011244 | csusucc(Ada)UfuCfCfAfgccuaacauuL96 | | asAfsuguUfaGfGfcuggAfaUfggaagsasc | | GUCUUCCAUUCCAGCCUAACAUC | |
| AD-2011245 | asasuga(Ada)GfuGfUfCfauuauucaauL96 | | asUfsugaAfuAfAfugacAfcUfucauususg | | CAAAUGAAGUGUCAUUAUUCAAA | |
| AD-2011246 | csusuca(Uda)CfaUfAfAfaguguaaaguL96 | | asCfsuuuAfcAfCfuuuaUfgAfugaagsasa | | UUCUUCAUCAUAAAGUGUAAAGA | |
| AD-2011247 | cscsaaa(Uda)CfuUfUfUfcugaagauguL96 | | asCfsaucUfuCfAfgaaaAfgAfuuuggsgsa | | UCCCAAAUCUUUUCUGAAGAUGA | |
| AD-2011248 | ususugg(Ada)AfuCfAfUfgaaaccuuauL96 | | asUfsaagGfuUfUfcaugAfuUfccaaasgsa | | UCUUUGGAAUCAUGAAACCUUAA | |
| AD-2011249 | asasaca(Cda)CfcGfUfAfagacuucauuL96 | | asAfsugaAfgUfCfuuacGfgGfuguuusasg | | CUAAACACCCGUAAGACUUCAUA | |
| AD-2011250 | asascuc(Ada)AfuAfGfUfgaaggagacuL96 | | asGfsucuCfcUfUfcacuAfuUfgaguusasg | | CUAACUCAAUAGUGAAGGAGACA | |
| AD-2011251 | uscsuuc(Ada)UfuUfAfAfggcacuguauL96 | | asUfsacaGfuGfCfcuuaAfaUfgaagasusu | | AAUCUUCAUUUAAGGCACUGUAG | |
| AD-2011252 | gsgsucu(Uda)GfcAfGfUfcuugucuuauL96 | | asUfsaagAfcAfAfgacuGfcAfagaccsasa | | UUGGUCUUGCAGUCUUGUCUUAG | |
| AD-2011253 | usasucu(Gda)AfgCfUfAfgaguuaccuuL96 | | asAfsgguAfaCfUfcuagCfuCfagauasasu | | AUUAUCUGAGCUAGAGUUACCUA | |
| AD-2011254 | asascug(Uda)AfaUfAfGfgauauagcuuL96 | | asAfsgcuAfuAfUfccuaUfuAfcaguusgsa | | UCAACUGUAAUAGGAUAUAGCUA | |
| AD-2011255 | asusgaa(Ada)AfgGfGfCfuuuauuuucuL96 | | asGfsaaaAfuAfAfagccCfuUfuucausgsu | | ACAUGAAAAGGGCUUUAUUUUCA | |
| AD-2011256 | csasgaa(Ada)GfuAfUfCfccuagucuuuL96 | | asAfsagaCfuAfGfggauAfcUfuucugsusa | | UACAGAAAGUAUCCCUAGUCUUA | |
| AD-2011257 | usgscca(Gda)CfuUfUfUfuaucuuucuuL96 | | asAfsgaaAfgAfUfaaaaAfgCfuggcasgsc | | GCUGCCAGCUUUUUAUCUUUCUC | |
| AD-2011258 | csusuuu(Gda)AfgGfUfGfaauauaauuuL96 | | asAfsauuAfuAfUfucacCfuCfaaaagsasg | | CUCUUUUGAGGUGAAUAUAAUUU | |
| AD-2011259 | uscsagg(Gda)AfuAfUfCfugaagaacauL96 | | asUfsguuCfuUfCfagauAfuCfccugasasc | | GUUCAGGGAUAUCUGAAGAACAG | |
| AD-2011260 | csasaca(Ada)GfcAfCfGfucaaaagcuuL96 | | asAfsgcuUfuUfGfacguGfcUfuguugsasg | | CUCAACAAGCACGUCAAAAGCUA | |
| AD-2011261 | asusugu(Ada)UfaAfCfAfgaccacuucuL96 | | asGfsaagUfgGfUfcuguUfaUfacaausasu | | AUAUUGUAUAACAGACCACUUCC | |
| AD-2011262 | ususaau(Gda)UfuGfCfCfuuuuauauuuL96 | | asAfsauaUfaAfAfaggcAfaCfauuaasgsc | | GCUUAAUGUUGCCUUUUAUAUUU | |
| AD-2011263 | asusuga(Cda)CfuUfGfGfuuucuuacauL96 | | asUfsguaAfgAfAfaccaAfgGfucaausasu | | AUAUUGACCUUGGUUUCUUACAC | |
| AD-2011264 | usasuga(Uda)CfaAfCfAfgaugagaacuL96 | | asGfsuucUfcAfUfcuguUfgAfucauasusg | | CAUAUGAUCAACAGAUGAGAACU | |
| AD-2011265 | gscsaga(Gda)AfuUfUfCfuuaagugacuL96 | | asGfsucaCfuUfAfagaaAfuCfucugcscsc | | GGGCAGAGAUUUCUUAAGUGACG | |
| AD-2011266 | gsasaga(Gda)UfuUfCfUfuugugaaaauL96 | | asUfsuuuCfaCfAfaagaAfaCfucuucsusa | | UAGAAGAGUUUCUUUGUGAAAAG | |
| AD-2011267 | csasacc(Ada)UfuGfAfAfaugccucaauL96 | | asUfsugaGfgCfAfuuucAfaUfgguugsasg | | CUCAACCAUUGAAAUGCCUCAAC | |
| AD-2011268 | asuscua(Uda)UfuUfGfCfaguccacucuL96 | | asGfsaguGfgAfCfugcaAfaAfuagausgsc | | GCAUCUAUUUUGCAGUCCACUCU | |
| AD-2011269 | gsusuac(Cda)AfuAfUfGfuauucaucuuL96 | | asAfsgauGfaAfUfacauAfuGfguaacsasa | | UUGUUACCAUAUGUAUUCAUCUG | |
| AD-2011270 | ususcuu(Ada)UfcUfUfAfauuuacagguL96 | | asCfscugUfaAfAfuuaaGfaUfaagaascsu | | AGUUCUUAUCUUAAUUUACAGGG | |
| AD-2011271 | ascsagu(Uda)AfuCfUfCfauauuuggcuL96 | | asGfsccaAfaUfAfugagAfuAfacuguscsu | | AGACAGUUAUCUCAUAUUUGGCU | |
| AD-2011272 | asascaa(Uda)UfuUfAfAfuuucaguuguL96 | | asCfsaacUfgAfAfauuaAfaAfuuguusgsg | | CCAACAAUUUUAAUUUCAGUUGA | |
| AD-2011273 | gsgscaa(Gda)GfaAfAfAfuaaaagauuuL96 | | asAfsaucUfuUfUfauuuUfcCfuugccsusg | | CAGGCAAGGAAAAUAAAAGAUUU | |
| AD-2011274 | uscsauc(Gda)UfgAfUfGfcuucucugauL96 | | asUfscagAfgAfAfgcauCfaCfgaugasusa | | UAUCAUCGUGAUGCUUCUCUGAA | |
| AD-2011275 | asasgau(Gda)AfaGfAfGfuuuaguuuuuL96 | | asAfsaaaCfuAfAfacucUfuCfaucuuscsa | | UGAAGAUGAAGAGUUUAGUUUUA | |
| AD-2011276 | csascug(Uda)AfgUfGfAfauuaucugauL96 | | asUfscagAfuAfAfuucaCfuAfcagugscsc | | GGCACUGUAGUGAAUUAUCUGAG | |
| AD-2011277 | csusaca(Ada)CfcUfCfUfagaucugcauL96 | | asUfsgcaGfaUfCfuagaGfgUfuguagscsa | | UGCUACAACCUCUAGAUCUGCAG | |
| AD-2011278 | asusgag(Ada)AfuCfAfAfguauggaaauL96 | | asUfsuucCfaUfAfcuugAfuUfcucauscsa | | UGAUGAGAAUCAAGUAUGGAAAA | |
| AD-2011279 | ususguu(Cda)AfaGfGfGfucaacuguauL96 | | asUfsacaGfuUfGfacccUfuGfaacaascsa | | UGUUGUUCAAGGGUCAACUGUAA | |
| AD-2011280 | gsasacc(Cda)AfuGfAfGfagauacuaguL96 | | asCfsuagUfaUfCfucucAfuGfgguucsasg | | CUGAACCCAUGAGAGAUACUAGA | |
| AD-2011281 | asusgug(Ada)CfaGfUfGfagauuagucuL96 | | asGfsacuAfaUfCfucacUfgUfcacausasu | | AUAUGUGACAGUGAGAUUAGUCA | |
| AD-2011282 | csusauu(Cda)AfuUfAfAfauggaaguguL96 | | asCfsacuUfcCfAfuuuaAfuGfaauagsusa | | UACUAUUCAUUAAAUGGAAGUGG | |
| AD-2011283 | uscsuuu(Uda)AfaAfGfUfugaugagaauL96 | | asUfsucuCfaUfCfaacuUfuAfaaagasusg | | CAUCUUUUAAAGUUGAUGAGAAU | |
| AD-2011284 | gsgsuga(Cda)AfgAfGfUfcagaaaacuuL96 | | asAfsguuUfuCfUfgacuCfuGfucaccscsa | | UGGGUGACAGAGUCAGAAAACUC | |
| AD-2011285 | asasaca(Ada)CfaGfGfUfgauacacucuL96 | | asGfsaguGfuAfUfcaccUfgUfuguuusasu | | AUAAACAACAGGUGAUACACUCA | |
| AD-2011286 | cscsacu(Uda)CfcUfGfAfguagaagaguL96 | | asCfsucuUfcUfAfcucaGfgAfaguggsusc | | GACCACUUCCUGAGUAGAAGAGU | |
| AD-2011287 | asasauc(Uda)UfaUfUfCfugugaggauuL96 | | asAfsuccUfcAfCfagaaUfaAfgauuususa | | UAAAAUCUUAUUCUGUGAGGAUU | |
| AD-2011288 | asgsugg(Ada)AfaGfUfGfuuugguucauL96 | | asUfsgaaCfcAfAfacacUfuUfccacuscsc | | GGAGUGGAAAGUGUUUGGUUCAG | |
| AD-2011289 | ususgua(Uda)UfuUfUfUfcuaugccacuL96 | | asGfsuggCfaUfAfgaaaAfaAfuacaasusu | | AAUUGUAUUUUUUCUAUGCCACA | |
| AD-2011290 | gsusguu(Ada)UfaUfGfUfauuauacacuL96 | | asGfsuguAfuAfAfuacaUfaUfaacacsgsc | | GCGUGUUAUAUGUAUUAUACACU | |
| AD-2011291 | asasaga(Gda)UfaGfAfGfgauguguaauL96 | | asUfsuacAfcAfUfccucUfaCfucuuususa | | UAAAAGAGUAGAGGAUGUGUAAU | |
| AD-2011292 | asgsuuu(Uda)AfaAfAfCfugcacugccuL96 | | asGfsgcaGfuGfCfaguuUfuAfaaacusasa | | UUAGUUUUAAAACUGCACUGCCA | |
| AD-2011293 | asasgau(Uda)UfcCfAfGfugacagaaauL96 | | asUfsuucUfgUfCfacugGfaAfaucuususu | | AAAAGAUUUCCAGUGACAGAAAA | |
| AD-2011294 | ascsugg(Uda)GfgUfUfAfauaugugacuL96 | | asGfsucaCfaUfAfuuaaCfcAfccagususc | | GAACUGGUGGUUAAUAUGUGACA | |
| AD-2011295 | ususgca(Ada)UfuCfAfAfgcccuuguuuL96 | | asAfsacaAfgGfGfcuugAfaUfugcaasgsg | | CCUUGCAAUUCAAGCCCUUGUUG | |
| AD-2011296 | asasgug(Ada)CfgCfCfUfcaucuacaauL96 | | asUfsuguAfgAfUfgaggCfgUfcacuusasa | | UUAAGUGACGCCUCAUCUACAAG | |
| AD-2011297 | asusuuu(Gda)CfaGfGfUfugucuuccauL96 | | asUfsggaAfgAfCfaaccUfgCfaaaauscsa | | UGAUUUUGCAGGUUGUCUUCCAU | |
| AD-2011298 | asusgua(Ada)CfaUfCfAfauauugaccuL96 | | asGfsgucAfaUfAfuugaUfgUfuacausasu | | AUAUGUAACAUCAAUAUUGACCU | |
| AD-2011299 | asasaga(Ada)UfaUfUfCfauguauaaguL96 | | asCfsuuaUfaCfAfugaaUfaUfucuuuscsc | | GGAAAGAAUAUUCAUGUAUAAGU | |
| AD-2011300 | asasgua(Ada)UfaAfCfAfcaaaugaaguL96 | | asCfsuucAfuUfUfguguUfaUfuacuususg | | CAAAGUAAUAACACAAAUGAAGU | |
| AD-2011301 | usascag(Cda)UfgAfCfCfcuugaacauuL96 | | asAfsuguUfcAfAfggguCfaGfcuguasgsa | | UCUACAGCUGACCCUUGAACAUG | |
| AD-2011302 | asusgga(Ada)AfaGfUfAfaggccauacuL96 | | asGfsuauGfgCfCfuuacUfuUfuccausasc | | GUAUGGAAAAGUAAGGCCAUACU | |

TABLE 39
Unmodified Sense and Antisense Strand Sequences of PLN dsRNA
Agents Comprising a GalNAc Conjugate Targeting Ligand

| | | SEQ | Range in | | | SEQ | Range in | |
|---|---|---|---|---|---|---|---|---|
| Duplex | Sense Strand | ID | NM_002667.5 | | Antisense Strand | ID | NM_002667.5 | |
| Name | Sequence 5′ to 3′ | NO. | Start | End | Sequence 5′ to 3′ | NO. | Start | End |
| AD-2004072 | GGUGACAGAGUCAGAAAACUU | | 9 | 29 | AAGUUUUCUGACUCUGUCACCCA | | 7 | 29 |
| AD-2004080 | AAACACCCGUAAGACUUCAUU | | 37 | 57 | AAUGAAGUCUUACGGGUGUUUAG | | 35 | 57 |
| AD-2004095 | UUCAUACAACACAAUACUCUU | | 52 | 72 | AAGAGUAUUGUGUUGUAUGAAGU | | 50 | 72 |
| AD-2004113 | CUAUACUGUGAUGAUCACAGU | | 70 | 90 | ACUGUGAUCAUCACAGUAUAGAG | | 68 | 90 |
| AD-2004142 | CUACCUAAAAGAAGACAGUUU | | 99 | 119 | AAACUGUCUUCUUUUAGGUAGCC | | 97 | 119 |
| AD-2004156 | ACAGUUAUCUCAUAUUUGGCU | | 113 | 133 | AGCCAAAUAUGAGAUAACUGUCU | | 111 | 133 |
| AD-2004176 | UGCCAGCUUUUUAUCUUUCUU | | 133 | 153 | AAGAAAGAUAAAAAGCUGGCAGC | | 131 | 153 |
| AD-2004189 | UCUUUCUCUCGACCACUUAAU | | 146 | 166 | AUUAAGUGGUCGAGAGAAAGAUA | | 144 | 166 |
| AD-2004202 | CACUUAAAACUUCAGACUUCU | | 159 | 179 | AGAAGUCUGAAGUUUUAAGUGGU | | 157 | 179 |
| AD-2004238 | AUGGAGAAAGUCCAAUACCUU | | 195 | 215 | AAGGUAUUGGACUUUCUCCAUGA | | 193 | 215 |
| AD-2004260 | CUCGCUCAGCUAUAAGAAGAU | | 217 | 237 | AUCUUCUUAUAGCUGAGCGAGUG | | 215 | 237 |
| AD-2004284 | CAACCAUUGAAAUGCCUCAAU | | 241 | 261 | AUUGAGGCAUUUCAAUGGUUGAG | | 239 | 261 |
| AD-2004301 | CAACAAGCACGUCAAAAGCUU | | 258 | 278 | AAGCUUUUGACGUGCUUGUUGAG | | 256 | 278 |
| AD-2004319 | CUACAGAAUCUAUUUAUCAAU | | 276 | 296 | AUUGAUAAAUAGAUUCUGUAGCU | | 274 | 296 |
| AD-2004329 | UAUCAAUUUCUGUCUCAUCUU | | 290 | 310 | AAGAUGAGACAGAAAUUGAUAAA | | 288 | 310 |
| AD-2004345 | AUCUUAAUAUGUCUCUUGCUU | | 306 | 326 | AAGCAAGAGACAUAUUAAGAUGA | | 304 | 326 |
| AD-2004360 | UUGCUGAUCUGUAUCAUCGUU | | 321 | 341 | AACGAUGAUACAGAUCAGCAAGA | | 319 | 341 |
| AD-2004373 | UCAUCGUGAUGCUUCUCUGAU | | 334 | 354 | AUCAGAGAAGCAUCACGAUGAUA | | 332 | 354 |
| AD-2004386 | UCUCUGAAGUUCUGCUACAAU | | 347 | 367 | AUUGUAGCAGAACUUCAGAGAAG | | 345 | 367 |
| AD-2004400 | CUACAACCUCUAGAUCUGCAU | | 361 | 381 | AUGCAGAUCUAGAGGUUGUAGCA | | 359 | 381 |
| AD-2004428 | CAUCAGCUUAAAAUCUGUCAU | | 389 | 409 | AUGACAGAUUUUAAGCUGAUGUG | | 387 | 409 |
| AD-2004458 | ACAGGAAAACAAUAUUGUAUU | | 419 | 439 | AAUACAAUAUUGUUUUCCUGUCU | | 417 | 439 |
| AD-2004468 | AUUGUAUAACAGACCACUUCU | | 432 | 452 | AGAAGUGGUCUGUUAUACAAUAU | | 430 | 452 |
| AD-2004481 | CCACUUCCUGAGUAGAAGAGU | | 445 | 465 | ACUCUUCUACUCAGGAAGUGGUC | | 443 | 465 |
| AD-2004495 | GAAGAGUUUCUUUGUGAAAAU | | 459 | 479 | AUUUUCACAAAGAAACUCUUCUA | | 457 | 479 |
| AD-2004518 | CAAGAUUAAGACUAAAACUUU | | 482 | 502 | AAAGUUUUAGUCUUAAUCUUGAC | | 480 | 502 |
| AD-2004539 | GUUACCAUAUGUAUUCAUCUU | | 505 | 525 | AAGAUGAAUACAUAUGGUAACAA | | 503 | 525 |
| AD-2004555 | AUCUGUUGGAUCUUGUAAACU | | 521 | 541 | AGUUUACAAGAUCCAACAGAUGA | | 519 | 541 |
| AD-2004575 | AUGAAAAGGGCUUUAUUUUCU | | 541 | 561 | AGAAAAUAAAGCCCUUUUCAUGU | | 539 | 561 |
| AD-2004594 | GUGUAUAAAAUGCAACUGUUU | | 581 | 601 | AAACAGUUGCAUUUUAUACACUU | | 579 | 601 |
| AD-2004608 | ACUGUUGAUUUCCUCAACAUU | | 595 | 615 | AAUGUUGAGGAAAUCAACAGUUG | | 593 | 615 |
| AD-2004632 | CACAAAUUUCUAUCCCAAAUU | | 619 | 639 | AAUUUGGGAUAGAAAUUUGUGAG | | 617 | 639 |
| AD-2004646 | CCAAAUCUUUUCUGAAGAUGU | | 633 | 653 | ACAUCUUCAGAAAAGAUUUGGGA | | 631 | 653 |
| AD-2004660 | AAGAUGAAGAGUUUAGUUUUU | | 647 | 667 | AAAAACUAAACUCUUCAUCUUCA | | 645 | 667 |
| AD-2004673 | AGUUUUAAAACUGCACUGCCU | | 661 | 681 | AGGCAGUGCAGUUUUAAAACUAA | | 659 | 681 |
| AD-2004689 | UGCCAACAAGUUCACUUCAUU | | 677 | 697 | AAUGAAGUGAACUUGUUGGCAGU | | 675 | 697 |
| AD-2004718 | CUUUUGAGGUGAAUAUAAUUU | | 718 | 738 | AAAUUAUAUUCACCUCAAAAGAG | | 716 | 738 |
| AD-2004747 | AAGUAUUUUUCAGGUCUUCAU | | 769 | 789 | AUGAAGACCUGAAAAAUACUUAG | | 767 | 789 |
| AD-2004763 | UUCACCAAGUAUCAAAGUAAU | | 785 | 805 | AUUACUUUGAUACUUGGUGAAGA | | 783 | 805 |
| AD-2004777 | AAGUAAUAACACAAAUGAAGU | | 799 | 819 | ACUUCAUUUGUGUUAUUACUUUG | | 797 | 819 |
| AD-2004790 | AAUGAAGUGUCAUUAUUCAAU | | 812 | 832 | AUUGAAUAAUGACACUUCAUUUG | | 810 | 832 |
| AD-2004806 | UCAAAAUAGUCCACUGACUCU | | 828 | 848 | AGAGUCAGUGGACUAUUUUGAAU | | 826 | 848 |
| AD-2004825 | CCUCACAUCUGUUAUCUUAUU | | 847 | 867 | AAUAAGAUAACAGAUGUGAGGAG | | 845 | 867 |
| AD-2004837 | AACUAUUUGUAGUAACUAUCU | | 874 | 894 | AGAUAGUUACUACAAAUAGUUCU | | 872 | 894 |
| AD-2004853 | UAUCAGAAUCUACAUUCUAAU | | 890 | 910 | AUUAGAAUGUAGAUUCUGAUAGU | | 888 | 910 |
| AD-2004872 | UUGUAUUUUUUCUAUGCCACU | | 918 | 938 | AGUGGCAUAGAAAAAAUACAAUU | | 916 | 938 |
| AD-2004885 | AUGCCACAUUAACAUCUUUUU | | 931 | 951 | AAAAAGAUGUUAAUGUGGCAUAG | | 929 | 951 |
| AD-2004896 | UCUUUUAAAGUUGAUGAGAAU | | 945 | 965 | AUUCUCAUCAACUUUAAAAGAUG | | 943 | 965 |
| AD-2004909 | AUGAGAAUCAAGUAUGGAAAU | | 958 | 978 | AUUUCCAUACUUGAUUCUCAUCA | | 956 | 978 |
| AD-2004922 | AUGGAAAAGUAAGGCCAUACU | | 971 | 991 | AGUAUGGCCUUACUUUUCCAUAC | | 969 | 991 |
| AD-2004935 | GCCAUACUCUUACAUAAUAAU | | 984 | 1004 | AUUAUUAUGUAAGAGUAUGGCCU | | 982 | 1004 |
| AD-2004950 | GAAUCACAGAAUUCUAGUACU | | 1030 | 1050 | AGUACUAGAAUUCUGUGAUUCUU | | 1028 | 1050 |
| AD-2004970 | AUGUAGGUAAAUCAUAAAUCU | | 1050 | 1070 | AGAUUUAUGAUUUACCUACAUGU | | 1048 | 1070 |
| AD-2004989 | CUGUUCUAAGACAUAUGAUCU | | 1069 | 1089 | AGAUCAUAUGUCUUAGAACAGAU | | 1067 | 1089 |
| AD-2005002 | UAUGAUCAACAGAUGAGAACU | | 1082 | 1102 | AGUUCUCAUCUGUUGAUCAUAUG | | 1080 | 1102 |
| AD-2005020 | ACUGGUGGUUAAUAUGUGACU | | 1100 | 1120 | AGUCACAUAUUAACCACCAGUUC | | 1098 | 1120 |
| AD-2005033 | AUGUGACAGUGAGAUUAGUCU | | 1113 | 1133 | AGACUAAUCUCACUGUCACAUAU | | 1111 | 1133 |
| AD-2005051 | CAUAUCACUAAUAUACUAACU | | 1132 | 1152 | AGUUAGUAUAUUAGUGAUAUGAC | | 1130 | 1152 |
| AD-2005067 | UAACAACAGAAUCUAAUCUUU | | 1148 | 1168 | AAAGAUUAGAUUCUGUUGUUAGU | | 1146 | 1168 |
| AD-2005082 | UCUUCAUUUAAGGCACUGUAU | | 1164 | 1184 | AUACAGUGCCUUAAAUGAAGAUU | | 1162 | 1184 |
| AD-2005095 | CACUGUAGUGAAUUAUCUGAU | | 1177 | 1197 | AUCAGAUAAUUCACUACAGUGCC | | 1175 | 1197 |
| AD-2005108 | UAUCUGAGCUAGAGUUACCUU | | 1190 | 1210 | AAGGUAACUCUAGCUCAGAUAAU | | 1188 | 1210 |
| AD-2005129 | GCUUACCAUACUAUAUCUUUU | | 1211 | 1231 | AAAAGAUAUAGUAUGGUAAGCUA | | 1209 | 1231 |
| AD-2005146 | UUUGGAAUCAUGAAACCUUAU | | 1228 | 1248 | AUAAGGUUUCAUGAUUCCAAAGA | | 1226 | 1248 |
| AD-2005164 | UAAGACUUCAGAAUGAUUUUU | | 1246 | 1266 | AAAAAUCAUUCUGAAGUCUUAAG | | 1244 | 1266 |
| AD-2005179 | AUUUUGCAGGUUGUCUUCCAU | | 1261 | 1281 | AUGGAAGACAACCUGCAAAAUCA | | 1259 | 1281 |
| AD-2005193 | CUUCCAUUCCAGCCUAACAUU | | 1275 | 1295 | AAUGUUAGGCUGGAAUGGAAGAC | | 1273 | 1295 |
| AD-2005221 | GGCAAGGAAAAUAAAAGAUUU | | 1303 | 1323 | AAAUCUUUUAUUUUCCUUGCCUG | | 1301 | 1323 |
| AD-2005234 | AAGAUUUCCAGUGACAGAAAU | | 1317 | 1337 | AUUUCUGUCACUGGAAAUCUUUU | | 1315 | 1337 |
| AD-2005250 | UAUGAAUUCUCUCUCCAAAUU | | 1368 | 1388 | AAUUUGGAGAGAGAAUUCAUAUA | | 1366 | 1388 |
| AD-2005274 | GAACUUGUUGGCCCAUCUAUU | | 1419 | 1439 | AAUAGAUGGGCCAACAAGUUCAU | | 1417 | 1439 |
| AD-2005287 | CAUCUAUUACAUCUACAGCUU | | 1432 | 1452 | AAGCUGUAGAUGUAAUAGAUGGG | | 1430 | 1452 |
| AD-2005300 | UACAGCUGACCCUUGAACAUU | | 1445 | 1465 | AAUGUUCAAGGGUCAGCUGUAGA | | 1443 | 1465 |
| AD-2005325 | CAAAAUCUUAACUACCUAAUU | | 1498 | 1518 | AAUUAGGUAGUUAAGAUUUUGCG | | 1496 | 1518 |
| AD-2005350 | ACUAUUGACCAUAAACCUUAU | | 1523 | 1543 | AUAAGGUUUAUGGUCAAUAGUAG | | 1521 | 1543 |
| AD-2005365 | CCUUACUGAUAACAUAAACAU | | 1538 | 1558 | AUGUUUAUGUUAUCAGUAAGGUU | | 1536 | 1558 |
| AD-2005384 | ACACAUAUUUUGCGUGUUAUU | | 1566 | 1586 | AAUAACACGCAAAAUAUGUGUUA | | 1564 | 1586 |
| AD-2005396 | GUGUUAUAUGUAUUAUACACU | | 1579 | 1599 | AGUGUAUAAUACAUAUAACACGC | | 1577 | 1599 |
| AD-2005409 | CUAUAUUCCUACAAUAAAGUU | | 1598 | 1618 | AACUUUAUUGUAGGAAUAUAGUG | | 1596 | 1618 |
| AD-2005429 | AAGCUAGAGAAAAUGUUAUUU | | 1618 | 1638 | AAAUAACAUUUUCUCUAGCUUAC | | 1616 | 1638 |
| AD-2005447 | CUAUUCAUUAAAUGGAAGUGU | | 1670 | 1690 | ACACUUCCAUUUAAUGAAUAGUA | | 1668 | 1690 |
| AD-2005471 | AACAUAAAAGUCUUCAUUCUU | | 1694 | 1714 | AAGAAUGAAGACUUUUAUGUUGA | | 1692 | 1714 |
| AD-2005485 | CAUUCUCAUUGUCUUCACAUU | | 1708 | 1728 | AAUGUGAAGACAAUGAGAAUGAA | | 1706 | 1728 |
| AD-2005527 | GGUCUUGCAGUCUUGUCUUAU | | 1773 | 1793 | AUAAGACAAGACUGCAAGACCAA | | 1771 | 1793 |
| AD-2005530 | AAAGAAUAUUCAUGUAUAAGU | | 1812 | 1832 | ACUUAUACAUGAAUAUUCUUUCC | | 1810 | 1832 |
| AD-2005557 | UUGCAAUUCAAGCCCUUGUUU | | 1839 | 1859 | AAACAAGGGCUUGAAUUGCAAGG | | 1837 | 1859 |
| AD-2005575 | UUGUUCAAGGGUCAACUGUAU | | 1857 | 1877 | AUACAGUUGACCCUUGAACAACA | | 1855 | 1877 |
| AD-2005588 | AACUGUAAUAGGAUAUAGCUU | | 1870 | 1890 | AAGCUAUAUCCUAUUACAGUUGA | | 1868 | 1890 |
| AD-2005604 | CUAUUUUUCUUCCUCUAUCAU | | 1888 | 1908 | AUGAUAGAGGAAGAAAAAUAGCU | | 1886 | 1908 |
| AD-2005617 | UCUAUCAACCAAAUGGUAAGU | | 1901 | 1921 | ACUUACCAUUUGGUUGAUAGAGG | | 1899 | 1921 |
| AD-2005638 | AUCUAUUUUGCAGUCCACUCU | | 1922 | 1942 | AGAGUGGACUGCAAAAUAGAUGC | | 1920 | 1942 |
| AD-2005658 | UACUGAGCUAAAUUAUAGAUU | | 1942 | 1962 | AAUCUAUAAUUUAGCUCAGUAGA | | 1940 | 1962 |
| AD-2005678 | CCAGCUAUGCUAUUUAUAAUU | | 1962 | 1982 | AAUUAUAAAUAGCAUAGCUGGAU | | 1960 | 1982 |
| AD-2005687 | UUUUCAAUUUCUCCUCUGACU | | 2001 | 2021 | AGUCAGAGGAGAAAUUGAAAAUU | | 1999 | 2021 |
| AD-2005704 | GACCAUUUCAGAACAUCUUCU | | 2018 | 2038 | AGAAGAUGUUCUGAAAUGGUCAG | | 2016 | 2038 |
| AD-2005720 | CUUCCAAUAACUCAUAAAACU | | 2034 | 2054 | AGUUUUAUGAGUUAUUGGAAGAU | | 2032 | 2054 |
| AD-2005737 | CAACUGAAGUAAAAUUGAGUU | | 2053 | 2073 | AACUCAAUUUUACUUCAGUUGUU | | 2051 | 2073 |
| AD-2005760 | GGAAAAUAUAUUCACCAAACU | | 2076 | 2096 | AGUUUGGUGAAUAUAUUUUCCAG | | 2074 | 2096 |
| AD-2005826 | AAACUUUGGUAAUUUAAGUUU | | 2092 | 2112 | AAACUUAAAUUACCAAAGUUUGG | | 2090 | 2112 |
| AD-2005849 | AAAAUAGUUUACACCUAUACU | | 2135 | 2155 | AGUAUAGGUGUAAACUAUUUUAG | | 2133 | 2155 |
| AD-2005862 | CCUAUACUGCAUAAUCCAACU | | 2148 | 2168 | AGUUGGAUUAUGCAGUAUAGGUG | | 2146 | 2168 |
| AD-2005923 | AACAAUUUUAAUUUCAGUUGU | | 2165 | 2185 | ACAACUGAAAUUAAAAUUGUUGG | | 2163 | 2185 |
| AD-2005942 | AGACAUGUUACUAAUAUAACU | | 2186 | 2206 | AGUUAUAUUAGUAACAUGUCUUC | | 2184 | 2206 |
| AD-2005954 | AAAGAGUAGAGGAUGUGUAAU | | 2214 | 2234 | AUUACACAUCCUCUACUCUUUUA | | 2212 | 2234 |
| AD-2006018 | GUGUAAUUAACCAUAUCUUCU | | 2228 | 2248 | AGAAGAUAUGGUUAAUUACACAU | | 2226 | 2248 |
| AD-2006035 | UUCUAAAACAUGGUUACUAAU | | 2245 | 2265 | AUUAGUAACCAUGUUUUAGAAGA | | 2243 | 2265 |
| AD-2006046 | UUACUAAAAGAAUAUGUAACU | | 2258 | 2278 | AGUUACAUAUUCUUUUAGUAACC | | 2256 | 2278 |
| AD-2006056 | AUGUAACAUCAAUAUUGACCU | | 2271 | 2291 | AGGUCAAUAUUGAUGUUACAUAU | | 2269 | 2291 |
| AD-2006119 | AUUGACCUUGGUUUCUUACAU | | 2284 | 2304 | AUGUAAGAAACCAAGGUCAAUAU | | 2282 | 2304 |
| AD-2006132 | UCUUACACAAGUGUUGCUAAU | | 2297 | 2317 | AUUAGCAACACUUGUGUAAGAAA | | 2295 | 2317 |
| AD-2006150 | AACUCAAUAGUGAAGGAGACU | | 2315 | 2335 | AGUCUCCUUCACUAUUGAGUUAG | | 2313 | 2335 |
| AD-2006164 | GGAGACACUAUUAAAUUUUCU | | 2329 | 2349 | AGAAAAUUUAAUAGUGUCUCCUU | | 2327 | 2349 |
| AD-2006234 | GAACCCAUGAGAGAUACUAGU | | 2350 | 2370 | ACUAGUAUCUCUCAUGGGUUCAG | | 2348 | 2370 |
| AD-2006242 | AGUGGAAAGUGUUUGGUUCAU | | 2378 | 2398 | AUGAACCAAACACUUUCCACUCC | | 2376 | 2398 |
| AD-2006259 | UCAGGGAUAUCUGAAGAACAU | | 2395 | 2415 | AUGUUCUUCAGAUAUCCCUGAAC | | 2393 | 2415 |
| AD-2006334 | GCAGAGAUUUCUUAAGUGACU | | 2420 | 2440 | AGUCACUUAAGAAAUCUCUGCCC | | 2418 | 2440 |
| AD-2006347 | AAGUGACGCCUCAUCUACAAU | | 2433 | 2453 | AUUGUAGAUGAGGCGUCACUUAA | | 2431 | 2453 |
| AD-2006362 | UACAAGCUGGAAAUUCCUAAU | | 2448 | 2468 | AUUAGGAAUUUCCAGCUUGUAGA | | 2446 | 2468 |
| AD-2006437 | AGUAGAAAGCUUAUAAACAAU | | 2473 | 2493 | AUUGUUUAUAAGCUUUCUACUUG | | 2471 | 2493 |
| AD-2006451 | AAACAACAGGUGAUACACUCU | | 2487 | 2507 | AGAGUGUAUCACCUGUUGUUUAU | | 2485 | 2507 |
| AD-2006525 | CACUGGUUUUAGUAAAUUACU | | 2511 | 2531 | AGUAAUUUACUAAAACCAGUGAG | | 2509 | 2531 |
| AD-2006548 | CAGAAAGUAUCCCUAGUCUUU | | 2536 | 2556 | AAAGACUAGGGAUACUUUCUGUA | | 2534 | 2556 |
| AD-2006626 | GUGGAAAAUUUGAACUGAUUU | | 2564 | 2584 | AAAUCAGUUCAAAUUUUCCACUU | | 2562 | 2584 |
| AD-2006640 | CUGAUUAGUCAUAUUCCUUUU | | 2578 | 2598 | AAAAGGAAUAUGACUAAUCAGUU | | 2576 | 2598 |
| AD-2006658 | UUGAUUACACUGUUUGUUACU | | 2596 | 2616 | AGUAACAAACAGUGUAAUCAAAG | | 2594 | 2616 |
| AD-2006731 | UCUCAGUAAACAGAAAUAACU | | 2624 | 2644 | AGUUAUUUCUGUUUACUGAGAAA | | 2622 | 2644 |
| AD-2006743 | UCUUCAUUCUUUGAUAGAAAU | | 2656 | 2676 | AUUUCUAUCAAAGAAUGAAGAAC | | 2654 | 2676 |
| AD-2006751 | AAAUCUUAUUCUGUGAGGAUU | | 2679 | 2699 | AAUCCUCACAGAAUAAGAUUUUA | | 2677 | 2699 |
| AD-2006764 | UGAGGAUUACAGAAUACUAUU | | 2692 | 2712 | AAUAGUAUUCUGUAAUCCUCACA | | 2690 | 2712 |
| AD-2006839 | CUUCAUCAUAAAGUGUAAAGU | | 2754 | 2774 | ACUUUACACUUUAUGAUGAAGAA | | 2752 | 2774 |
| AD-2006862 | AUGCUCAAAUAUGUUCUACUU | | 2820 | 2840 | AAGUAGAACAUAUUUGAGCAUUU | | 2818 | 2840 |
| AD-2006926 | UCUACUAUAGAAUAAGUUCUU | | 2834 | 2854 | AAGAACUUAUUCUAUAGUAGAAC | | 2832 | 2854 |
| AD-2006935 | UUCUUAUCUUAAUUUACAGGU | | 2850 | 2870 | ACCUGUAAAUUAAGAUAAGAACU | | 2848 | 2870 |
| AD-2006965 | UUAAUGUUGCCUUUUAUAUUU | | 2894 | 2914 | AAAUAUAAAAGGCAACAUUAAGC | | 2892 | 2914 |
| AD-2007034 | AAAUCAGAAUCACUAUAUUAU | | 2947 | 2967 | AUAAUAUAGUGAUUCUGAUUUGC | | 2945 | 2967 |

TABLE 40
Modified Sense and Antisense Strand Sequences of PLN dsRNA Agents Comprising a GalNAc Conjugate Targeting Ligand

| Duplex Name | Sense Strand Sequence 5′ to 3′ | SEQ ID NO. | Antisense Strand Sequence 5′ to 3′ | SEQ ID NO. | mRNA target sequence | SEQ ID NO. |
|---|---|---|---|---|---|---|
| AD-2004072 | gsgsugacAfgAfGfUfcagaaaacuuL96 | | asAfsguuUfuCfUfgacuCfuGfucaccscsa | | UGGGUGACAGAGUCAGAAAACUC | |
| AD-2004080 | asasacacCfcGfUfAfagacuucauuL96 | | asAfsugaAfgUfCfuuacGfgGfuguuusasg | | CUAAACACCCGUAAGACUUCAUA | |
| AD-2004095 | ususcauaCfaAfCfAfcaauacucuuL96 | | asAfsgagUfaUfUfguguUfgUfaugaasgsu | | ACUUCAUACAACACAAUACUCUA | |
| AD-2004113 | csusauacUfgUfGfAfugaucacaguL96 | | asCfsuguGfaUfCfaucaCfaGfuauagsasg | | CUCUAUACUGUGAUGAUCACAGC | |
| AD-2004142 | csusaccuAfaAfAfGfaagacaguuuL96 | | asAfsacuGfuCfUfucuuUfuAfgguagscsc | | GGCUACCUAAAAGAAGACAGUUA | |
| AD-2004156 | ascsaguuAfuCfUfCfauauuuggcuL96 | | asGfsccaAfaUfAfugagAfuAfacuguscsu | | AGACAGUUAUCUCAUAUUUGGCU | |
| AD-2004176 | usgsccagCfuUfUfUfuaucuuucuuL96 | | asAfsgaaAfgAfUfaaaaAfgCfuggcasgsc | | GCUGCCAGCUUUUUAUCUUUCUC | |
| AD-2004189 | uscsuuucUfcUfCfGfaccacuuaauL96 | | asUfsuaaGfuGfGfucgaGfaGfaaagasusa | | UAUCUUUCUCUCGACCACUUAAA | |
| AD-2004202 | csascuuaAfaAfCfUfucagacuucuL96 | | asGfsaagUfcUfGfaaguUfuUfaagugsgsu | | ACCACUUAAAACUUCAGACUUCC | |
| AD-2004238 | asusggagAfaAfGfUfccaauaccuuL96 | | asAfsgguAfuUfGfgacuUfuCfuccausgsa | | UCAUGGAGAAAGUCCAAUACCUC | |
| AD-2004260 | csuscgcuCfaGfCfUfauaagaagauL96 | | asUfscuuCfuUfAfuagcUfgAfgcgagsusg | | CACUCGCUCAGCUAUAAGAAGAG | |
| AD-2004284 | csasaccaUfuGfAfAfaugccucaauL96 | | asUfsugaGfgCfAfuuucAfaUfgguugsasg | | CUCAACCAUUGAAAUGCCUCAAC | |
| AD-2004301 | csasacaaGfcAfCfGfucaaaagcuuL96 | | asAfsgcuUfuUfGfacguGfcUfuguugsasg | | CUCAACAAGCACGUCAAAAGCUA | |
| AD-2004319 | csusacagAfaUfCfUfauuuaucaauL96 | | asUfsugaUfaAfAfuagaUfuCfuguagscsu | | AGCUACAGAAUCUAUUUAUCAAU | |
| AD-2004329 | usasucaaUfuUfCfUfgucucaucuuL96 | | asAfsgauGfaGfAfcagaAfaUfugauasasa | | UUUAUCAAUUUCUGUCUCAUCUU | |
| AD-2004345 | asuscuuaAfuAfUfGfucucuugcuuL96 | | asAfsgcaAfgAfGfacauAfuUfaagausgsa | | UCAUCUUAAUAUGUCUCUUGCUG | |
| AD-2004360 | ususgcugAfuCfUfGfuaucaucguuL96 | | asAfscgaUfgAfUfacagAfuCfagcaasgsa | | UCUUGCUGAUCUGUAUCAUCGUG | |
| AD-2004373 | uscsaucgUfgAfUfGfcuucucugauL96 | | asUfscagAfgAfAfgcauCfaCfgaugasusa | | UAUCAUCGUGAUGCUUCUCUGAA | |
| AD-2004386 | uscsucugAfaGfUfUfcugcuacaauL96 | | asUfsuguAfgCfAfgaacUfuCfagagasasg | | CUUCUCUGAAGUUCUGCUACAAC | |
| AD-2004400 | csusacaaCfcUfCfUfagaucugcauL96 | | asUfsgcaGfaUfCfuagaGfgUfuguagscsa | | UGCUACAACCUCUAGAUCUGCAG | |
| AD-2004428 | csasucagCfuUfAfAfaaucugucauL96 | | asUfsgacAfgAfUfuuuaAfgCfugaugsusg | | CACAUCAGCUUAAAAUCUGUCAU | |
| AD-2004458 | ascsaggaAfaAfCfAfauauuguauuL96 | | asAfsuacAfaUfAfuuguUfuUfccuguscsu | | AGACAGGAAAACAAUAUUGUAUA | |
| AD-2004468 | asusuguaUfaAfCfAfgaccacuucuL96 | | asGfsaagUfgGfUfcuguUfaUfacaausasu | | AUAUUGUAUAACAGACCACUUCC | |
| AD-2004481 | cscsacuuCfcUfGfAfguagaagaguL96 | | asCfsucuUfcUfAfcucaGfgAfaguggsusc | | GACCACUUCCUGAGUAGAAGAGU | |
| AD-2004495 | gsasagagUfuUfCfUfuugugaaaauL96 | | asUfsuuuCfaCfAfaagaAfaCfucuucsusa | | UAGAAGAGUUUCUUUGUGAAAAG | |
| AD-2004518 | csasagauUfaAfGfAfcuaaaacuuuL96 | | asAfsaguUfuUfAfgucuUfaAfucuugsasc | | GUCAAGAUUAAGACUAAAACUUA | |
| AD-2004539 | gsusuaccAfuAfUfGfuauucaucuuL96 | | asAfsgauGfaAfUfacauAfuGfguaacsasa | | UUGUUACCAUAUGUAUUCAUCUG | |
| AD-2004555 | asuscuguUfgGfAfUfcuuguaaacuL96 | | asGfsuuuAfcAfAfgaucCfaAfcagausgsa | | UCAUCUGUUGGAUCUUGUAAACA | |
| AD-2004575 | asusgaaaAfgGfGfCfuuuauuuucuL96 | | asGfsaaaAfuAfAfagccCfuUfuucausgsu | | ACAUGAAAAGGGCUUUAUUUUCA | |
| AD-2004594 | gsusguauAfaAfAfUfgcaacuguuuL96 | | asAfsacaGfuUfGfcauuUfuAfuacacsusu | | AAGUGUAUAAAAUGCAACUGUUG | |
| AD-2004608 | ascsuguuGfaUfUfUfccucaacauuL96 | | asAfsuguUfgAfGfgaaaUfcAfacagususg | | CAACUGUUGAUUUCCUCAACAUG | |
| AD-2004632 | csascaaaUfuUfCfUfaucccaaauuL96 | | asAfsuuuGfgGfAfuagaAfaUfuugugsasg | | CUCACAAAUUUCUAUCCCAAAUC | |
| AD-2004646 | cscsaaauCfuUfUfUfcugaagauguL96 | | asCfsaucUfuCfAfgaaaAfgAfuuuggsgsa | | UCCCAAAUCUUUUCUGAAGAUGA | |
| AD-2004660 | asasgaugAfaGfAfGfuuuaguuuuuL96 | | asAfsaaaCfuAfAfacucUfuCfaucuuscsa | | UGAAGAUGAAGAGUUUAGUUUUA | |
| AD-2004673 | asgsuuuuAfaAfAfCfugcacugccuL96 | | asGfsgcaGfuGfCfaguuUfuAfaaacusasa | | UUAGUUUUAAAACUGCACUGCCA | |
| AD-2004689 | usgsccaaCfaAfGfUfucacuucauuL96 | | asAfsugaAfgUfGfaacuUfgUfuggcasgsu | | ACUGCCAACAAGUUCACUUCAUA | |
| AD-2004718 | csusuuugAfgGfUfGfaauauaauuuL96 | | asAfsauuAfuAfUfucacCfuCfaaaagsasg | | CUCUUUUGAGGUGAAUAUAAUUU | |
| AD-2004747 | asasguauUfuUfUfCfaggucuucauL96 | | asUfsgaaGfaCfCfugaaAfaAfuacuusasg | | CUAAGUAUUUUUCAGGUCUUCAC | |
| AD-2004763 | ususcaccAfaGfUfAfucaaaguaauL96 | | asUfsuacUfuUfGfauacUfuGfgugaasgsa | | UCUUCACCAAGUAUCAAAGUAAU | |
| AD-2004777 | asasguaaUfaAfCfAfcaaaugaaguL96 | | asCfsuucAfuUfUfguguUfaUfuacuususg | | CAAAGUAAUAACACAAAUGAAGU | |
| AD-2004790 | asasugaaGfuGfUfCfauuauucaauL96 | | asUfsugaAfuAfAfugacAfcUfucauususg | | CAAAUGAAGUGUCAUUAUUCAAA | |
| AD-2004806 | uscsaaaaUfaGfUfCfcacugacucuL96 | | asGfsaguCfaGfUfggacUfaUfuuugasasu | | AUUCAAAAUAGUCCACUGACUCC | |
| AD-2004825 | cscsucacAfuCfUfGfuuaucuuauuL96 | | asAfsuaaGfaUfAfacagAfuGfugaggsasg | | CUCCUCACAUCUGUUAUCUUAUU | |
| AD-2004837 | asascuauUfuGfUfAfguaacuaucuL96 | | asGfsauaGfuUfAfcuacAfaAfuaguuscsu | | AGAACUAUUUGUAGUAACUAUCA | |
| AD-2004853 | usasucagAfaUfCfUfacauucuaauL96 | | asUfsuagAfaUfGfuagaUfuCfugauasgsu | | ACUAUCAGAAUCUACAUUCUAAA | |
| AD-2004872 | ususguauUfuUfUfUfcuaugccacuL96 | | asGfsuggCfaUfAfgaaaAfaAfuacaasusu | | AAUUGUAUUUUUUCUAUGCCACA | |
| AD-2004885 | asusgccaCfaUfUfAfacaucuuuuuL96 | | asAfsaaaGfaUfGfuuaaUfgUfggcausasg | | CUAUGCCACAUUAACAUCUUUUA | |
| AD-2004896 | uscsuuuuAfaAfGfUfugaugagaauL96 | | asUfsucuCfaUfCfaacuUfuAfaaagasusg | | CAUCUUUUAAAGUUGAUGAGAAU | |
| AD-2004909 | asusgagaAfuCfAfAfguauggaaauL96 | | asUfsuucCfaUfAfcuugAfuUfcucauscsa | | UGAUGAGAAUCAAGUAUGGAAAA | |
| AD-2004922 | asusggaaAfaGfUfAfaggccauacuL96 | | asGfsuauGfgCfCfuuacUfuUfuccausasc | | GUAUGGAAAAGUAAGGCCAUACU | |
| AD-2004935 | gscscauaCfuCfUfUfacauaauaauL96 | | asUfsuauUfaUfGfuaagAfgUfauggcscsu | | AGGCCAUACUCUUACAUAAUAAA | |
| AD-2004950 | gsasaucaCfaGfAfAfuucuaguacuL96 | | asGfsuacUfaGfAfauucUfgUfgauucsusu | | AAGAAUCACAGAAUUCUAGUACA | |
| AD-2004970 | asusguagGfuAfAfAfucauaaaucuL96 | | asGfsauuUfaUfGfauuuAfcCfuacausgsu | | ACAUGUAGGUAAAUCAUAAAUCU | |
| AD-2004989 | csusguucUfaAfGfAfcauaugaucuL96 | | asGfsaucAfuAfUfgucuUfaGfaacagsasu | | AUCUGUUCUAAGACAUAUGAUCA | |
| AD-2005002 | usasugauCfaAfCfAfgaugagaacuL96 | | asGfsuucUfcAfUfcuguUfgAfucauasusg | | CAUAUGAUCAACAGAUGAGAACU | |
| AD-2005020 | ascsugguGfgUfUfAfauaugugacuL96 | | asGfsucaCfaUfAfuuaaCfcAfccagususc | | GAACUGGUGGUUAAUAUGUGACA | |
| AD-2005033 | asusgugaCfaGfUfGfagauuagucuL96 | | asGfsacuAfaUfCfucacUfgUfcacausasu | | AUAUGUGACAGUGAGAUUAGUCA | |
| AD-2005051 | csasuaucAfcUfAfAfuauacuaacuL96 | | asGfsuuaGfuAfUfauuaGfuGfauaugsasc | | GUCAUAUCACUAAUAUACUAACA | |
| AD-2005067 | usasacaaCfaGfAfAfucuaaucuuuL96 | | asAfsagaUfuAfGfauucUfgUfuguuasgsu | | ACUAACAACAGAAUCUAAUCUUC | |
| AD-2005082 | uscsuucaUfuUfAfAfggcacuguauL96 | | asUfsacaGfuGfCfcuuaAfaUfgaagasusu | | AAUCUUCAUUUAAGGCACUGUAG | |
| AD-2005095 | csascuguAfgUfGfAfauuaucugauL96 | | asUfscagAfuAfAfuucaCfuAfcagugscsc | | GGCACUGUAGUGAAUUAUCUGAG | |
| AD-2005108 | usasucugAfgCfUfAfgaguuaccuuL96 | | asAfsgguAfaCfUfcuagCfuCfagauasasu | | AUUAUCUGAGCUAGAGUUACCUA | |
| AD-2005129 | gscsuuacCfaUfAfCfuauaucuuuuL96 | | asAfsaagAfuAfUfaguaUfgGfuaagcsusa | | UAGCUUACCAUACUAUAUCUUUG | |
| AD-2005146 | ususuggaAfuCfAfUfgaaaccuuauL96 | | asUfsaagGfuUfUfcaugAfuUfccaaasgsa | | UCUUUGGAAUCAUGAAACCUUAA | |
| AD-2005164 | usasagacUfuCfAfGfaaugauuuuuL96 | | asAfsaaaUfcAfUfucugAfaGfucuuasasg | | CUUAAGACUUCAGAAUGAUUUUG | |
| AD-2005179 | asusuuugCfaGfGfUfugucuuccauL96 | | asUfsggaAfgAfCfaaccUfgCfaaaauscsa | | UGAUUUUGCAGGUUGUCUUCCAU | |
| AD-2005193 | csusuccaUfuCfCfAfgccuaacauuL96 | | asAfsuguUfaGfGfcuggAfaUfggaagsasc | | GUCUUCCAUUCCAGCCUAACAUC | |
| AD-2005221 | gsgscaagGfaAfAfAfuaaaagauuuL96 | | asAfsaucUfuUfUfauuuUfcCfuugccsusg | | CAGGCAAGGAAAAUAAAAGAUUU | |
| AD-2005234 | asasgauuUfcCfAfGfugacagaaauL96 | | asUfsuucUfgUfCfacugGfaAfaucuususu | | AAAAGAUUUCCAGUGACAGAAAA | |
| AD-2005250 | usasugaaUfuCfUfCfucuccaaauuL96 | | asAfsuuuGfgAfGfagagAfaUfucauasusa | | UAUAUGAAUUCUCUCUCCAAAUA | |
| AD-2005274 | gsasacuuGfuUfGfGfcccaucuauuL96 | | asAfsuagAfuGfGfgccaAfcAfaguucsasu | | AUGAACUUGUUGGCCCAUCUAUU | |
| AD-2005287 | csasucuaUfuAfCfAfucuacagcuuL96 | | asAfsgcuGfuAfGfauguAfaUfagaugsgsg | | CCCAUCUAUUACAUCUACAGCUG | |
| AD-2005300 | usascagcUfgAfCfCfcuugaacauuL96 | | asAfsuguUfcAfAfggguCfaGfcuguasgsa | | UCUACAGCUGACCCUUGAACAUG | |
| AD-2005325 | csasaaauCfuUfAfAfcuaccuaauuL96 | | asAfsuuaGfgUfAfguuaAfgAfuuuugscsg | | CGCAAAAUCUUAACUACCUAAUA | |
| AD-2005350 | ascsuauuGfaCfCfAfuaaaccuuauL96 | | asUfsaagGfuUfUfauggUfcAfauagusasg | | CUACUAUUGACCAUAAACCUUAC | |
| AD-2005365 | cscsuuacUfgAfUfAfacauaaacauL96 | | asUfsguuUfaUfGfuuauCfaGfuaaggsusu | | AACCUUACUGAUAACAUAAACAG | |
| AD-2005384 | ascsacauAfuUfUfUfgcguguuauuL96 | | asAfsuaaCfaCfGfcaaaAfuAfugugususa | | UAACACAUAUUUUGCGUGUUAUA | |
| AD-2005396 | gsusguuaUfaUfGfUfauuauacacuL96 | | asGfsuguAfuAfAfuacaUfaUfaacacsgsc | | GCGUGUUAUAUGUAUUAUACACU | |
| AD-2005409 | csusauauUfcCfUfAfcaauaaaguuL96 | | asAfscuuUfaUfUfguagGfaAfuauagsusg | | CACUAUAUUCCUACAAUAAAGUA | |
| AD-2005429 | asasgcuaGfaGfAfAfaauguuauuuL96 | | asAfsauaAfcAfUfuuucUfcUfagcuusasc | | GUAAGCUAGAGAAAAUGUUAUUU | |
| AD-2005447 | csusauucAfuUfAfAfauggaaguguL96 | | asCfsacuUfcCfAfuuuaAfuGfaauagsusa | | UACUAUUCAUUAAAUGGAAGUGG | |
| AD-2005471 | asascauaAfaAfGfUfcuucauucuuL96 | | asAfsgaaUfgAfAfgacuUfuUfauguusgsa | | UCAACAUAAAAGUCUUCAUUCUC | |
| AD-2005485 | csasuucuCfaUfUfGfucuucacauuL96 | | asAfsuguGfaAfGfacaaUfgAfgaaugsasa | | UUCAUUCUCAUUGUCUUCACAUU | |
| AD-2005527 | gsgsucuuGfcAfGfUfcuugucuuauL96 | | asUfsaagAfcAfAfgacuGfcAfagaccsasa | | UUGGUCUUGCAGUCUUGUCUUAG | |
| AD-2005530 | asasagaaUfaUfUfCfauguauaaguL96 | | asCfsuuaUfaCfAfugaaUfaUfucuuuscsc | | GGAAAGAAUAUUCAUGUAUAAGU | |
| AD-2005557 | ususgcaaUfuCfAfAfgcccuuguuuL96 | | asAfsacaAfgGfGfcuugAfaUfugcaasgsg | | CCUUGCAAUUCAAGCCCUUGUUG | |
| AD-2005575 | ususguucAfaGfGfGfucaacuguauL96 | | asUfsacaGfuUfGfacccUfuGfaacaascsa | | UGUUGUUCAAGGGUCAACUGUAA | |
| AD-2005588 | asascuguAfaUfAfGfgauauagcuuL96 | | asAfsgcuAfuAfUfccuaUfuAfcaguusgsa | | UCAACUGUAAUAGGAUAUAGCUA | |
| AD-2005604 | csusauuuUfuCfUfUfccucuaucauL96 | | asUfsgauAfgAfGfgaagAfaAfaauagscsu | | AGCUAUUUUUCUUCCUCUAUCAA | |
| AD-2005617 | uscsuaucAfaCfCfAfaaugguaaguL96 | | asCfsuuaCfcAfUfuuggUfuGfauagasgsg | | CCUCUAUCAACCAAAUGGUAAGC | |
| AD-2005638 | asuscuauUfuUfGfCfaguccacucuL96 | | asGfsaguGfgAfCfugcaAfaAfuagausgsc | | GCAUCUAUUUUGCAGUCCACUCU | |
| AD-2005658 | usascugaGfcUfAfAfauuauagauuL96 | | asAfsucuAfuAfAfuuuaGfcUfcaguasgsa | | UCUACUGAGCUAAAUUAUAGAUC | |
| AD-2005678 | cscsagcuAfuGfCfUfauuuauaauuL96 | | asAfsuuaUfaAfAfuagcAfuAfgcuggsasu | | AUCCAGCUAUGCUAUUUAUAAUU | |
| AD-2005687 | ususuucaAfuUfUfCfuccucugacuL96 | | asGfsucaGfaGfGfagaaAfuUfgaaaasusu | | AAUUUUCAAUUUCUCCUCUGACC | |
| AD-2005704 | gsasccauUfuCfAfGfaacaucuucuL96 | | asGfsaagAfuGfUfucugAfaAfuggucsasg | | CUGACCAUUUCAGAACAUCUUCC | |
| AD-2005720 | csusuccaAfuAfAfCfucauaaaacuL96 | | asGfsuuuUfaUfGfaguuAfuUfggaagsasu | | AUCUUCCAAUAACUCAUAAAACA | |
| AD-2005737 | csasacugAfaGfUfAfaaauugaguuL96 | | asAfscucAfaUfUfuuacUfuCfaguugsusu | | AACAACUGAAGUAAAAUUGAGUG | |
| AD-2005760 | gsgsaaaaUfaUfAfUfucaccaaacuL96 | | asGfsuuuGfgUfGfaauaUfaUfuuuccsasg | | CUGGAAAAUAUAUUCACCAAACU | |
| AD-2005826 | asasacuuUfgGfUfAfauuuaaguuuL96 | | asAfsacuUfaAfAfuuacCfaAfaguuusgsg | | CCAAACUUUGGUAAUUUAAGUUG | |
| AD-2005849 | asasaauaGfuUfUfAfcaccuauacuL96 | | asGfsuauAfgGfUfguaaAfcUfauuuusasg | | CUAAAAUAGUUUACACCUAUACU | |
| AD-2005862 | cscsuauaCfuGfCfAfuaauccaacuL96 | | asGfsuugGfaUfUfaugcAfgUfauaggsusg | | CACCUAUACUGCAUAAUCCAACA | |
| AD-2005923 | asascaauUfuUfAfAfuuucaguuguL96 | | asCfsaacUfgAfAfauuaAfaAfuuguusgsg | | CCAACAAUUUUAAUUUCAGUUGA | |
| AD-2005942 | asgsacauGfuUfAfCfuaauauaacuL96 | | asGfsuuaUfaUfUfaguaAfcAfugucususc | | GAAGACAUGUUACUAAUAUAACU | |
| AD-2005954 | asasagagUfaGfAfGfgauguguaauL96 | | asUfsuacAfcAfUfccucUfaCfucuuususa | | UAAAAGAGUAGAGGAUGUGUAAU | |
| AD-2006018 | gsusguaaUfuAfAfCfcauaucuucuL96 | | asGfsaagAfuAfUfgguuAfaUfuacacsasu | | AUGUGUAAUUAACCAUAUCUUCU | |
| AD-2006035 | ususcuaaAfaCfAfUfgguuacuaauL96 | | asUfsuagUfaAfCfcaugUfuUfuagaasgsa | | UCUUCUAAAACAUGGUUACUAAA | |
| AD-2006046 | ususacuaAfaAfGfAfauauguaacuL96 | | asGfsuuaCfaUfAfuucuUfuUfaguaascsc | | GGUUACUAAAAGAAUAUGUAACA | |
| AD-2006056 | asusguaaCfaUfCfAfauauugaccuL96 | | asGfsgucAfaUfAfuugaUfgUfuacausasu | | AUAUGUAACAUCAAUAUUGACCU | |
| AD-2006119 | asusugacCfuUfGfGfuuucuuacauL96 | | asUfsguaAfgAfAfaccaAfgGfucaausasu | | AUAUUGACCUUGGUUUCUUACAC | |
| AD-2006132 | uscsuuacAfcAfAfGfuguugcuaauL96 | | asUfsuagCfaAfCfacuuGfuGfuaagasasa | | UUUCUUACACAAGUGUUGCUAAC | |
| AD-2006150 | asascucaAfuAfGfUfgaaggagacuL96 | | asGfsucuCfcUfUfcacuAfuUfgaguusasg | | CUAACUCAAUAGUGAAGGAGACA | |
| AD-2006164 | gsgsagacAfcUfAfUfuaaauuuucuL96 | | asGfsaaaAfuUfUfaauaGfuGfucuccsusu | | AAGGAGACACUAUUAAAUUUUCU | |
| AD-2006234 | gsasacccAfuGfAfGfagauacuaguL96 | | asCfsuagUfaUfCfucucAfuGfgguucsasg | | CUGAACCCAUGAGAGAUACUAGA | |
| AD-2006242 | asgsuggaAfaGfUfGfuuugguucauL96 | | asUfsgaaCfcAfAfacacUfuUfccacuscsc | | GGAGUGGAAAGUGUUUGGUUCAG | |
| AD-2006259 | uscsagggAfuAfUfCfugaagaacauL96 | | asUfsguuCfuUfCfagauAfuCfccugasasc | | GUUCAGGGAUAUCUGAAGAACAG | |
| AD-2006334 | gscsagagAfuUfUfCfuuaagugacuL96 | | asGfsucaCfuUfAfagaaAfuCfucugcscsc | | GGGCAGAGAUUUCUUAAGUGACG | |
| AD-2006347 | asasgugaCfgCfCfUfcaucuacaauL96 | | asUfsuguAfgAfUfgaggCfgUfcacuusasa | | UUAAGUGACGCCUCAUCUACAAG | |
| AD-2006362 | usascaagCfuGfGfAfaauuccuaauL96 | | asUfsuagGfaAfUfuuccAfgCfuuguasgsa | | UCUACAAGCUGGAAAUUCCUAAA | |
| AD-2006437 | asgsuagaAfaGfCfUfuauaaacaauL96 | | asUfsuguUfuAfUfaagcUfuUfcuacususg | | CAAGUAGAAAGCUUAUAAACAAC | |
| AD-2006451 | asasacaaCfaGfGfUfgauacacucuL96 | | asGfsaguGfuAfUfcaccUfgUfuguuusasu | | AUAAACAACAGGUGAUACACUCA | |
| AD-2006525 | csascuggUfuUfUfAfguaaauuacuL96 | | asGfsuaaUfuUfAfcuaaAfaCfcagugsasg | | CUCACUGGUUUUAGUAAAUUACC | |
| AD-2006548 | csasgaaaGfuAfUfCfccuagucuuuL96 | | asAfsagaCfuAfGfggauAfcUfuucugsusa | | UACAGAAAGUAUCCCUAGUCUUA | |
| AD-2006626 | gsusggaaAfaUfUfUfgaacugauuuL96 | | asAfsaucAfgUfUfcaaaUfuUfuccacsusu | | AAGUGGAAAAUUUGAACUGAUUA | |
| AD-2006640 | csusgauuAfgUfCfAfuauuccuuuuL96 | | asAfsaagGfaAfUfaugaCfuAfaucagsusu | | AACUGAUUAGUCAUAUUCCUUUG | |
| AD-2006658 | ususgauuAfcAfCfUfguuuguuacuL96 | | asGfsuaaCfaAfAfcaguGfuAfaucaasasg | | CUUUGAUUACACUGUUUGUUACA | |
| AD-2006731 | uscsucagUfaAfAfCfagaaauaacuL96 | | asGfsuuaUfuUfCfuguuUfaCfugagasasa | | UUUCUCAGUAAACAGAAAUAACU | |
| AD-2006743 | uscsuucaUfuCfUfUfugauagaaauL96 | | asUfsuucUfaUfCfaaagAfaUfgaagasasc | | GUUCUUCAUUCUUUGAUAGAAAU | |
| AD-2006751 | asasaucuUfaUfUfCfugugaggauuL96 | | asAfsuccUfcAfCfagaaUfaAfgauuususa | | UAAAAUCUUAUUCUGUGAGGAUU | |
| AD-2006764 | usgsaggaUfuAfCfAfgaauacuauuL96 | | asAfsuagUfaUfUfcuguAfaUfccucascsa | | UGUGAGGAUUACAGAAUACUAUA | |
| AD-2006839 | csusucauCfaUfAfAfaguguaaaguL96 | | asCfsuuuAfcAfCfuuuaUfgAfugaagsasa | | UUCUUCAUCAUAAAGUGUAAAGA | |
| AD-2006862 | asusgcucAfaAfUfAfuguucuacuuL96 | | asAfsguaGfaAfCfauauUfuGfagcaususu | | AAAUGCUCAAAUAUGUUCUACUA | |
| AD-2006926 | uscsuacuAfuAfGfAfauaaguucuuL96 | | asAfsgaaCfuUfAfuucuAfuAfguagasasc | | GUUCUACUAUAGAAUAAGUUCUU | |
| AD-2006935 | ususcuuaUfcUfUfAfauuuacagguL96 | | asCfscugUfaAfAfuuaaGfaUfaagaascsu | | AGUUCUUAUCUUAAUUUACAGGG | |
| AD-2006965 | ususaaugUfuGfCfCfuuuuauauuuL96 | | asAfsauaUfaAfAfaggcAfaCfauuaasgsc | | GCUUAAUGUUGCCUUUUAUAUUU | |
| AD-2007024 | asasaucaGfaAfUfCfacuauauuauL96 | | asUfsaauAfuAfGfugauUfcUfgauuusgsc | | GCAAAUCAGAAUCACUAUAUUAA | |

TABLE 41
Unmodified Sense and Antisense Strand Sequences of CAMK2D dsRNA Agents Comprising an Unsaturated
C22 Hydrocarbon Chain Conjugated to Position 6 on the Sense Strand, Counting from the 5′-end of
the Sense Strand

| | | SEQ | Range in | | | SEQ | Range in | |
|---|---|---|---|---|---|---|---|---|
| Duplex | Sense Strand Sequence | ID | NM_001321571.2 | | Antisense Strand Sequence | ID | NM_001321571.2 | |
| Name | 5′ to 3′ | NO. | Start | End | 5′ to 3′ | NO. | Start | End |
| AD-2011305 | UAGCACUUUUGAUCAUCUUCU | | 3221 | 3241 | AGAAGAUGAUCAAAAGUGCUAGU | | 3219 | 3241 |
| AD-2011306 | CCUCAUCAAUAAAAUGCUUAU | | 1411 | 1431 | AUAAGCAUUUUAUUGAUGAGGUC | | 1409 | 1431 |
| AD-2011307 | UCCAUCAUUGUUAUUUUAACU | | 3763 | 3783 | AGUUAAAAUAACAAUGAUGGAGA | | 3761 | 3783 |
| AD-2011308 | UCCACACUAUUAUUCUAAACU | | 2001 | 2021 | AGUUUAGAAUAAUAGUGUGGAUU | | 1999 | 2021 |
| AD-2011309 | CUCCUAAAAGCUUCUCUAAAU | | 4614 | 4634 | AUUUAGAGAAGCUUUUAGGAGUC | | 4612 | 4634 |
| AD-2011310 | GGUCUCAUUUAGUACAUAACU | | 4491 | 4511 | AGUUAUGUACUAAAUGAGACCAG | | 4489 | 4511 |
| AD-2011311 | CAGACUUAAGAACUAUUGUUU | | 2620 | 2640 | AAACAAUAGUUCUUAAGUCUGUU | | 2618 | 2640 |
| AD-2011312 | CAUCAAGUUUCUCUGUUAAUU | | 2588 | 2608 | AAUUAACAGAGAAACUUGAUGAA | | 2586 | 2608 |
| AD-2011313 | AUUCUCUAUAUUCUACUUGUU | | 1277 | 1297 | AACAAGUAGAAUAUAGAGAAUGA | | 1275 | 1297 |
| AD-2011314 | CUGCUUGAAGAAAUUUAAUGU | | 1537 | 1557 | ACAUUAAAUUUCUUCAAGCAGUC | | 1535 | 1557 |
| AD-2011315 | CACUGACAUUAAUAUUCCUAU | | 5434 | 5454 | AUAGGAAUAUUAAUGUCAGUGAU | | 5432 | 5454 |
| AD-2011316 | AACCACAUUGUUUUGAAAAUU | | 5033 | 5053 | AAUUUUCAAAACAAUGUGGUUGA | | 5031 | 5053 |
| AD-2011317 | UCAUCACUAGCUAGUUUUCUU | | 3492 | 3512 | AAGAAAACUAGCUAGUGAUGAUG | | 3490 | 3512 |
| AD-2011318 | UUACUUUUUCCUAAGAUUCAU | | 4912 | 4932 | AUGAAUCUUAGGAAAAAGUAAGA | | 4910 | 4932 |
| AD-2011319 | UUACCUAGAAUAAAUAGUCUU | | 4866 | 4886 | AAGACUAUUUAUUCUAGGUAAGA | | 4864 | 4886 |
| AD-2011320 | GGUCUUCUAAAUUUCAACAGU | | 2296 | 2316 | ACUGUUGAAAUUUAGAAGACCCA | | 2294 | 2316 |
| AD-2011321 | CCUAUACAUUGUUUACACUUU | | 2466 | 2486 | AAAGUGUAAACAAUGUAUAGGAA | | 2464 | 2486 |
| AD-2011322 | UCUCUUGAAUCAGAGUAUCAU | | 3594 | 3614 | AUGAUACUCUGAUUCAAGAGAGA | | 3592 | 3614 |
| AD-2011323 | GCUGAGAACAAUAUAGUUAAU | | 4585 | 4605 | AUUAACUAUAUUGUUCUCAGCAA | | 4583 | 4605 |
| AD-2011324 | CGUCCAUCUUUAUUUCUUCAU | | 4407 | 4427 | AUGAAGAAAUAAAGAUGGACGCA | | 4405 | 4427 |
| AD-2011325 | AGCUUCUUUUGAUUUGCUAAU | | 4792 | 4812 | AUUAGCAAAUCAAAAGAAGCUGA | | 4790 | 4812 |
| AD-2011326 | AUCUCUUUUCUUUAUCCUGUU | | 3028 | 3048 | AACAGGAUAAAGAAAAGAGAUCA | | 3026 | 3048 |
| AD-2011327 | CACAAAUGAAUUACACAUUUU | | 4261 | 4281 | AAAAUGUGUAAUUCAUUUGUGGU | | 4259 | 4281 |
| AD-2011328 | UUUGUCCAAAAGCAAUAAACU | | 1978 | 1998 | AGUUUAUUGCUUUUGGACAAAGC | | 1976 | 1998 |
| AD-2011329 | UCUGAGUUUAAUCACUUUAGU | | 2945 | 2965 | ACUAAAGUGAUUAAACUCAGAAA | | 2943 | 2965 |
| AD-2011330 | CCAAGUACAACUCUUCAUCAU | | 2573 | 2593 | AUGAUGAAGAGUUGUACUUGGAA | | 2571 | 2593 |
| AD-2011331 | UUCUACUUUGAAAAUGCUUUU | | 1961 | 1981 | AAAAGCAUUUUCAAAGUAGAAUC | | 1959 | 1981 |
| AD-2011332 | UAUCAUAUAUUCCUUCCUAUU | | 2451 | 2471 | AAUAGGAAGGAAUAUAUGAUAAG | | 2449 | 2471 |
| AD-2011333 | CCUCUCAAAACCUACAUAAUU | | 4990 | 5010 | AAUUAUGUAGGUUUUGAGAGGGA | | 4988 | 5010 |
| AD-2011334 | AGUUAAUUGUUCUCUGUGAGU | | 4535 | 4555 | ACUCACAGAGAACAAUUAACUUG | | 4533 | 4555 |
| AD-2011335 | UUCUAUCAUUUUGAAACACUU | | 4287 | 4307 | AAGUGUUUCAAAAUGAUAGAAGA | | 4285 | 4307 |
| AD-2011336 | CAGCUUGAACUUGAGCAUACU | | 4762 | 4782 | AGUAUGCUCAAGUUCAAGCUGGG | | 4760 | 4782 |
| AD-2011337 | UCACCCAAAUUUUGAAUUUUU | | 5678 | 5698 | AAAAAUUCAAAAUUUGGGUGAAG | | 5676 | 5698 |
| AD-2011338 | GCAGUAUAACUAUUCUGAUCU | | 5415 | 5435 | AGAUCAGAAUAGUUAUACUGCUA | | 5413 | 5435 |
| AD-2011339 | GGUUUUCUUUGUGCUUCUCAU | | 3672 | 3692 | AUGAGAAGCACAAAGAAAACCUA | | 3670 | 3692 |
| AD-2011340 | AUGAGAAUAAACAUACCAACU | | 5324 | 5344 | AGUUGGUAUGUUUAUUCUCAUUU | | 5322 | 5344 |
| AD-2011341 | GAGUGAUUUCAUUGAAUAAAU | | 5746 | 5766 | AUUUAUUCAAUGAAAUCACUCGA | | 5744 | 5766 |
| AD-2011342 | GUUUCCAUAUUUGUAAAAUGU | | 5307 | 5327 | ACAUUUUACAAAUAUGGAAACUG | | 5305 | 5327 |
| AD-2011343 | CAUGCUGUUUUUGGUCAAACU | | 2897 | 2917 | AGUUUGACCAAAAACAGCAUGGC | | 2895 | 2917 |
| AD-2011344 | CUCUACUGCAGUAUAAUGUCU | | 5072 | 5092 | AGACAUUAUACUGCAGUAGAGGA | | 5070 | 5092 |
| AD-2011345 | UUGGUGUUUGAUUUAGUUACU | | 932 | 952 | AGUAACUAAAUCAAACACCAAGU | | 930 | 952 |
| AD-2011346 | UCUUUCUCCAGAAGUUUUACU | | 1210 | 1230 | AGUAAAACUUCUGGAGAAAGAUA | | 1208 | 1230 |
| AD-2011347 | AGAGUUCAAAUACAACAAUUU | | 1767 | 1787 | AAAUUGUUGUAUUUGAACUCUCA | | 1765 | 1787 |
| AD-2011348 | UCUGUGUUGAUUACUAAUCAU | | 3885 | 3905 | AUGAUUAGUAAUCAACACAGAGA | | 3883 | 3905 |
| AD-2011349 | UGCUUUUUUAGCUUCUCUCUU | | 3579 | 3599 | AAGAGAGAAGCUAAAAAAGCACA | | 3577 | 3599 |
| AD-2011350 | CUGUGACUGCAACGUCUUACU | | 3371 | 3391 | AGUAAGACGUUGCAGUCACAGGA | | 3369 | 3391 |
| AD-2011351 | CACUUCUGCAUUCUCUGUUCU | | 2319 | 2339 | AGAACAGAGAAUGCAGAAGUGGC | | 2317 | 2339 |
| AD-2011352 | CUCAUUUUUCCUUUGUUGAUU | | 3688 | 3708 | AAUCAACAAAGGAAAAAUGAGAA | | 3686 | 3708 |
| AD-2011353 | CCUCAGAAGCCUAUUUUUAAU | | 3799 | 3819 | AUUAAAAAUAGGCUUCUGAGGAC | | 3797 | 3819 |
| AD-2011354 | AUAGUAAUUCACAGUCCUCAU | | 3784 | 3804 | AUGAGGACUGUGAAUUACUAUCG | | 3782 | 3804 |
| AD-2011355 | UUUCUCAAAUCUGUGAUCUCU | | 3013 | 3033 | AGAGAUCACAGAUUUGAGAAAGA | | 3011 | 3033 |
| AD-2011356 | GCUGCCAAAAUUAUCAACACU | | 791 | 811 | AGUGUUGAUAAUUUUGGCAGCAU | | 789 | 811 |
| AD-2011357 | GACUGAUUGAUAUAUUUAAGU | | 4355 | 4375 | ACUUAAAUAUAUCAAUCAGUCCU | | 4353 | 4375 |
| AD-2011358 | UACACUUUUAACUUAGCAUGU | | 4164 | 4184 | ACAUGCUAAGUUAAAAGUGUAAA | | 4162 | 4184 |
| AD-2011359 | UCUGAGCAAGUUACCUCUUCU | | 5274 | 5294 | AGAAGAGGUAACUUGCUCAGAGC | | 5272 | 5294 |
| AD-2011360 | GCCCUCUUUAUGUAGGUUUAU | | 5508 | 5528 | AUAAACCUACAUAAAGAGGGCAG | | 5506 | 5528 |
| AD-2011361 | CAAGGAAUAUUAAUCUUCACU | | 5662 | 5682 | AGUGAAGAUUAAUAUUCCUUGAA | | 5660 | 5682 |
| AD-2011362 | AUGUUGUUUAUGUUUCUUACU | | 4850 | 4870 | AGUAAGAAACAUAAACAACAUGA | | 4848 | 4870 |
| AD-2011363 | AUACUCGGACUCAAAUGUCUU | | 5545 | 5565 | AAGACAUUUGAGUCCGAGUAUAU | | 5543 | 5565 |
| AD-2011364 | UGAAGCUUUUCUGAUAAUUAU | | 3944 | 3964 | AUAAUUAUCAGAAAAGCUUCAAC | | 3942 | 3964 |
| AD-2011365 | GAACUCUUUGCUGUUAAUCUU | | 2678 | 2698 | AAGAUUAACAGCAAAGAGUUCUA | | 2676 | 2698 |
| AD-2011366 | UUGAAAGUUUUGCUGAUUAAU | | 2796 | 2816 | AUUAAUCAGCAAAACUUUCAAUG | | 2794 | 2816 |
| AD-2011367 | AUGCUAGAAGAAAACUAAAGU | | 1554 | 1574 | ACUUUAGUUUUCUUCUAGCAUUA | | 1552 | 1574 |
| AD-2011368 | CCUCUUCAUGCAUGUUUCUGU | | 2378 | 2398 | ACAGAAACAUGCAUGAAGAGGAG | | 2376 | 2398 |
| AD-2011369 | UACUGCUUUUGAACCUGAAGU | | 1903 | 1923 | ACUUCAGGUUCAAAAGCAGUAAG | | 1901 | 1923 |
| AD-2011370 | CAACGUUCUACUGUUGCUUCU | | 1490 | 1510 | AGAAGCAACAGUAGAACGUUGAC | | 1488 | 1510 |
| AD-2011371 | CAGAUAGUCCUUGUUUUAAUU | | 5225 | 5245 | AAUUAAAACAAGGACUAUCUGGG | | 5223 | 5245 |
| AD-2011372 | ACACUGUAUAUAUUUCUUGCU | | 4322 | 4342 | AGCAAGAAAUAUAUACAGUGUCC | | 4320 | 4342 |
| AD-2011373 | AACUUAAUAAAGAUAUUGUGU | | 5341 | 5361 | ACACAAUAUCUUUAUUAAGUUGG | | 5339 | 5361 |
| AD-2011374 | UUUCUAUUUGUGUCUCCUCUU | | 5056 | 5076 | AAGAGGAGACACAAAUAGAAAUA | | 5054 | 5076 |
| AD-2011375 | GCUUACAAAUGUUUGCCAUUU | | 3524 | 3544 | AAAUGGCAAACAUUUGUAAGCCU | | 3522 | 3544 |
| AD-2011376 | CUGUGAUUUUUGUUCUCUUCU | | 3715 | 3735 | AGAAGAGAACAAAAAUCACAGGA | | 3713 | 3735 |
| AD-2011377 | UGAUCGAAGCUAUCAACAAUU | | 1842 | 1862 | AAUUGUUGAUAGCUUCGAUCAGU | | 1840 | 1862 |
| AD-2011378 | AUGCCUGUUUAUGCUGUUCAU | | 4831 | 4851 | AUGAACAGCAUAAACAGGCAUGU | | 4829 | 4851 |
| AD-2011379 | AGAAUUUCCCAGUUUAAAACU | | 3634 | 3654 | AGUUUUAAACUGGGAAAUUCUAA | | 3632 | 3654 |
| AD-2011380 | GUAGAUCAAGUUUGUCUUCCU | | 4202 | 4222 | AGGAAGACAAACUUGAUCUACAG | | 4200 | 4222 |
| AD-2011381 | ACAACCCUUCCUCUUUUCUCU | | 3853 | 3873 | AGAGAAAAGAGGAAGGGUUGUUU | | 3851 | 3873 |
| AD-2011382 | AGUGAAAUUUGCAUAAUGAAU | | 3162 | 3182 | AUUCAUUAUGCAAAUUUCACUUC | | 3160 | 3182 |
| AD-2011383 | UUAGGAUAUAUUCACAUUGUU | | 2961 | 2981 | AACAAUGUGAAUAUAUCCUAAAG | | 2959 | 2981 |
| AD-2011384 | UCUUAGAUAUUAUUGCUAGUU | | 3905 | 3925 | AACUAGCAAUAAUAUCUAAGAUG | | 3903 | 3925 |
| AD-2011385 | CUGGUUAAAAUGGAUGAUUUU | | 2772 | 2792 | AAAAUCAUCCAUUUUAACCAGGA | | 2770 | 2792 |
| AD-2011386 | CUUCCCUGAAGUGCUUUACAU | | 3731 | 3751 | AUGUAAAGCACUUCAGGGAAGAG | | 3729 | 3751 |
| AD-2011387 | CACCACUGUCUUGAUGCUCUU | | 5257 | 5277 | AAGAGCAUCAAGACAGUGGUGAG | | 5255 | 5277 |
| AD-2011388 | ACAACUCUUGUUUUGCUGUUU | | 5483 | 5503 | AAACAGCAAAACAAGAGUUGUAU | | 5481 | 5503 |
| AD-2011389 | CCUUUCGUUUGCUUUCUUAUU | | 3057 | 3077 | AAUAAGAAAGCAAACGAAAGGAA | | 3055 | 3077 |
| AD-2011390 | GGGCAAAAUCACUUAUGAAAU | | 2838 | 2858 | AUUUCAUAAGUGAUUUUGCCCAC | | 2836 | 2858 |
| AD-2011391 | AACACUUUGAUGUUAUCAUUU | | 4703 | 4723 | AAAUGAUAACAUCAAAGUGUUAC | | 4701 | 4723 |
| AD-2011392 | UUCCUCCAAGGAGUUAGAAUU | | 3619 | 3639 | AAUUCUAACUCCUUGGAGGAAGA | | 3617 | 3639 |
| AD-2011393 | AAGUGUUUUGAACUUGAUCUU | | 3549 | 3569 | AAGAUCAAGUUCAAAACACUUAU | | 3547 | 3569 |
| AD-2011394 | UGGCCUCAUUUUUCUCUUUUU | | 4060 | 4080 | AAAAAGAGAAAAAUGAGGCCAUU | | 4058 | 4080 |
| AD-2011395 | AGGUAUUUGCAUUGUUUAAAU | | 3328 | 3348 | AUUUAAACAAUGCAAAUACCUCC | | 3326 | 3348 |
| AD-2011396 | CCUAAUAUUGUGCGACUUCAU | | 881 | 901 | AUGAAGUCGCACAAUAUUAGGGU | | 879 | 901 |
| AD-2011397 | ACACCAAAUGAAGUGGUCAUU | | 5582 | 5602 | AAUGACCACUUCAUUUGGUGUCU | | 5580 | 5602 |
| AD-2011398 | GUAGCAAAUCAGUAUAUUCUU | | 5631 | 5651 | AAGAAUAUACUGAUUUGCUACUA | | 5629 | 5651 |
| AD-2011399 | CGAAAGCAAGAGAUUAUCAAU | | 1808 | 1828 | AUUGAUAAUCUCUUGCUUUCGUG | | 1806 | 1828 |
| AD-2011400 | CCAACACAGACUCUAUCAGCU | | 1324 | 1344 | AGCUGAUAGAGUCUGUGUUGGUC | | 1322 | 1344 |
| AD-2011401 | GACUAGAAUGAUAUUUGAUAU | | 5381 | 5401 | AUAUCAAAUAUCAUUCUAGUCAC | | 5379 | 5401 |
| AD-2011402 | GCCUGAGAAUUUGCUUUUAGU | | 1084 | 1104 | ACUAAAAGCAAAUUCUCAGGCUU | | 1082 | 1104 |
| AD-2011403 | CAAAACAAUGGUCUCUUCUGU | | 4555 | 4575 | ACAGAAGAGACCAUUGUUUUGCU | | 4553 | 4575 |
| AD-2011404 | GAUAAACAACAAAGCCAACGU | | 1654 | 1674 | ACGUUGGCUUUGUUGUUUAUCUU | | 1652 | 1674 |
| AD-2011405 | UUUUUUAAUACGAACCUGUCU | | 4678 | 4698 | AGACAGGUUCGUAUUAAAAAAAA | | 4676 | 4698 |
| AD-2011406 | GGUUUAUAAUUCUGCUUAAGU | | 3273 | 3293 | ACUUAAGCAGAAUUAUAAACCUU | | 3271 | 3293 |
| AD-2011407 | AGGAUAAAAGCAAGUUCCUCU | | 3351 | 3371 | AGAGGAACUUGCUUUUAUCCUAA | | 3349 | 3371 |
| AD-2011408 | UGUAGAGUGUUUUUUUUACAU | | 4148 | 4168 | AUGUAAAAAAAACACUCUACAUC | | 4146 | 4168 |
| AD-2011409 | UUCUCUGAAUGACAGUUGUAU | | 2638 | 2658 | AUACAACUGUCAUUCAGAGAACA | | 2636 | 2658 |
| AD-2011410 | AUUGUAUUUACCUCUCCUGUU | | 5012 | 5032 | AACAGGAGAGGUAAAUACAAUCU | | 5010 | 5032 |
| AD-2011411 | UGGCAUACAUGUAUUUAAAGU | | 4115 | 4135 | ACUUUAAAUACAUGUAUGCCACG | | 4113 | 4135 |
| AD-2011412 | UUGUCAAGAUUUUAAAGGUUU | | 3257 | 3277 | AAACCUUUAAAAUCUUGACAACA | | 3255 | 3277 |
| AD-2011413 | UAUGAAAAUUCCUACUGGACU | | 763 | 783 | AGUCCAGUAGGAAUUUUCAUACA | | 761 | 783 |
| AD-2011414 | CCUCUUUGUGGCAAAACAUCU | | 2250 | 2270 | AGAUGUUUUGCCACAAAGAGGUG | | 2248 | 2270 |
| AD-2011415 | CAGUCAGAAGAGACUCGUGUU | | 2114 | 2134 | AACACGAGUCUCUUCUGACUGCA | | 2112 | 2134 |
| AD-2011416 | AAGUCACUGAACAACUGAUCU | | 1827 | 1847 | AGAUCAGUUGUUCAGUGACUUUG | | 1825 | 1847 |
| AD-2011417 | GGAGCUUAUGAUUUUCCAUCU | | 1355 | 1375 | AGAUGGAAAAUCAUAAGCUCCAG | | 1353 | 1375 |
| AD-2011418 | GUGCGGAUCGUUUCGCAACUU | | 278 | 298 | AAGUUGCGAAACGAUCCGCACUG | | 276 | 298 |
| AD-2011419 | AAUCUGCCGUCUUUUGAAGCU | | 859 | 879 | AGCUUCAAAAGACGGCAGAUUCU | | 857 | 879 |
| AD-2011420 | UACUUCUUUUCCCGACUUCUU | | 4893 | 4913 | AAGAAGUCGGGAAAAGAAGUAGG | | 4891 | 4913 |
| AD-2011421 | CUACUGUAAUCCACAACCCUU | | 1725 | 1745 | AAGGGUUGUGGAUUACAGUAGUU | | 1723 | 1745 |
| AD-2011422 | UUUGUUCCAUUCUUUUCUUAU | | 3083 | 3103 | AUAAGAAAAGAAUGGAACAAAAG | | 3081 | 3103 |
| AD-2011423 | GAAGAUGUGAAAGCACGAAAU | | 1793 | 1813 | AUUUCGUGCUUUCACAUCUUCAU | | 1791 | 1813 |
| AD-2011424 | CAGUAAAUAUAUUGAGCCAUU | | 4007 | 4027 | AAUGGCUCAAUAUAUUUACUGUA | | 4005 | 4027 |
| AD-2011425 | AAUGGGAAAGAAAACUUCUCU | | 2222 | 2242 | AGAGAAGUUUUCUUUCCCAUUUG | | 2220 | 2242 |
| AD-2011426 | GGCAGAAUGUUCAUUUUCAUU | | 2157 | 2177 | AAUGAAAAUGAACAUUCUGCCAC | | 2155 | 2177 |
| AD-2011427 | CGCCUGCAUAGCAUAUAUUAU | | 2050 | 2070 | AUAAUAUAUGCUAUGCAGGCGGC | | 2048 | 2070 |
| AD-2011428 | CUGGCUGUUUUUCCAUUUCCU | | 318 | 338 | AGGAAAUGGAAAAACAGCCAGGC | | 316 | 338 |
| AD-2011429 | AGGGAAAUAAAAGUCUUUUGU | | 3188 | 3208 | ACAAAAGACUUUUAUUUCCCUUU | | 3186 | 3208 |
| AD-2011430 | CCACCCUUUCUGGUCAUCUCU | | 481 | 501 | AGAGAUGACCAGAAAGGGUGGCG | | 479 | 501 |
| AD-2011431 | UGCCAUAAUGGUAAAGGACUU | | 4339 | 4359 | AAGUCCUUUACCAUUAUGGCAAG | | 4337 | 4359 |
| AD-2011432 | CAAACUGUGUAAACUGGAAAU | | 2912 | 2932 | AUUUCCAGUUUACACAGUUUGAC | | 2910 | 2932 |
| AD-2011433 | UAAACCCUCAUGUACAUCUGU | | 2016 | 2036 | ACAGAUGUACAUGAGGGUUUAGA | | 2014 | 2036 |
| AD-2011434 | UUUUGUGAAGCAGCUAUACGU | | 4095 | 4115 | ACGUAUAGCUGCUUCACAAAAGG | | 4093 | 4115 |
| AD-2011435 | AUGGAGAUAUCAUUGAUAAAU | | 5151 | 5171 | AUUUAUCAAUGAUAUCUCCAUUC | | 5149 | 5171 |
| AD-2011436 | GUGUAUUCAUCAUUGCAUUCU | | 5108 | 5128 | AGAAUGCAAUGAUGAAUACACAG | | 5106 | 5128 |
| AD-2011437 | GAAGCUUUGGGUAAUUUAGUU | | 1919 | 1939 | AACUAAAUUACCCAAAGCUUCAG | | 1917 | 1939 |
| AD-2011438 | GCUGUGAAAUUGGCAGACUUU | | 1124 | 1144 | AAAGUCUGCCAAUUUCACAGCUG | | 1122 | 1144 |
| AD-2011439 | UAACAAUUAAAGUGGGAUGAU | | 2813 | 2833 | AUCAUCCCACUUUAAUUGUUAAU | | 2811 | 2833 |
| AD-2011440 | GCUGGCUACAAGGAAUUUCUU | | 1594 | 1614 | AAGAAAUUCCUUGUAGCCAGCAU | | 1592 | 1614 |
| AD-2011441 | UGUUAUUAUUCUUUGCUCACU | | 5455 | 5475 | AGUGAGCAAAGAAUAAUAACAAU | | 5453 | 5475 |
| AD-2011442 | AUAACAAUUUGCACUUGGUGU | | 4506 | 4526 | ACACCAAGUGCAAAUUGUUAUGU | | 4504 | 4526 |
| AD-2011443 | CUUCCGCACUAAGAUGUGAGU | | 4217 | 4237 | ACUCACAUCUUAGUGCGGAAGAC | | 4215 | 4237 |
| AD-2011444 | CUCUCAUCUCACCUCUCUGUU | | 3870 | 3890 | AACAGAGAGGUGAGAUGAGAGAA | | 3868 | 3890 |
| AD-2011445 | CACCCAUGGAUCUGUCAACGU | | 1475 | 1495 | ACGUUGACAGAUCCAUGGGUGCU | | 1473 | 1495 |
| AD-2011446 | AUAAAAUUCUACUGACUUCUU | | 5761 | 5781 | AAGAAGUCAGUAGAAUUUUAUUC | | 5759 | 5781 |
| AD-2011447 | UGCCAUCUUGACAACUAUGCU | | 1576 | 1596 | AGCAUAGUUGUCAAGAUGGCACC | | 1574 | 1596 |
| AD-2011448 | ACUUAGGUAUCCUAACUAUGU | | 3304 | 3324 | ACAUAGUUAGGAUACCUAAGUCC | | 3302 | 3324 |
| AD-2011449 | CUGCUUCUACUCCUCCUGCUU | | 255 | 275 | AAGCAGGAGGAGUAGAAGCAGAG | | 253 | 275 |
| AD-2011450 | UGAGGAAAUUGUGAUUUGUUU | | 4233 | 4253 | AAACAAAUCACAAUUUCCUCACA | | 4231 | 4253 |
| AD-2011451 | GACGAGUAUCAGCUUUUCGAU | | 704 | 724 | AUCGAAAAGCUGAUACUCGUCCG | | 702 | 724 |
| AD-2011452 | UCCCUCUGACCCUCAGUUUCU | | 5292 | 5312 | AGAAACUGAGGGUCAGAGGGAAG | | 5290 | 5312 |
| AD-2011453 | GCCCUUUUGAUAACAGAAGCU | | 5192 | 5212 | AGCUUCUGUUAUCAAAAGGGCUU | | 5190 | 5212 |
| AD-2011454 | AGAAAUUAAAUGGUAGCAGUU | | 5400 | 5420 | AACUGCUACCAUUUAAUUUCUAU | | 5398 | 5420 |
| AD-2011455 | GAUGGAUUUUCACCGAUUCUU | | 1945 | 1965 | AAGAAUCGGUGAAAAUCCAUCCC | | 1943 | 1965 |
| AD-2011456 | ACAUCACACUUGCUCACAUGU | | 4814 | 4834 | ACAUGUGAGCAAGUGUGAUGUUU | | 4812 | 4834 |
| AD-2011457 | UCUAAGGCCUGAAAACCAUUU | | 2268 | 2288 | AAAUGGUUUUCAGGCCUUAGAUG | | 2266 | 2288 |
| AD-2011458 | UUACGUAAAGAUCCUUAUGGU | | 1226 | 1246 | ACCAUAAGGAUCUUUACGUAAAA | | 1224 | 1246 |
| AD-2011459 | UACAGUGAAGCUGAUGCCAGU | | 992 | 1012 | ACUGGCAUCAGCUUCACUGUAGU | | 990 | 1012 |
| AD-2011460 | AUUUGCUGAAUUGAAUUGUUU | | 2989 | 3009 | AAACAAUUCAAUUCAGCAAAUUC | | 2987 | 3009 |
| AD-2011461 | UAAGCUCUAGUUUGGACUUAU | | 3289 | 3309 | AUAAGUCCAAACUAGAGCUUAAG | | 3287 | 3309 |
| AD-2011462 | CUGGCUAGUAGUGUGUGAGAU | | 3132 | 3152 | AUCUCACACACUACUAGCCAGCC | | 3130 | 3152 |
| AD-2011463 | AUGUGAUGCAUCAUCUUAUCU | | 2435 | 2455 | AGAUAAGAUGAUGCAUCACAUAU | | 2433 | 2455 |
| AD-2011464 | CCUACAUGUAAUGCAUAUGUU | | 2419 | 2439 | AACAUAUGCAUUACAUGUAGGAC | | 2417 | 2439 |
| AD-2011465 | CAGCAGCCAAGAGUUUGUUGU | | 1614 | 1634 | ACAACAAACUCUUGGCUGCUGAG | | 1612 | 1634 |
| AD-2011466 | UCCAAUCCAGCCUUCACAUGU | | 4642 | 4662 | ACAUGUGAAGGCUGGAUUGGAGG | | 4640 | 4662 |
| AD-2011467 | ACCAACAGUACCCAUCAAGCU | | 2188 | 2208 | AGCUUGAUGGGUACUGUUGGUGA | | 2186 | 2208 |
| AD-2011468 | CUGCUAGGGAUCAUCAGAAAU | | 822 | 842 | AUUUCUGAUGAUCCCUAGCAGAA | | 820 | 842 |
| AD-2011469 | GGUUUGCUACCACAUAAAGCU | | 2877 | 2897 | AGCUUUAUGUGGUAGCAAACCAA | | 2875 | 2897 |
| AD-2011470 | AGUGUACAGCAUCAUGCUCCU | | 4931 | 4951 | AGGAGCAUGAUGCUGUACACUGA | | 4929 | 4951 |
| AD-2011471 | UGGCUUCGACCACAACCUGCU | | 672 | 692 | AGCAGGUUGUGGUCGAAGCCAUC | | 670 | 692 |
| AD-2011472 | CCAGUCAUUGCAUUCAGCAGU | | 1008 | 1028 | ACUGCUGAAUGCAAUGACUGGCA | | 1006 | 1028 |
| AD-2011473 | CUUCCAUGAUGCACAGACAGU | | 1506 | 1526 | ACUGUCUGUGCAUCAUGGAAGCA | | 1504 | 1526 |
| AD-2011474 | CAGGAGGAUACCAACUUGAUU | | 3407 | 3427 | AAUCAAGUUGGUAUCCUCCUGGC | | 3405 | 3427 |
| AD-2011475 | UGAUGGAAACAAGGAGUCAAU | | 1744 | 1764 | AUUGACUCCUUGUUUCCAUCAGG | | 1742 | 1764 |
| AD-2011476 | AAGCAAGAAUCAGUUGGUUUU | | 2862 | 2882 | AAAACCAACUGAUUCUUGCUUCU | | 2860 | 2882 |
| AD-2011477 | CAACUGCUUGCCACUCGUCCU | | 293 | 313 | AGGACGAGUGGCAAGCAGUUGCG | | 291 | 313 |
| AD-2011478 | GUGUUGAAGUAUUACUGUAGU | | 4186 | 4206 | ACUACAGUAAUACUUCAACACCA | | 4184 | 4206 |
| AD-2011479 | UUACUGUUGGCAAAACAAUAU | | 2517 | 2537 | AUAUUGUUUUGCCAACAGUAAUU | | 2515 | 2537 |
| AD-2011480 | CAGUGUGUCCUACUCUGGUCU | | 4475 | 4495 | AGACCAGAGUAGGACACACUGCC | | 4473 | 4495 |
| AD-2011481 | AGAAACCAGAUGGAGUAAAGU | | 1635 | 1655 | ACUUUACUCCAUCUGGUUUCUUC | | 1633 | 1655 |
| AD-2011482 | GCUCCACAGCAAACCUUCCUU | | 4946 | 4966 | AAGGAAGGUUUGCUGUGGAGCAU | | 4944 | 4966 |
| AD-2011483 | GACUUUGAAGCCUACACAAAU | | 1865 | 1885 | AUUUGUGUAGGCUUCAAAGUCCC | | 1863 | 1885 |

TABLE 42
Modified Sense and Antisense Strand Sequences of CAMK2D dsRNA Agents Comprising an Unsaturated C22 Hydrocarbon Chain
Conjugated to Position 6 on the Sense Strand, Counting from the 5′-end of the Sense Strand

| | | SEQ | | SEQ | | SEQ |
|---|---|---|---|---|---|---|
| Duplex | | ID | | ID | | ID |
| Name | Sense Strand Sequence 5′ to 3′ | NO. | Antisense Strand Sequence 5′ to 3′ | NO. | mRNA target sequence | NO. |
| AD-2011304 | cscsaca(Cda)AfaAfCfUfuaaauuacuuL96 | | asAfsguaAfuUfUfaaguUfuGfuguggsasa | | UUCCACACAAACUUAAAUUACUG | |
| AD-2011305 | usasgca(Cda)UfuUfUfGfaucaucuucuL96 | | asGfsaagAfuGfAfucaaAfaGfugcuasgsu | | ACUAGCACUUUUGAUCAUCUUCA | |
| AD-2011306 | cscsuca(Uda)CfaAfUfAfaaaugcuuauL96 | | asUfsaagCfaUfUfuuauUfgAfugaggsusc | | GACCUCAUCAAUAAAAUGCUUAC | |
| AD-2011307 | uscscau(Cda)AfuUfGfUfuauuuuaacuL96 | | asGfsuuaAfaAfUfaacaAfuGfauggasgsa | | UCUCCAUCAUUGUUAUUUUAACG | |
| AD-2011308 | uscscac(Ada)CfuAfUfUfauucuaaacuL96 | | asGfsuuuAfgAfAfuaauAfgUfguggasusu | | AAUCCACACUAUUAUUCUAAACC | |
| AD-2011309 | csusccu(Ada)AfaAfGfCfuucucuaaauL96 | | asUfsuuaGfaGfAfagcuUfuUfaggagsusc | | GACUCCUAAAAGCUUCUCUAAAC | |
| AD-2011310 | gsgsucu(Cda)AfuUfUfAfguacauaacuL96 | | asGfsuuaUfgUfAfcuaaAfuGfagaccsasg | | CUGGUCUCAUUUAGUACAUAACA | |
| AD-2011311 | csasgac(Uda)UfaAfGfAfacuauuguuuL96 | | asAfsacaAfuAfGfuucuUfaAfgucugsusu | | AACAGACUUAAGAACUAUUGUUC | |
| AD-2011312 | csasuca(Ada)GfuUfUfCfucuguuaauuL96 | | asAfsuuaAfcAfGfagaaAfcUfugaugsasa | | UUCAUCAAGUUUCUCUGUUAAUG | |
| AD-2011313 | asusucu(Cda)UfaUfAfUfucuacuuguuL96 | | asAfscaaGfuAfGfaauaUfaGfagaausgsa | | UCAUUCUCUAUAUUCUACUUGUG | |
| AD-2011314 | csusgcu(Uda)GfaAfGfAfaauuuaauguL96 | | asCfsauuAfaAfUfuucuUfcAfagcagsusc | | GACUGCUUGAAGAAAUUUAAUGC | |
| AD-2011315 | csascug(Ada)CfaUfUfAfauauuccuauL96 | | asUfsaggAfaUfAfuuaaUfgUfcagugsasu | | AUCACUGACAUUAAUAUUCCUAU | |
| AD-2011316 | asascca(Cda)AfuUfGfUfuuugaaaauuL96 | | asAfsuuuUfcAfAfaacaAfuGfugguusgsa | | UCAACCACAUUGUUUUGAAAAUA | |
| AD-2011317 | uscsauc(Ada)CfuAfGfCfuaguuuucuuL96 | | asAfsgaaAfaCfUfagcuAfgUfgaugasusg | | CAUCAUCACUAGCUAGUUUUCUA | |
| AD-2011318 | ususacu(Uda)UfuUfCfCfuaagauucauL96 | | asUfsgaaUfcUfUfaggaAfaAfaguaasgsa | | UCUUACUUUUUCCUAAGAUUCAG | |
| AD-2011319 | ususacc(Uda)AfgAfAfUfaaauagucuuL96 | | asAfsgacUfaUfUfuauuCfuAfgguaasgsa | | UCUUACCUAGAAUAAAUAGUCUC | |
| AD-2011320 | gsgsucu(Uda)CfuAfAfAfuuucaacaguL96 | | asCfsuguUfgAfAfauuuAfgAfagaccscsa | | UGGGUCUUCUAAAUUUCAACAGU | |
| AD-2011321 | cscsuau(Ada)CfaUfUfGfuuuacacuuuL96 | | asAfsaguGfuAfAfacaaUfgUfauaggsasa | | UUCCUAUACAUUGUUUACACUUC | |
| AD-2011322 | uscsucu(Uda)GfaAfUfCfagaguaucauL96 | | asUfsgauAfcUfCfugauUfcAfagagasgsa | | UCUCUCUUGAAUCAGAGUAUCAU | |
| AD-2011323 | gscsuga(Gda)AfaCfAfAfuauaguuaauL96 | | asUfsuaaCfuAfUfauugUfuCfucagcsasa | | UUGCUGAGAACAAUAUAGUUAAC | |
| AD-2011324 | csgsucc(Ada)UfcUfUfUfauuucuucauL96 | | asUfsgaaGfaAfAfuaaaGfaUfggacgscsa | | UGCGUCCAUCUUUAUUUCUUCAG | |
| AD-2011325 | asgscuu(Cda)UfuUfUfGfauuugcuaauL96 | | asUfsuagCfaAfAfucaaAfaGfaagcusgsa | | UCAGCUUCUUUUGAUUUGCUAAA | |
| AD-2011326 | asuscuc(Uda)UfuUfCfUfuuauccuguuL96 | | asAfscagGfaUfAfaagaAfaAfgagauscsa | | UGAUCUCUUUUCUUUAUCCUGUU | |
| AD-2011327 | csascaa(Ada)UfgAfAfUfuacacauuuuL96 | | asAfsaauGfuGfUfaauuCfaUfuugugsgsu | | ACCACAAAUGAAUUACACAUUUA | |
| AD-2011328 | ususugu(Cda)CfaAfAfAfgcaauaaacuL96 | | asGfsuuuAfuUfGfcuuuUfgGfacaaasgsc | | GCUUUGUCCAAAAGCAAUAAACC | |
| AD-2011329 | uscsuga(Gda)UfuUfAfAfucacuuuaguL96 | | asCfsuaaAfgUfGfauuaAfaCfucagasasa | | UUUCUGAGUUUAAUCACUUUAGG | |
| AD-2011330 | cscsaag(Uda)AfcAfAfCfucuucaucauL96 | | asUfsgauGfaAfGfaguuGfuAfcuuggsasa | | UUCCAAGUACAACUCUUCAUCAA | |
| AD-2011331 | ususcua(Cda)UfuUfGfAfaaaugcuuuuL96 | | asAfsaagCfaUfUfuucaAfaGfuagaasusc | | GAUUCUACUUUGAAAAUGCUUUG | |
| AD-2011332 | usasuca(Uda)AfuAfUfUfccuuccuauuL96 | | asAfsuagGfaAfGfgaauAfuAfugauasasg | | CUUAUCAUAUAUUCCUUCCUAUA | |
| AD-2011333 | cscsucu(Cda)AfaAfAfCfcuacauaauuL96 | | asAfsuuaUfgUfAfgguuUfuGfagaggsgsa | | UCCCUCUCAAAACCUACAUAAUA | |
| AD-2011334 | asgsuua(Ada)UfuGfUfUfcucugugaguL96 | | asCfsucaCfaGfAfgaacAfaUfuaacususg | | CAAGUUAAUUGUUCUCUGUGAGC | |
| AD-2011335 | ususcua(Uda)CfaUfUfUfugaaacacuuL96 | | asAfsgugUfuUfCfaaaaUfgAfuagaasgsa | | UCUUCUAUCAUUUUGAAACACUG | |
| AD-2011336 | csasgcu(Uda)GfaAfCfUfugagcauacuL96 | | asGfsuauGfcUfCfaaguUfcAfagcugsgsg | | CCCAGCUUGAACUUGAGCAUACA | |
| AD-2011337 | uscsacc(Cda)AfaAfUfUfuugaauuuuuL96 | | asAfsaaaUfuCfAfaaauUfuGfggugasasg | | CUUCACCCAAAUUUUGAAUUUUU | |
| AD-2011338 | gscsagu(Ada)UfaAfCfUfauucugaucuL96 | | asGfsaucAfgAfAfuaguUfaUfacugcsusa | | UAGCAGUAUAACUAUUCUGAUCA | |
| AD-2011339 | gsgsuuu(Uda)CfuUfUfGfugcuucucauL96 | | asUfsgagAfaGfCfacaaAfgAfaaaccsusa | | UAGGUUUUCUUUGUGCUUCUCAU | |
| AD-2011340 | asusgag(Ada)AfuAfAfAfcauaccaacuL96 | | asGfsuugGfuAfUfguuuAfuUfcucaususu | | AAAUGAGAAUAAACAUACCAACU | |
| AD-2011341 | gsasgug(Ada)UfuUfCfAfuugaauaaauL96 | | asUfsuuaUfuCfAfaugaAfaUfcacucsgsa | | UCGAGUGAUUUCAUUGAAUAAAA | |
| AD-2011342 | gsusuuc(Cda)AfuAfUfUfuguaaaauguL96 | | asCfsauuUfuAfCfaaauAfuGfgaaacsusg | | CAGUUUCCAUAUUUGUAAAAUGA | |
| AD-2011343 | csasugc(Uda)GfuUfUfUfuggucaaacuL96 | | asGfsuuuGfaCfCfaaaaAfcAfgcaugsgsc | | GCCAUGCUGUUUUUGGUCAAACU | |
| AD-2011344 | csuscua(Cda)UfgCfAfGfuauaaugucuL96 | | asGfsacaUfuAfUfacugCfaGfuagagsgsa | | UCCUCUACUGCAGUAUAAUGUCU | |
| AD-2011345 | ususggu(Gda)UfuUfGfAfuuuaguuacuL96 | | asGfsuaaCfuAfAfaucaAfaCfaccaasgsu | | ACUUGGUGUUUGAUUUAGUUACU | |
| AD-2011346 | uscsuuu(Cda)UfcCfAfGfaaguuuuacuL96 | | asGfsuaaAfaCfUfucugGfaGfaaagasusa | | UAUCUUUCUCCAGAAGUUUUACG | |
| AD-2011347 | asgsagu(Uda)CfaAfAfUfacaacaauuuL96 | | asAfsauuGfuUfGfuauuUfgAfacucuscsa | | UGAGAGUUCAAAUACAACAAUUG | |
| AD-2011348 | uscsugu(Gda)UfuGfAfUfuacuaaucauL96 | | asUfsgauUfaGfUfaaucAfaCfacagasgsa | | UCUCUGUGUUGAUUACUAAUCAU | |
| AD-2011349 | usgscuu(Uda)UfuUfAfGfcuucucucuuL96 | | asAfsgagAfgAfAfgcuaAfaAfaagcascsa | | UGUGCUUUUUUAGCUUCUCUCUU | |
| AD-2011350 | csusgug(Ada)CfuGfCfAfacgucuuacuL96 | | asGfsuaaGfaCfGfuugcAfgUfcacagsgsa | | UCCUGUGACUGCAACGUCUUACU | |
| AD-2011351 | csascuu(Cda)UfgCfAfUfucucuguucuL96 | | asGfsaacAfgAfGfaaugCfaGfaagugsgsc | | GCCACUUCUGCAUUCUCUGUUCU | |
| AD-2011352 | csuscau(Uda)UfuUfCfCfuuuguugauuL96 | | asAfsucaAfcAfAfaggaAfaAfaugagsasa | | UUCUCAUUUUUCCUUUGUUGAUU | |
| AD-2011353 | cscsuca(Gda)AfaGfCfCfuauuuuuaauL96 | | asUfsuaaAfaAfUfaggcUfuCfugaggsasc | | GUCCUCAGAAGCCUAUUUUUAAA | |
| AD-2011354 | asusagu(Ada)AfuUfCfAfcaguccucauL96 | | asUfsgagGfaCfUfgugaAfuUfacuauscsg | | CGAUAGUAAUUCACAGUCCUCAG | |
| AD-2011355 | ususucu(Cda)AfaAfUfCfugugaucucuL96 | | asGfsagaUfcAfCfagauUfuGfagaaasgsa | | UCUUUCUCAAAUCUGUGAUCUCU | |
| AD-2011356 | gscsugc(Cda)AfaAfAfUfuaucaacacuL96 | | asGfsuguUfgAfUfaauuUfuGfgcagcsasu | | AUGCUGCCAAAAUUAUCAACACC | |
| AD-2011357 | gsascug(Ada)UfuGfAfUfauauuuaaguL96 | | asCfsuuaAfaUfAfuaucAfaUfcagucscsu | | AGGACUGAUUGAUAUAUUUAAGA | |
| AD-2011358 | usascac(Uda)UfuUfAfAfcuuagcauguL96 | | asCfsaugCfuAfAfguuaAfaAfguguasasa | | UUUACACUUUUAACUUAGCAUGU | |
| AD-2011359 | uscsuga(Gda)CfaAfGfUfuaccucuucuL96 | | asGfsaagAfgGfUfaacuUfgCfucagasgsc | | GCUCUGAGCAAGUUACCUCUUCC | |
| AD-2011360 | gscsccu(Cda)UfuUfAfUfguagguuuauL96 | | asUfsaaaCfcUfAfcauaAfaGfagggcsasg | | CUGCCCUCUUUAUGUAGGUUUAC | |
| AD-2011361 | csasagg(Ada)AfuAfUfUfaaucuucacuL96 | | asGfsugaAfgAfUfuaauAfuUfccuugsasa | | UUCAAGGAAUAUUAAUCUUCACC | |
| AD-2011362 | asusguu(Gda)UfuUfAfUfguuucuuacuL96 | | asGfsuaaGfaAfAfcauaAfaCfaacausgsa | | UCAUGUUGUUUAUGUUUCUUACC | |
| AD-2011363 | asusacu(Cda)GfgAfCfUfcaaaugucuuL96 | | asAfsgacAfuUfUfgaguCfcGfaguausasu | | AUAUACUCGGACUCAAAUGUCUC | |
| AD-2011364 | usgsaag(Cda)UfuUfUfCfugauaauuauL96 | | asUfsaauUfaUfCfagaaAfaGfcuucasasc | | GUUGAAGCUUUUCUGAUAAUUAU | |
| AD-2011365 | gsasacu(Cda)UfuUfGfCfuguuaaucuuL96 | | asAfsgauUfaAfCfagcaAfaGfaguucsusa | | UAGAACUCUUUGCUGUUAAUCUG | |
| AD-2011366 | ususgaa(Ada)GfuUfUfUfgcugauuaauL96 | | asUfsuaaUfcAfGfcaaaAfcUfuucaasusg | | CAUUGAAAGUUUUGCUGAUUAAC | |
| AD-2011367 | asusgcu(Ada)GfaAfGfAfaaacuaaaguL96 | | asCfsuuuAfgUfUfuucuUfcUfagcaususa | | UAAUGCUAGAAGAAAACUAAAGG | |
| AD-2011368 | cscsucu(Uda)CfaUfGfCfauguuucuguL96 | | asCfsagaAfaCfAfugcaUfgAfagaggsasg | | CUCCUCUUCAUGCAUGUUUCUGA | |
| AD-2011369 | usascug(Cda)UfuUfUfGfaaccugaaguL96 | | asCfsuucAfgGfUfucaaAfaGfcaguasasg | | CUUACUGCUUUUGAACCUGAAGC | |
| AD-2011370 | csasacg(Uda)UfcUfAfCfuguugcuucuL96 | | asGfsaagCfaAfCfaguaGfaAfcguugsasc | | GUCAACGUUCUACUGUUGCUUCC | |
| AD-2011371 | csasgau(Ada)GfuCfCfUfuguuuuaauuL96 | | asAfsuuaAfaAfCfaaggAfcUfaucugsgsg | | CCCAGAUAGUCCUUGUUUUAAUG | |
| AD-2011372 | ascsacu(Gda)UfaUfAfUfauuucuugcuL96 | | asGfscaaGfaAfAfuauaUfaCfaguguscsc | | GGACACUGUAUAUAUUUCUUGCC | |
| AD-2011373 | asascuu(Ada)AfuAfAfAfgauauuguguL96 | | asCfsacaAfuAfUfcuuuAfuUfaaguusgsg | | CCAACUUAAUAAAGAUAUUGUGA | |
| AD-2011374 | ususucu(Ada)UfuUfGfUfgucuccucuuL96 | | asAfsgagGfaGfAfcacaAfaUfagaaasusa | | UAUUUCUAUUUGUGUCUCCUCUA | |
| AD-2011375 | gscsuua(Cda)AfaAfUfGfuuugccauuuL96 | | asAfsaugGfcAfAfacauUfuGfuaagcscsu | | AGGCUUACAAAUGUUUGCCAUUC | |
| AD-2011376 | csusgug(Ada)UfuUfUfUfguucucuucuL96 | | asGfsaagAfgAfAfcaaaAfaUfcacagsgsa | | UCCUGUGAUUUUUGUUCUCUUCC | |
| AD-2011377 | usgsauc(Gda)AfaGfCfUfaucaacaauuL96 | | asAfsuugUfuGfAfuagcUfuCfgaucasgsu | | ACUGAUCGAAGCUAUCAACAAUG | |
| AD-2011378 | asusgcc(Uda)GfuUfUfAfugcuguucauL96 | | asUfsgaaCfaGfCfauaaAfcAfggcausgsu | | ACAUGCCUGUUUAUGCUGUUCAU | |
| AD-2011379 | asgsaau(Uda)UfcCfCfAfguuuaaaacuL96 | | asGfsuuuUfaAfAfcuggGfaAfauucusasa | | UUAGAAUUUCCCAGUUUAAAACA | |
| AD-2011380 | gsusaga(Uda)CfaAfGfUfuugucuuccuL96 | | asGfsgaaGfaCfAfaacuUfgAfucuacsasg | | CUGUAGAUCAAGUUUGUCUUCCG | |
| AD-2011381 | ascsaac(Cda)CfuUfCfCfucuuuucucuL96 | | asGfsagaAfaAfGfaggaAfgGfguugususu | | AAACAACCCUUCCUCUUUUCUCU | |
| AD-2011382 | asgsuga(Ada)AfuUfUfGfcauaaugaauL96 | | asUfsucaUfuAfUfgcaaAfuUfucacususc | | GAAGUGAAAUUUGCAUAAUGAAU | |
| AD-2011383 | ususagg(Ada)UfaUfAfUfucacauuguuL96 | | asAfscaaUfgUfGfaauaUfaUfccuaasasg | | CUUUAGGAUAUAUUCACAUUGUU | |
| AD-2011384 | uscsuua(Gda)AfuAfUfUfauugcuaguuL96 | | asAfscuaGfcAfAfuaauAfuCfuaagasusg | | CAUCUUAGAUAUUAUUGCUAGUG | |
| AD-2011385 | csusggu(Uda)AfaAfAfUfggaugauuuuL96 | | asAfsaauCfaUfCfcauuUfuAfaccagsgsa | | UCCUGGUUAAAAUGGAUGAUUUU | |
| AD-2011386 | csusucc(Cda)UfgAfAfGfugcuuuacauL96 | | asUfsguaAfaGfCfacuuCfaGfggaagsasg | | CUCUUCCCUGAAGUGCUUUACAG | |
| AD-2011387 | csascca(Cda)UfgUfCfUfugaugcucuuL96 | | asAfsgagCfaUfCfaagaCfaGfuggugsasg | | CUCACCACUGUCUUGAUGCUCUG | |
| AD-2011388 | ascsaac(Uda)CfuUfGfUfuuugcuguuuL96 | | asAfsacaGfcAfAfaacaAfgAfguugusasu | | AUACAACUCUUGUUUUGCUGUUG | |
| AD-2011389 | cscsuuu(Cda)GfuUfUfGfcuuucuuauuL96 | | asAfsuaaGfaAfAfgcaaAfcGfaaaggsasa | | UUCCUUUCGUUUGCUUUCUUAUU | |
| AD-2011390 | gsgsgca(Ada)AfaUfCfAfcuuaugaaauL96 | | asUfsuucAfuAfAfgugaUfuUfugcccsasc | | GUGGGCAAAAUCACUUAUGAAAG | |
| AD-2011391 | asascac(Uda)UfuGfAfUfguuaucauuuL96 | | asAfsaugAfuAfAfcaucAfaAfguguusasc | | GUAACACUUUGAUGUUAUCAUUU | |
| AD-2011392 | ususccu(Cda)CfaAfGfGfaguuagaauuL96 | | asAfsuucUfaAfCfuccuUfgGfaggaasgsa | | UCUUCCUCCAAGGAGUUAGAAUU | |
| AD-2011393 | asasgug(Uda)UfuUfGfAfacuugaucuuL96 | | asAfsgauCfaAfGfuucaAfaAfcacuusasu | | AUAAGUGUUUUGAACUUGAUCUU | |
| AD-2011394 | usgsgcc(Uda)CfaUfUfUfuucucuuuuuL96 | | asAfsaaaGfaGfAfaaaaUfgAfggccasusu | | AAUGGCCUCAUUUUUCUCUUUUU | |
| AD-2011395 | asgsgua(Uda)UfuGfCfAfuuguuuaaauL96 | | asUfsuuaAfaCfAfaugcAfaAfuaccuscsc | | GGAGGUAUUUGCAUUGUUUAAAG | |
| AD-2011396 | cscsuaa(Uda)AfuUfGfUfgcgacuucauL96 | | asUfsgaaGfuCfGfcacaAfuAfuuaggsgsu | | ACCCUAAUAUUGUGCGACUUCAU | |
| AD-2011397 | ascsacc(Ada)AfaUfGfAfaguggucauuL96 | | asAfsugaCfcAfCfuucaUfuUfgguguscsu | | AGACACCAAAUGAAGUGGUCAUC | |
| AD-2011398 | gsusagc(Ada)AfaUfCfAfguauauucuuL96 | | asAfsgaaUfaUfAfcugaUfuUfgcuacsusa | | UAGUAGCAAAUCAGUAUAUUCUA | |
| AD-2011399 | csgsaaa(Gda)CfaAfGfAfgauuaucaauL96 | | asUfsugaUfaAfUfcucuUfgCfuuucgsusg | | CACGAAAGCAAGAGAUUAUCAAA | |
| AD-2011400 | cscsaac(Ada)CfaGfAfCfucuaucagcuL96 | | asGfscugAfuAfGfagucUfgUfguuggsusc | | GACCAACACAGACUCUAUCAGCA | |
| AD-2011401 | gsascua(Gda)AfaUfGfAfuauuugauauL96 | | asUfsaucAfaAfUfaucaUfuCfuagucsasc | | GUGACUAGAAUGAUAUUUGAUAG | |
| AD-2011402 | gscscug(Ada)GfaAfUfUfugcuuuuaguL96 | | asCfsuaaAfaGfCfaaauUfcUfcaggcsusu | | AAGCCUGAGAAUUUGCUUUUAGC | |
| AD-2011403 | csasaaa(Cda)AfaUfGfGfucucuucuguL96 | | asCfsagaAfgAfGfaccaUfuGfuuuugscsu | | AGCAAAACAAUGGUCUCUUCUGG | |
| AD-2011404 | gsasuaa(Ada)CfaAfCfAfaagccaacguL96 | | asCfsguuGfgCfUfuuguUfgUfuuaucsusu | | AAGAUAAACAACAAAGCCAACGU | |
| AD-2011405 | ususuuu(Uda)AfaUfAfCfgaaccugucuL96 | | asGfsacaGfgUfUfcguaUfuAfaaaaasasa | | UUUUUUUUAAUACGAACCUGUCC | |
| AD-2011406 | gsgsuuu(Ada)UfaAfUfUfcugcuuaaguL96 | | asCfsuuaAfgCfAfgaauUfaUfaaaccsusu | | AAGGUUUAUAAUUCUGCUUAAGC | |
| AD-2011407 | asgsgau(Ada)AfaAfGfCfaaguuccucuL96 | | asGfsaggAfaCfUfugcuUfuUfauccusasa | | UUAGGAUAAAAGCAAGUUCCUCC | |
| AD-2011408 | usgsuag(Ada)GfuGfUfUfuuuuuuacauL96 | | asUfsguaAfaAfAfaaacAfcUfcuacasusc | | GAUGUAGAGUGUUUUUUUUACAC | |
| AD-2011409 | ususcuc(Uda)GfaAfUfGfacaguuguauL96 | | asUfsacaAfcUfGfucauUfcAfgagaascsa | | UGUUCUCUGAAUGACAGUUGUAA | |
| AD-2011410 | asusugu(Ada)UfuUfAfCfcucuccuguuL96 | | asAfscagGfaGfAfgguaAfaUfacaauscsu | | AGAUUGUAUUUACCUCUCCUGUC | |
| AD-2011411 | usgsgca(Uda)AfcAfUfGfuauuuaaaguL96 | | asCfsuuuAfaAfUfacauGfuAfugccascsg | | CGUGGCAUACAUGUAUUUAAAGA | |
| AD-2011412 | ususguc(Ada)AfgAfUfUfuuaaagguuuL96 | | asAfsaccUfuUfAfaaauCfuUfgacaascsa | | UGUUGUCAAGAUUUUAAAGGUUU | |
| AD-2011413 | usasuga(Ada)AfaUfUfCfcuacuggacuL96 | | asGfsuccAfgUfAfggaaUfuUfucauascsa | | UGUAUGAAAAUUCCUACUGGACA | |
| AD-2011414 | cscsucu(Uda)UfgUfGfGfcaaaacaucuL96 | | asGfsaugUfuUfUfgccaCfaAfagaggsusg | | CACCUCUUUGUGGCAAAACAUCU | |
| AD-2011415 | csasguc(Ada)GfaAfGfAfgacucguguuL96 | | asAfscacGfaGfUfcucuUfcUfgacugscsa | | UGCAGUCAGAAGAGACUCGUGUG | |
| AD-2011416 | asasguc(Ada)CfuGfAfAfcaacugaucuL96 | | asGfsaucAfgUfUfguucAfgUfgacuususg | | CAAAGUCACUGAACAACUGAUCG | |
| AD-2011417 | gsgsagc(Uda)UfaUfGfAfuuuuccaucuL96 | | asGfsaugGfaAfAfaucaUfaAfgcuccsasg | | CUGGAGCUUAUGAUUUUCCAUCA | |
| AD-2011418 | gsusgcg(Gda)AfuCfGfUfuucgcaacuuL96 | | asAfsguuGfcGfAfaacgAfuCfcgcacsusg | | CAGUGCGGAUCGUUUCGCAACUG | |
| AD-2011419 | asasucu(Gda)CfcGfUfCfuuuugaagcuL96 | | asGfscuuCfaAfAfagacGfgCfagauuscsu | | AGAAUCUGCCGUCUUUUGAAGCA | |
| AD-2011420 | usascuu(Cda)UfuUfUfCfccgacuucuuL96 | | asAfsgaaGfuCfGfggaaAfaGfaaguasgsg | | CCUACUUCUUUUCCCGACUUCUU | |
| AD-2011421 | csusacu(Gda)UfaAfUfCfcacaacccuuL96 | | asAfsgggUfuGfUfggauUfaCfaguagsusu | | AACUACUGUAAUCCACAACCCUG | |
| AD-2011422 | ususugu(Uda)CfcAfUfUfcuuuucuuauL96 | | asUfsaagAfaAfAfgaauGfgAfacaaasasg | | CUUUUGUUCCAUUCUUUUCUUAC | |
| AD-2011423 | gsasaga(Uda)GfuGfAfAfagcacgaaauL96 | | asUfsuucGfuGfCfuuucAfcAfucuucsasu | | AUGAAGAUGUGAAAGCACGAAAG | |
| AD-2011424 | csasgua(Ada)AfuAfUfAfuugagccauuL96 | | asAfsuggCfuCfAfauauAfuUfuacugsusa | | UACAGUAAAUAUAUUGAGCCAUG | |
| AD-2011425 | asasugg(Gda)AfaAfGfAfaaacuucucuL96 | | asGfsagaAfgUfUfuucuUfuCfccauususg | | CAAAUGGGAAAGAAAACUUCUCA | |
| AD-2011426 | gsgscag(Ada)AfuGfUfUfcauuuucauuL96 | | asAfsugaAfaAfUfgaacAfuUfcugccsasc | | GUGGCAGAAUGUUCAUUUUCAUC | |
| AD-2011427 | csgsccu(Gda)CfaUfAfGfcauauauuauL96 | | asUfsaauAfuAfUfgcuaUfgCfaggcgsgsc | | GCCGCCUGCAUAGCAUAUAUUAG | |
| AD-2011428 | csusggc(Uda)GfuUfUfUfuccauuuccuL96 | | asGfsgaaAfuGfGfaaaaAfcAfgccagsgsc | | GCCUGGCUGUUUUUCCAUUUCCC | |
| AD-2011429 | asgsgga(Ada)AfuAfAfAfagucuuuuguL96 | | asCfsaaaAfgAfCfuuuuAfuUfucccususu | | AAAGGGAAAUAAAAGUCUUUUGA | |
| AD-2011430 | cscsacc(Cda)UfuUfCfUfggucaucucuL96 | | asGfsagaUfgAfCfcagaAfaGfgguggscsg | | CGCCACCCUUUCUGGUCAUCUCC | |
| AD-2011431 | usgscca(Uda)AfaUfGfGfuaaaggacuuL96 | | asAfsgucCfuUfUfaccaUfuAfuggcasasg | | CUUGCCAUAAUGGUAAAGGACUG | |
| AD-2011432 | csasaac(Uda)GfuGfUfAfaacuggaaauL96 | | asUfsuucCfaGfUfuuacAfcAfguuugsasc | | GUCAAACUGUGUAAACUGGAAAA | |
| AD-2011433 | usasaac(Cda)CfuCfAfUfguacaucuguL96 | | asCfsagaUfgUfAfcaugAfgGfguuuasgsa | | UCUAAACCCUCAUGUACAUCUGG | |
| AD-2011434 | ususuug(Uda)GfaAfGfCfagcuauacguL96 | | asCfsguaUfaGfCfugcuUfcAfcaaaasgsg | | CCUUUUGUGAAGCAGCUAUACGU | |
| AD-2011435 | asusgga(Gda)AfuAfUfCfauugauaaauL96 | | asUfsuuaUfcAfAfugauAfuCfuccaususc | | GAAUGGAGAUAUCAUUGAUAAAU | |
| AD-2011436 | gsusgua(Uda)UfcAfUfCfauugcauucuL96 | | asGfsaauGfcAfAfugauGfaAfuacacsasg | | CUGUGUAUUCAUCAUUGCAUUCC | |
| AD-2011437 | gsasagc(Uda)UfuGfGfGfuaauuuaguuL96 | | asAfscuaAfaUfUfacccAfaAfgcuucsasg | | CUGAAGCUUUGGGUAAUUUAGUG | |
| AD-2011438 | gscsugu(Gda)AfaAfUfUfggcagacuuuL96 | | asAfsaguCfuGfCfcaauUfuCfacagcsusg | | CAGCUGUGAAAUUGGCAGACUUU | |
| AD-2011439 | usasaca(Ada)UfuAfAfAfgugggaugauL96 | | asUfscauCfcCfAfcuuuAfaUfuguuasasu | | AUUAACAAUUAAAGUGGGAUGAU | |
| AD-2011440 | gscsugg(Cda)UfaCfAfAfggaauuucuuL96 | | asAfsgaaAfuUfCfcuugUfaGfccagcsasu | | AUGCUGGCUACAAGGAAUUUCUC | |
| AD-2011441 | usgsuua(Uda)UfaUfUfCfuuugcucacuL96 | | asGfsugaGfcAfAfagaaUfaAfuaacasasu | | AUUGUUAUUAUUCUUUGCUCACG | |
| AD-2011442 | asusaac(Ada)AfuUfUfGfcacuugguguL96 | | asCfsaccAfaGfUfgcaaAfuUfguuausgsu | | ACAUAACAAUUUGCACUUGGUGA | |
| AD-2011443 | csusucc(Gda)CfaCfUfAfagaugugaguL96 | | asCfsucaCfaUfCfuuagUfgCfggaagsasc | | GUCUUCCGCACUAAGAUGUGAGG | |
| AD-2011444 | csuscuc(Ada)UfcUfCfAfccucucuguuL96 | | asAfscagAfgAfGfgugaGfaUfgagagsasa | | UUCUCUCAUCUCACCUCUCUGUG | |
| AD-2011445 | csasccc(Ada)UfgGfAfUfcugucaacguL96 | | asCfsguuGfaCfAfgaucCfaUfgggugscsu | | AGCACCCAUGGAUCUGUCAACGU | |
| AD-2011446 | asusaaa(Ada)UfuCfUfAfcugacuucuuL96 | | asAfsgaaGfuCfAfguagAfaUfuuuaususc | | GAAUAAAAUUCUACUGACUUCUA | |
| AD-2011447 | usgscca(Uda)CfuUfGfAfcaacuaugcuL96 | | asGfscauAfgUfUfgucaAfgAfuggcascsc | | GGUGCCAUCUUGACAACUAUGCU | |
| AD-2011448 | ascsuua(Gda)GfuAfUfCfcuaacuauguL96 | | asCfsauaGfuUfAfggauAfcCfuaaguscsc | | GGACUUAGGUAUCCUAACUAUGU | |
| AD-2011449 | csusgcu(Uda)CfuAfCfUfccuccugcuuL96 | | asAfsgcaGfgAfGfgaguAfgAfagcagsasg | | CUCUGCUUCUACUCCUCCUGCUC | |
| AD-2011450 | usgsagg(Ada)AfaUfUfGfugauuuguuuL96 | | asAfsacaAfaUfCfacaaUfuUfccucascsa | | UGUGAGGAAAUUGUGAUUUGUUC | |
| AD-2011451 | gsascga(Gda)UfaUfCfAfgcuuuucgauL96 | | asUfscgaAfaAfGfcugaUfaCfucgucscsg | | CGGACGAGUAUCAGCUUUUCGAG | |
| AD-2011452 | uscsccu(Cda)UfgAfCfCfcucaguuucuL96 | | asGfsaaaCfuGfAfggguCfaGfagggasasg | | CUUCCCUCUGACCCUCAGUUUCC | |
| AD-2011453 | gscsccu(Uda)UfuGfAfUfaacagaagcuL96 | | asGfscuuCfuGfUfuaucAfaAfagggcsusu | | AAGCCCUUUUGAUAACAGAAGCC | |
| AD-2011454 | asgsaaa(Uda)UfaAfAfUfgguagcaguuL96 | | asAfscugCfuAfCfcauuUfaAfuuucusasu | | AUAGAAAUUAAAUGGUAGCAGUA | |
| AD-2011455 | gsasugg(Ada)UfuUfUfCfaccgauucuuL96 | | asAfsgaaUfcGfGfugaaAfaUfccaucscsc | | GGGAUGGAUUUUCACCGAUUCUA | |
| AD-2011456 | ascsauc(Ada)CfaCfUfUfgcucacauguL96 | | asCfsaugUfgAfGfcaagUfgUfgaugususu | | AAACAUCACACUUGCUCACAUGC | |
| AD-2011457 | uscsuaa(Gda)GfcCfUfGfaaaaccauuuL96 | | asAfsaugGfuUfUfucagGfcCfuuagasusg | | CAUCUAAGGCCUGAAAACCAUUC | |
| AD-2011458 | ususacg(Uda)AfaAfGfAfuccuuaugguL96 | | asCfscauAfaGfGfaucuUfuAfcguaasasa | | UUUUACGUAAAGAUCCUUAUGGA | |
| AD-2011459 | usascag(Uda)GfaAfGfCfugaugccaguL96 | | asCfsuggCfaUfCfagcuUfcAfcuguasgsu | | ACUACAGUGAAGCUGAUGCCAGU | |
| AD-2011460 | asusuug(Cda)UfgAfAfUfugaauuguuuL96 | | asAfsacaAfuUfCfaauuCfaGfcaaaususc | | GAAUUUGCUGAAUUGAAUUGUUU | |
| AD-2011461 | usasagc(Uda)CfuAfGfUfuuggacuuauL96 | | asUfsaagUfcCfAfaacuAfgAfgcuuasasg | | CUUAAGCUCUAGUUUGGACUUAG | |
| AD-2011462 | csusggc(Uda)AfgUfAfGfugugugagauL96 | | asUfscucAfcAfCfacuaCfuAfgccagscsc | | GGCUGGCUAGUAGUGUGUGAGAA | |
| AD-2011463 | asusgug(Ada)UfgCfAfUfcaucuuaucuL96 | | asGfsauaAfgAfUfgaugCfaUfcacausasu | | AUAUGUGAUGCAUCAUCUUAUCA | |
| AD-2011464 | cscsuac(Ada)UfgUfAfAfugcauauguuL96 | | asAfscauAfuGfCfauuaCfaUfguaggsasc | | GUCCUACAUGUAAUGCAUAUGUG | |
| AD-2011465 | csasgca(Gda)CfcAfAfGfaguuuguuguL96 | | asCfsaacAfaAfCfucuuGfgCfugcugsasg | | CUCAGCAGCCAAGAGUUUGUUGA | |
| AD-2011466 | uscscaa(Uda)CfcAfGfCfcuucacauguL96 | | asCfsaugUfgAfAfggcuGfgAfuuggasgsg | | CCUCCAAUCCAGCCUUCACAUGG | |
| AD-2011467 | ascscaa(Cda)AfgUfAfCfccaucaagcuL96 | | asGfscuuGfaUfGfgguaCfuGfuuggusgsa | | UCACCAACAGUACCCAUCAAGCC | |
| AD-2011468 | csusgcu(Ada)GfgGfAfUfcaucagaaauL96 | | asUfsuucUfgAfUfgaucCfcUfagcagsasa | | UUCUGCUAGGGAUCAUCAGAAAC | |
| AD-2011469 | gsgsuuu(Gda)CfuAfCfCfacauaaagcuL96 | | asGfscuuUfaUfGfugguAfgCfaaaccsasa | | UUGGUUUGCUACCACAUAAAGCC | |
| AD-2011470 | asgsugu(Ada)CfaGfCfAfucaugcuccuL96 | | asGfsgagCfaUfGfaugcUfgUfacacusgsa | | UCAGUGUACAGCAUCAUGCUCCA | |
| AD-2011471 | usgsgcu(Uda)CfgAfCfCfacaaccugcuL96 | | asGfscagGfuUfGfugguCfgAfagccasusc | | GAUGGCUUCGACCACAACCUGCA | |
| AD-2011472 | cscsagu(Cda)AfuUfGfCfauucagcaguL96 | | asCfsugcUfgAfAfugcaAfuGfacuggscsa | | UGCCAGUCAUUGCAUUCAGCAGA | |
| AD-2011473 | csusucc(Ada)UfgAfUfGfcacagacaguL96 | | asCfsuguCfuGfUfgcauCfaUfggaagscsa | | UGCUUCCAUGAUGCACAGACAGG | |
| AD-2011474 | csasgga(Gda)GfaUfAfCfcaacuugauuL96 | | asAfsucaAfgUfUfgguaUfcCfuccugsgsc | | GCCAGGAGGAUACCAACUUGAUA | |
| AD-2011475 | usgsaug(Gda)AfaAfCfAfaggagucaauL96 | | asUfsugaCfuCfCfuuguUfuCfcaucasgsg | | CCUGAUGGAAACAAGGAGUCAAC | |
| AD-2011476 | asasgca(Ada)GfaAfUfCfaguugguuuuL96 | | asAfsaacCfaAfCfugauUfcUfugcuuscsu | | AGAAGCAAGAAUCAGUUGGUUUG | |
| AD-2011477 | csasacu(Gda)CfuUfGfCfcacucguccuL96 | | asGfsgacGfaGfUfggcaAfgCfaguugscsg | | CGCAACUGCUUGCCACUCGUCCC | |
| AD-2011478 | gsusguu(Gda)AfaGfUfAfuuacuguaguL96 | | asCfsuacAfgUfAfauacUfuCfaacacscsa | | UGGUGUUGAAGUAUUACUGUAGA | |
| AD-2011479 | ususacu(Gda)UfuGfGfCfaaaacaauauL96 | | asUfsauuGfuUfUfugccAfaCfaguaasusu | | AAUUACUGUUGGCAAAACAAUAG | |
| AD-2011480 | csasgug(Uda)GfuCfCfUfacucuggucuL96 | | asGfsaccAfgAfGfuaggAfcAfcacugscsc | | GGCAGUGUGUCCUACUCUGGUCU | |
| AD-2011481 | asgsaaa(Cda)CfaGfAfUfggaguaaaguL96 | | asCfsuuuAfcUfCfcaucUfgGfuuucususc | | GAAGAAACCAGAUGGAGUAAAGA | |
| AD-2011482 | gscsucc(Ada)CfaGfCfAfaaccuuccuuL96 | | asAfsggaAfgGfUfuugcUfgUfggagcsasu | | AUGCUCCACAGCAAACCUUCCUA | |
| AD-2011483 | gsascuu(Uda)GfaAfGfCfcuacacaaauL96 | | asUfsuugUfgUfAfggcuUfcAfaagucscsc | | GGGACUUUGAAGCCUACACAAAA | |

TABLE 43
Unmodified Sense and Antisense Strand Sequences of CAMK2D dsRNA Agents Comprising a GalNAc Conjugate
Targeting Ligand

| | | SEQ | Range in | | | SEQ | Range in | |
|---|---|---|---|---|---|---|---|---|
| Duplex | Sense Strand Sequence | ID | NM_001321571.2 | | Antisense Strand Sequence | ID | NM_001321571.2 | |
| Name | 5′ to 3′ | NO. | Start | End | 5′ to 3′ | NO. | Start | End |
| AD-2005899 | GUGCGGAUCGUUUCGCAACUU | | 278 | 298 | AAGUUGCGAAACGAUCCGCACUG | | 276 | 298 |
| AD-2005914 | CAACUGCUUGCCACUCGUCCU | | 293 | 313 | AGGACGAGUGGCAAGCAGUUGCG | | 291 | 313 |
| AD-2005989 | CUGGCUGUUUUUCCAUUUCCU | | 318 | 338 | AGGAAAUGGAAAAACAGCCAGGC | | 316 | 338 |
| AD-2006091 | CCACCCUUUCUGGUCAUCUCU | | 481 | 501 | AGAGAUGACCAGAAAGGGUGGCG | | 479 | 501 |
| AD-2006275 | UGGCUUCGACCACAACCUGCU | | 672 | 692 | AGCAGGUUGUGGUCGAAGCCAUC | | 670 | 692 |
| AD-2006307 | GACGAGUAUCAGCUUUUCGAU | | 704 | 724 | AUCGAAAAGCUGAUACUCGUCCG | | 702 | 724 |
| AD-2006395 | UAUGAAAAUUCCUACUGGACU | | 763 | 783 | AGUCCAGUAGGAAUUUUCAUACA | | 761 | 783 |
| AD-2006473 | GCUGCCAAAAUUAUCAACACU | | 791 | 811 | AGUGUUGAUAAUUUUGGCAGCAU | | 789 | 811 |
| AD-2006501 | CUGCUAGGGAUCAUCAGAAAU | | 822 | 842 | AUUUCUGAUGAUCCCUAGCAGAA | | 820 | 842 |
| AD-2006588 | AAUCUGCCGUCUUUUGAAGCU | | 859 | 879 | AGCUUCAAAAGACGGCAGAUUCU | | 857 | 879 |
| AD-2006610 | CCUAAUAUUGUGCGACUUCAU | | 881 | 901 | AUGAAGUCGCACAAUAUUAGGGU | | 879 | 901 |
| AD-2006710 | UUGGUGUUUGAUUUAGUUACU | | 932 | 952 | AGUAACUAAAUCAAACACCAAGU | | 930 | 952 |
| AD-2006870 | UACAGUGAAGCUGAUGCCAGU | | 992 | 1012 | ACUGGCAUCAGCUUCACUGUAGU | | 990 | 1012 |
| AD-2006886 | CCAGUCAUUGCAUUCAGCAGU | | 1008 | 1028 | ACUGCUGAAUGCAAUGACUGGCA | | 1006 | 1028 |
| AD-2007012 | GCCUGAGAAUUUGCUUUUAGU | | 1084 | 1104 | ACUAAAAGCAAAUUCUCAGGCUU | | 1082 | 1104 |
| AD-2007079 | GCUGUGAAAUUGGCAGACUUU | | 1124 | 1144 | AAAGUCUGCCAAUUUCACAGCUG | | 1122 | 1144 |
| AD-2007144 | UCUUUCUCCAGAAGUUUUACU | | 1210 | 1230 | AGUAAAACUUCUGGAGAAAGAUA | | 1208 | 1230 |
| AD-2007160 | UUACGUAAAGAUCCUUAUGGU | | 1226 | 1246 | ACCAUAAGGAUCUUUACGUAAAA | | 1224 | 1246 |
| AD-2007211 | AUUCUCUAUAUUCUACUUGUU | | 1277 | 1297 | AACAAGUAGAAUAUAGAGAAUGA | | 1275 | 1297 |
| AD-2007238 | CCAACACAGACUCUAUCAGCU | | 1324 | 1344 | AGCUGAUAGAGUCUGUGUUGGUC | | 1322 | 1344 |
| AD-2007269 | GGAGCUUAUGAUUUUCCAUCU | | 1355 | 1375 | AGAUGGAAAAUCAUAAGCUCCAG | | 1353 | 1375 |
| AD-2007325 | CCUCAUCAAUAAAAUGCUUAU | | 1411 | 1431 | AUAAGCAUUUUAUUGAUGAGGUC | | 1409 | 1431 |
| AD-2007389 | CACCCAUGGAUCUGUCAACGU | | 1475 | 1495 | ACGUUGACAGAUCCAUGGGUGCU | | 1473 | 1495 |
| AD-2007404 | CAACGUUCUACUGUUGCUUCU | | 1490 | 1510 | AGAAGCAACAGUAGAACGUUGAC | | 1488 | 1510 |
| AD-2007420 | CUUCCAUGAUGCACAGACAGU | | 1506 | 1526 | ACUGUCUGUGCAUCAUGGAAGCA | | 1504 | 1526 |
| AD-2007451 | CUGCUUGAAGAAAUUUAAUGU | | 1537 | 1557 | ACAUUAAAUUUCUUCAAGCAGUC | | 1535 | 1557 |
| AD-2007468 | AUGCUAGAAGAAAACUAAAGU | | 1554 | 1574 | ACUUUAGUUUUCUUCUAGCAUUA | | 1552 | 1574 |
| AD-2007490 | UGCCAUCUUGACAACUAUGCU | | 1576 | 1596 | AGCAUAGUUGUCAAGAUGGCACC | | 1574 | 1596 |
| AD-2007508 | GCUGGCUACAAGGAAUUUCUU | | 1594 | 1614 | AAGAAAUUCCUUGUAGCCAGCAU | | 1592 | 1614 |
| AD-2007528 | CAGCAGCCAAGAGUUUGUUGU | | 1614 | 1634 | ACAACAAACUCUUGGCUGCUGAG | | 1612 | 1634 |
| AD-2007549 | AGAAACCAGAUGGAGUAAAGU | | 1635 | 1655 | ACUUUACUCCAUCUGGUUUCUUC | | 1633 | 1655 |
| AD-2007568 | GAUAAACAACAAAGCCAACGU | | 1654 | 1674 | ACGUUGGCUUUGUUGUUUAUCUU | | 1652 | 1674 |
| AD-2007585 | CUACUGUAAUCCACAACCCUU | | 1725 | 1745 | AAGGGUUGUGGAUUACAGUAGUU | | 1723 | 1745 |
| AD-2007604 | UGAUGGAAACAAGGAGUCAAU | | 1744 | 1764 | AUUGACUCCUUGUUUCCAUCAGG | | 1742 | 1764 |
| AD-2007627 | AGAGUUCAAAUACAACAAUUU | | 1767 | 1787 | AAAUUGUUGUAUUUGAACUCUCA | | 1765 | 1787 |
| AD-2007653 | GAAGAUGUGAAAGCACGAAAU | | 1793 | 1813 | AUUUCGUGCUUUCACAUCUUCAU | | 1791 | 1813 |
| AD-2007668 | CGAAAGCAAGAGAUUAUCAAU | | 1808 | 1828 | AUUGAUAAUCUCUUGCUUUCGUG | | 1806 | 1828 |
| AD-2007687 | AAGUCACUGAACAACUGAUCU | | 1827 | 1847 | AGAUCAGUUGUUCAGUGACUUUG | | 1825 | 1847 |
| AD-2007702 | UGAUCGAAGCUAUCAACAAUU | | 1842 | 1862 | AAUUGUUGAUAGCUUCGAUCAGU | | 1840 | 1862 |
| AD-2007705 | GACUUUGAAGCCUACACAAAU | | 1865 | 1885 | AUUUGUGUAGGCUUCAAAGUCCC | | 1863 | 1885 |
| AD-2007743 | UACUGCUUUUGAACCUGAAGU | | 1903 | 1923 | ACUUCAGGUUCAAAAGCAGUAAG | | 1901 | 1923 |
| AD-2007759 | GAAGCUUUGGGUAAUUUAGUU | | 1919 | 1939 | AACUAAAUUACCCAAAGCUUCAG | | 1917 | 1939 |
| AD-2007785 | GAUGGAUUUUCACCGAUUCUU | | 1945 | 1965 | AAGAAUCGGUGAAAAUCCAUCCC | | 1943 | 1965 |
| AD-2007801 | UUCUACUUUGAAAAUGCUUUU | | 1961 | 1981 | AAAAGCAUUUUCAAAGUAGAAUC | | 1959 | 1981 |
| AD-2007818 | UUUGUCCAAAAGCAAUAAACU | | 1978 | 1998 | AGUUUAUUGCUUUUGGACAAAGC | | 1976 | 1998 |
| AD-2007841 | UCCACACUAUUAUUCUAAACU | | 2001 | 2021 | AGUUUAGAAUAAUAGUGUGGAUU | | 1999 | 2021 |
| AD-2007856 | UAAACCCUCAUGUACAUCUGU | | 2016 | 2036 | ACAGAUGUACAUGAGGGUUUAGA | | 2014 | 2036 |
| AD-2007870 | CGCCUGCAUAGCAUAUAUUAU | | 2050 | 2070 | AUAAUAUAUGCUAUGCAGGCGGC | | 2048 | 2070 |
| AD-2007934 | CAGUCAGAAGAGACUCGUGUU | | 2114 | 2134 | AACACGAGUCUCUUCUGACUGCA | | 2112 | 2134 |
| AD-2007974 | GGCAGAAUGUUCAUUUUCAUU | | 2157 | 2177 | AAUGAAAAUGAACAUUCUGCCAC | | 2155 | 2177 |
| AD-2007985 | ACCAACAGUACCCAUCAAGCU | | 2188 | 2208 | AGCUUGAUGGGUACUGUUGGUGA | | 2186 | 2208 |
| AD-2008019 | AAUGGGAAAGAAAACUUCUCU | | 2222 | 2242 | AGAGAAGUUUUCUUUCCCAUUUG | | 2220 | 2242 |
| AD-2008047 | CCUCUUUGUGGCAAAACAUCU | | 2250 | 2270 | AGAUGUUUUGCCACAAAGAGGUG | | 2248 | 2270 |
| AD-2008065 | UCUAAGGCCUGAAAACCAUUU | | 2268 | 2288 | AAAUGGUUUUCAGGCCUUAGAUG | | 2266 | 2288 |
| AD-2008093 | GGUCUUCUAAAUUUCAACAGU | | 2296 | 2316 | ACUGUUGAAAUUUAGAAGACCCA | | 2294 | 2316 |
| AD-2008116 | CACUUCUGCAUUCUCUGUUCU | | 2319 | 2339 | AGAACAGAGAAUGCAGAAGUGGC | | 2317 | 2339 |
| AD-2008170 | CCUCUUCAUGCAUGUUUCUGU | | 2378 | 2398 | ACAGAAACAUGCAUGAAGAGGAG | | 2376 | 2398 |
| AD-2008211 | CCUACAUGUAAUGCAUAUGUU | | 2419 | 2439 | AACAUAUGCAUUACAUGUAGGAC | | 2417 | 2439 |
| AD-2008227 | AUGUGAUGCAUCAUCUUAUCU | | 2435 | 2455 | AGAUAAGAUGAUGCAUCACAUAU | | 2433 | 2455 |
| AD-2008242 | UAUCAUAUAUUCCUUCCUAUU | | 2451 | 2471 | AAUAGGAAGGAAUAUAUGAUAAG | | 2449 | 2471 |
| AD-2008257 | CCUAUACAUUGUUUACACUUU | | 2466 | 2486 | AAAGUGUAAACAAUGUAUAGGAA | | 2464 | 2486 |
| AD-2008273 | CCACACAAACUUAAAUUACUU | | 2502 | 2522 | AAGUAAUUUAAGUUUGUGUGGAA | | 2500 | 2522 |
| AD-2008288 | UUACUGUUGGCAAAACAAUAU | | 2517 | 2537 | AUAUUGUUUUGCCAACAGUAAUU | | 2515 | 2537 |
| AD-2008310 | CCAAGUACAACUCUUCAUCAU | | 2573 | 2593 | AUGAUGAAGAGUUGUACUUGGAA | | 2571 | 2593 |
| AD-2008325 | CAUCAAGUUUCUCUGUUAAUU | | 2588 | 2608 | AAUUAACAGAGAAACUUGAUGAA | | 2586 | 2608 |
| AD-2008357 | CAGACUUAAGAACUAUUGUUU | | 2620 | 2640 | AAACAAUAGUUCUUAAGUCUGUU | | 2618 | 2640 |
| AD-2008375 | UUCUCUGAAUGACAGUUGUAU | | 2638 | 2658 | AUACAACUGUCAUUCAGAGAACA | | 2636 | 2658 |
| AD-2008402 | GAACUCUUUGCUGUUAAUCUU | | 2678 | 2698 | AAGAUUAACAGCAAAGAGUUCUA | | 2676 | 2698 |
| AD-2008453 | CUGGUUAAAAUGGAUGAUUUU | | 2772 | 2792 | AAAAUCAUCCAUUUUAACCAGGA | | 2770 | 2792 |
| AD-2008474 | UUGAAAGUUUUGCUGAUUAAU | | 2796 | 2816 | AUUAAUCAGCAAAACUUUCAAUG | | 2794 | 2816 |
| AD-2008491 | UAACAAUUAAAGUGGGAUGAU | | 2813 | 2833 | AUCAUCCCACUUUAAUUGUUAAU | | 2811 | 2833 |
| AD-2008516 | GGGCAAAAUCACUUAUGAAAU | | 2838 | 2858 | AUUUCAUAAGUGAUUUUGCCCAC | | 2836 | 2858 |
| AD-2008540 | AAGCAAGAAUCAGUUGGUUUU | | 2862 | 2882 | AAAACCAACUGAUUCUUGCUUCU | | 2860 | 2882 |
| AD-2008555 | GGUUUGCUACCACAUAAAGCU | | 2877 | 2897 | AGCUUUAUGUGGUAGCAAACCAA | | 2875 | 2897 |
| AD-2008575 | CAUGCUGUUUUUGGUCAAACU | | 2897 | 2917 | AGUUUGACCAAAAACAGCAUGGC | | 2895 | 2917 |
| AD-2008590 | CAAACUGUGUAAACUGGAAAU | | 2912 | 2932 | AUUUCCAGUUUACACAGUUUGAC | | 2910 | 2932 |
| AD-2008623 | UCUGAGUUUAAUCACUUUAGU | | 2945 | 2965 | ACUAAAGUGAUUAAACUCAGAAA | | 2943 | 2965 |
| AD-2008639 | UUAGGAUAUAUUCACAUUGUU | | 2961 | 2981 | AACAAUGUGAAUAUAUCCUAAAG | | 2959 | 2981 |
| AD-2008666 | AUUUGCUGAAUUGAAUUGUUU | | 2989 | 3009 | AAACAAUUCAAUUCAGCAAAUUC | | 2987 | 3009 |
| AD-2008687 | UUUCUCAAAUCUGUGAUCUCU | | 3013 | 3033 | AGAGAUCACAGAUUUGAGAAAGA | | 3011 | 3033 |
| AD-2008701 | AUCUCUUUUCUUUAUCCUGUU | | 3028 | 3048 | AACAGGAUAAAGAAAAGAGAUCA | | 3026 | 3048 |
| AD-2008708 | CCUUUCGUUUGCUUUCUUAUU | | 3057 | 3077 | AAUAAGAAAGCAAACGAAAGGAA | | 3055 | 3077 |
| AD-2008714 | UUUGUUCCAUUCUUUUCUUAU | | 3083 | 3103 | AUAAGAAAAGAAUGGAACAAAAG | | 3081 | 3103 |
| AD-2008720 | CUGGCUAGUAGUGUGUGAGAU | | 3132 | 3152 | AUCUCACACACUACUAGCCAGCC | | 3130 | 3152 |
| AD-2008746 | AGUGAAAUUUGCAUAAUGAAU | | 3162 | 3182 | AUUCAUUAUGCAAAUUUCACUUC | | 3160 | 3182 |
| AD-2008767 | AGGGAAAUAAAAGUCUUUUGU | | 3188 | 3208 | ACAAAAGACUUUUAUUUCCCUUU | | 3186 | 3208 |
| AD-2008799 | UAGCACUUUUGAUCAUCUUCU | | 3221 | 3241 | AGAAGAUGAUCAAAAGUGCUAGU | | 3219 | 3241 |
| AD-2008835 | UUGUCAAGAUUUUAAAGGUUU | | 3257 | 3277 | AAACCUUUAAAAUCUUGACAACA | | 3255 | 3277 |
| AD-2008844 | GGUUUAUAAUUCUGCUUAAGU | | 3273 | 3293 | ACUUAAGCAGAAUUAUAAACCUU | | 3271 | 3293 |
| AD-2008860 | UAAGCUCUAGUUUGGACUUAU | | 3289 | 3309 | AUAAGUCCAAACUAGAGCUUAAG | | 3287 | 3309 |
| AD-2008875 | ACUUAGGUAUCCUAACUAUGU | | 3304 | 3324 | ACAUAGUUAGGAUACCUAAGUCC | | 3302 | 3324 |
| AD-2008899 | AGGUAUUUGCAUUGUUUAAAU | | 3328 | 3348 | AUUUAAACAAUGCAAAUACCUCC | | 3326 | 3348 |
| AD-2008921 | AGGAUAAAAGCAAGUUCCUCU | | 3351 | 3371 | AGAGGAACUUGCUUUUAUCCUAA | | 3349 | 3371 |
| AD-2008941 | CUGUGACUGCAACGUCUUACU | | 3371 | 3391 | AGUAAGACGUUGCAGUCACAGGA | | 3369 | 3391 |
| AD-2008977 | CAGGAGGAUACCAACUUGAUU | | 3407 | 3427 | AAUCAAGUUGGUAUCCUCCUGGC | | 3405 | 3427 |
| AD-2009021 | UCAUCACUAGCUAGUUUUCUU | | 3492 | 3512 | AAGAAAACUAGCUAGUGAUGAUG | | 3490 | 3512 |
| AD-2009053 | GCUUACAAAUGUUUGCCAUUU | | 3524 | 3544 | AAAUGGCAAACAUUUGUAAGCCU | | 3522 | 3544 |
| AD-2009078 | AAGUGUUUUGAACUUGAUCUU | | 3549 | 3569 | AAGAUCAAGUUCAAAACACUUAU | | 3547 | 3569 |
| AD-2009108 | UGCUUUUUUAGCUUCUCUCUU | | 3579 | 3599 | AAGAGAGAAGCUAAAAAAGCACA | | 3577 | 3599 |
| AD-2009122 | UCUCUUGAAUCAGAGUAUCAU | | 3594 | 3614 | AUGAUACUCUGAUUCAAGAGAGA | | 3592 | 3614 |
| AD-2009147 | UUCCUCCAAGGAGUUAGAAUU | | 3619 | 3639 | AAUUCUAACUCCUUGGAGGAAGA | | 3617 | 3639 |
| AD-2009162 | AGAAUUUCCCAGUUUAAAACU | | 3634 | 3654 | AGUUUUAAACUGGGAAAUUCUAA | | 3632 | 3654 |
| AD-2009197 | GGUUUUCUUUGUGCUUCUCAU | | 3672 | 3692 | AUGAGAAGCACAAAGAAAACCUA | | 3670 | 3692 |
| AD-2009211 | CUCAUUUUUCCUUUGUUGAUU | | 3688 | 3708 | AAUCAACAAAGGAAAAAUGAGAA | | 3686 | 3708 |
| AD-2009238 | CUGUGAUUUUUGUUCUCUUCU | | 3715 | 3735 | AGAAGAGAACAAAAAUCACAGGA | | 3713 | 3735 |
| AD-2009253 | CUUCCCUGAAGUGCUUUACAU | | 3731 | 3751 | AUGUAAAGCACUUCAGGGAAGAG | | 3729 | 3751 |
| AD-2009285 | UCCAUCAUUGUUAUUUUAACU | | 3763 | 3783 | AGUUAAAAUAACAAUGAUGGAGA | | 3761 | 3783 |
| AD-2009302 | AUAGUAAUUCACAGUCCUCAU | | 3784 | 3804 | AUGAGGACUGUGAAUUACUAUCG | | 3782 | 3804 |
| AD-2009317 | CCUCAGAAGCCUAUUUUUAAU | | 3799 | 3819 | AUUAAAAAUAGGCUUCUGAGGAC | | 3797 | 3819 |
| AD-2009344 | ACAACCCUUCCUCUUUUCUCU | | 3853 | 3873 | AGAGAAAAGAGGAAGGGUUGUUU | | 3851 | 3873 |
| AD-2009354 | CUCUCAUCUCACCUCUCUGUU | | 3870 | 3890 | AACAGAGAGGUGAGAUGAGAGAA | | 3868 | 3890 |
| AD-2009369 | UCUGUGUUGAUUACUAAUCAU | | 3885 | 3905 | AUGAUUAGUAAUCAACACAGAGA | | 3883 | 3905 |
| AD-2009386 | UCUUAGAUAUUAUUGCUAGUU | | 3905 | 3925 | AACUAGCAAUAAUAUCUAAGAUG | | 3903 | 3925 |
| AD-2009425 | UGAAGCUUUUCUGAUAAUUAU | | 3944 | 3964 | AUAAUUAUCAGAAAAGCUUCAAC | | 3942 | 3964 |
| AD-2009437 | CAGUAAAUAUAUUGAGCCAUU | | 4007 | 4027 | AAUGGCUCAAUAUAUUUACUGUA | | 4005 | 4027 |
| AD-2009490 | UGGCCUCAUUUUUCUCUUUUU | | 4060 | 4080 | AAAAAGAGAAAAAUGAGGCCAUU | | 4058 | 4080 |
| AD-2009505 | UUUUGUGAAGCAGCUAUACGU | | 4095 | 4115 | ACGUAUAGCUGCUUCACAAAAGG | | 4093 | 4115 |
| AD-2009525 | UGGCAUACAUGUAUUUAAAGU | | 4115 | 4135 | ACUUUAAAUACAUGUAUGCCACG | | 4113 | 4135 |
| AD-2009537 | UGUAGAGUGUUUUUUUUACAU | | 4148 | 4168 | AUGUAAAAAAAACACUCUACAUC | | 4146 | 4168 |
| AD-2009546 | UACACUUUUAACUUAGCAUGU | | 4164 | 4184 | ACAUGCUAAGUUAAAAGUGUAAA | | 4162 | 4184 |
| AD-2009568 | GUGUUGAAGUAUUACUGUAGU | | 4186 | 4206 | ACUACAGUAAUACUUCAACACCA | | 4184 | 4206 |
| AD-2009584 | GUAGAUCAAGUUUGUCUUCCU | | 4202 | 4222 | AGGAAGACAAACUUGAUCUACAG | | 4200 | 4222 |
| AD-2009599 | CUUCCGCACUAAGAUGUGAGU | | 4217 | 4237 | ACUCACAUCUUAGUGCGGAAGAC | | 4215 | 4237 |
| AD-2009615 | UGAGGAAAUUGUGAUUUGUUU | | 4233 | 4253 | AAACAAAUCACAAUUUCCUCACA | | 4231 | 4253 |
| AD-2009643 | CACAAAUGAAUUACACAUUUU | | 4261 | 4281 | AAAAUGUGUAAUUCAUUUGUGGU | | 4259 | 4281 |
| AD-2009655 | UUCUAUCAUUUUGAAACACUU | | 4287 | 4307 | AAGUGUUUCAAAAUGAUAGAAGA | | 4285 | 4307 |
| AD-2009690 | ACACUGUAUAUAUUUCUUGCU | | 4322 | 4342 | AGCAAGAAAUAUAUACAGUGUCC | | 4320 | 4342 |
| AD-2009707 | UGCCAUAAUGGUAAAGGACUU | | 4339 | 4359 | AAGUCCUUUACCAUUAUGGCAAG | | 4337 | 4359 |
| AD-2009722 | GACUGAUUGAUAUAUUUAAGU | | 4355 | 4375 | ACUUAAAUAUAUCAAUCAGUCCU | | 4353 | 4375 |
| AD-2009755 | CGUCCAUCUUUAUUUCUUCAU | | 4407 | 4427 | AUGAAGAAAUAAAGAUGGACGCA | | 4405 | 4427 |
| AD-2009823 | CAGUGUGUCCUACUCUGGUCU | | 4475 | 4495 | AGACCAGAGUAGGACACACUGCC | | 4473 | 4495 |
| AD-2009839 | GGUCUCAUUUAGUACAUAACU | | 4491 | 4511 | AGUUAUGUACUAAAUGAGACCAG | | 4489 | 4511 |
| AD-2009852 | AUAACAAUUUGCACUUGGUGU | | 4506 | 4526 | ACACCAAGUGCAAAUUGUUAUGU | | 4504 | 4526 |
| AD-2009881 | AGUUAAUUGUUCUCUGUGAGU | | 4535 | 4555 | ACUCACAGAGAACAAUUAACUUG | | 4533 | 4555 |
| AD-2009901 | CAAAACAAUGGUCUCUUCUGU | | 4555 | 4575 | ACAGAAGAGACCAUUGUUUUGCU | | 4553 | 4575 |
| AD-2009931 | GCUGAGAACAAUAUAGUUAAU | | 4585 | 4605 | AUUAACUAUAUUGUUCUCAGCAA | | 4583 | 4605 |
| AD-2009959 | CUCCUAAAAGCUUCUCUAAAU | | 4614 | 4634 | AUUUAGAGAAGCUUUUAGGAGUC | | 4612 | 4634 |
| AD-2009987 | UCCAAUCCAGCCUUCACAUGU | | 4642 | 4662 | ACAUGUGAAGGCUGGAUUGGAGG | | 4640 | 4662 |
| AD-2010007 | UUUUUUAAUACGAACCUGUCU | | 4678 | 4698 | AGACAGGUUCGUAUUAAAAAAAA | | 4676 | 4698 |
| AD-2010032 | AACACUUUGAUGUUAUCAUUU | | 4703 | 4723 | AAAUGAUAACAUCAAAGUGUUAC | | 4701 | 4723 |
| AD-2010054 | CAGCUUGAACUUGAGCAUACU | | 4762 | 4782 | AGUAUGCUCAAGUUCAAGCUGGG | | 4760 | 4782 |
| AD-2010084 | AGCUUCUUUUGAUUUGCUAAU | | 4792 | 4812 | AUUAGCAAAUCAAAAGAAGCUGA | | 4790 | 4812 |
| AD-2010106 | ACAUCACACUUGCUCACAUGU | | 4814 | 4834 | ACAUGUGAGCAAGUGUGAUGUUU | | 4812 | 4834 |
| AD-2010123 | AUGCCUGUUUAUGCUGUUCAU | | 4831 | 4851 | AUGAACAGCAUAAACAGGCAUGU | | 4829 | 4851 |
| AD-2010142 | AUGUUGUUUAUGUUUCUUACU | | 4850 | 4870 | AGUAAGAAACAUAAACAACAUGA | | 4848 | 4870 |
| AD-2010158 | UUACCUAGAAUAAAUAGUCUU | | 4866 | 4886 | AAGACUAUUUAUUCUAGGUAAGA | | 4864 | 4886 |
| AD-2010165 | UACUUCUUUUCCCGACUUCUU | | 4893 | 4913 | AAGAAGUCGGGAAAAGAAGUAGG | | 4891 | 4913 |
| AD-2010184 | UUACUUUUUCCUAAGAUUCAU | | 4912 | 4932 | AUGAAUCUUAGGAAAAAGUAAGA | | 4910 | 4932 |
| AD-2010203 | AGUGUACAGCAUCAUGCUCCU | | 4931 | 4951 | AGGAGCAUGAUGCUGUACACUGA | | 4929 | 4951 |
| AD-2010218 | GCUCCACAGCAAACCUUCCUU | | 4946 | 4966 | AAGGAAGGUUUGCUGUGGAGCAU | | 4944 | 4966 |
| AD-2010262 | CCUCUCAAAACCUACAUAAUU | | 4990 | 5010 | AAUUAUGUAGGUUUUGAGAGGGA | | 4988 | 5010 |
| AD-2010280 | AUUGUAUUUACCUCUCCUGUU | | 5012 | 5032 | AACAGGAGAGGUAAAUACAAUCU | | 5010 | 5032 |
| AD-2010301 | AACCACAUUGUUUUGAAAAUU | | 5033 | 5053 | AAUUUUCAAAACAAUGUGGUUGA | | 5031 | 5053 |
| AD-2010309 | UUUCUAUUUGUGUCUCCUCUU | | 5056 | 5076 | AAGAGGAGACACAAAUAGAAAUA | | 5054 | 5076 |
| AD-2010325 | CUCUACUGCAGUAUAAUGUCU | | 5072 | 5092 | AGACAUUAUACUGCAGUAGAGGA | | 5070 | 5092 |
| AD-2010361 | GUGUAUUCAUCAUUGCAUUCU | | 5108 | 5128 | AGAAUGCAAUGAUGAAUACACAG | | 5106 | 5128 |
| AD-2010404 | AUGGAGAUAUCAUUGAUAAAU | | 5151 | 5171 | AUUUAUCAAUGAUAUCUCCAUUC | | 5149 | 5171 |
| AD-2010441 | GCCCUUUUGAUAACAGAAGCU | | 5192 | 5212 | AGCUUCUGUUAUCAAAAGGGCUU | | 5190 | 5212 |
| AD-2010454 | CAGAUAGUCCUUGUUUUAAUU | | 5225 | 5245 | AAUUAAAACAAGGACUAUCUGGG | | 5223 | 5245 |
| AD-2010486 | CACCACUGUCUUGAUGCUCUU | | 5257 | 5277 | AAGAGCAUCAAGACAGUGGUGAG | | 5255 | 5277 |
| AD-2010503 | UCUGAGCAAGUUACCUCUUCU | | 5274 | 5294 | AGAAGAGGUAACUUGCUCAGAGC | | 5272 | 5294 |
| AD-2010521 | UCCCUCUGACCCUCAGUUUCU | | 5292 | 5312 | AGAAACUGAGGGUCAGAGGGAAG | | 5290 | 5312 |
| AD-2010535 | GUUUCCAUAUUUGUAAAAUGU | | 5307 | 5327 | ACAUUUUACAAAUAUGGAAACUG | | 5305 | 5327 |
| AD-2010545 | AUGAGAAUAAACAUACCAACU | | 5324 | 5344 | AGUUGGUAUGUUUAUUCUCAUUU | | 5322 | 5344 |
| AD-2010559 | AACUUAAUAAAGAUAUUGUGU | | 5341 | 5361 | ACACAAUAUCUUUAUUAAGUUGG | | 5339 | 5361 |
| AD-2010598 | GACUAGAAUGAUAUUUGAUAU | | 5381 | 5401 | AUAUCAAAUAUCAUUCUAGUCAC | | 5379 | 5401 |
| AD-2010609 | AGAAAUUAAAUGGUAGCAGUU | | 5400 | 5420 | AACUGCUACCAUUUAAUUUCUAU | | 5398 | 5420 |
| AD-2010624 | GCAGUAUAACUAUUCUGAUCU | | 5415 | 5435 | AGAUCAGAAUAGUUAUACUGCUA | | 5413 | 5435 |
| AD-2010643 | CACUGACAUUAAUAUUCCUAU | | 5434 | 5454 | AUAGGAAUAUUAAUGUCAGUGAU | | 5432 | 5454 |
| AD-2010655 | UGUUAUUAUUCUUUGCUCACU | | 5455 | 5475 | AGUGAGCAAAGAAUAAUAACAAU | | 5453 | 5475 |
| AD-2010683 | ACAACUCUUGUUUUGCUGUUU | | 5483 | 5503 | AAACAGCAAAACAAGAGUUGUAU | | 5481 | 5503 |
| AD-2010708 | GCCCUCUUUAUGUAGGUUUAU | | 5508 | 5528 | AUAAACCUACAUAAAGAGGGCAG | | 5506 | 5528 |
| AD-2010745 | AUACUCGGACUCAAAUGUCUU | | 5545 | 5565 | AAGACAUUUGAGUCCGAGUAUAU | | 5543 | 5565 |
| AD-2010782 | ACACCAAAUGAAGUGGUCAUU | | 5582 | 5602 | AAUGACCACUUCAUUUGGUGUCU | | 5580 | 5602 |
| AD-2010830 | GUAGCAAAUCAGUAUAUUCUU | | 5631 | 5651 | AAGAAUAUACUGAUUUGCUACUA | | 5629 | 5651 |
| AD-2010855 | CAAGGAAUAUUAAUCUUCACU | | 5662 | 5682 | AGUGAAGAUUAAUAUUCCUUGAA | | 5660 | 5682 |
| AD-2010871 | UCACCCAAAUUUUGAAUUUUU | | 5678 | 5698 | AAAAAUUCAAAAUUUGGGUGAAG | | 5676 | 5698 |
| AD-2010911 | GAGUGAUUUCAUUGAAUAAAU | | 5746 | 5766 | AUUUAUUCAAUGAAAUCACUCGA | | 5744 | 5766 |
| AD-2010919 | AUAAAAUUCUACUGACUUCUU | | 5761 | 5781 | AAGAAGUCAGUAGAAUUUUAUUC | | 5759 | 5781 |

TABLE 44
Modified Sense and Antisense Strand Sequences of CAMK2D dsRNA Agents Comprising a GalNAc Conjugate Targeting Ligand

| | | SEQ | | SEQ | | SEQ |
|---|---|---|---|---|---|---|
| Duplex | | ID | | ID | | ID |
| Name | Sense Strand Sequence 5′ to 3′ | NO. | Antisense Strand Sequence 5′ to 3′ | NO. | mRNA target sequence | NO. |
| AD-2005876 | csusgcuuCfuAfCfUfccuccugcuuL96 | | asAfsgcaGfgAfGfgaguAfgAfagcagsasg | | CUCUGCUUCUACUCCUCCUGCUC | |
| AD-2005899 | gsusgcggAfuCfGfUfuucgcaacuuL96 | | asAfsguuGfcGfAfaacgAfuCfcgcacsusg | | CAGUGCGGAUCGUUUCGCAACUG | |
| AD-2005914 | csasacugCfuUfGfCfcacucguccuL96 | | asGfsgacGfaGfUfggcaAfgCfaguugscsg | | CGCAACUGCUUGCCACUCGUCCC | |
| AD-2005989 | csusggcuGfuUfUfUfuccauuuccuL96 | | asGfsgaaAfuGfGfaaaaAfcAfgccagsgsc | | GCCUGGCUGUUUUUCCAUUUCCC | |
| AD-2006091 | cscsacccUfuUfCfUfggucaucucuL96 | | asGfsagaUfgAfCfcagaAfaGfgguggscsg | | CGCCACCCUUUCUGGUCAUCUCC | |
| AD-2006275 | usgsgcuuCfgAfCfCfacaaccugcuL96 | | asGfscagGfuUfGfugguCfgAfagccasusc | | GAUGGCUUCGACCACAACCUGCA | |
| AD-2006307 | gsascgagUfaUfCfAfgcuuuucgauL96 | | asUfscgaAfaAfGfcugaUfaCfucgucscsg | | CGGACGAGUAUCAGCUUUUCGAG | |
| AD-2006395 | usasugaaAfaUfUfCfcuacuggacuL96 | | asGfsuccAfgUfAfggaaUfuUfucauascsa | | UGUAUGAAAAUUCCUACUGGACA | |
| AD-2006473 | gscsugccAfaAfAfUfuaucaacacuL96 | | asGfsuguUfgAfUfaauuUfuGfgcagcsasu | | AUGCUGCCAAAAUUAUCAACACC | |
| AD-2006501 | csusgcuaGfgGfAfUfcaucagaaauL96 | | asUfsuucUfgAfUfgaucCfcUfagcagsasa | | UUCUGCUAGGGAUCAUCAGAAAC | |
| AD-2006588 | asasucugCfcGfUfCfuuuugaagcuL96 | | asGfscuuCfaAfAfagacGfgCfagauuscsu | | AGAAUCUGCCGUCUUUUGAAGCA | |
| AD-2006610 | cscsuaauAfuUfGfUfgcgacuucauL96 | | asUfsgaaGfuCfGfcacaAfuAfuuaggsgsu | | ACCCUAAUAUUGUGCGACUUCAU | |
| AD-2006710 | ususggugUfuUfGfAfuuuaguuacuL96 | | asGfsuaaCfuAfAfaucaAfaCfaccaasgsu | | ACUUGGUGUUUGAUUUAGUUACU | |
| AD-2006870 | usascaguGfaAfGfCfugaugccaguL96 | | asCfsuggCfaUfCfagcuUfcAfcuguasgsu | | ACUACAGUGAAGCUGAUGCCAGU | |
| AD-2006886 | cscsagucAfuUfGfCfauucagcaguL96 | | asCfsugcUfgAfAfugcaAfuGfacuggscsa | | UGCCAGUCAUUGCAUUCAGCAGA | |
| AD-2007012 | gscscugaGfaAfUfUfugcuuuuaguL96 | | asCfsuaaAfaGfCfaaauUfcUfcaggcsusu | | AAGCCUGAGAAUUUGCUUUUAGC | |
| AD-2007079 | gscsugugAfaAfUfUfggcagacuuuL96 | | asAfsaguCfuGfCfcaauUfuCfacagcsusg | | CAGCUGUGAAAUUGGCAGACUUU | |
| AD-2007144 | uscsuuucUfcCfAfGfaaguuuuacuL96 | | asGfsuaaAfaCfUfucugGfaGfaaagasusa | | UAUCUUUCUCCAGAAGUUUUACG | |
| AD-2007160 | ususacguAfaAfGfAfuccuuaugguL96 | | asCfscauAfaGfGfaucuUfuAfcguaasasa | | UUUUACGUAAAGAUCCUUAUGGA | |
| AD-2007211 | asusucucUfaUfAfUfucuacuuguuL96 | | asAfscaaGfuAfGfaauaUfaGfagaausgsa | | UCAUUCUCUAUAUUCUACUUGUG | |
| AD-2007238 | cscsaacaCfaGfAfCfucuaucagcuL96 | | asGfscugAfuAfGfagucUfgUfguuggsusc | | GACCAACACAGACUCUAUCAGCA | |
| AD-2007269 | gsgsagcuUfaUfGfAfuuuuccaucuL96 | | asGfsaugGfaAfAfaucaUfaAfgcuccsasg | | CUGGAGCUUAUGAUUUUCCAUCA | |
| AD-2007325 | cscsucauCfaAfUfAfaaaugcuuauL96 | | asUfsaagCfaUfUfuuauUfgAfugaggsusc | | GACCUCAUCAAUAAAAUGCUUAC | |
| AD-2007389 | csascccaUfgGfAfUfcugucaacguL96 | | asCfsguuGfaCfAfgaucCfaUfgggugscsu | | AGCACCCAUGGAUCUGUCAACGU | |
| AD-2007404 | csasacguUfcUfAfCfuguugcuucuL96 | | asGfsaagCfaAfCfaguaGfaAfcguugsasc | | GUCAACGUUCUACUGUUGCUUCC | |
| AD-2007420 | csusuccaUfgAfUfGfcacagacaguL96 | | asCfsuguCfuGfUfgcauCfaUfggaagscsa | | UGCUUCCAUGAUGCACAGACAGG | |
| AD-2007451 | csusgcuuGfaAfGfAfaauuuaauguL96 | | asCfsauuAfaAfUfuucuUfcAfagcagsusc | | GACUGCUUGAAGAAAUUUAAUGC | |
| AD-2007468 | asusgcuaGfaAfGfAfaaacuaaaguL96 | | asCfsuuuAfgUfUfuucuUfcUfagcaususa | | UAAUGCUAGAAGAAAACUAAAGG | |
| AD-2007490 | usgsccauCfuUfGfAfcaacuaugcuL96 | | asGfscauAfgUfUfgucaAfgAfuggcascsc | | GGUGCCAUCUUGACAACUAUGCU | |
| AD-2007508 | gscsuggcUfaCfAfAfggaauuucuuL96 | | asAfsgaaAfuUfCfcuugUfaGfccagcsasu | | AUGCUGGCUACAAGGAAUUUCUC | |
| AD-2007528 | csasgcagCfcAfAfGfaguuuguuguL96 | | asCfsaacAfaAfCfucuuGfgCfugcugsasg | | CUCAGCAGCCAAGAGUUUGUUGA | |
| AD-2007549 | asgsaaacCfaGfAfUfggaguaaaguL96 | | asCfsuuuAfcUfCfcaucUfgGfuuucususc | | GAAGAAACCAGAUGGAGUAAAGA | |
| AD-2007568 | gsasuaaaCfaAfCfAfaagccaacguL96 | | asCfsguuGfgCfUfuuguUfgUfuuaucsusu | | AAGAUAAACAACAAAGCCAACGU | |
| AD-2007585 | csusacugUfaAfUfCfcacaacccuuL96 | | asAfsgggUfuGfUfggauUfaCfaguagsusu | | AACUACUGUAAUCCACAACCCUG | |
| AD-2007604 | usgsauggAfaAfCfAfaggagucaauL96 | | asUfsugaCfuCfCfuuguUfuCfcaucasgsg | | CCUGAUGGAAACAAGGAGUCAAC | |
| AD-2007627 | asgsaguuCfaAfAfUfacaacaauuuL96 | | asAfsauuGfuUfGfuauuUfgAfacucuscsa | | UGAGAGUUCAAAUACAACAAUUG | |
| AD-2007653 | gsasagauGfuGfAfAfagcacgaaauL96 | | asUfsuucGfuGfCfuuucAfcAfucuucsasu | | AUGAAGAUGUGAAAGCACGAAAG | |
| AD-2007668 | csgsaaagCfaAfGfAfgauuaucaauL96 | | asUfsugaUfaAfUfcucuUfgCfuuucgsusg | | CACGAAAGCAAGAGAUUAUCAAA | |
| AD-2007687 | asasgucaCfuGfAfAfcaacugaucuL96 | | asGfsaucAfgUfUfguucAfgUfgacuususg | | CAAAGUCACUGAACAACUGAUCG | |
| AD-2007702 | usgsaucgAfaGfCfUfaucaacaauuL96 | | asAfsuugUfuGfAfuagcUfuCfgaucasgsu | | ACUGAUCGAAGCUAUCAACAAUG | |
| AD-2007705 | gsascuuuGfaAfGfCfcuacacaaauL96 | | asUfsuugUfgUfAfggcuUfcAfaagucscsc | | GGGACUUUGAAGCCUACACAAAA | |
| AD-2007743 | usascugcUfuUfUfGfaaccugaaguL96 | | asCfsuucAfgGfUfucaaAfaGfcaguasasg | | CUUACUGCUUUUGAACCUGAAGC | |
| AD-2007759 | gsasagcuUfuGfGfGfuaauuuaguuL96 | | asAfscuaAfaUfUfacccAfaAfgcuucsasg | | CUGAAGCUUUGGGUAAUUUAGUG | |
| AD-2007785 | gsasuggaUfuUfUfCfaccgauucuuL96 | | asAfsgaaUfcGfGfugaaAfaUfccaucscsc | | GGGAUGGAUUUUCACCGAUUCUA | |
| AD-2007801 | ususcuacUfuUfGfAfaaaugcuuuuL96 | | asAfsaagCfaUfUfuucaAfaGfuagaasusc | | GAUUCUACUUUGAAAAUGCUUUG | |
| AD-2007818 | ususugucCfaAfAfAfgcaauaaacuL96 | | asGfsuuuAfuUfGfcuuuUfgGfacaaasgsc | | GCUUUGUCCAAAAGCAAUAAACC | |
| AD-2007841 | uscscacaCfuAfUfUfauucuaaacuL96 | | asGfsuuuAfgAfAfuaauAfgUfguggasusu | | AAUCCACACUAUUAUUCUAAACC | |
| AD-2007856 | usasaaccCfuCfAfUfguacaucuguL96 | | asCfsagaUfgUfAfcaugAfgGfguuuasgsa | | UCUAAACCCUCAUGUACAUCUGG | |
| AD-2007870 | csgsccugCfaUfAfGfcauauauuauL96 | | asUfsaauAfuAfUfgcuaUfgCfaggcgsgsc | | GCCGCCUGCAUAGCAUAUAUUAG | |
| AD-2007934 | csasgucaGfaAfGfAfgacucguguuL96 | | asAfscacGfaGfUfcucuUfcUfgacugscsa | | UGCAGUCAGAAGAGACUCGUGUG | |
| AD-2007974 | gsgscagaAfuGfUfUfcauuuucauuL96 | | asAfsugaAfaAfUfgaacAfuUfcugccsasc | | GUGGCAGAAUGUUCAUUUUCAUC | |
| AD-2007985 | ascscaacAfgUfAfCfccaucaagcuL96 | | asGfscuuGfaUfGfgguaCfuGfuuggusgsa | | UCACCAACAGUACCCAUCAAGCC | |
| AD-2008019 | asasugggAfaAfGfAfaaacuucucuL96 | | asGfsagaAfgUfUfuucuUfuCfccauususg | | CAAAUGGGAAAGAAAACUUCUCA | |
| AD-2008047 | cscsucuuUfgUfGfGfcaaaacaucuL96 | | asGfsaugUfuUfUfgccaCfaAfagaggsusg | | CACCUCUUUGUGGCAAAACAUCU | |
| AD-2008065 | uscsuaagGfcCfUfGfaaaaccauuuL96 | | asAfsaugGfuUfUfucagGfcCfuuagasusg | | CAUCUAAGGCCUGAAAACCAUUC | |
| AD-2008093 | gsgsucuuCfuAfAfAfuuucaacaguL96 | | asCfsuguUfgAfAfauuuAfgAfagaccscsa | | UGGGUCUUCUAAAUUUCAACAGU | |
| AD-2008116 | csascuucUfgCfAfUfucucuguucuL96 | | asGfsaacAfgAfGfaaugCfaGfaagugsgsc | | GCCACUUCUGCAUUCUCUGUUCU | |
| AD-2008170 | cscsucuuCfaUfGfCfauguuucuguL96 | | asCfsagaAfaCfAfugcaUfgAfagaggsasg | | CUCCUCUUCAUGCAUGUUUCUGA | |
| AD-2008211 | cscsuacaUfgUfAfAfugcauauguuL96 | | asAfscauAfuGfCfauuaCfaUfguaggsasc | | GUCCUACAUGUAAUGCAUAUGUG | |
| AD-2008227 | asusgugaUfgCfAfUfcaucuuaucuL96 | | asGfsauaAfgAfUfgaugCfaUfcacausasu | | AUAUGUGAUGCAUCAUCUUAUCA | |
| AD-2008242 | usasucauAfuAfUfUfccuuccuauuL96 | | asAfsuagGfaAfGfgaauAfuAfugauasasg | | CUUAUCAUAUAUUCCUUCCUAUA | |
| AD-2008257 | cscsuauaCfaUfUfGfuuuacacuuuL96 | | asAfsaguGfuAfAfacaaUfgUfauaggsasa | | UUCCUAUACAUUGUUUACACUUC | |
| AD-2008273 | cscsacacAfaAfCfUfuaaauuacuuL96 | | asAfsguaAfuUfUfaaguUfuGfuguggsasa | | UUCCACACAAACUUAAAUUACUG | |
| AD-2008288 | ususacugUfuGfGfCfaaaacaauauL96 | | asUfsauuGfuUfUfugccAfaCfaguaasusu | | AAUUACUGUUGGCAAAACAAUAG | |
| AD-2008310 | cscsaaguAfcAfAfCfucuucaucauL96 | | asUfsgauGfaAfGfaguuGfuAfcuuggsasa | | UUCCAAGUACAACUCUUCAUCAA | |
| AD-2008325 | csasucaaGfuUfUfCfucuguuaauuL96 | | asAfsuuaAfcAfGfagaaAfcUfugaugsasa | | UUCAUCAAGUUUCUCUGUUAAUG | |
| AD-2008357 | csasgacuUfaAfGfAfacuauuguuuL96 | | asAfsacaAfuAfGfuucuUfaAfgucugsusu | | AACAGACUUAAGAACUAUUGUUC | |
| AD-2008375 | ususcucuGfaAfUfGfacaguuguauL96 | | asUfsacaAfcUfGfucauUfcAfgagaascsa | | UGUUCUCUGAAUGACAGUUGUAA | |
| AD-2008402 | gsasacucUfuUfGfCfuguuaaucuuL96 | | asAfsgauUfaAfCfagcaAfaGfaguucsusa | | UAGAACUCUUUGCUGUUAAUCUG | |
| AD-2008453 | csusgguuAfaAfAfUfggaugauuuuL96 | | asAfsaauCfaUfCfcauuUfuAfaccagsgsa | | UCCUGGUUAAAAUGGAUGAUUUU | |
| AD-2008474 | ususgaaaGfuUfUfUfgcugauuaauL96 | | asUfsuaaUfcAfGfcaaaAfcUfuucaasusg | | CAUUGAAAGUUUUGCUGAUUAAC | |
| AD-2008491 | usasacaaUfuAfAfAfgugggaugauL96 | | asUfscauCfcCfAfcuuuAfaUfuguuasasu | | AUUAACAAUUAAAGUGGGAUGAU | |
| AD-2008516 | gsgsgcaaAfaUfCfAfcuuaugaaauL96 | | asUfsuucAfuAfAfgugaUfuUfugcccsasc | | GUGGGCAAAAUCACUUAUGAAAG | |
| AD-2008540 | asasgcaaGfaAfUfCfaguugguuuuL96 | | asAfsaacCfaAfCfugauUfcUfugcuuscsu | | AGAAGCAAGAAUCAGUUGGUUUG | |
| AD-2008555 | gsgsuuugCfuAfCfCfacauaaagcuL96 | | asGfscuuUfaUfGfugguAfgCfaaaccsasa | | UUGGUUUGCUACCACAUAAAGCC | |
| AD-2008575 | csasugcuGfuUfUfUfuggucaaacuL96 | | asGfsuuuGfaCfCfaaaaAfcAfgcaugsgsc | | GCCAUGCUGUUUUUGGUCAAACU | |
| AD-2008590 | csasaacuGfuGfUfAfaacuggaaauL96 | | asUfsuucCfaGfUfuuacAfcAfguuugsasc | | GUCAAACUGUGUAAACUGGAAAA | |
| AD-2008623 | uscsugagUfuUfAfAfucacuuuaguL96 | | asCfsuaaAfgUfGfauuaAfaCfucagasasa | | UUUCUGAGUUUAAUCACUUUAGG | |
| AD-2008639 | ususaggaUfaUfAfUfucacauuguuL96 | | asAfscaaUfgUfGfaauaUfaUfccuaasasg | | CUUUAGGAUAUAUUCACAUUGUU | |
| AD-2008666 | asusuugcUfgAfAfUfugaauuguuuL96 | | asAfsacaAfuUfCfaauuCfaGfcaaaususc | | GAAUUUGCUGAAUUGAAUUGUUU | |
| AD-2008687 | ususucucAfaAfUfCfugugaucucuL96 | | asGfsagaUfcAfCfagauUfuGfagaaasgsa | | UCUUUCUCAAAUCUGUGAUCUCU | |
| AD-2008701 | asuscucuUfuUfCfUfuuauccuguuL96 | | asAfscagGfaUfAfaagaAfaAfgagauscsa | | UGAUCUCUUUUCUUUAUCCUGUU | |
| AD-2008708 | cscsuuucGfuUfUfGfcuuucuuauuL96 | | asAfsuaaGfaAfAfgcaaAfcGfaaaggsasa | | UUCCUUUCGUUUGCUUUCUUAUU | |
| AD-2008714 | ususuguuCfcAfUfUfcuuuucuuauL96 | | asUfsaagAfaAfAfgaauGfgAfacaaasasg | | CUUUUGUUCCAUUCUUUUCUUAC | |
| AD-2008720 | csusggcuAfgUfAfGfugugugagauL96 | | asUfscucAfcAfCfacuaCfuAfgccagscsc | | GGCUGGCUAGUAGUGUGUGAGAA | |
| AD-2008746 | asgsugaaAfuUfUfGfcauaaugaauL96 | | asUfsucaUfuAfUfgcaaAfuUfucacususc | | GAAGUGAAAUUUGCAUAAUGAAU | |
| AD-2008767 | asgsggaaAfuAfAfAfagucuuuuguL96 | | asCfsaaaAfgAfCfuuuuAfuUfucccususu | | AAAGGGAAAUAAAAGUCUUUUGA | |
| AD-2008799 | usasgcacUfuUfUfGfaucaucuucuL96 | | asGfsaagAfuGfAfucaaAfaGfugcuasgsu | | ACUAGCACUUUUGAUCAUCUUCA | |
| AD-2008835 | ususgucaAfgAfUfUfuuaaagguuuL96 | | asAfsaccUfuUfAfaaauCfuUfgacaascsa | | UGUUGUCAAGAUUUUAAAGGUUU | |
| AD-2008844 | gsgsuuuaUfaAfUfUfcugcuuaaguL96 | | asCfsuuaAfgCfAfgaauUfaUfaaaccsusu | | AAGGUUUAUAAUUCUGCUUAAGC | |
| AD-2008860 | usasagcuCfuAfGfUfuuggacuuauL96 | | asUfsaagUfcCfAfaacuAfgAfgcuuasasg | | CUUAAGCUCUAGUUUGGACUUAG | |
| AD-2008875 | ascsuuagGfuAfUfCfcuaacuauguL96 | | asCfsauaGfuUfAfggauAfcCfuaaguscsc | | GGACUUAGGUAUCCUAACUAUGU | |
| AD-2008899 | asgsguauUfuGfCfAfuuguuuaaauL96 | | asUfsuuaAfaCfAfaugcAfaAfuaccuscsc | | GGAGGUAUUUGCAUUGUUUAAAG | |
| AD-2008921 | asgsgauaAfaAfGfCfaaguuccucuL96 | | asGfsaggAfaCfUfugcuUfuUfauccusasa | | UUAGGAUAAAAGCAAGUUCCUCC | |
| AD-2008941 | csusgugaCfuGfCfAfacgucuuacuL96 | | asGfsuaaGfaCfGfuugcAfgUfcacagsgsa | | UCCUGUGACUGCAACGUCUUACU | |
| AD-2008977 | csasggagGfaUfAfCfcaacuugauuL96 | | asAfsucaAfgUfUfgguaUfcCfuccugsgsc | | GCCAGGAGGAUACCAACUUGAUA | |
| AD-2009021 | uscsaucaCfuAfGfCfuaguuuucuuL96 | | asAfsgaaAfaCfUfagcuAfgUfgaugasusg | | CAUCAUCACUAGCUAGUUUUCUA | |
| AD-2009053 | gscsuuacAfaAfUfGfuuugccauuuL96 | | asAfsaugGfcAfAfacauUfuGfuaagcscsu | | AGGCUUACAAAUGUUUGCCAUUC | |
| AD-2009078 | asasguguUfuUfGfAfacuugaucuuL96 | | asAfsgauCfaAfGfuucaAfaAfcacuusasu | | AUAAGUGUUUUGAACUUGAUCUU | |
| AD-2009108 | usgscuuuUfuUfAfGfcuucucucuuL96 | | asAfsgagAfgAfAfgcuaAfaAfaagcascsa | | UGUGCUUUUUUAGCUUCUCUCUU | |
| AD-2009122 | uscsucuuGfaAfUfCfagaguaucauL96 | | asUfsgauAfcUfCfugauUfcAfagagasgsa | | UCUCUCUUGAAUCAGAGUAUCAU | |
| AD-2009147 | ususccucCfaAfGfGfaguuagaauuL96 | | asAfsuucUfaAfCfuccuUfgGfaggaasgsa | | UCUUCCUCCAAGGAGUUAGAAUU | |
| AD-2009162 | asgsaauuUfcCfCfAfguuuaaaacuL96 | | asGfsuuuUfaAfAfcuggGfaAfauucusasa | | UUAGAAUUUCCCAGUUUAAAACA | |
| AD-2009197 | gsgsuuuuCfuUfUfGfugcuucucauL96 | | asUfsgagAfaGfCfacaaAfgAfaaaccsusa | | UAGGUUUUCUUUGUGCUUCUCAU | |
| AD-2009211 | csuscauuUfuUfCfCfuuuguugauuL96 | | asAfsucaAfcAfAfaggaAfaAfaugagsasa | | UUCUCAUUUUUCCUUUGUUGAUU | |
| AD-2009238 | csusgugaUfuUfUfUfguucucuucuL96 | | asGfsaagAfgAfAfcaaaAfaUfcacagsgsa | | UCCUGUGAUUUUUGUUCUCUUCC | |
| AD-2009253 | csusucccUfgAfAfGfugcuuuacauL96 | | asUfsguaAfaGfCfacuuCfaGfggaagsasg | | CUCUUCCCUGAAGUGCUUUACAG | |
| AD-2009285 | uscscaucAfuUfGfUfuauuuuaacuL96 | | asGfsuuaAfaAfUfaacaAfuGfauggasgsa | | UCUCCAUCAUUGUUAUUUUAACG | |
| AD-2009302 | asusaguaAfuUfCfAfcaguccucauL96 | | asUfsgagGfaCfUfgugaAfuUfacuauscsg | | CGAUAGUAAUUCACAGUCCUCAG | |
| AD-2009317 | cscsucagAfaGfCfCfuauuuuuaauL96 | | asUfsuaaAfaAfUfaggcUfuCfugaggsasc | | GUCCUCAGAAGCCUAUUUUUAAA | |
| AD-2009344 | ascsaaccCfuUfCfCfucuuuucucuL96 | | asGfsagaAfaAfGfaggaAfgGfguugususu | | AAACAACCCUUCCUCUUUUCUCU | |
| AD-2009354 | csuscucaUfcUfCfAfccucucuguuL96 | | asAfscagAfgAfGfgugaGfaUfgagagsasa | | UUCUCUCAUCUCACCUCUCUGUG | |
| AD-2009369 | uscsugugUfuGfAfUfuacuaaucauL96 | | asUfsgauUfaGfUfaaucAfaCfacagasgsa | | UCUCUGUGUUGAUUACUAAUCAU | |
| AD-2009386 | uscsuuagAfuAfUfUfauugcuaguuL96 | | asAfscuaGfcAfAfuaauAfuCfuaagasusg | | CAUCUUAGAUAUUAUUGCUAGUG | |
| AD-2009425 | usgsaagcUfuUfUfCfugauaauuauL96 | | asUfsaauUfaUfCfagaaAfaGfcuucasasc | | GUUGAAGCUUUUCUGAUAAUUAU | |
| AD-2009437 | csasguaaAfuAfUfAfuugagccauuL96 | | asAfsuggCfuCfAfauauAfuUfuacugsusa | | UACAGUAAAUAUAUUGAGCCAUG | |
| AD-2009490 | usgsgccuCfaUfUfUfuucucuuuuuL96 | | asAfsaaaGfaGfAfaaaaUfgAfggccasusu | | AAUGGCCUCAUUUUUCUCUUUUU | |
| AD-2009505 | ususuuguGfaAfGfCfagcuauacguL96 | | asCfsguaUfaGfCfugcuUfcAfcaaaasgsg | | CCUUUUGUGAAGCAGCUAUACGU | |
| AD-2009525 | usgsgcauAfcAfUfGfuauuuaaaguL96 | | asCfsuuuAfaAfUfacauGfuAfugccascsg | | CGUGGCAUACAUGUAUUUAAAGA | |
| AD-2009537 | usgsuagaGfuGfUfUfuuuuuuacauL96 | | asUfsguaAfaAfAfaaacAfcUfcuacasusc | | GAUGUAGAGUGUUUUUUUUACAC | |
| AD-2009546 | usascacuUfuUfAfAfcuuagcauguL96 | | asCfsaugCfuAfAfguuaAfaAfguguasasa | | UUUACACUUUUAACUUAGCAUGU | |
| AD-2009568 | gsusguugAfaGfUfAfuuacuguaguL96 | | asCfsuacAfgUfAfauacUfuCfaacacscsa | | UGGUGUUGAAGUAUUACUGUAGA | |
| AD-2009584 | gsusagauCfaAfGfUfuugucuuccuL96 | | asGfsgaaGfaCfAfaacuUfgAfucuacsasg | | CUGUAGAUCAAGUUUGUCUUCCG | |
| AD-2009599 | csusuccgCfaCfUfAfagaugugaguL96 | | asCfsucaCfaUfCfuuagUfgCfggaagsasc | | GUCUUCCGCACUAAGAUGUGAGG | |
| AD-2009615 | usgsaggaAfaUfUfGfugauuuguuuL96 | | asAfsacaAfaUfCfacaaUfuUfccucascsa | | UGUGAGGAAAUUGUGAUUUGUUC | |
| AD-2009643 | csascaaaUfgAfAfUfuacacauuuuL96 | | asAfsaauGfuGfUfaauuCfaUfuugugsgsu | | ACCACAAAUGAAUUACACAUUUA | |
| AD-2009655 | ususcuauCfaUfUfUfugaaacacuuL96 | | asAfsgugUfuUfCfaaaaUfgAfuagaasgsa | | UCUUCUAUCAUUUUGAAACACUG | |
| AD-2009690 | ascsacugUfaUfAfUfauuucuugcuL96 | | asGfscaaGfaAfAfuauaUfaCfaguguscsc | | GGACACUGUAUAUAUUUCUUGCC | |
| AD-2009707 | usgsccauAfaUfGfGfuaaaggacuuL96 | | asAfsgucCfuUfUfaccaUfuAfuggcasasg | | CUUGCCAUAAUGGUAAAGGACUG | |
| AD-2009722 | gsascugaUfuGfAfUfauauuuaaguL96 | | asCfsuuaAfaUfAfuaucAfaUfcagucscsu | | AGGACUGAUUGAUAUAUUUAAGA | |
| AD-2009755 | csgsuccaUfcUfUfUfauuucuucauL96 | | asUfsgaaGfaAfAfuaaaGfaUfggacgscsa | | UGCGUCCAUCUUUAUUUCUUCAG | |
| AD-2009823 | csasguguGfuCfCfUfacucuggucuL96 | | asGfsaccAfgAfGfuaggAfcAfcacugscsc | | GGCAGUGUGUCCUACUCUGGUCU | |
| AD-2009839 | gsgsucucAfuUfUfAfguacauaacuL96 | | asGfsuuaUfgUfAfcuaaAfuGfagaccsasg | | CUGGUCUCAUUUAGUACAUAACA | |
| AD-2009852 | asusaacaAfuUfUfGfcacuugguguL96 | | asCfsaccAfaGfUfgcaaAfuUfguuausgsu | | ACAUAACAAUUUGCACUUGGUGA | |
| AD-2009881 | asgsuuaaUfuGfUfUfcucugugaguL96 | | asCfsucaCfaGfAfgaacAfaUfuaacususg | | CAAGUUAAUUGUUCUCUGUGAGC | |
| AD-2009901 | csasaaacAfaUfGfGfucucuucuguL96 | | asCfsagaAfgAfGfaccaUfuGfuuuugscsu | | AGCAAAACAAUGGUCUCUUCUGG | |
| AD-2009931 | gscsugagAfaCfAfAfuauaguuaauL96 | | asUfsuaaCfuAfUfauugUfuCfucagcsasa | | UUGCUGAGAACAAUAUAGUUAAC | |
| AD-2009959 | csusccuaAfaAfGfCfuucucuaaauL96 | | asUfsuuaGfaGfAfagcuUfuUfaggagsusc | | GACUCCUAAAAGCUUCUCUAAAC | |
| AD-2009987 | uscscaauCfcAfGfCfcuucacauguL96 | | asCfsaugUfgAfAfggcuGfgAfuuggasgsg | | CCUCCAAUCCAGCCUUCACAUGG | |
| AD-2010007 | ususuuuuAfaUfAfCfgaaccugucuL96 | | asGfsacaGfgUfUfcguaUfuAfaaaaasasa | | UUUUUUUUAAUACGAACCUGUCC | |
| AD-2010032 | asascacuUfuGfAfUfguuaucauuuL96 | | asAfsaugAfuAfAfcaucAfaAfguguusasc | | GUAACACUUUGAUGUUAUCAUUU | |
| AD-2010054 | csasgcuuGfaAfCfUfugagcauacuL96 | | asGfsuauGfcUfCfaaguUfcAfagcugsgsg | | CCCAGCUUGAACUUGAGCAUACA | |
| AD-2010084 | asgscuucUfuUfUfGfauuugcuaauL96 | | asUfsuagCfaAfAfucaaAfaGfaagcusgsa | | UCAGCUUCUUUUGAUUUGCUAAA | |
| AD-2010106 | ascsaucaCfaCfUfUfgcucacauguL96 | | asCfsaugUfgAfGfcaagUfgUfgaugususu | | AAACAUCACACUUGCUCACAUGC | |
| AD-2010123 | asusgccuGfuUfUfAfugcuguucauL96 | | asUfsgaaCfaGfCfauaaAfcAfggcausgsu | | ACAUGCCUGUUUAUGCUGUUCAU | |
| AD-2010142 | asusguugUfuUfAfUfguuucuuacuL96 | | asGfsuaaGfaAfAfcauaAfaCfaacausgsa | | UCAUGUUGUUUAUGUUUCUUACC | |
| AD-2010158 | ususaccuAfgAfAfUfaaauagucuuL96 | | asAfsgacUfaUfUfuauuCfuAfgguaasgsa | | UCUUACCUAGAAUAAAUAGUCUC | |
| AD-2010165 | usascuucUfuUfUfCfccgacuucuuL96 | | asAfsgaaGfuCfGfggaaAfaGfaaguasgsg | | CCUACUUCUUUUCCCGACUUCUU | |
| AD-2010184 | ususacuuUfuUfCfCfuaagauucauL96 | | asUfsgaaUfcUfUfaggaAfaAfaguaasgsa | | UCUUACUUUUUCCUAAGAUUCAG | |
| AD-2010203 | asgsuguaCfaGfCfAfucaugcuccuL96 | | asGfsgagCfaUfGfaugcUfgUfacacusgsa | | UCAGUGUACAGCAUCAUGCUCCA | |
| AD-2010218 | gscsuccaCfaGfCfAfaaccuuccuuL96 | | asAfsggaAfgGfUfuugcUfgUfggagcsasu | | AUGCUCCACAGCAAACCUUCCUA | |
| AD-2010262 | cscsucucAfaAfAfCfcuacauaauuL96 | | asAfsuuaUfgUfAfgguuUfuGfagaggsgsa | | UCCCUCUCAAAACCUACAUAAUA | |
| AD-2010280 | asusuguaUfuUfAfCfcucuccuguuL96 | | asAfscagGfaGfAfgguaAfaUfacaauscsu | | AGAUUGUAUUUACCUCUCCUGUC | |
| AD-2010301 | asasccacAfuUfGfUfuuugaaaauuL96 | | asAfsuuuUfcAfAfaacaAfuGfugguusgsa | | UCAACCACAUUGUUUUGAAAAUA | |
| AD-2010309 | ususucuaUfuUfGfUfgucuccucuuL96 | | asAfsgagGfaGfAfcacaAfaUfagaaasusa | | UAUUUCUAUUUGUGUCUCCUCUA | |
| AD-2010325 | csuscuacUfgCfAfGfuauaaugucuL96 | | asGfsacaUfuAfUfacugCfaGfuagagsgsa | | UCCUCUACUGCAGUAUAAUGUCU | |
| AD-2010361 | gsusguauUfcAfUfCfauugcauucuL96 | | asGfsaauGfcAfAfugauGfaAfuacacsasg | | CUGUGUAUUCAUCAUUGCAUUCC | |
| AD-2010404 | asusggagAfuAfUfCfauugauaaauL96 | | asUfsuuaUfcAfAfugauAfuCfuccaususc | | GAAUGGAGAUAUCAUUGAUAAAU | |
| AD-2010441 | gscsccuuUfuGfAfUfaacagaagcuL96 | | asGfscuuCfuGfUfuaucAfaAfagggcsusu | | AAGCCCUUUUGAUAACAGAAGCC | |
| AD-2010454 | csasgauaGfuCfCfUfuguuuuaauuL96 | | asAfsuuaAfaAfCfaaggAfcUfaucugsgsg | | CCCAGAUAGUCCUUGUUUUAAUG | |
| AD-2010486 | csasccacUfgUfCfUfugaugcucuuL96 | | asAfsgagCfaUfCfaagaCfaGfuggugsasg | | CUCACCACUGUCUUGAUGCUCUG | |
| AD-2010503 | uscsugagCfaAfGfUfuaccucuucuL96 | | asGfsaagAfgGfUfaacuUfgCfucagasgsc | | GCUCUGAGCAAGUUACCUCUUCC | |
| AD-2010521 | uscsccucUfgAfCfCfcucaguuucuL96 | | asGfsaaaCfuGfAfggguCfaGfagggasasg | | CUUCCCUCUGACCCUCAGUUUCC | |
| AD-2010535 | gsusuuccAfuAfUfUfuguaaaauguL96 | | asCfsauuUfuAfCfaaauAfuGfgaaacsusg | | CAGUUUCCAUAUUUGUAAAAUGA | |
| AD-2010545 | asusgagaAfuAfAfAfcauaccaacuL96 | | asGfsuugGfuAfUfguuuAfuUfcucaususu | | AAAUGAGAAUAAACAUACCAACU | |
| AD-2010559 | asascuuaAfuAfAfAfgauauuguguL96 | | asCfsacaAfuAfUfcuuuAfuUfaaguusgsg | | CCAACUUAAUAAAGAUAUUGUGA | |
| AD-2010598 | gsascuagAfaUfGfAfuauuugauauL96 | | asUfsaucAfaAfUfaucaUfuCfuagucsasc | | GUGACUAGAAUGAUAUUUGAUAG | |
| AD-2010609 | asgsaaauUfaAfAfUfgguagcaguuL96 | | asAfscugCfuAfCfcauuUfaAfuuucusasu | | AUAGAAAUUAAAUGGUAGCAGUA | |
| AD-2010624 | gscsaguaUfaAfCfUfauucugaucuL96 | | asGfsaucAfgAfAfuaguUfaUfacugcsusa | | UAGCAGUAUAACUAUUCUGAUCA | |
| AD-2010643 | csascugaCfaUfUfAfauauuccuauL96 | | asUfsaggAfaUfAfuuaaUfgUfcagugsasu | | AUCACUGACAUUAAUAUUCCUAU | |
| AD-2010655 | usgsuuauUfaUfUfCfuuugcucacuL96 | | asGfsugaGfcAfAfagaaUfaAfuaacasasu | | AUUGUUAUUAUUCUUUGCUCACG | |
| AD-2010683 | ascsaacuCfuUfGfUfuuugcuguuuL96 | | asAfsacaGfcAfAfaacaAfgAfguugusasu | | AUACAACUCUUGUUUUGCUGUUG | |
| AD-2010708 | gscsccucUfuUfAfUfguagguuuauL96 | | asUfsaaaCfcUfAfcauaAfaGfagggcsasg | | CUGCCCUCUUUAUGUAGGUUUAC | |
| AD-2010745 | asusacucGfgAfCfUfcaaaugucuuL96 | | asAfsgacAfuUfUfgaguCfcGfaguausasu | | AUAUACUCGGACUCAAAUGUCUC | |
| AD-2010782 | ascsaccaAfaUfGfAfaguggucauuL96 | | asAfsugaCfcAfCfuucaUfuUfgguguscsu | | AGACACCAAAUGAAGUGGUCAUC | |
| AD-2010830 | gsusagcaAfaUfCfAfguauauucuuL96 | | asAfsgaaUfaUfAfcugaUfuUfgcuacsusa | | UAGUAGCAAAUCAGUAUAUUCUA | |
| AD-2010855 | csasaggaAfuAfUfUfaaucuucacuL96 | | asGfsugaAfgAfUfuaauAfuUfccuugsasa | | UUCAAGGAAUAUUAAUCUUCACC | |
| AD-2010871 | uscsacccAfaAfUfUfuugaauuuuuL96 | | asAfsaaaUfuCfAfaaauUfuGfggugasasg | | CUUCACCCAAAUUUUGAAUUUUU | |
| AD-2010911 | gsasgugaUfuUfCfAfuugaauaaauL96 | | asUfsuuaUfuCfAfaugaAfaUfcacucsgsa | | UCGAGUGAUUUCAUUGAAUAAAA | |
| AD-2010919 | asusaaaaUfuCfUfAfcugacuucuuL96 | | asAfsgaaGfuCfAfguagAfaUfuuuaususc | | GAAUAAAAUUCUACUGACUUCUA | |

### Example 17: In Vitro Screening of dsRNA Agents Targeting PLN and CAMK2D

### In Vitro Dual-Luciferase and Endogenous Screening Assays

[1400] Hepa1-6 cells cells were transfected by adding 50 μL of siRNA duplexes and 100 ng of a plasmid, comprising partial sequences of human CAMK2D (NM_001321571, e.g., nucleotides 1-2959, or nucleotides 2659-5613), or the sequence of human PLN (NM_002667.5), per well along with 100 μL of Opti-MEM plus 0.5 μL of Lipofectamine 2000 per well (Invitrogen, Carlsbad CA. cat #13778-150) and then incubated at room temperature for 15 minutes. Specifically, V217 plasmid comprises nucleotides 1-2959 of human CAMK2D (NM_001321571), and V218 plasmid comprises nucleotides 2969-5613 of human CAMK2D (NM_001321571). V216 plasmid comprises the sequence of human PLN (NM_002667.5). The mixture was then added to the cells which are re-suspended in 35 μL of fresh complete media. The transfected cells were incubated at 37° C. in an atmosphere of 5% CO2. Single-dose experiments were performed at 10 nM.

[1401] Twenty-four hours after the siRNAs and plasmid were transfected, Firefly (transfection control) and Renilla (fused to LEP target sequence) luciferase were measured. First, media was removed from cells. Then Firefly luciferase activity was measured by adding 75 μL of Dual-Glo® Luciferase Reagent equal to the culture medium volume to each well and mix. The mixture was incubated at room temperature for 30 minutes before luminescense (500 nm) was measured on a Spectramax (Molecular Devices) to detect the Firefly luciferase signal. Renilla luciferase activity was measured by adding 75 μL of room temperature of Dual-Glo® Stop & Glo® Reagent to each well and the plates were incubated for 10-15 minutes before luminescence was again measured to determine the Renilla luciferase signal. The Dual-Glo® Stop & Glo® Reagent quenches the firefly luciferase signal and sustained luminescence for the Renilla luciferase reaction. siRNA activity was determined by normalizing the Renilla (LEP) signal to the Firefly (control) signal within each well. The magnitude of siRNA activity was then assessed relative to cells that were transfected with the same vector but were not treated with siRNA or were treated with a non-targeting siRNA. All transfections were done with n=4.

Total RNA Isolation Using DYNABEADS mRNA Isolation Kit (Invitrogen™, Part #: 610-12)

[1402] Cells were lysed in 75 μl of Lysis/Binding Buffer containing 3 μL of beads per well and mixed for 10 minutes on an electrostatic shaker. The washing steps were automated on a Biotek EL406, using a magnetic plate support. Beads were washed (in 90 L) once in Buffer A, once in Buffer B, and twice in Buffer E, with aspiration steps in between. Following a final aspiration, complete 10 μL RT mixture was added to each well, as described below.

cDNA Synthesis Using ABI High Capacity cDNA Reverse Transcription Kit (Applied Biosystems, Foster City, CA, Cat #4368813)

[1403] A master mix of 1 μl 10× Buffer, 0.4 μL 25× dNTPs, 1 μl Random primers, 0.5 μl Reverse Transcriptase, 0.5 μl RNase inhibitor and 6.6 μl of H₂O per reaction were added per well. Plates were sealed, agitated for 10 minutes on an electrostatic shaker, and then incubated at 37 degrees C. for 2 hours. Following this, the plates were agitated at 80 degrees C. for 8 minutes.

### Real Time PCR

[1404] Two microlitre (μl) of cDNA were added to a master mix containing 0.5 μl of human GAPDH TaqMan Probe (4326317E), 0.5 μl human AGT, 2 μl nuclease-free water and 5 μl Lightcycler 480 probe master mix (Roche Cat #04887301001) per well in a 384 well plates (Roche cat #04887301001). Real time PCR was done in a LightCycler480 Real Time PCR system (Roche).

[1405] To calculate relative fold change, data were analyzed using the ΔΔCt method and normalized to assays performed with cells transfected with 10 nM AD-1955, or mock transfected cells. IC₅₀s were calculated using a 4 parameter fit model using XLFit and normalized to cells transfected with AD-1955 or mock-transfected. The sense and antisense sequences of AD-1955 are: sense: 5′-cuuAcGcuGAGuAcuucGAdTsdT-3′ and antisense 5′-UCGAAGuACUcAGCGuAAGdTsdT-3′.

[1406] The results of the dual-luciferase assays of the agents targeting PLN listed in Tables 39 and 40 are provided in Table 45.

[1407] The results of the dual-luciferase assays of the agents targeting CAMK2D listed in Tables 43 and 44 are provided in Table 46.

TABLE 45
Single Dose Reporter Screen for Human PLN in Hepa1-6 Cells

RLuc/FLuc
10 nM

| | % Message | |
|---|---|---|
| Duplex Name | remaining | SD |
| AD-2007034.1 | 74.471 | 1.336 |
| AD-2006965.1 | 79.415 | 2.654 |
| AD-2006935.1 | 98.367 | 7.093 |
| AD-2006926.1 | 73.665 | 2.308 |
| AD-2006862.1 | 71.965 | 3.478 |
| AD-2006839.1 | 72.055 | 3.068 |
| AD-2006764.1 | 80.783 | 2.256 |
| AD-2006751.1 | 94.187 | 1.833 |
| AD-2006743.1 | 78.258 | 2.789 |
| AD-2006731.1 | 75.200 | 2.414 |
| AD-2006658.1 | 63.797 | 3.636 |
| AD-2006640.1 | 79.573 | 3.340 |
| AD-2006626.1 | 89.767 | 1.977 |
| AD-2006548.1 | 79.254 | 2.656 |
| AD-2006525.1 | 97.983 | 1.930 |
| AD-2006451.1 | 71.323 | 1.207 |
| AD-2006437.1 | 78.733 | 3.978 |
| AD-2006362.1 | 68.489 | 1.876 |
| AD-2006347.1 | 57.744 | 1.454 |
| AD-2006334.1 | 90.091 | 3.499 |
| AD-2006259.1 | 80.739 | 2.113 |
| AD-2006242.1 | 69.201 | 4.156 |
| AD-2006234.1 | 69.430 | 2.572 |
| AD-2006164.1 | 85.985 | 2.877 |
| AD-2006150.1 | 78.944 | 2.370 |
| AD-2006132.1 | 65.844 | 3.148 |
| AD-2006119.1 | 67.891 | 2.715 |
| AD-2006056.1 | 79.256 | 3.796 |
| AD-2006046.1 | 72.080 | 2.814 |
| AD-2006035.1 | 74.951 | 1.204 |
| AD-2006018.1 | 69.416 | 1.116 |
| AD-2005954.1 | 71.976 | 1.319 |
| AD-2005942.1 | 73.672 | 3.299 |
| AD-2005923.1 | 84.576 | 1.308 |
| AD-2005862.1 | 52.157 | 0.938 |
| AD-2005849.1 | 88.045 | 2.389 |
| AD-2005826.1 | 112.005 | 0.917 |
| AD-2005760.1 | 111.182 | 2.680 |
| AD-2005737.1 | 81.084 | 2.698 |
| AD-2005720.1 | 67.458 | 0.088 |
| AD-2005704.1 | 66.982 | 2.264 |
| AD-2005687.1 | 90.730 | 1.279 |
| AD-2005678.1 | 73.201 | 2.059 |
| AD-2005658.1 | 81.316 | 2.647 |
| AD-2005638.1 | 76.024 | 1.690 |
| AD-2005617.1 | 69.415 | 0.770 |
| AD-2005604.1 | 62.339 | 1.020 |
| AD-2005588.1 | 73.296 | 3.091 |
| AD-2005575.1 | 73.973 | 2.813 |
| AD-2005557.1 | 86.620 | 2.652 |
| AD-2005530.1 | 87.155 | 2.522 |
| AD-2005527.1 | 66.437 | 3.464 |
| AD-2005485.1 | 60.734 | 1.125 |
| AD-2005471.1 | 74.209 | 2.816 |
| AD-2005447.1 | 55.255 | 1.527 |
| AD-2005429.1 | 61.881 | 2.504 |
| AD-2005409.1 | 55.910 | 1.679 |
| AD-2005396.1 | 70.051 | 1.457 |
| AD-2005384.1 | 59.529 | 1.880 |
| AD-2005365.1 | 49.761 | 2.254 |
| AD-2005350.1 | 49.862 | 1.778 |
| AD-2005325.1 | 49.062 | 1.550 |
| AD-2005300.1 | 72.649 | 3.503 |
| AD-2005287.1 | 66.711 | 1.750 |
| AD-2005274.1 | 57.620 | 2.185 |
| AD-2005250.1 | 42.331 | 0.718 |
| AD-2005234.1 | 36.497 | 1.216 |
| AD-2005221.1 | 39.891 | 0.782 |
| AD-2005193.1 | 47.444 | 1.638 |
| AD-2005179.1 | 31.061 | 0.664 |
| AD-2005164.1 | 38.766 | 1.143 |
| AD-2005146.1 | 42.489 | 1.460 |
| AD-2005129.1 | 35.148 | 1.370 |
| AD-2005108.1 | 45.362 | 1.516 |
| AD-2005095.1 | 44.466 | 0.712 |
| AD-2005082.1 | 44.276 | 0.629 |
| AD-2005067.1 | 35.862 | 0.419 |
| AD-2005051.1 | 36.352 | 0.285 |
| AD-2005033.1 | 35.934 | 1.159 |
| AD-2005020.1 | 52.416 | 1.682 |
| AD-2005002.1 | 43.338 | 1.433 |
| AD-2004989.1 | 33.202 | 0.616 |
| AD-2004970.1 | 39.309 | 0.534 |
| AD-2004950.1 | 36.412 | 1.258 |
| AD-2004935.1 | 39.050 | 0.834 |
| AD-2004922.1 | 55.716 | 2.384 |
| AD-2004909.1 | 37.126 | 0.682 |
| AD-2004896.1 | 31.389 | 0.294 |
| AD-2004885.1 | 43.271 | 1.438 |
| AD-2004872.1 | 36.214 | 2.665 |
| AD-2004853.1 | 39.615 | 1.714 |
| AD-2004837.1 | 32.899 | 1.054 |
| AD-2004825.1 | 29.761 | 1.078 |
| AD-2004806.1 | 32.790 | 1.262 |
| AD-2004790.1 | 29.823 | 1.134 |
| AD-2004777.1 | 33.226 | 1.762 |
| AD-2004763.1 | 30.181 | 1.410 |
| AD-2004747.1 | 28.097 | 0.601 |
| AD-2004718.1 | 47.433 | 3.268 |
| AD-2004689.1 | 29.233 | 0.737 |
| AD-2004673.1 | 35.458 | 0.769 |
| AD-2004660.1 | 29.217 | 0.864 |
| AD-2004646.1 | 42.910 | 1.006 |
| AD-2004632.1 | 23.375 | 0.587 |
| AD-2004608.1 | 84.486 | 2.159 |
| AD-2004594.1 | 10.840 | 0.844 |
| AD-2004575.1 | 6.793 | 0.323 |
| AD-2004555.1 | 6.065 | 0.193 |
| AD-2004539.1 | 4.753 | 0.229 |
| AD-2004518.1 | 4.717 | 0.315 |
| AD-2004495.1 | 4.114 | 0.253 |
| AD-2004481.1 | 64.414 | 0.700 |
| AD-2004468.1 | 5.628 | 0.493 |
| AD-2004458.1 | 7.073 | 0.385 |
| AD-2004428.1 | 8.520 | 0.514 |
| AD-2004400.1 | 25.806 | 0.707 |
| AD-2004386.1 | 3.955 | 0.105 |
| AD-2004373.1 | 7.681 | 0.321 |
| AD-2004360.1 | 5.221 | 0.397 |
| AD-2004345.1 | 9.997 | 0.707 |
| AD-2004329.1 | 5.616 | 0.469 |
| AD-2004319.1 | 4.875 | 0.267 |
| AD-2004301.1 | 10.902 | 0.526 |
| AD-2004284.1 | 6.918 | 0.616 |
| AD-2004260.1 | 13.058 | 0.327 |
| AD-2004238.1 | 7.854 | 0.197 |
| AD-2004202.1 | 7.385 | 0.540 |
| AD-2004189.1 | 10.326 | 0.405 |
| AD-2004176.1 | 12.764 | 0.435 |
| AD-2004156.1 | 11.300 | 1.182 |
| AD-2004142.1 | 12.730 | 0.159 |
| AD-2004113.1 | 8.975 | 0.279 |
| AD-2004095.1 | 2.922 | 0.151 |
| AD-2004080.1 | 59.209 | 1.282 |
| AD-2004072.1 | 13.064 | 0.967 |
| Postive control | 0.538 | 0.095 |

TABLE 46
Single Dose Reporter Screen for
Human CAMK2D in Hepa1-6 Cells

| | RLuc/Fluc V218 | | RLuc/Fluc V217 | |
|---|---|---|---|---|
| | 10 nM | | 10 nM | |
| | % Message | | % Message | |
| Duplex Name | Remaining | SD | Remaining | SD |
| AD-2010919.1 | 54.775 | 3.875 | | |
| AD-2010911.1 | 63.205 | 0.834 | | |
| AD-2010871.1 | 87.416 | 5.684 | | |
| AD-2010855.1 | 93.304 | 3.325 | | |
| AD-2010830.1 | 84.938 | 3.881 | | |
| AD-2010782.1 | 78.337 | 4.600 | | |
| AD-2010745.1 | 88.461 | 6.353 | | |
| AD-2010708.1 | 93.117 | 6.451 | | |
| AD-2010683.1 | 69.483 | 3.261 | | |
| AD-2010655.1 | 77.639 | 2.283 | | |
| AD-2010643.1 | 87.707 | 3.018 | | |
| AD-2010624.1 | 80.114 | 3.333 | | |
| AD-2010609.1 | 90.918 | 4.832 | | |
| AD-2010598.1 | 74.414 | 1.039 | | |
| AD-2010559.1 | 86.988 | 1.703 | | |
| AD-2010545.1 | 71.871 | 3.138 | | |
| AD-2010535.1 | 73.669 | 2.725 | | |
| AD-2010521.1 | 71.072 | 0.767 | | |
| AD-2010503.1 | 72.548 | 1.061 | | |
| AD-2010486.1 | 72.378 | 2.071 | | |
| AD-2010454.1 | 84.009 | 4.651 | | |
| AD-2010441.1 | 74.567 | 2.349 | | |
| AD-2010404.1 | 79.424 | 3.393 | | |
| AD-2010361.1 | 76.688 | 2.472 | | |
| AD-2010325.1 | 79.238 | 4.044 | | |
| AD-2010309.1 | 67.564 | 2.345 | | |
| AD-2010301.1 | 59.701 | 2.046 | | |
| AD-2010280.1 | 72.425 | 2.744 | | |
| AD-2010262.1 | 81.376 | 4.975 | | |
| AD-2010218.1 | 67.650 | 4.358 | | |
| AD-2010203.1 | 67.587 | 2.183 | | |
| AD-2010184.1 | 68.670 | 2.029 | | |
| AD-2010165.1 | 76.258 | 1.121 | | |
| AD-2010158.1 | 93.459 | 0.881 | | |
| AD-2010142.1 | 79.214 | 1.961 | | |
| AD-2010123.1 | 68.582 | 1.827 | | |
| AD-2010106.1 | 68.511 | 1.973 | | |
| AD-2010084.1 | 65.765 | 2.122 | | |
| AD-2010054.1 | 55.070 | 1.970 | | |
| AD-2010032.1 | 61.999 | 2.320 | | |
| AD-2010007.1 | 80.181 | 2.149 | | |
| AD-2009987.1 | 86.662 | 5.464 | | |
| AD-2009959.1 | 52.258 | 1.295 | | |
| AD-2009931.1 | 76.826 | 2.364 | | |
| AD-2009901.1 | 79.035 | 4.350 | | |
| AD-2009881.1 | 89.987 | 6.509 | | |
| AD-2009852.1 | 85.627 | 5.840 | | |
| AD-2009839.1 | 81.043 | 3.015 | | |
| AD-2009823.1 | 92.060 | 3.075 | | |
| AD-2009755.1 | 97.673 | 4.670 | | |
| AD-2009722.1 | 7.458 | 0.308 | | |
| AD-2009707.1 | 8.020 | 0.492 | | |
| AD-2009690.1 | 15.120 | 0.831 | | |
| AD-2009655.1 | 6.171 | 0.266 | | |
| AD-2009643.1 | 13.322 | 0.233 | | |
| AD-2009615.1 | 6.271 | 0.252 | | |
| AD-2009599.1 | 26.536 | 0.816 | | |
| AD-2009584.1 | 8.085 | 0.842 | | |
| AD-2009568.1 | 6.779 | 0.301 | | |
| AD-2009546.1 | 12.216 | 0.260 | | |
| AD-2009537.1 | 7.405 | 0.140 | | |
| AD-2009525.1 | 8.702 | 0.322 | | |
| AD-2009505.1 | 15.844 | 0.558 | | |
| AD-2009490.1 | 7.311 | 0.324 | | |
| AD-2009437.1 | 10.483 | 0.217 | | |
| AD-2009425.1 | 3.552 | 0.159 | | |
| AD-2009386.1 | 7.732 | 0.356 | | |
| AD-2009369.1 | 4.180 | 0.202 | | |
| AD-2009354.1 | 12.511 | 0.483 | | |
| AD-2009344.1 | 19.310 | 0.115 | | |
| AD-2009317.1 | 7.006 | 0.297 | | |
| AD-2009302.1 | 3.416 | 0.110 | | |
| AD-2009285.1 | 8.156 | 0.520 | | |
| AD-2009253.1 | 4.172 | 0.270 | | |
| AD-2009238.1 | 3.640 | 0.161 | | |
| AD-2009211.1 | 12.916 | 0.346 | | |
| AD-2009197.1 | 2.605 | 0.169 | | |
| AD-2009162.1 | 9.455 | 0.439 | | |
| AD-2009147.1 | 8.493 | 0.118 | | |
| AD-2009122.1 | 3.398 | 0.118 | | |
| AD-2009108.1 | 5.204 | 0.207 | | |
| AD-2009078.1 | 2.664 | 0.213 | | |
| AD-2009053.1 | 6.560 | 0.119 | | |
| AD-2009021.1 | 9.111 | 0.335 | | |
| AD-2008977.1 | 30.950 | 1.078 | | |
| AD-2008941.1 | 24.568 | 0.808 | | |
| AD-2008921.1 | 37.944 | 1.475 | | |
| AD-2008899.1 | 4.925 | 0.148 | | |
| AD-2008875.1 | 28.692 | 0.747 | | |
| AD-2008860.1 | 7.795 | 0.347 | | |
| AD-2008844.1 | 7.289 | 0.395 | | |
| AD-2008835.1 | 3.943 | 0.103 | | |
| AD-2008799.1 | 4.375 | 0.238 | | |
| AD-2008767.1 | 5.444 | 0.182 | | |
| AD-2008746.1 | 2.286 | 0.105 | | |
| AD-2008720.1 | 12.460 | 1.301 | | |
| AD-2008714.1 | 28.171 | 0.547 | 45.65886104 | 1.1035907 |
| AD-2008708.1 | 33.037 | 0.902 | 61.79586966 | 1.5307934 |
| AD-2008701.1 | 16.450 | 0.554 | 44.17280687 | 1.9294042 |
| AD-2008687.1 | 2.892 | 0.059 | 16.20778676 | 0.3737978 |
| AD-2008666.1 | 1.191 | 0.085 | 11.77972984 | 0.3063456 |
| AD-2008639.1 | 1.494 | 0.085 | 16.08336566 | 0.8901049 |
| AD-2008623.1 | 2.640 | 0.112 | 17.62525171 | 0.4686597 |
| AD-2008590.1 | 1.714 | 0.101 | 14.38598257 | 0.6394634 |
| AD-2008575.1 | 3.631 | 0.077 | 19.99313108 | 1.1687672 |
| AD-2008555.1 | 11.072 | 1.039 | 31.50514332 | 1.917178 |
| AD-2008540.1 | 2.454 | 0.076 | 20.53179586 | 0.2485112 |
| AD-2008516.1 | 1.405 | 0.050 | 21.48519022 | 0.3653849 |
| AD-2008474.1 | | | 24.02537918 | 0.6280613 |
| AD-2008453.1 | | | 13.73531117 | 0.3217469 |
| AD-2008402.1 | | | 16.87679869 | 0.6515435 |
| AD-2008375.1 | | | 16.98560683 | 0.498232 |
| AD-2008357.1 | | | 14.21209621 | 0.3004723 |
| AD-2008325.1 | | | 16.73471701 | 0.7296915 |
| AD-2008310.1 | | | 19.32436409 | 0.8544198 |
| AD-2008288.1 | | | 14.23682319 | 0.3745798 |
| AD-2008273.1 | | | 71.50461253 | 3.2380485 |
| AD-2008257.1 | | | 27.49900574 | 1.3455372 |
| AD-2008242.1 | | | 10.76358 | 0.5053741 |
| AD-2008227.1 | | | 15.28452231 | 0.4654998 |
| AD-2008211.1 | | | 13.60926615 | 0.1644877 |
| AD-2008170.1 | | | 25.66489061 | 0.7888178 |
| AD-2008116.1 | | | 51.30787029 | 3.2940949 |
| AD-2008093.1 | | | 27.98984317 | 0.9882612 |
| AD-2008065.1 | | | 21.13859066 | 0.4752274 |
| AD-2008047.1 | | | 48.37926908 | 0.6189311 |
| AD-2008019.1 | | | 43.49619485 | 1.3081996 |
| AD-2007985.1 | | | 19.09148666 | 0.2746135 |
| AD-2007974.1 | | | 51.99112086 | 2.5656624 |
| AD-2007934.1 | | | 33.97294662 | 1.0110332 |
| AD-2007870.1 | | | 36.17811695 | 2.5952914 |
| AD-2007856.1 | | | 32.58840548 | 0.8877862 |
| AD-2007841.1 | | | 26.72922 | 1.5211521 |
| AD-2007818.1 | | | 24.81585399 | 0.7996233 |
| AD-2007801.1 | | | 10.70960323 | 0.5182464 |
| AD-2007785.1 | | | 12.3854364 | 0.1588502 |
| AD-2007759.1 | | | 17.54481777 | 0.8691434 |
| AD-2007743.1 | | | 18.65843633 | 0.8691339 |
| AD-2007705.1 | | | 20.97710268 | 2.0623631 |
| AD-2007702.1 | | | 22.23837144 | 1.2792613 |
| AD-2007687.1 | | | 14.28983278 | 0.5877183 |
| AD-2007668.1 | | | 12.55123358 | 0.5519322 |
| AD-2007653.1 | | | 16.03158735 | 1.0494897 |
| AD-2007627.1 | | | 8.778782361 | 0.5807514 |
| AD-2007604.1 | | | 11.3277006 | 0.5801774 |
| AD-2007585.1 | | | 12.12409743 | 0.3406555 |
| AD-2007568.1 | | | 10.91668988 | 0.9796381 |
| AD-2007549.1 | | | 28.5985825 | 1.8602411 |
| AD-2007528.1 | | | 26.24339901 | 3.0900046 |
| AD-2007508.1 | | | 24.20127046 | 2.0456574 |
| AD-2007490.1 | | | 32.98630016 | 1.863752 |
| AD-2007468.1 | | | 52.37705677 | 2.902928 |
| AD-2007451.1 | | | 14.12308396 | 0.8174496 |
| AD-2007420.1 | | | 12.9988447 | 1.0455565 |
| AD-2007404.1 | | | 73.82535862 | 3.2250002 |
| AD-2007389.1 | | | 23.12555471 | 0.7699604 |
| AD-2007325.1 | | | 40.76464069 | 2.3558281 |
| AD-2007269.1 | | | 13.45774901 | 0.9639825 |
| AD-2007238.1 | | | 26.19603597 | 0.5648448 |
| AD-2007211.1 | | | 48.54309211 | 2.5350914 |
| AD-2007160.1 | | | 10.07170671 | 0.3209378 |
| AD-2007144.1 | | | 12.95174443 | 0.6263839 |
| AD-2007079.1 | | | 11.53212195 | 0.5785039 |
| AD-2007012.1 | | | 19.95795834 | 0.7006737 |
| AD-2006886.1 | | | 31.6192243 | 0.2459024 |
| AD-2006870.1 | | | 27.09699643 | 1.5404928 |
| AD-2006710.1 | | | 19.12964642 | 1.8183614 |
| AD-2006610.1 | | | 10.23483771 | 0.9179456 |
| AD-2006588.1 | | | 14.25744683 | 0.8293527 |
| AD-2006501.1 | | | 36.6319817 | 3.3363464 |
| AD-2006473.1 | | | 20.91053622 | 1.3427681 |
| AD-2006395.1 | | | 15.13240856 | 1.3434645 |
| AD-2006307.1 | | | 11.78307666 | 0.4056504 |
| AD-2006275.1 | | | 18.57181389 | 1.7504964 |
| AD-2006091.1 | | | 58.62441069 | 4.1443315 |
| AD-2005989.1 | | | 33.17064508 | 1.9442207 |
| AD-2005914.1 | | | 27.87696239 | 0.6755636 |
| AD-2005899.1 | | | 36.94068638 | 0.6020162 |
| AD-2005876.1 | | | 40.88704238 | 2.1567636 |
| | | | 37.2476383 | 0.6411107 |
| Positive control | 0.455 | 0.108 | 0.781 | 0.124 |

The application's sequence listing, which the Patent Office published only in electronic form, follows.

SEQUENCE LISTING (6312 sequences)

SEQ ID NO: 1 - DNA, 3039 bp, Homo sapiens
  source 1..3039: mol_type = genomic DNA
agaaacatgctgaagtcccggcggctcttccagcagcggcagcggctccagcagcagcggcggcggcggcggcggcggcagcggcagcgacagcgctcggctcctgcgggaaaggcgcccggcgcccatgcctccggccccgcgccgcggctgccctgacccggccgcgacctccctctgcgcaccacgccgcccgggcttctggggtgttccccaaccacggcccagccctgccacaccccccgcccccggcctccgcagctcggcatgggcgcgggggtgctcgtcctgggcgcctccgagcccggtaacctgtcgtcggccgcaccgctccccgacggcgcggccaccgcggcgcggctgctggtgcccgcgtcgccgcccgcctcgttgctgcctcccgccagcgaaagccccgagccgctgtctcagcagtggacagcgggcatgggtctgctgatggcgctcatcgtgctgctcatcgtggcgggcaatgtgctggtgatcgtggccatcgccaagacgccgcggctgcagacgctcaccaacctcttcatcatgtccctggccagcgccgacctggtcatggggctgctggtggtgccgttcggggccaccatcgtggtgtggggccgctgggagtacggctccttcttctgcgagctgtggacctcagtggacgtgctgtgcgtgacggccagcatcgagaccctgtgtgtcattgccctggaccgctacctcgccatcacctcgcccttccgctaccagagcctgctgacgcgcgcgcgggcgcggggcctcgtgtgcaccgtgtgggccatctcggccctggtgtccttcctgcccatcctcatgcactggtggcgggcggagagcgacgaggcgcgccgctgctacaacgaccccaagtgctgcgacttcgtcaccaaccgggcctacgccatcgcctcgtccgtagtctccttctacgtgcccctgtgcatcatggccttcgtgtacctgcgggtgttccgcgaggcccagaagcaggtgaagaagatcgacagctgcgagcgccgtttcctcggcggcccagcgcggccgccctcgccctcgccctcgcccgtccccgcgcccgcgccgccgcccggacccccgcgccccgccgccgccgccgccaccgccccgctggccaacgggcgtgcgggtaagcggcggccctcgcgcctcgtggccctgcgcgagcagaaggcgctcaagacgctgggcatcatcatgggcgtcttcacgctctgctggctgcccttcttcctggccaacgtggtgaaggccttccaccgcgagctggtgcccgaccgcctcttcgtcttcttcaactggctgggctacgccaactcggccttcaaccccatcatctactgccgcagccccgacttccgcaaggccttccagggactgctctgctgcgcgcgcagggctgcccgccggcgccacgcgacccacggagaccggccgcgcgcctcgggctgtctggcccggcccggacccccgccatcgcccggggccgcctcggacgacgacgacgacgatgtcgtcggggccacgccgcccgcgcgcctgctggagccctgggccggctgcaacggcggggcggcggcggacagcgactcgagcctggacgagccgtgccgccccggcttcgcctcggaatccaaggtgtagggcccggcgcggggcgcggactccgggcacggcttcccaggggaacgaggagatctgtgtttacttaagaccgatagcaggtgaactcgaagcccacaatcctcgtctgaatcatccgaggcaaagagaaaagccacggaccgttgcacaaaaaggaaagtttgggaagggatgggagagtggcttgctgatgttccttgttgttttttttttcttttcttttctttcttcttcttttttttttttttttttttttctgtttgtggtccggccttcttttgtgtgtgcgtgtgatgcatctttagatttttttcccccaccaggtggtttttgacactctctgagaggaccggagtggaagatgggtgggttaggggaagggagaagcattaggaggggattaaaatcgatcatcgtggctcccatccctttcccgggaacaggaacacactaccagccagagagaggagaatgacagtttgtcaagacatatttccttttgctttccagagaaatttcattttaatttctaagtaatgatttctgctgttatgaaagcaaagagaaaggatggaggcaaaataaaaaaaaatcacgtttcaagaaatgttaagctcttcttggaacaagccccaccttgctttccttgtgtagggcaaacccgctgtcccccgcgcgcctgggtggtcaggctgagggatttctacctcacactgtgcatttgcacagcagatagaaagacttgtttatattaaacagcttatttatgtatcaatattagttggaaggaccaggcgcagagcctctctctgtgacatgtgactctgtcaattgaagacaggacattaaaagagagcgagagagagaaacagttcagattactgcacatgtggataaaaacaaaaacaaaaaaaaggagtggttcaaaatgccatttttgcacagtgttaggaattacaaaatccacagaagatgttacttgcacaaaaagaaattaaatattttttaaagggagaggggctgggcagatcttaaataaaattcaaactctacttctgttgtctagtatgttattgagctaatgattcattgggaaaatacctttttatactcctttatcatggtactgtaactgtatccatattataaatataattatcttaaggattttttatttttttttatgtccaagtgcccacgtgaatttgctggtgaaagttagcacttgtgtgtaaattctacttcctcttgtgtgttttaccaagtatttatactctggtgcaactaactactgtgtgaggaattggtccatgtgcaataaataccaatgaagcacaa

SEQ ID NO: 2 - DNA, 3034 bp, Mus musculus
  source 1..3034: mol_type = genomic DNA
agaaacatgctgaggtcccggcggctcttccagcagcgacagcggctccagcagcagcggcggcggcggcggcggagacagcgctcggctacggaggagaaggcgcccggcgtccatgcctccggccccgagccgcggctgccctgacctggccgcgacctccccgcgcgggccccgcagccccggctcctggggtgctccccaggcgcggcccagccccgccacaccccccgcccccggcctccgcagctcggcatgggcgcgggggcgctcgccctgggcgcctccgaaccctgcaacctgtcgtccgccgcgccgctgcccgacggtgcggccaccgcggcgcggctgctggtgctcgcgtcgcctcccgcctcgctgctgcctccagccagcgagggctcagcgccgctgtcgcagcagtggaccgcgggtatgggcctactgctggcgctcatcgttctgctcatcgtggtgggtaacgtgctggtgatcgtggccatcgccaagaccccgcggctgcagacgctcaccaacctcttcatcatgtccctggccagcgctgatctggtcatgggattgctggtggtgcctttcggggccaccatcgtggtgtggggccgctgggagtacggctccttcttctgcgagctctggacttcggtagatgtgctgtgtgtgacggccagcattgagaccctgtgtgtcatcgccctggaccgctacctcgccatcacgtcgccctttcgctaccagagtttgctgacgcgcgcgcgagcgcgggccctcgtgtgcacagtgtgggccatctcggcgttggtgtccttcctgcccatcctcatgcactggtggcgggccgagagcgacgaagcgcgccgctgctacaacgaccccaagtgctgcgatttcgtcaccaacagggcctacgccatcgcctcgtccgtcgtctccttctacgtgcccctgtgcatcatggccttcgtgtacctgcgggtgttccgcgaggcccaaaaacaggtaaagaagatcgacagctgcgagcgccgcttcctcggcggcccagcccggccgccctcgcctgagccctcgccgtcacctgggccaccgcgccccgcagactcgctggccaacgggcgctccagcaagcggcggccgtcgcgcctcgtggctctgcgcgagcagaaggcgctcaagacactgggcatcatcatgggtgtgttcacgctctgctggctgcccttcttcctggccaacgtggtgaaggctttccaccgcgacctggtgccggatcgcctcttcgtcttcttcaactggctgggctacgccaactcggccttcaaccccatcatctactgccgcagccccgacttccgcaaggctttccagcgcctgctctgctgcgcgcgccgggccgcctgcagacgccgcgcagcccacggggaccggccgcgcgcctccggctgcctggcgagagctgggccgccgccgtcccccggagctccctcggacgacgacgacgacgacgccgggaccaccccaccggcgcgcctgctggagccctggaccggctgcaacggcgggacaaccactgtggacagcgattcgagcctggacgagccggggcgccagggcttctcctcggagtccaaggtgtagagagccaggctctctgggcgcacggacgccgctccccatagtcccgggctggacacgggctctgcatccctagaggaagagagcccgcctgggcgcccctgagccgctccccaggggagagaggagatctctgtttactcaagaccgaaagcaggtgaatgcaaagcccacagatctatcgaatcatccgagacgtacagaaaagccccggaccgagcgtttgcgcaaaaaggaaagtttaggaggagttgggagagtgtggcttagtatggcttactggcttgtcttgagttcctttctctctgaggttcggcctttcgtgtgtttaatgcaccttcaggcattcccccccccccccgcccctaggtgggttttgacactttctgcaaggacccgagtggaaactaggcggggaggggagggggcaggatggagtctatcacctggctttccggttccacacctaggaacctaagtattcagctcaggtttggtgtgggggcggggccggtgataattagccaggaagtgtttccctttgctttctaaagaaattgcatactaattccggagtactggtgtctcctgttcttaaagcaaagggaaaagaaggatgcgaaacagacaaatctggtttcgagaaactatgtgtggagcacggttcaccttgctttctcctagagggcaaaccttgtgccctgcgcgcctcggtggtcctgctgtgggtcctctacctcactctgtgcatattgcacagcaagatagaaagacttgtttatattaaacagcttatttatgtatcaatactagttggaaggaccaggcgctgagtctctctctgtgacatgtgactctgtcaactaaagataggacagaacaaaaaggaaacagttgagattattgcacatgtggctaaaaacaaagacggcaaaaaaaaaaaaaaaaggcagtggttggaaggccattttgcacagtgttaggcattgtaaaattcatagaagttgttaacttgcacaaaaaaaattaaatatttttactgggatggggaggtgggcagatctttaaaaagctaaaataaaattcaaactcagtttctcttgtctattatgttattgagttgatggtttattgggaagttactttttatactcttatcatggtactgtaactgtatccatattataaatattattctcttacgtatttttattattattttttaatgtccaagtgcccccgtgaatctgctggtaaaatttagcactcgtgtgtatattctatctcttcttgtgtgtgtgaccaagtatttatactctggtgcaactaactaccgtgtgggaattggtccatgtgcaataaagacagcagtgcagctcaa

SEQ ID NO: 3 - DNA, 1401 bp, Rattus norvegicus
  source 1..1401: mol_type = genomic DNA
atgggcgcgggggcgctcgccctgggcgcctccgaaccctgcaacctgtcgtcggccgcgccgctgcccgacggcgcggccaccgcggcacgactgctggtgctcgcgtcgcctcccgcctcgctgctgcctccagccagcgagggctcagcgccgctgtcgcagcagtggaccgcgggtatgggcctactcctggcgctcatcgtgctgctcatcgtagtgggcaacgtgttggtgatcgtggccatcgccaagaccccgcggctgcagacgctcaccaacctcttcatcatgtccctggccagcgccgatctggtcatgggactgctggtggtgcctttcggggccaccattgtggtgtggggccgctgggagtacggctccttcttctgtgagctctggacttcggtagacgtgctatgtgtgacggccagcatcgagaccctgtgtgtcatcgccctggaccgctacctcgccatcacgctgccctttcgctaccagagcctgctgacgcgcgcgcgagcgcgggccctcgtgtgcacagtgtgggccatctccgcgctggtgtccttcctgcccatcctcatgcactggtggcgggccgagagcgacgaagcgcgccgctgctacaacgaccccaagtgctgcgatttcgtcaccaaccgggcctacgccatcgcctcgtccgtcgtctccttctacgtgcccctgtgcatcatggccttcgtgtacctccgggtgttccgcgaggcccagaaacaggtgaagaagatcgacagctgcgagcgccgcttcctcacgggcccgccccggccgccctcgcccgcgccctcgccatcaccagggccaccgcgccccgcagactcgctggccaacgggcgctccagcaagcggcggccgtcgcgcctcgtggctctgcgagagcagaaggcgctcaagacactgggcatcatcatgggtgtgttcacgctctgctggctgcccttcttcctggccaacgtggtgaaagctttccaccgcgacctggtgccggatcgcctcttcgtcttcttcaactggctgggctacgccaactcggccttcaaccccatcatctactgccgcagccccgacttccgcaaggctttccagcgcctgctttgctgcgcgcgccgggccgcctgcagacgccgcgcagcccacggggaccggccgcgcgcctcgggctgcctggcgagagctgggccgccgccgtcccccggggctccttcggacgacgacgacgatgacgccggggccaccccacccgcgcgcctgttggagccctgggccggctgcaacggcgggacgaccactgtggacagcgattcgagcctggacgagccgggacgccagggcttctcctccgagtccaaggtgtag

SEQ ID NO: 4 - DNA, 2891 bp, Macaca mulatta
  source 1..2891: mol_type = genomic DNA
gcaccccgccgtccaggcttctggggtgttccccaaccaaggcccagccctgccacaccccccgcctccggcctccgcaactcggcatgggcgcgggggcgctcgtcctgggcgcctccgagcccggtaacctgtcgtcggccgcaccgctccccgacggcgtggccaccgcggcgcggctgctggtgcccgcgtcgccgcccgcctcgttgctgcctcccgccagcgaaggccccgagccgctgtcgcagcagtggacggcgggcatgggtctgctgatggcgctcatcgtgctgctcatcgtggcgggcaacgtgctggtgatcgtggccatcgccaagacgccgcggctgcagacgctcaccaacctcttcatcatgtccctggccagcgccgacctggtcatggggctgctggtggtgccgttcggggccaccatcgtggtgtggggccgctgggagtacggctccttcttctgcgagctgtggacctcggtggacgtgctgtgcgtgacggccagcatcgagaccctgtgtgtcatcgccctggaccgctacctcgccatcacctcgcccttccgctaccagagcctgctgacgcgcgcgcgggcgcggggcctcgtgtgcaccgtgtgggccatctcagccctggtgtccttcctgcccatcctcatgcattggtggcgggcggagagcgacgaggcgcgccgctgctacaacgaccccaagtgctgcgatttcgtcaccaaccgggcctacgccatcgcctcgtccgtggtctccttctacgtgcccctgtgcatcatggccttcgtgtacctgcgggtgttccgcgaggcccagaagcaggtgaagaagatcgacagctgcgagcgccgtttcctcggcggccccgcgcggccgccctcgccctcgccctcgccctcgccctcgccggtccccgcgccgccgcccggacctccgcgccccgccgccgccgctgccaccaccgccccgctggtcaacggacgtgcgggtaagcggcggccctcgcgcctcgtggccctgcgcgagcagaaggcgctcaagacgctgggcatcatcatgggcgtgttcacgctctgttggctgcccttcttcctggccaacgtggtgaaggccttccaccgcgagctggtgcccgaccgcctcttcgtcttcttcaactggctgggctacgccaactcggccttcaaccccatcatctactgccgcagccccgacttccgcaacgccttccagcgactgctctgctgcgcgcgcagggctgcccgccggcgccacgcggcccacggagaccggccgcgcgcctcgggctgtctggcccggcccggacccccgccgtcgcccggggccgcctcggacgacgacgacgacgatgtcgtcggggccacgcagcccgcgcgcctgctggagccctgggccggctgcaacggcggggcggcggcggacagcgactcgagcctggacgagccgtgccgccccggattcgcctcggagtccaaggtgtagggcccggcgccgggcgaggacgccgggcaccccgggaggaggagagcccgggcgccccggaacgacttcccgggggaacgaggagatctgtgtttactcaagaccgaaagcaggtgaactcgaagcccacaatcctcgtctgaatcatccgaggcaaacagaaaagccacggaccattgcacaaaaaggaaagtttggggagggatgggagagtggcttgctgatgttccttggttttttttctttctttcttcctttttttttttttttttctgtttgtggtccggccttcttttgtatgtgcgtgtgatgcatctttagattttttttcccccacgttggtttttgacactctctgcgaggaccggagtggaagttgggtgggttacgggaaggaagaagcattaggaggggattaaaatcgatcagcgtggctcctatccctttcccaggaacaggagcagtctaccagccagagggaggagaatgacagtttgtcaagacgtatttcttttgctttccagataaatttcattttaatttctaagtaatgagttctgctgtcatgaaagcaaagagaaaggatggaggcaaaaaaaaaaaaattcacgtttcaagaaatgttaagctcttcttggaacaagccccaccttgctttccttgtgtagggcaaaccggccgtcccccgcgcgcctgggtggtcaggctgagggatttctacctcacactgtgcgtttgcacagcagatagaacgacttgtttatattaaacagcttatttatgtatcaatattagttggaaggaccaggcgcagagcctctctctgtgacatgtgactctgtcaattgaagacaggacattagagagagagaaacagttcagattactgcacatgtggataaaaacaaaaacaacaaaaaaaggagtggttcaaaatgccatttttgcacagtgttaggaattacaaagtccacaggagatgttacttgcacaaaaagaaattaaatattttttaaagggggaggggctgggcagatcttaaaaactaaaataaaattcaaactctacttctgttgtctagtatgttattgagctaatgatttattggggaaaatacctttttatactcctttatcatggtactgtaactgtatccatattataaatataattatcttaaggattttttatttttttttttttatgtccaagtgcccacgtgaatttgctggtgaaagttagcacttgtgtgtgaactctacttcctcttgtgtgttttaccaagtatttatactctggtgcaactaactactgtgtgaggaattggtccatgtgcaataaataccaatgaagcacaatcaa

SEQ ID NO: 5 - DNA, 3039 bp, Homo sapiens
  source 1..3039: mol_type = genomic DNA
ttgtgcttcattggtatttattgcacatggaccaattcctcacacagtagttagttgcaccagagtataaatacttggtaaaacacacaagaggaagtagaatttacacacaagtgctaactttcaccagcaaattcacgtgggcacttggacataaaaaaaaataaaaaatccttaagataattatatttataatatggatacagttacagtaccatgataaaggagtataaaaaggtattttcccaatgaatcattagctcaataacatactagacaacagaagtagagtttgaattttatttaagatctgcccagcccctctccctttaaaaaatatttaatttctttttgtgcaagtaacatcttctgtggattttgtaattcctaacactgtgcaaaaatggcattttgaaccactccttttttttgtttttgtttttatccacatgtgcagtaatctgaactgtttctctctctcgctctcttttaatgtcctgtcttcaattgacagagtcacatgtcacagagagaggctctgcgcctggtccttccaactaatattgatacataaataagctgtttaatataaacaagtctttctatctgctgtgcaaatgcacagtgtgaggtagaaatccctcagcctgaccacccaggcgcgcgggggacagcgggtttgccctacacaaggaaagcaaggtggggcttgttccaagaagagcttaacatttcttgaaacgtgatttttttttattttgcctccatcctttctctttgctttcataacagcagaaatcattacttagaaattaaaatgaaatttctctggaaagcaaaaggaaatatgtcttgacaaactgtcattctcctctctctggctggtagtgtgttcctgttcccgggaaagggatgggagccacgatgatcgattttaatcccctcctaatgcttctcccttcccctaacccacccatcttccactccggtcctctcagagagtgtcaaaaaccacctggtgggggaaaaaaatctaaagatgcatcacacgcacacacaaaagaaggccggaccacaaacagaaaaaaaaaaaaaaaaaaaaaagaagaagaaagaaaagaaaagaaaaaaaaaacaacaaggaacatcagcaagccactctcccatcccttcccaaactttcctttttgtgcaacggtccgtggcttttctctttgcctcggatgattcagacgaggattgtgggcttcgagttcacctgctatcggtcttaagtaaacacagatctcctcgttcccctgggaagccgtgcccggagtccgcgccccgcgccgggccctacaccttggattccgaggcgaagccggggcggcacggctcgtccaggctcgagtcgctgtccgccgccgccccgccgttgcagccggcccagggctccagcaggcgcgcgggcggcgtggccccgacgacatcgtcgtcgtcgtcgtccgaggcggccccgggcgatggcgggggtccgggccgggccagacagcccgaggcgcgcggccggtctccgtgggtcgcgtggcgccggcgggcagccctgcgcgcgcagcagagcagtccctggaaggccttgcggaagtcggggctgcggcagtagatgatggggttgaaggccgagttggcgtagcccagccagttgaagaagacgaagaggcggtcgggcaccagctcgcggtggaaggccttcaccacgttggccaggaagaagggcagccagcagagcgtgaagacgcccatgatgatgcccagcgtcttgagcgccttctgctcgcgcagggccacgaggcgcgagggccgccgcttacccgcacgcccgttggccagcggggcggtggcggcggcggcggcggggcgcgggggtccgggcggcggcgcgggcgcggggacgggcgagggcgagggcgagggcggccgcgctgggccgccgaggaaacggcgctcgcagctgtcgatcttcttcacctgcttctgggcctcgcggaacacccgcaggtacacgaaggccatgatgcacaggggcacgtagaaggagactacggacgaggcgatggcgtaggcccggttggtgacgaagtcgcagcacttggggtcgttgtagcagcggcgcgcctcgtcgctctccgcccgccaccagtgcatgaggatgggcaggaaggacaccagggccgagatggcccacacggtgcacacgaggccccgcgcccgcgcgcgcgtcagcaggctctggtagcggaagggcgaggtgatggcgaggtagcggtccagggcaatgacacacagggtctcgatgctggccgtcacgcacagcacgtccactgaggtccacagctcgcagaagaaggagccgtactcccagcggccccacaccacgatggtggccccgaacggcaccaccagcagccccatgaccaggtcggcgctggccagggacatgatgaagaggttggtgagcgtctgcagccgcggcgtcttggcgatggccacgatcaccagcacattgcccgccacgatgagcagcacgatgagcgccatcagcagacccatgcccgctgtccactgctgagacagcggctcggggctttcgctggcgggaggcagcaacgaggcgggcggcgacgcgggcaccagcagccgcgccgcggtggccgcgccgtcggggagcggtgcggccgacgacaggttaccgggctcggaggcgcccaggacgagcacccccgcgcccatgccgagctgcggaggccgggggcggggggtgtggcagggctgggccgtggttggggaacaccccagaagcccgggcggcgtggtgcgcagagggaggtcgcggccgggtcagggcagccgcggcgcggggccggaggcatgggcgccgggcgcctttcccgcaggagccgagcgctgtcgctgccgctgccgccgccgccgccgccgccgctgctgctggagccgctgccgctgctggaagagccgccgggacttcagcatgtttct

SEQ ID NO: 6 - DNA, 3034 bp, Mus musculus
  source 1..3034: mol_type = genomic DNA
ttgagctgcactgctgtctttattgcacatggaccaattcccacacggtagttagttgcaccagagtataaatacttggtcacacacacaagaagagatagaatatacacacgagtgctaaattttaccagcagattcacgggggcacttggacattaaaaaataataataaaaatacgtaagagaataatatttataatatggatacagttacagtaccatgataagagtataaaaagtaacttcccaataaaccatcaactcaataacataatagacaagagaaactgagtttgaattttattttagctttttaaagatctgcccacctccccatcccagtaaaaatatttaattttttttgtgcaagttaacaacttctatgaattttacaatgcctaacactgtgcaaaatggccttccaaccactgccttttttttttttttttgccgtctttgtttttagccacatgtgcaataatctcaactgtttcctttttgttctgtcctatctttagttgacagagtcacatgtcacagagagagactcagcgcctggtccttccaactagtattgatacataaataagctgtttaatataaacaagtctttctatcttgctgtgcaatatgcacagagtgaggtagaggacccacagcaggaccaccgaggcgcgcagggcacaaggtttgccctctaggagaaagcaaggtgaaccgtgctccacacatagtttctcgaaaccagatttgtctgtttcgcatccttcttttccctttgctttaagaacaggagacaccagtactccggaattagtatgcaatttctttagaaagcaaagggaaacacttcctggctaattatcaccggccccgcccccacaccaaacctgagctgaatacttaggttcctaggtgtggaaccggaaagccaggtgatagactccatcctgccccctcccctccccgcctagtttccactcgggtccttgcagaaagtgtcaaaacccacctaggggcgggggggggggggaatgcctgaaggtgcattaaacacacgaaaggccgaacctcagagagaaaggaactcaagacaagccagtaagccatactaagccacactctcccaactcctcctaaactttcctttttgcgcaaacgctcggtccggggcttttctgtacgtctcggatgattcgatagatctgtgggctttgcattcacctgctttcggtcttgagtaaacagagatctcctctctcccctggggagcggctcaggggcgcccaggcgggctctcttcctctagggatgcagagcccgtgtccagcccgggactatggggagcggcgtccgtgcgcccagagagcctggctctctacaccttggactccgaggagaagccctggcgccccggctcgtccaggctcgaatcgctgtccacagtggttgtcccgccgttgcagccggtccagggctccagcaggcgcgccggtggggtggtcccggcgtcgtcgtcgtcgtcgtccgagggagctccgggggacggcggcggcccagctctcgccaggcagccggaggcgcgcggccggtccccgtgggctgcgcggcgtctgcaggcggcccggcgcgcgcagcagagcaggcgctggaaagccttgcggaagtcggggctgcggcagtagatgatggggttgaaggccgagttggcgtagcccagccagttgaagaagacgaagaggcgatccggcaccaggtcgcggtggaaagccttcaccacgttggccaggaagaagggcagccagcagagcgtgaacacacccatgatgatgcccagtgtcttgagcgccttctgctcgcgcagagccacgaggcgcgacggccgccgcttgctggagcgcccgttggccagcgagtctgcggggcgcggtggcccaggtgacggcgagggctcaggcgagggcggccgggctgggccgccgaggaagcggcgctcgcagctgtcgatcttctttacctgtttttgggcctcgcggaacacccgcaggtacacgaaggccatgatgcacaggggcacgtagaaggagacgacggacgaggcgatggcgtaggccctgttggtgacgaaatcgcagcacttggggtcgttgtagcagcggcgcgcttcgtcgctctcggcccgccaccagtgcatgaggatgggcaggaaggacaccaacgccgagatggcccacactgtgcacacgagggcccgcgctcgcgcgcgcgtcagcaaactctggtagcgaaagggcgacgtgatggcgaggtagcggtccagggcgatgacacacagggtctcaatgctggccgtcacacacagcacatctaccgaagtccagagctcgcagaagaaggagccgtactcccagcggccccacaccacgatggtggccccgaaaggcaccaccagcaatcccatgaccagatcagcgctggccagggacatgatgaagaggttggtgagcgtctgcagccgcggggtcttggcgatggccacgatcaccagcacgttacccaccacgatgagcagaacgatgagcgccagcagtaggcccatacccgcggtccactgctgcgacagcggcgctgagccctcgctggctggaggcagcagcgaggcgggaggcgacgcgagcaccagcagccgcgccgcggtggccgcaccgtcgggcagcggcgcggcggacgacaggttgcagggttcggaggcgcccagggcgagcgcccccgcgcccatgccgagctgcggaggccgggggcggggggtgtggcggggctgggccgcgcctggggagcaccccaggagccggggctgcggggcccgcgcggggaggtcgcggccaggtcagggcagccgcggctcggggccggaggcatggacgccgggcgccttctcctccgtagccgagcgctgtctccgccgccgccgccgccgctgctgctggagccgctgtcgctgctggaagagccgccgggacctcagcatgtttct

SEQ ID NO: 7 - DNA, 1401 bp, Rattus norvegicus
  source 1..1401: mol_type = genomic DNA
ctacaccttggactcggaggagaagccctggcgtcccggctcgtccaggctcgaatcgctgtccacagtggtcgtcccgccgttgcagccggcccagggctccaacaggcgcgcgggtggggtggccccggcgtcatcgtcgtcgtcgtccgaaggagccccgggggacggcggcggcccagctctcgccaggcagcccgaggcgcgcggccggtccccgtgggctgcgcggcgtctgcaggcggcccggcgcgcgcagcaaagcaggcgctggaaagccttgcggaagtcggggctgcggcagtagatgatggggttgaaggccgagttggcgtagcccagccagttgaagaagacgaagaggcgatccggcaccaggtcgcggtggaaagctttcaccacgttggccaggaagaagggcagccagcagagcgtgaacacacccatgatgatgcccagtgtcttgagcgccttctgctctcgcagagccacgaggcgcgacggccgccgcttgctggagcgcccgttggccagcgagtctgcggggcgcggtggccctggtgatggcgagggcgcgggcgagggcggccggggcgggcccgtgaggaagcggcgctcgcagctgtcgatcttcttcacctgtttctgggcctcgcggaacacccggaggtacacgaaggccatgatgcacaggggcacgtagaaggagacgacggacgaggcgatggcgtaggcccggttggtgacgaaatcgcagcacttggggtcgttgtagcagcggcgcgcttcgtcgctctcggcccgccaccagtgcatgaggatgggcaggaaggacaccagcgcggagatggcccacactgtgcacacgagggcccgcgctcgcgcgcgcgtcagcaggctctggtagcgaaagggcagcgtgatggcgaggtagcggtccagggcgatgacacacagggtctcgatgctggccgtcacacatagcacgtctaccgaagtccagagctcacagaagaaggagccgtactcccagcggccccacaccacaatggtggccccgaaaggcaccaccagcagtcccatgaccagatcggcgctggccagggacatgatgaagaggttggtgagcgtctgcagccgcggggtcttggcgatggccacgatcaccaacacgttgcccactacgatgagcagcacgatgagcgccaggagtaggcccatacccgcggtccactgctgcgacagcggcgctgagccctcgctggctggaggcagcagcgaggcgggaggcgacgcgagcaccagcagtcgtgccgcggtggccgcgccgtcgggcagcggcgcggccgacgacaggttgcagggttcggaggcgcccagggcgagcgcccccgcgcccat

SEQ ID NO: 8 - DNA, 2891 bp, Macaca mulatta
  source 1..2891: mol_type = genomic DNA
ttgattgtgcttcattggtatttattgcacatggaccaattcctcacacagtagttagttgcaccagagtataaatacttggtaaaacacacaagaggaagtagagttcacacacaagtgctaactttcaccagcaaattcacgtgggcacttggacataaaaaaaaaaaaataaaaaatccttaagataattatatttataatatggatacagttacagtaccatgataaaggagtataaaaaggtattttccccaataaatcattagctcaataacatactagacaacagaagtagagtttgaattttattttagtttttaagatctgcccagcccctccccctttaaaaaatatttaatttctttttgtgcaagtaacatctcctgtggactttgtaattcctaacactgtgcaaaaatggcattttgaaccactcctttttttgttgtttttgtttttatccacatgtgcagtaatctgaactgtttctctctctctaatgtcctgtcttcaattgacagagtcacatgtcacagagagaggctctgcgcctggtccttccaactaatattgatacataaataagctgtttaatataaacaagtcgttctatctgctgtgcaaacgcacagtgtgaggtagaaatccctcagcctgaccacccaggcgcgcgggggacggccggtttgccctacacaaggaaagcaaggtggggcttgttccaagaagagcttaacatttcttgaaacgtgaatttttttttttttgcctccatcctttctctttgctttcatgacagcagaactcattacttagaaattaaaatgaaatttatctggaaagcaaaagaaatacgtcttgacaaactgtcattctcctccctctggctggtagactgctcctgttcctgggaaagggataggagccacgctgatcgattttaatcccctcctaatgcttcttccttcccgtaacccacccaacttccactccggtcctcgcagagagtgtcaaaaaccaacgtgggggaaaaaaaatctaaagatgcatcacacgcacatacaaaagaaggccggaccacaaacagaaaaaaaaaaaaaaaaaggaagaaagaaagaaaaaaaaccaaggaacatcagcaagccactctcccatccctccccaaactttcctttttgtgcaatggtccgtggcttttctgtttgcctcggatgattcagacgaggattgtgggcttcgagttcacctgctttcggtcttgagtaaacacagatctcctcgttcccccgggaagtcgttccggggcgcccgggctctcctcctcccggggtgcccggcgtcctcgcccggcgccgggccctacaccttggactccgaggcgaatccggggcggcacggctcgtccaggctcgagtcgctgtccgccgccgccccgccgttgcagccggcccagggctccagcaggcgcgcgggctgcgtggccccgacgacatcgtcgtcgtcgtcgtccgaggcggccccgggcgacggcgggggtccgggccgggccagacagcccgaggcgcgcggccggtctccgtgggccgcgtggcgccggcgggcagccctgcgcgcgcagcagagcagtcgctggaaggcgttgcggaagtcggggctgcggcagtagatgatggggttgaaggccgagttggcgtagcccagccagttgaagaagacgaagaggcggtcgggcaccagctcgcggtggaaggccttcaccacgttggccaggaagaagggcagccaacagagcgtgaacacgcccatgatgatgcccagcgtcttgagcgccttctgctcgcgcagggccacgaggcgcgagggccgccgcttacccgcacgtccgttgaccagcggggcggtggtggcagcggcggcggcggggcgcggaggtccgggcggcggcgcggggaccggcgagggcgagggcgagggcgagggcgagggcggccgcgcggggccgccgaggaaacggcgctcgcagctgtcgatcttcttcacctgcttctgggcctcgcggaacacccgcaggtacacgaaggccatgatgcacaggggcacgtagaaggagaccacggacgaggcgatggcgtaggcccggttggtgacgaaatcgcagcacttggggtcgttgtagcagcggcgcgcctcgtcgctctccgcccgccaccaatgcatgaggatgggcaggaaggacaccagggctgagatggcccacacggtgcacacgaggccccgcgcccgcgcgcgcgtcagcaggctctggtagcggaagggcgaggtgatggcgaggtagcggtccagggcgatgacacacagggtctcgatgctggccgtcacgcacagcacgtccaccgaggtccacagctcgcagaagaaggagccgtactcccagcggccccacaccacgatggtggccccgaacggcaccaccagcagccccatgaccaggtcggcgctggccagggacatgatgaagaggttggtgagcgtctgcagccgcggcgtcttggcgatggccacgatcaccagcacgttgcccgccacgatgagcagcacgatgagcgccatcagcagacccatgcccgccgtccactgctgcgacagcggctcggggccttcgctggcgggaggcagcaacgaggcgggcggcgacgcgggcaccagcagccgcgccgcggtggccacgccgtcggggagcggtgcggccgacgacaggttaccgggctcggaggcgcccaggacgagcgcccccgcgcccatgccgagttgcggaggccggaggcggggggtgtggcagggctgggccttggttggggaacaccccagaagcctggacggcggggtgc

SEQ ID NO: 9 - DNA, 1443 bp, Macaca fascicularis
  source 1..1443: mol_type = genomic DNA
atgggcgcgggggcgctcgtcctgggcgcctccgagcccggtaacctgtcgtcggccgcaccgctccccgacggcgtggccaccgcggcgcggctgctggtgcccgcgtcgccgcccgcctcgttgctgcctcccgccagcgaaggccccgagccgctgtcgcagcagtggacggcgggcatgggtctgctgatggcgctcatcgtgctgctcatcgtggcgggcaacgtgctggtgatcgtggccatcgccaagacgccgcggctgcagacgctcaccaacctcttcatcatgtccctggccagcgccgacctggtcatggggctgctggtggtgccgttcggggccaccatcgtggtgtggggccgctgggagtacggctccttcttctgcgagctgtggacctcggtggacgtgctgtgcgtgacggccagcatcgagaccctgtgtgtcatcgccctggaccgctacctcgccatcacctcgcccttccgctaccagagcctgctgacgcgcgcgcgggcgcggggcctcgtgtgcaccgtgtgggccatctcagccctggtgtccttcctgcccatcctcatgcattggtggcgggcggagagcgacgaggcgcgccgctgctacaacgaccccaagtgctgcgatttcgtcaccaaccgggcctacgccatcgcctcgtccgtggtctccttctacgtgcccctgtgcatcatggccttcgtgtacctgcgggtgttccgcgaggcccagaagcaggtgaagaagatcgacagctgcgagcgccgtttcctcggcggccccgcgcggccgccctcgccctcgccctcgccctcgccctcgccggtccccgcgccgccgcccggacccccgcgccccgccgccgccgctgccaccaccgccccgctggtcaacggacgtgcgggtaagcggcggccctcgcgcctcgtggccctgcgcgagcagaaggcgctcaagacgctgggcatcatcatgggcgtgttcacgctctgttggctgcccttcttcctggccaacgtggtgaaggccttccaccgcgagctggtgcccgaccgcctcttcgtcttcttcaactggctgggctacgccaactcggccttcaaccccatcatctactgccgcagccccgacttccgcaacgccttccagcgactgctctgctgcgcgcgcagggctgcccgccggcgccacgcggcccacggagaccggccgcgcgcctcgggctgtctggcccggcccggacccccgccgtcgcccggggccgcctcggacgacgacgacgacgatgtcgtcggggccacgcagcccgcgcgcctgctggagccctgggccggctgcaacggcggggcggcggcggacagcgactcgagcctggacgagccgtgccgccccggattcgcctcggagtccaaggtgtag

SEQ ID NO: 10 - DNA, 1443 bp, Macaca fascicularis
  source 1..1443: mol_type = genomic DNA
ctacaccttggactccgaggcgaatccggggcggcacggctcgtccaggctcgagtcgctgtccgccgccgccccgccgttgcagccggcccagggctccagcaggcgcgcgggctgcgtggccccgacgacatcgtcgtcgtcgtcgtccgaggcggccccgggcgacggcgggggtccgggccgggccagacagcccgaggcgcgcggccggtctccgtgggccgcgtggcgccggcgggcagccctgcgcgcgcagcagagcagtcgctggaaggcgttgcggaagtcggggctgcggcagtagatgatggggttgaaggccgagttggcgtagcccagccagttgaagaagacgaagaggcggtcgggcaccagctcgcggtggaaggccttcaccacgttggccaggaagaagggcagccaacagagcgtgaacacgcccatgatgatgcccagcgtcttgagcgccttctgctcgcgcagggccacgaggcgcgagggccgccgcttacccgcacgtccgttgaccagcggggcggtggtggcagcggcggcggcggggcgcgggggtccgggcggcggcgcggggaccggcgagggcgagggcgagggcgagggcgagggcggccgcgcggggccgccgaggaaacggcgctcgcagctgtcgatcttcttcacctgcttctgggcctcgcggaacacccgcaggtacacgaaggccatgatgcacaggggcacgtagaaggagaccacggacgaggcgatggcgtaggcccggttggtgacgaaatcgcagcacttggggtcgttgtagcagcggcgcgcctcgtcgctctccgcccgccaccaatgcatgaggatgggcaggaaggacaccagggctgagatggcccacacggtgcacacgaggccccgcgcccgcgcgcgcgtcagcaggctctggtagcggaagggcgaggtgatggcgaggtagcggtccagggcgatgacacacagggtctcgatgctggccgtcacgcacagcacgtccaccgaggtccacagctcgcagaagaaggagccgtactcccagcggccccacaccacgatggtggccccgaacggcaccaccagcagccccatgaccaggtcggcgctggccagggacatgatgaagaggttggtgagcgtctgcagccgcggcgtcttggcgatggccacgatcaccagcacgttgcccgccacgatgagcagcacgatgagcgccatcagcagacccatgcccgccgtccactgctgcgacagcggctcggggccttcgctggcgggaggcagcaacgaggcgggcggcgacgcgggcaccagcagccgcgccgcggtggccacgccgtcggggagcggtgcggccgacgacaggttaccgggctcggaggcgcccaggacgagcgcccccgcgcccat

SEQ ID NO: 11 - DNA, 13993 bp, Homo sapiens
  source 1..13993: mol_type = genomic DNA
gtctccctctcgctgcctctgcagaaacagctcctgccagagcggcgctcggcgcggcgcggcgggcccggagcggcggcggcggctcttcctgcctccgcgcccaggagttgccggctccctttgacagcagagagccgggcaggggcctcaggaggactcgctgggagtgggcagaggcgcctcggcccctgccggcccaggcgggccccgcgcgccccccgcccctcctctccgcctcttctcgccctgcctctcccgatttattttttcaaatggtgtagccgccggaggtgcggtgctcagttcttggaaggggcccggatgtactgaggatgcgttacagtttcactcgaggaggcagtagtggaaaggagcagtttttggggtttgatgccataatgggaatcaggtaatcgtcggcggggaagaagaaacgctgcagaccacggcttcctcgaatcttgcgcgaaagccgccggcctcggaggagggattaatccagacccgccggggggtgttttcacatttcttcctcttcgtggctgctcctcctattaaaaccatttttggtccatggtcaatgagaatacgaggatgtacattccagaggaaaaccaccaaggttccaactatgggagcccacgccccgcccatgccaacatgaatgccaatgcggcagcggggctggcccctgagcacatccccaccccgggggctgccctgtcgtggcaggcggccatcgacgcagcccggcaggctaagctgatgggcagcgctggcaatgcgaccatctccacagtcagctccacgcagcggaagcggcagcaatatgggaaacccaagaagcagggcagcaccacggccacacgcccgccccgagccctgctctgcctgaccctgaagaaccccatccggagggcctgcatcagcattgtcgaatggaaaccatttgaaataattattttactgactatttttgccaattgtgtggccttagcgatctatattccctttccagaagatgattccaacgccaccaattccaacctggaacgagtggaatatctctttctcataatttttacggtggaagcgtttttaaaagtaatcgcctatggactcctctttcaccccaatgcctacctccgcaacggctggaacctactagattttataattgtggttgtggggctttttagtgcaattttagaacaagcaaccaaagcagatggggcaaacgctctcggagggaaaggggccggatttgatgtgaaggcgctgagggccttccgcgtgctgcgccccctgcggctggtgtccggagtcccaagtctccaggtggtcctgaattccatcatcaaggccatggtccccctgctgcacatcgccctgcttgtgctgtttgtcatcatcatctacgccatcatcggcttggagctcttcatggggaagatgcacaagacctgctacaaccaggagggcatagcagatgttccagcagaagatgacccttccccttgtgcgctggaaacgggccacgggcggcagtgccagaacggcacggtgtgcaagcccggctgggatggtcccaagcacggcatcaccaactttgacaactttgccttcgccatgctcacggtgttccagtgcatcaccatggagggctggacggacgtgctgtactgggtcaatgatgccgtaggaagggactggccctggatctattttgttacactaatcatcatagggtcattttttgtacttaacttggttctcggtgtgcttagcggagagttttccaaagagagggagaaggccaaggcccggggagatttccagaagctgcgggagaagcagcagctagaagaggatctcaaaggctacctggattggatcactcaggccgaagacatcgatcctgagaatgaggacgaaggcatggatgaggagaagccccgaaacatgagcatgcccaccagtgagaccgagtccgtcaacaccgaaaacgtggctggaggtgacatcgagggagaaaactgcggggccaggctggcccaccggatctccaagtcaaagttcagccgctactggcgccggtggaatcggttctgcagaaggaagtgccgcgccgcagtcaagtctaatgtcttctactggctggtgattttcctggtgttcctcaacacgctcaccattgcctctgagcactacaaccagcccaactggctcacagaagtccaagacacggcaaacaaggccctgctggccctgttcacggcagagatgctcctgaagatgtacagcctgggcctgcaggcctacttcgtgtccctcttcaaccgctttgactgcttcgtcgtgtgtggcggcatcctggagaccatcctggtggagaccaagatcatgtccccactgggcatctccgtgctcagatgcgtccggctgctgaggattttcaagatcacgaggtactggaactccttgagcaacctggtggcatccttgctgaactctgtgcgctccatcgcctccctgctccttctcctcttcctcttcatcatcatcttctccctcctggggatgcagctctttggaggaaagttcaactttgatgagatgcagacccggaggagcacattcgataacttcccccagtccctcctcactgtgtttcagatcctgaccggggaggactggaattcggtgatgtatgatgggatcatggcttatggcggcccctcttttccagggatgttagtctgtatttacttcatcatcctcttcatctgtggaaactatatcctactgaatgtgttcttggccattgctgtggacaacctggctgatgctgagagcctcacatctgcccaaaaggaggaggaagaggagaaggagagaaagaagctggccaggactgccagcccagagaagaaacaagagttggtggagaagccggcagtgggggaatccaaggaggagaagattgagctgaaatccatcacggctgacggagagtctccacccgccaccaagatcaacatggatgacctccagcccaatgaaaatgaggataagagcccctaccccaacccagaaactacaggagaagaggatgaggaggagccagagatgcctgtcggccctcgcccacgaccactctctgagcttcaccttaaggaaaaggcagtgcccatgccagaagccagcgcgtttttcatcttcagctctaacaacaggtttcgcctccagtgccaccgcattgtcaatgacacgatcttcaccaacctgatcctcttcttcattctgctcagcagcatttccctggctgctgaggacccggtccagcacacctccttcaggaaccatattctgttttattttgatattgtttttaccaccattttcaccattgaaattgctctgaagatcctaggcaatgcagactatgtcttcactagtatctttacattagaaattatccttaagatgactgcttatggggctttcttgcacaagggttctttctgccggaactacttcaacatcctggacctgctggtggtcagcgtgtccctcatctcctttggcatccagtccagtgcaatcaatgtcgtgaagatcttgcgagtcctgcgagtactcaggcccctgagggccatcaacagggccaaggggctaaagcatgtggttcagtgtgtgtttgtcgccatccggaccatcgggaacatcgtgattgtcaccaccctgctgcagttcatgtttgcctgcatcggggtccagctcttcaagggaaagctgtacacctgttcagacagttccaagcagacagaggcggaatgcaagggcaactacatcacgtacaaagacggggaggttgaccaccccatcatccaaccccgcagctgggagaacagcaagtttgactttgacaatgttctggcagccatgatggccctcttcaccgtctccaccttcgaagggtggccagagctgctgtaccgctccatcgactcccacacggaagacaagggccccatctacaactaccgtgtggagatctccatcttcttcatcatctacatcatcatcatcgccttcttcatgatgaacatcttcgtgggcttcgtcatcgtcacctttcaggagcagggggagcaggagtacaagaactgtgagctggacaagaaccagcgacagtgcgtggaatacgccctcaaggcccggcccctgcggaggtacatccccaagaaccagcaccagtacaaagtgtggtacgtggtcaactccacctacttcgagtacctgatgttcgtcctcatcctgctcaacaccatctgcctggccatgcagcactacggccagagctgcctgttcaaaatcgccatgaacatcctcaacatgctcttcactggcctcttcaccgtggagatgatcctgaagctcattgccttcaaacccaagggttactttagtgatccctggaatgtttttgacttcctcatcgtaattggcagcataattgacgtcattctcagtgagactaatcactatttctgtgatgcatggaatacatttgacgccttgattgttgtgggtagcattgttgatatagcaatcaccgaggtaaacccagctgaacatacccaatgctctccctctatgaacgcagaggaaaactcccgcatctccatcaccttcttccgcctgttccgggtcatgcgtctggtgaagctgctgagccgtggggagggcatccggacgctgctgtggaccttcatcaagtccttccaggccctgccctatgtggccctcctgatcgtgatgctgttcttcatctacgcggtgatcgggatgcaggtgtttgggaaaattgccctgaatgataccacagagatcaaccggaacaacaactttcagaccttcccccaggccgtgctgctcctcttcaggtgtgccaccggggaggcctggcaggacatcatgctggcctgcatgccaggcaagaagtgtgccccagagtccgagcccagcaacagcacggagggtgaaacaccctgtggtagcagctttgctgtcttctacttcatcagcttctacatgctctgtgccttcctgatcatcaacctctttgtagctgtcatcatggacaactttgactacctgacaagggactggtccatccttggtccccaccacctggatgagtttaaaagaatctgggcagagtatgaccctgaagccaagggtcgtatcaaacacctggatgtggtgaccctcctccggcggattcagccgccactaggttttgggaagctgtgccctcaccgcgtggcttgcaaacgcctggtctccatgaacatgcctctgaacagcgacgggacagtcatgttcaatgccaccctgtttgccctggtcaggacggccctgaggatcaaaacagaagggaacctagaacaagccaatgaggagctgcgggcgatcatcaagaagatctggaagcggaccagcatgaagctgctggaccaggtggtgccccctgcaggtgatgatgaggtcaccgttggcaagttctacgccacgttcctgatccaggagtacttccggaagttcaagaagcgcaaagagcagggccttgtgggcaagccctcccagaggaacgcgctgtctctgcaggctggcttgcgcacactgcatgacatcgggcctgagatccgacgggccatctctggagatctcaccgctgaggaggagctggacaaggccatgaaggaggctgtgtccgctgcttctgaagatgacatcttcaggagggccggtggcctgttcggcaaccacgtcagctactaccaaagcgacggccggagcgccttcccccagaccttcaccactcagcgcccgctgcacatcaacaaggcgggcagcagccagggcgacactgagtcgccatcccacgagaagctggtggactccaccttcaccccgagcagctactcgtccaccggctccaacgccaacatcaacaacgccaacaacaccgccctgggtcgcctccctcgccccgccggctaccccagcacggtcagcactgtggagggccacgggccccccttgtcccctgccatccgggtgcaggaggtggcgtggaagctcagctccaacagggaaaggcacgttccgatgtgtgaggatctggagctcaggagggattcaggctcagcagggactcaggctcactgccttctgctcaggagagcaaacccctctaggtgccactcccgggagagccaggcagccatggcgggtcaggaggagacgtctcaggatgagacctatgaagtgaagatgaaccatgacacggaggcctgcagtgagcccagcctgctctccacagagatgctctcctaccaggatgacgaaaatcggcaactgacgctcccagaggaggacaagagggacatccggcaatctccgaagaggggtttcctccgctctgcctcactaggtcgaagggcctccttccacctggaatgtctgaagcgacagaaggaccgagggggagacatctctcagaagacagtcctgcccttgcatctggttcatcatcaggcattggcagtggcaggcctgagccccctcctccagagaagccattcccctgcctcattccctaggccttttgccaccccaccagccacacctggcagccgaggctggcccccacagcccgtccccaccctgcggcttgagggggtcgagtccagtgagaaactcaacagcagcttcccatccatccactgcggctcctgggctgagaccacccccggtggcgggggcagcagcgccgcccggagagtccggcccgtctccctcatggtgcccagccaggctggggccccagggaggcagttccacggcagtgccagcagcctggtggaagcggtcttgatttcagaaggactggggcagtttgctcaagatcccaagttcatcgaggtcaccacccaggagctggccgacgcctgcgacatgaccatagaggagatggagagcgcggccgacaacatcctcagcgggggcgccccacagagccccaatggcgccctcttaccctttgtgaactgcagggacgcggggcaggaccgagccgggggcgaagaggacgcgggctgtgtgcgcgcgcggggtcgaccgagtgaggaggagctccaggacagcagggtctacgtcagcagcctgtagtgggcgctgccagatgcgggcttttttttatttgtttcaatgttcctaatgggttcgtttcagaagtgcctcactgttctcgtgacctggagttaaccggaacagcgtcttcattcatttctgttgggaccagacgcggagcctgggtgcgcgagccgccctccgggaggaaggcgcccggctgcgtctgcagaggcggggagaggaggcggcgagggtcccggggcgcgaggaaggcgcctgccctctcccagctcgcaggccccgggcccggccgcgcctccgcggggagagcaccccggcttcccgcgcgccctcaccaaaaggaccctacagcaaacgggtgtctttcgactctgcttgtagaaaccatttgcacatattctgtacgagcctcgctgtctccctagagccagggccctgcggatttggagaagggagcggggcaggacttccaggaggaccccaacccggcccggagagggaggaggaggcctccaggggcgcggagctctggggatgggcgtcgggccggcagtggtgcggctcactccgtccctgcccacctgcgacgggatcccccgaccggcacgggccacgccgagctcccggccagccgccggcccgcaggcagcgcgagggaggagctgcgccgccggctccgcccaaccaggtggtgctgagcttccgctgagcgctcttttgttttgtggtttgacacttttcttgacagcatgttgcagtttcttttcggttttggttttttttaaatgttttattttgctttcccagcgggaggggaggaagaagagtgtttacaaagtcctgtagccccctcacctttctgttttcacttttgccaatgtacatcgggtttggttttcttgtattatttaaacggttgtggtttcctttttccacggaggttcaatagaagccgctgcaggagagttttaccaaccattgtgtatgcccaataatttgttatcatttccttaggtagtaacctatttttgttctggtttggttcggttatctaatggaaaggtaactggcaatgcacttgatgtggtcttgcacatgtgggtgatagagttgggttcctttttatgctgggtgtacaggtgggtttgggagagaggagcatgcgcgagagagtctccgagtgtgtgcgacgcgtgtgtgtgtggtgggttgtctgtgtgcatatgtcctgcccgtgtatatgcacccacaccatgtgcccgtgcacaccagtgactacgcagtcccccctttctggtttagctgtgggaagatctgaatctggggccgtttgaaagcaaaaacaaaccactgtctctgcttctgaaacgggaatcagtaactctttgcattttctgtcccacaagatatgcaaaaacaatgcaataatattcatttaaaaatacaattgtgagttgtgttggcattaaaactgtattttaaaaaaagacagaaatttaagggaaaaacacaagaaggcattttgcttcaatatattccgtgtaatgttttattgcattgataatgtttctgttgaagaaaccgttatacttgaattcaggtcagtttcagtatttttcaaatatttttttaaaactgaattgcaattgtgccaagcgaatataatgaattgaattaagttggttttcggattcacttcttgtatattttgctgcatgtaaagtaaatcattttgtatttggagtgtgacaagctttacctttgaactcaagtgcttttctatatgtggttgggggaaagggaacaagttttctttagtttgcacaatgagcaaaggtatcaccagtgtagtcattattctgctctccacaaacaggtttggacattactgttttgcatatcttgtgtttgcttacatttccctcaatttttccaaaatcgtttgctgggtatgtttgtaccgcctcttgctgtgagagaccaggacctattttattccagtcttcactctgtccactctgctctggtcatctgatttggtacttctccaagaacagcccttcactgtgaggtgcagggaggcgttctgatgagccctcagtcactgggccgtcatccgcatcccccatggaagaggtagctggctttcccttcccttccaccacacggaattttctctttggcttccttaggaaagtgtacactaaccgggaggataaaattaaagtcaggctgcttggagggaggggcatcctcacttccggattcttgttgctctacccaacaaggacagcaggggctcgagaaaggaactggtgaaaccctgatccatctgaaagtcaactctgcgtgctcctttctccatcccttcctcactctggagcagcctttccttcaggcttgccctaatgtttgggctgccggggagggggccaggacaagggaagaggcatccggagctcacagtgggggtgggaacagatttttgtgggggcatctctaatgctcacttatatctccctagaacatcactcttttggtgctgtgtccttcaaatgtatgtcaacagtggtggctgaaaagggactgctttggggaaaacaggacccaaccattcacccagaattgacccattaaatctcttccagtcctagtgttccctgagcccctcttggcacatatataagtaagctagaaattacaataagggacagtccattcctctatgacagcttgctggactgattcatgacaaagtggagaaatgtactcaatactccccggttaacacagtctagaaacagagtttctttatggatatccacacccaagtcatccaaactttcttgattccttttcactgccatcaaggtcctctagaaattgagtttaggtatcatcctttgaaaagttcccaagatttctaccaggaggtacacacaggcgttccctgtctagggcaggaggactatcctagcttgaccttctgatccactagaataagactggcgtatgatgcctgtcatcagaacagactggcacaagtagtgacatcaatgaaccacagcacaatcttccaagtgatgtctactctccacctaaaatggaattttccccatgaccttgtaaaacataattgtcacatcttccatacccctcctgacagcccccaagtgtcaggagaaaacagtcaggggctaagggcccaagggacttgaagaaacaacagtttaaggtctgcagtttggtcaacttaattcttgtcctccgaccagccctgcctctttcatttccagaccttggagaatttttcccagctttgattcagaaggtactagttataacccctttccttcttcttaatccaataggcctcactctcactgggaaatccactcaaaggaacaaggcaatgtctctcattctatttcccagttccaaattccaggtgcttgtctggagtgaagctacccgttactttctcccagcttttctccacccagcatgtctcctgcccatgcagctgaagacagtggggcaacctcaggagaagcagacctttccatgcccaagttcatctcctgagcaacagtgacacctagaaaatgaggactttggaagtcacccaaaagatggtggctactttatggagtcctgaagatacacagccaccactcctaaaggcaaagaaagaaaacacgaatgtaggtcagggatagagtggaaccctggtcatcggggtttttagcctcatcgtgggaaaggtggtaaaggaggatgatggcatctccatccctagaggccaagaattgaaatatcattgtcaaggattagaaacaattcagcaaagaggccacaaaaagggcctgctgactcccagaagacctctttaaaccccaggggaggcaaatacttgctgatggagtctgggccgtttccatattttaaagaagacctgcctctggggcaaatgtcagcacagagaggactgggaggagaatggaggcaagaaaagggcatattttgactccctctgtgcctcttcccagttcatggaaggatgtgttcagcttacccacccacagtgaccagtgtggtggagccgctgacatctcaaggatctatttgggaaggtgagaagagtactcattccatctgggggtgttgttccagccacatcagcctacctggtgggatgtgggggtgtctgccaccctgtcccccctctgctgatgtccctcccctcaggctgtccaggtgccacctgacacaggctgctgtgcaaagacaggcggggaagcccaaacctcactcccagggaggccctcagccgccagagtccaggttctccagaggctacgatttgaggaggttgagggggaagacaggagggaaagaaaagtcctacaactgtcaggaatggggcacctttccctgtccctaagcaaagctccctcttcccactgccctccccagccccagctccctgtcctccccaacacctagtgagaaagacggtgcgtggaagggagtcccatgggcagatgcttacacgacctctttgtgaagcctcttctgggtttaacttcattcatcaatttattcttatgtcaaagcaatgaaacttttctttctggagccagataccaatacaacaggtgaacgggtttctgccacatctctacattgacgggggatgcttgaacaacccccctcactacacagacacacaccgttaaggcacaagggctggggttgagctctagatgagggactttcctgctcctgcaagggtgagcactgtatacacagacaaggagggtgcagtagagtgactcccttggatggaagtagtaccatcagaacctactattattatgacataaattctatttacatacattgagagaatactacaatcaacactttttcctgggatgactttaagaggtttgagccacagcacctgaagtggcaaagatccatggtctttgtagggtattagagaactcttccagtcacctctgaaagcactctagatcttgcagctgagtggatgaagtgtaacaaatctgttgcacgctgagaggagtcagaattagcatttttcatgaaagttccccacgtctctactaagaatgaggaagaaaagactaagactaggtaattacacagaggcttgaaatgttacatcaccagagccaagtcctctcccttcagatcagttactggctgctacacagggacacccccaccttttcagggcatcccatgcactccacttctcaggatctaaggaatttgactttgtagggatcccagaaagggcactgtgccacttcccctggtgtgaatcagacatacattgtacattcatttctaaaattcactcatgcacctcaaaccaaggtcattatccaaaaaaaaaaaaaaaaagctctgggtggaagagtttgtaagttttaagagagggtcatttctatgtgaggaaatgcagaaatggacagaatgattcttattcactgtttgggtctggagaattcccattgtggaaatcttagagatctcaagtttattaccaagggaataaggaaaaaaaggtgagcaggcaccaggccaagcagtggctcccttgccaaggaacctgaggctgcaggtttcagggacccccttgaagaaacctctcctggccattggccaggagaaaagagaagtctctcctgtagagtcacaagagaagcaaaagagggtgggtcactgggtcctggacatagcccccaaccccaagacttcccaatatggagaaactacaccaatgtttaaaaggggaaaaggaaagaacttgtacatcaagggaagatgatttgtaaacacacagtcctgtgcagaaagatccccttcaggaggtgtctccagcatcccaaagctgtgcgcaccttctcttttcctgcctcaggccacctatgcatccagctgcagcccatacccacacctgaaatccatctcttgaatcccagccaggttatataccaccccattgccatgtcctgtcctggccagaatgcatgctgttcccccaagcctcgtgggagtgaggccatgggaaacagagatgagcatgtctggacaagtctgtgatggtagtggatgagaataacccatggcaaaacacgcacattcattaagaaatagggcgacagattccccgttggtgaagcactgaaaggtctattactctcataatattgctgttttattttaatccaccagagctaccatgcaaaactttcctcctgtgaaacgctccagataaagctcctctaatctccccttccctcatgtcctccagctcaaacccaccttcatcccccaaaccaatctgtatcatgcctgttatcagagaggcacagaaagatgggcagtgcctccgttgtcaccattccccacacccctacacacccccacaccctcccctccaggctccacgacttcacagtcttactgttgtaaatatcattgtacagtttgtaatcctcaaataatcccattgtcagaggcctcgcctgatgggccttctcaccctcgagaaaggccagggaatctagaaggggcaacccttcaaggagagcttcagggtcatctctgtgtgagacactattgtatattcctgtaagattgcatttttatctaaggaatgatgttatttaaaaaacaaacaaaaaacacaaaaaataagaattgcaaataaatttcttaacaatgtcta

SEQ ID NO: 12 - DNA, 13993 bp, Homo sapiens
  source 1..13993: mol_type = genomic DNA
tagacattgttaagaaatttatttgcaattcttattttttgtgttttttgtttgttttttaaataacatcattccttagataaaaatgcaatcttacaggaatatacaatagtgtctcacacagagatgaccctgaagctctccttgaagggttgccccttctagattccctggcctttctcgagggtgagaaggcccatcaggcgaggcctctgacaatgggattatttgaggattacaaactgtacaatgatatttacaacagtaagactgtgaagtcgtggagcctggaggggagggtgtgggggtgtgtaggggtgtggggaatggtgacaacggaggcactgcccatctttctgtgcctctctgataacaggcatgatacagattggtttgggggatgaaggtgggtttgagctggaggacatgagggaaggggagattagaggagctttatctggagcgtttcacaggaggaaagttttgcatggtagctctggtggattaaaataaaacagcaatattatgagagtaatagacctttcagtgcttcaccaacggggaatctgtcgccctatttcttaatgaatgtgcgtgttttgccatgggttattctcatccactaccatcacagacttgtccagacatgctcatctctgtttcccatggcctcactcccacgaggcttgggggaacagcatgcattctggccaggacaggacatggcaatggggtggtatataacctggctgggattcaagagatggatttcaggtgtgggtatgggctgcagctggatgcataggtggcctgaggcaggaaaagagaaggtgcgcacagctttgggatgctggagacacctcctgaaggggatctttctgcacaggactgtgtgtttacaaatcatcttcccttgatgtacaagttctttccttttccccttttaaacattggtgtagtttctccatattgggaagtcttggggttgggggctatgtccaggacccagtgacccaccctcttttgcttctcttgtgactctacaggagagacttctcttttctcctggccaatggccaggagaggtttcttcaagggggtccctgaaacctgcagcctcaggttccttggcaagggagccactgcttggcctggtgcctgctcacctttttttccttattcccttggtaataaacttgagatctctaagatttccacaatgggaattctccagacccaaacagtgaataagaatcattctgtccatttctgcatttcctcacatagaaatgaccctctcttaaaacttacaaactcttccacccagagctttttttttttttttttggataatgaccttggtttgaggtgcatgagtgaattttagaaatgaatgtacaatgtatgtctgattcacaccaggggaagtggcacagtgccctttctgggatccctacaaagtcaaattccttagatcctgagaagtggagtgcatgggatgccctgaaaaggtgggggtgtccctgtgtagcagccagtaactgatctgaagggagaggacttggctctggtgatgtaacatttcaagcctctgtgtaattacctagtcttagtcttttcttcctcattcttagtagagacgtggggaactttcatgaaaaatgctaattctgactcctctcagcgtgcaacagatttgttacacttcatccactcagctgcaagatctagagtgctttcagaggtgactggaagagttctctaataccctacaaagaccatggatctttgccacttcaggtgctgtggctcaaacctcttaaagtcatcccaggaaaaagtgttgattgtagtattctctcaatgtatgtaaatagaatttatgtcataataatagtaggttctgatggtactacttccatccaagggagtcactctactgcaccctccttgtctgtgtatacagtgctcacccttgcaggagcaggaaagtccctcatctagagctcaaccccagcccttgtgccttaacggtgtgtgtctgtgtagtgaggggggttgttcaagcatcccccgtcaatgtagagatgtggcagaaacccgttcacctgttgtattggtatctggctccagaaagaaaagtttcattgctttgacataagaataaattgatgaatgaagttaaacccagaagaggcttcacaaagaggtcgtgtaagcatctgcccatgggactcccttccacgcaccgtctttctcactaggtgttggggaggacagggagctggggctggggagggcagtgggaagagggagctttgcttagggacagggaaaggtgccccattcctgacagttgtaggacttttctttccctcctgtcttccccctcaacctcctcaaatcgtagcctctggagaacctggactctggcggctgagggcctccctgggagtgaggtttgggcttccccgcctgtctttgcacagcagcctgtgtcaggtggcacctggacagcctgaggggagggacatcagcagaggggggacagggtggcagacacccccacatcccaccaggtaggctgatgtggctggaacaacacccccagatggaatgagtactcttctcaccttcccaaatagatccttgagatgtcagcggctccaccacactggtcactgtgggtgggtaagctgaacacatccttccatgaactgggaagaggcacagagggagtcaaaatatgcccttttcttgcctccattctcctcccagtcctctctgtgctgacatttgccccagaggcaggtcttctttaaaatatggaaacggcccagactccatcagcaagtatttgcctcccctggggtttaaagaggtcttctgggagtcagcaggccctttttgtggcctctttgctgaattgtttctaatccttgacaatgatatttcaattcttggcctctagggatggagatgccatcatcctcctttaccacctttcccacgatgaggctaaaaaccccgatgaccagggttccactctatccctgacctacattcgtgttttctttctttgcctttaggagtggtggctgtgtatcttcaggactccataaagtagccaccatcttttgggtgacttccaaagtcctcattttctaggtgtcactgttgctcaggagatgaacttgggcatggaaaggtctgcttctcctgaggttgccccactgtcttcagctgcatgggcaggagacatgctgggtggagaaaagctgggagaaagtaacgggtagcttcactccagacaagcacctggaatttggaactgggaaatagaatgagagacattgccttgttcctttgagtggatttcccagtgagagtgaggcctattggattaagaagaaggaaaggggttataactagtaccttctgaatcaaagctgggaaaaattctccaaggtctggaaatgaaagaggcagggctggtcggaggacaagaattaagttgaccaaactgcagaccttaaactgttgtttcttcaagtcccttgggcccttagcccctgactgttttctcctgacacttgggggctgtcaggaggggtatggaagatgtgacaattatgttttacaaggtcatggggaaaattccattttaggtggagagtagacatcacttggaagattgtgctgtggttcattgatgtcactacttgtgccagtctgttctgatgacaggcatcatacgccagtcttattctagtggatcagaaggtcaagctaggatagtcctcctgccctagacagggaacgcctgtgtgtacctcctggtagaaatcttgggaacttttcaaaggatgatacctaaactcaatttctagaggaccttgatggcagtgaaaaggaatcaagaaagtttggatgacttgggtgtggatatccataaagaaactctgtttctagactgtgttaaccggggagtattgagtacatttctccactttgtcatgaatcagtccagcaagctgtcatagaggaatggactgtcccttattgtaatttctagcttacttatatatgtgccaagaggggctcagggaacactaggactggaagagatttaatgggtcaattctgggtgaatggttgggtcctgttttccccaaagcagtcccttttcagccaccactgttgacatacatttgaaggacacagcaccaaaagagtgatgttctagggagatataagtgagcattagagatgcccccacaaaaatctgttcccacccccactgtgagctccggatgcctcttcccttgtcctggccccctccccggcagcccaaacattagggcaagcctgaaggaaaggctgctccagagtgaggaagggatggagaaaggagcacgcagagttgactttcagatggatcagggtttcaccagttcctttctcgagcccctgctgtccttgttgggtagagcaacaagaatccggaagtgaggatgcccctccctccaagcagcctgactttaattttatcctcccggttagtgtacactttcctaaggaagccaaagagaaaattccgtgtggtggaagggaagggaaagccagctacctcttccatgggggatgcggatgacggcccagtgactgagggctcatcagaacgcctccctgcacctcacagtgaagggctgttcttggagaagtaccaaatcagatgaccagagcagagtggacagagtgaagactggaataaaataggtcctggtctctcacagcaagaggcggtacaaacatacccagcaaacgattttggaaaaattgagggaaatgtaagcaaacacaagatatgcaaaacagtaatgtccaaacctgtttgtggagagcagaataatgactacactggtgatacctttgctcattgtgcaaactaaagaaaacttgttccctttcccccaaccacatatagaaaagcacttgagttcaaaggtaaagcttgtcacactccaaatacaaaatgatttactttacatgcagcaaaatatacaagaagtgaatccgaaaaccaacttaattcaattcattatattcgcttggcacaattgcaattcagttttaaaaaaatatttgaaaaatactgaaactgacctgaattcaagtataacggtttcttcaacagaaacattatcaatgcaataaaacattacacggaatatattgaagcaaaatgccttcttgtgtttttcccttaaatttctgtctttttttaaaatacagttttaatgccaacacaactcacaattgtatttttaaatgaatattattgcattgtttttgcatatcttgtgggacagaaaatgcaaagagttactgattcccgtttcagaagcagagacagtggtttgtttttgctttcaaacggccccagattcagatcttcccacagctaaaccagaaaggggggactgcgtagtcactggtgtgcacgggcacatggtgtgggtgcatatacacgggcaggacatatgcacacagacaacccaccacacacacacgcgtcgcacacactcggagactctctcgcgcatgctcctctctcccaaacccacctgtacacccagcataaaaaggaacccaactctatcacccacatgtgcaagaccacatcaagtgcattgccagttacctttccattagataaccgaaccaaaccagaacaaaaataggttactacctaaggaaatgataacaaattattgggcatacacaatggttggtaaaactctcctgcagcggcttctattgaacctccgtggaaaaaggaaaccacaaccgtttaaataatacaagaaaaccaaacccgatgtacattggcaaaagtgaaaacagaaaggtgagggggctacaggactttgtaaacactcttcttcctcccctcccgctgggaaagcaaaataaaacatttaaaaaaaaccaaaaccgaaaagaaactgcaacatgctgtcaagaaaagtgtcaaaccacaaaacaaaagagcgctcagcggaagctcagcaccacctggttgggcggagccggcggcgcagctcctccctcgcgctgcctgcgggccggcggctggccgggagctcggcgtggcccgtgccggtcgggggatcccgtcgcaggtgggcagggacggagtgagccgcaccactgccggcccgacgcccatccccagagctccgcgcccctggaggcctcctcctccctctccgggccgggttggggtcctcctggaagtcctgccccgctcccttctccaaatccgcagggccctggctctagggagacagcgaggctcgtacagaatatgtgcaaatggtttctacaagcagagtcgaaagacacccgtttgctgtagggtccttttggtgagggcgcgcgggaagccggggtgctctccccgcggaggcgcggccgggcccggggcctgcgagctgggagagggcaggcgccttcctcgcgccccgggaccctcgccgcctcctctccccgcctctgcagacgcagccgggcgccttcctcccggagggcggctcgcgcacccaggctccgcgtctggtcccaacagaaatgaatgaagacgctgttccggttaactccaggtcacgagaacagtgaggcacttctgaaacgaacccattaggaacattgaaacaaataaaaaaaagcccgcatctggcagcgcccactacaggctgctgacgtagaccctgctgtcctggagctcctcctcactcggtcgaccccgcgcgcgcacacagcccgcgtcctcttcgcccccggctcggtcctgccccgcgtccctgcagttcacaaagggtaagagggcgccattggggctctgtggggcgcccccgctgaggatgttgtcggccgcgctctccatctcctctatggtcatgtcgcaggcgtcggccagctcctgggtggtgacctcgatgaacttgggatcttgagcaaactgccccagtccttctgaaatcaagaccgcttccaccaggctgctggcactgccgtggaactgcctccctggggccccagcctggctgggcaccatgagggagacgggccggactctccgggcggcgctgctgcccccgccaccgggggtggtctcagcccaggagccgcagtggatggatgggaagctgctgttgagtttctcactggactcgaccccctcaagccgcagggtggggacgggctgtgggggccagcctcggctgccaggtgtggctggtggggtggcaaaaggcctagggaatgaggcaggggaatggcttctctggaggagggggctcaggcctgccactgccaatgcctgatgatgaaccagatgcaagggcaggactgtcttctgagagatgtctccccctcggtccttctgtcgcttcagacattccaggtggaaggaggcccttcgacctagtgaggcagagcggaggaaacccctcttcggagattgccggatgtccctcttgtcctcctctgggagcgtcagttgccgattttcgtcatcctggtaggagagcatctctgtggagagcaggctgggctcactgcaggcctccgtgtcatggttcatcttcacttcataggtctcatcctgagacgtctcctcctgacccgccatggctgcctggctctcccgggagtggcacctagaggggtttgctctcctgagcagaaggcagtgagcctgagtccctgctgagcctgaatccctcctgagctccagatcctcacacatcggaacgtgcctttccctgttggagctgagcttccacgccacctcctgcacccggatggcaggggacaaggggggcccgtggccctccacagtgctgaccgtgctggggtagccggcggggcgagggaggcgacccagggcggtgttgttggcgttgttgatgttggcgttggagccggtggacgagtagctgctcggggtgaaggtggagtccaccagcttctcgtgggatggcgactcagtgtcgccctggctgctgcccgccttgttgatgtgcagcgggcgctgagtggtgaaggtctgggggaaggcgctccggccgtcgctttggtagtagctgacgtggttgccgaacaggccaccggccctcctgaagatgtcatcttcagaagcagcggacacagcctccttcatggccttgtccagctcctcctcagcggtgagatctccagagatggcccgtcggatctcaggcccgatgtcatgcagtgtgcgcaagccagcctgcagagacagcgcgttcctctgggagggcttgcccacaaggccctgctctttgcgcttcttgaacttccggaagtactcctggatcaggaacgtggcgtagaacttgccaacggtgacctcatcatcacctgcagggggcaccacctggtccagcagcttcatgctggtccgcttccagatcttcttgatgatcgcccgcagctcctcattggcttgttctaggttcccttctgttttgatcctcagggccgtcctgaccagggcaaacagggtggcattgaacatgactgtcccgtcgctgttcagaggcatgttcatggagaccaggcgtttgcaagccacgcggtgagggcacagcttcccaaaacctagtggcggctgaatccgccggaggagggtcaccacatccaggtgtttgatacgacccttggcttcagggtcatactctgcccagattcttttaaactcatccaggtggtggggaccaaggatggaccagtcccttgtcaggtagtcaaagttgtccatgatgacagctacaaagaggttgatgatcaggaaggcacagagcatgtagaagctgatgaagtagaagacagcaaagctgctaccacagggtgtttcaccctccgtgctgttgctgggctcggactctggggcacacttcttgcctggcatgcaggccagcatgatgtcctgccaggcctccccggtggcacacctgaagaggagcagcacggcctgggggaaggtctgaaagttgttgttccggttgatctctgtggtatcattcagggcaattttcccaaacacctgcatcccgatcaccgcgtagatgaagaacagcatcacgatcaggagggccacatagggcagggcctggaaggacttgatgaaggtccacagcagcgtccggatgccctccccacggctcagcagcttcaccagacgcatgacccggaacaggcggaagaaggtgatggagatgcgggagttttcctctgcgttcatagagggagagcattgggtatgttcagctgggtttacctcggtgattgctatatcaacaatgctacccacaacaatcaaggcgtcaaatgtattccatgcatcacagaaatagtgattagtctcactgagaatgacgtcaattatgctgccaattacgatgaggaagtcaaaaacattccagggatcactaaagtaacccttgggtttgaaggcaatgagcttcaggatcatctccacggtgaagaggccagtgaagagcatgttgaggatgttcatggcgattttgaacaggcagctctggccgtagtgctgcatggccaggcagatggtgttgagcaggatgaggacgaacatcaggtactcgaagtaggtggagttgaccacgtaccacactttgtactggtgctggttcttggggatgtacctccgcaggggccgggccttgagggcgtattccacgcactgtcgctggttcttgtccagctcacagttcttgtactcctgctccccctgctcctgaaaggtgacgatgacgaagcccacgaagatgttcatcatgaagaaggcgatgatgatgatgtagatgatgaagaagatggagatctccacacggtagttgtagatggggcccttgtcttccgtgtgggagtcgatggagcggtacagcagctctggccacccttcgaaggtggagacggtgaagagggccatcatggctgccagaacattgtcaaagtcaaacttgctgttctcccagctgcggggttggatgatggggtggtcaacctccccgtctttgtacgtgatgtagttgcccttgcattccgcctctgtctgcttggaactgtctgaacaggtgtacagctttcccttgaagagctggaccccgatgcaggcaaacatgaactgcagcagggtggtgacaatcacgatgttcccgatggtccggatggcgacaaacacacactgaaccacatgctttagccccttggccctgttgatggccctcaggggcctgagtactcgcaggactcgcaagatcttcacgacattgattgcactggactggatgccaaaggagatgagggacacgctgaccaccagcaggtccaggatgttgaagtagttccggcagaaagaacccttgtgcaagaaagccccataagcagtcatcttaaggataatttctaatgtaaagatactagtgaagacatagtctgcattgcctaggatcttcagagcaatttcaatggtgaaaatggtggtaaaaacaatatcaaaataaaacagaatatggttcctgaaggaggtgtgctggaccgggtcctcagcagccagggaaatgctgctgagcagaatgaagaagaggatcaggttggtgaagatcgtgtcattgacaatgcggtggcactggaggcgaaacctgttgttagagctgaagatgaaaaacgcgctggcttctggcatgggcactgccttttccttaaggtgaagctcagagagtggtcgtgggcgagggccgacaggcatctctggctcctcctcatcctcttctcctgtagtttctgggttggggtaggggctcttatcctcattttcattgggctggaggtcatccatgttgatcttggtggcgggtggagactctccgtcagccgtgatggatttcagctcaatcttctcctccttggattcccccactgccggcttctccaccaactcttgtttcttctctgggctggcagtcctggccagcttctttctctccttctcctcttcctcctccttttgggcagatgtgaggctctcagcatcagccaggttgtccacagcaatggccaagaacacattcagtaggatatagtttccacagatgaagaggatgatgaagtaaatacagactaacatccctggaaaagaggggccgccataagccatgatcccatcatacatcaccgaattccagtcctccccggtcaggatctgaaacacagtgaggagggactgggggaagttatcgaatgtgctcctccgggtctgcatctcatcaaagttgaactttcctccaaagagctgcatccccaggagggagaagatgatgatgaagaggaagaggagaaggagcagggaggcgatggagcgcacagagttcagcaaggatgccaccaggttgctcaaggagttccagtacctcgtgatcttgaaaatcctcagcagccggacgcatctgagcacggagatgcccagtggggacatgatcttggtctccaccaggatggtctccaggatgccgccacacacgacgaagcagtcaaagcggttgaagagggacacgaagtaggcctgcaggcccaggctgtacatcttcaggagcatctctgccgtgaacagggccagcagggccttgtttgccgtgtcttggacttctgtgagccagttgggctggttgtagtgctcagaggcaatggtgagcgtgttgaggaacaccaggaaaatcaccagccagtagaagacattagacttgactgcggcgcggcacttccttctgcagaaccgattccaccggcgccagtagcggctgaactttgacttggagatccggtgggccagcctggccccgcagttttctccctcgatgtcacctccagccacgttttcggtgttgacggactcggtctcactggtgggcatgctcatgtttcggggcttctcctcatccatgccttcgtcctcattctcaggatcgatgtcttcggcctgagtgatccaatccaggtagcctttgagatcctcttctagctgctgcttctcccgcagcttctggaaatctccccgggccttggccttctccctctctttggaaaactctccgctaagcacaccgagaaccaagttaagtacaaaaaatgaccctatgatgattagtgtaacaaaatagatccagggccagtcccttcctacggcatcattgacccagtacagcacgtccgtccagccctccatggtgatgcactggaacaccgtgagcatggcgaaggcaaagttgtcaaagttggtgatgccgtgcttgggaccatcccagccgggcttgcacaccgtgccgttctggcactgccgcccgtggcccgtttccagcgcacaaggggaagggtcatcttctgctggaacatctgctatgccctcctggttgtagcaggtcttgtgcatcttccccatgaagagctccaagccgatgatggcgtagatgatgatgacaaacagcacaagcagggcgatgtgcagcagggggaccatggccttgatgatggaattcaggaccacctggagacttgggactccggacaccagccgcagggggcgcagcacgcggaaggccctcagcgccttcacatcaaatccggcccctttccctccgagagcgtttgccccatctgctttggttgcttgttctaaaattgcactaaaaagccccacaaccacaattataaaatctagtaggttccagccgttgcggaggtaggcattggggtgaaagaggagtccataggcgattacttttaaaaacgcttccaccgtaaaaattatgagaaagagatattccactcgttccaggttggaattggtggcgttggaatcatcttctggaaagggaatatagatcgctaaggccacacaattggcaaaaatagtcagtaaaataattatttcaaatggtttccattcgacaatgctgatgcaggccctccggatggggttcttcagggtcaggcagagcagggctcggggcgggcgtgtggccgtggtgctgccctgcttcttgggtttcccatattgctgccgcttccgctgcgtggagctgactgtggagatggtcgcattgccagcgctgcccatcagcttagcctgccgggctgcgtcgatggccgcctgccacgacagggcagcccccggggtggggatgtgctcaggggccagccccgctgccgcattggcattcatgttggcatgggcggggcgtgggctcccatagttggaaccttggtggttttcctctggaatgtacatcctcgtattctcattgaccatggaccaaaaatggttttaataggaggagcagccacgaagaggaagaaatgtgaaaacaccccccggcgggtctggattaatccctcctccgaggccggcggctttcgcgcaagattcgaggaagccgtggtctgcagcgtttcttcttccccgccgacgattacctgattcccattatggcatcaaaccccaaaaactgctcctttccactactgcctcctcgagtgaaactgtaacgcatcctcagtacatccgggccccttccaagaactgagcaccgcacctccggcggctacaccatttgaaaaaataaatcgggagaggcagggcgagaagaggcggagaggaggggcggggggcgcgcggggcccgcctgggccggcaggggccgaggcgcctctgcccactcccagcgagtcctcctgaggcccctgcccggctctctgctgtcaaagggagccggcaactcctgggcgcggaggcaggaagagccgccgccgccgctccgggcccgccgcgccgcgccgagcgccgctctggcaggagctgtttctgcagaggcagcgagagggagac

SEQ ID NO: 13 - DNA, 13340 bp, Mus musculus
  source 1..13340: mol_type = genomic DNA
aaatctgaaagcagaagctcggattcacagctgagtgacagggccacatgagactttacagccttcaaatgtggtcacagagatcgtttgtgagtttttagaaagtacaaggaaaaattacaagtgggatacttgttcagttgtgaagtcagttgttggtacccaactggaagccacaatgattcgggcctttgttcagccatccacacccccataccagccactctccagtcactcgtctgaggaaacagagaggaagttcaagggcaaggtggtacatgaagctcaactcaactgtttctacatttctcctggaggttccaactatgggagcccacgcccagctcatgccaacatgaatgccaatgcagctgcaggacttgctcccgagcacatccctactccaggggcagcactgtcctggcaggcagccatcgatgccgcccggcaggccaagctcatgggcagtgctggcaacgcaaccatctctaccgtcagttccacacagcggaagcggcagcagtatgggaaacccaagaagcaggggggcacaaccgccacacggccgccccgggctctgctgtgtctgaccctgaagaaccctatccggagggcgtgcataagcattgttgaatggaaaccatttgaaatcattattttactgactatttttgccaattgtgtggccttagcaatctatattccctttccggaagacgactccaacgccaccaactccaacctggaacgagtggagtatctcttcctcatcatttttaccgtggaagcatttttaaaagtaattgcctacggacttctcttccaccccaacgcttacctccgcaatggttggaatttactggattttataatcgtggttgtagggctttttagtgcaattttagaacaagcaaccaaagctgatggggccaatgctctaggagggaaaggagctggattcgacgtgaaggcactgagagcgttccgcgtgctccgtccactgcggctagtgtccggagtcccaagtctccaggtggtcctgaactccatcatcaaggccatggtgcctctgctgcacattgcccttcttgtgctcttcgtcatcatcatttatgctattatcggcctggagctcttcatgggaaagatgcacaagacctgctacaaccaggagggcataatagatgttccggcagaagaggatccttccccttgtgctttggagacaggccatgggcgacagtgtcagaacgggaccgtgtgcaaacccgggtgggatgggcccaagcacggcatcaccaacttcgacaacttcgccttcgccatgctgacggtgttccagtgtatcaccatggagggctggacagacgtgctgtactggatgcaagacgctatgggctatgagttgccctgggtgtattttgtcagtctggtcatctttggatcctttttcgttctaaatctggttctcggtgttttgagcggggagttttccaaagagagggagaaagccaaagcccgaggagatttccagaagcttcgagagaagcagcaactagaagaagatctcaaaggctacctggactggatcacccaggcagaagacattgaccccgagaatgaggacgagggcatggatgaagacaagcctcgaaacatgagcatgcccacaagtgagactgagtctgtcaacactgaaaacgtggctggaggtgacatcgagggagaaaactgtggagccaggcttgcccatcggatctccaaatccaaattcagccgctactggcgcaggtggaatcgattctgcagaagaaaatgccgtgcagcagttaagtccaacgtcttctactggctcgtgatcttcctggtgttcctcaacaccctcaccattgcctccgaacattacaaccagcctcactggctcacagaagtgcaagacacagccaataaagccctcctggcccttttcactgcagaaatgctcctgaagatgtacagcctgggtcttcaggcctattttgtgtccctcttcaaccgctttgactgtttcattgtgtgtgggggcatcctggagaccatcctggtggagacgaagatcatgtctcccctgggcatctctgtgctgagatgtgtgcggttgctcaggatcttcaagatcaccaggtactggaattccttgagcaaccttgtggcatccttgctgaactcagtgcgctccattgcctccctgctgctgctcctcttcctcttcatcatcatcttctccctcctggggatgcagctctttggagggaagttcaatttcgatgagatgcagacccgtaggagcacgttcgataacttcccgcagtctctcctcactgtgtttcagatcctgaccggggaggactggaattcggtgatgtatgatgggatcatggcttatggcggcccctcttttccagggatgttagtctgtatttacttcatcatcctcttcatctgtggaaattatatcctactgaatgtgttcttggccattgcggtggacaacctggctgatgcggagagcctgacctcagcccaaaaggaggaggaagaagagaaggagaggaagaagctggccaggactgccagcccagaaaagaaacaggaggtgatggagaagccagccgtggaggagagcaaagaggagaaaattgaactgaaatccattacagccgatggagaatccccacccactaccaagatcaacatggatgacctccagcccagtgaaaacgaggataagagtccccactccaacccagacactgcaggggaagaggatgaagaggagccagagatgcctgtggggccacgcccccggcccctgtctgagctgcaccttaaggaaaaggcagttcccatgccggaagccagtgcatttttcatcttcagcccaaacaacaggttccgcctgcagtgccaccgtattgtcaatgacacgatcttcaccaacctcatcctcttcttcattctgctcagcagcatctctctggctgctgaggaccccgtccagcacacctccttcaggaaccatatcctaggcaatgcagactatgtcttcactagtatctttacattagaaattatccttaagatgactgcttacggggctttcctgcacaagggctctttctgccgaaactacttcaatatcctggacctgctggtggttagcgtgtccctcatctcctttggcatccagtccagcgcgatcaacgttgtgaagattttacgagtgctgcgagtcctcagacccctgagggccatcaacagggccaaggggctaaagcatgtggttcagtgcgtgtttgtggccatccggaccatcgggaacatcgtaattgtcaccactctgctgcagttcatgttcgcctgcattggggtccagctcttcaagggaaagctctatacctgttcggatagttctaaacagacggaggcagaatgcaagggtaactatatcacatacaaagatggagaggtcgatcaccccattatccagcctcgaagctgggagaacagcaagtttgactttgacaatgttttggcagccatgatggctctcttcaccgtctccaccttcgaagggtggccagagctgctgtaccgctccattgactcccacacagaagacaagggccccatctacaactaccgtgtggagatctccatcttcttcatcatctatatcatcatcattgccttcttcatgatgaacatcttcgtgggtttcgtcattgtcaccttccaggagcagggggaacaagagtacaagaactgtgagctggacaagaaccagagacaatgtgtggaatatgccctcaaggcccgacccttgcgaaggtacatccccaagaaccagcaccagtacaaagtgtggtacgtggtcaactctacctacttcgagtatctgatgttcgttctcatcctgctcaacaccatctgcctggccatgcagcactatggccagagctgcctcttcaaaatcgccatgaatatactcaacatgcttttcaccggcctcttcacagtggagatgatcctgaagctcattgccttcaaacccaagggttactttagtgatccctggaatgtttttgacttcctcatcgtcattgggagcataattgatgtcattctcagtgagactaatccagctgaacatacccaatgctctccctctatgagtgcagaggagaactcccgcatctccatcaccttcttccgcctcttccgggtcatgcgcctggtgaagctgctgagccgcggggaaggcatccgaaccctgctgtggaccttcatcaagtccttccaggctctgccctatgtggctcttttgattgtgatgctgttctttatctatgcagtgattgggatgcaggtgtttgggaagattgccctgaatgacaccacagagatcaatcggaacaacaacttccagacgttcccccaggctgtgttactgctgttcaggtgtgccaccggagaggcctggcaggacatcatgctggcctgcatgccaggcaagaagtgtgccccagagtctgagcccagcaacagcacggaaggggagaccccctgtggcagcagctttgctgtcttctacttcatcagcttctacatgctctgtgccttcctgatcatcaacctctttgtagctgttatcatggacaactttgactacctgactagggattggtctatcctcggtccccatcacctggatgaattcaagagaatctgggccgagtatgaccctgaagccaagggtcggatcaaacacttggatgtggtgaccctcctccgtcgaattcagcccccactgggttttgggaaattgtgtcctcaccgtgtggcctgcaaacgcctggtgtccatgaacatgcctctgaacagcgatggcacagtcatgttcaatgctaccctgtttgccctcgtcaggacagccctgaggatcaaaacagaagggaacctagagcaagccaatgaggagcttcgggccatcatcaagaaaatctggaagaggactagcatgaagctgttggaccaggtggtgccccctgcaggcgatgacgaggtcacagtgggcaagttctatgccaccttcctgatccaagagtacttcaggaaattcaagaagcgaaaagagcaggggctggtgggcaagccctcacaaaggaatgcactgtccctccaggctggcttgcgcaccttgcatgacattgggcctgagatccggcgggccatctctggggatctgactgctgaggaggagttggacaaggctatgaaggaggcggtgtctgctgcctccgaagatgacatcttcaggagggctggaggcctgttcggcaaccatgtcacctactatcagagtgacagcaggggcaactttcctcagacgttcgccacccagcgcccactgcacatcaacaagacagggaacaaccaagctgacactgagtcaccgtcccatgagaagctggtggactccacgttcacccccagcagctactcatccacgggctccaatgccaacatcaacaatgccaacaacactgccctgggccgcttcccccatcccgctggctactccagcacggtcagcactgtggagggccatgggcctcccttgtcccctgctgtccgagtacaggaggcagcatggaagctcagctctaagaggtgccactcccgagagagccagggagccacggtgaatcaggagatatttccagatgagacccgcagcgtaaggatgagtgaagaagccgagtactgcagtgagcccagcctgctctccacagatatgttctcctaccaggaagatgaacaccgacaactgacctgcccagaggaggacaagagggagatccagccatctccaaagaggagtttccttcgctctgcctctctaggtcgaagggcctccttccatctggaatgtctaaagcgacaaaaggatcaagggggagacatctctcagaagacagccttgcccttgcatctggttcatcatcaggcattggcagtggcaggcttgagccccctcctgcagagaagccattctcctaccacattccccaggccgtgccccacaccccctgtcactccaggcagccggggcagacccctacggcccatccctaccctacggctggagggggcagagtccagcgagaaactcaacagcagcttcccatccatccactgcagctcctggtctgaggagacgacagcctgtagtgggagcagcagcatggcccggagagcccggcccgtctccctcaccgtgcccagccaggctggagctccagggagacagttccatggcagtgccagcagcctggtggaagcggtcttgatttcagaaggactgggacagtttgctcaagatcccaagttcatcgaggtcaccacccaggagctggctgacgcctgcgacatgacaatagaggagatggagaacgccgcagacaacatcctcagtgggggcgcccagcagagccccaacggcaccctcttaccttttgtgaactgcagggacccggggcaggacagggctgtggccccagaggacgagagctgcgcatatgccctggggcgaggccggagcgaggaggcgctcgcggacagcaggtcctacgtcagcaacctgtagtcctcagggctggcgagacgcgggtggtttttttattcgtttcaatgttcctaatgggttcgtttcagaagtgcctcactgttctcgtgacctggaggtaaccggaacagcgtcttcattcactgctgtcgggataagcctcagagctgggcggtgtacggagtcggcttttcaggggagaaggccaaggccgtggtgcgggggctccagcaccttccgcggcagcaccgcccaaaggaccccacccccacccctgagcaaaagggtgttttccccttgcttgtataaacagtcatttgcacatgttctgtctgagcctggccgtctctatggagcagggccccagggatctatggcaggaatgggccagcgcccccagtaggagccgggaggtggctgcgaggttcccagcagtgcaggtctggtccctatggtcccttcagggactctttccctgcaaggagctgagatgcaggtggcaggagccagtgcagatcacaccacccgccctcagctagccaggccaggggggcgcaggctgctgcctggtgctcggggtttcatggtttgagggttcttgtcagcatgttgcgactttctggggtttggtttctttattactatttgttgtgttttcccacggggaggggaggaataagagcggttacaactgcgcggcctcacttcactgtttccacatttgcatttgcgtatttaagtcggatttggtttgattgtattctttaaatggtgcggtccacccccaccgccacccccaccccccactggagcaagggttcaatatcaccagagaaaggttttacctgctctgtgtctgcccagtaacttgttccaatttccttaagtaaaagcaacttttttctttctttcgagtttggttgagcatcacaatcagcaggctaacaggcagttagatcaggcggtgtgcgcctgggcgattgagctgggctcctttctgtgctgggcatatggactggttcaagagagaagaaatatgggcatctttgtgtcacacttgtgtccatagtatgtgcgtatgtgcacccacgtggtatgtgtgcgccccaccccacccctgcacaaaagcctgtagaaccccgtttgggtttgactgcagggagttctaaatctggggctatttgaaagcaagaacaaaccactgtctctgcttctgcttctgaaacgagaatcggtaactgcatttttctgtcccacgagatatgcaaaagcaatgcaataatatccattttaaaatatggttgtgagttgtgtcagcattaaaattctattttaaaaaaaaaaccacgaaatttaagggaaaaactcaagaagacattttgcttcgatatattctgtgtaatgttttattgcattgataatgtttctgttgaagaaactgttatacttgaattcaggtcagtttcagtatttttcaaatatttttttaaaactgaattgcaattgtgccaagcaaatacaatgacttaagtttgttttaaaattcacttcttgtatattttgctgcatgtaaagtaaatcgttttgtatttggagtgtgaaaagctttacctttgagctcttaagtgcttcttctgtacgtggttggggggaaagatggtttttctttcatttgcaaagtgaacaaaggtgtccccggtgtaagtcctcactctgctttccagagagaggggaggtgccattttgcatatcttgtgttttgtttccatatccctcagttatttccaaaacccagtggtaaggttgcccatgccgaatcttgcttttcgaggtcaggacgtgttccacccagctcttctgctgtcttctgctcttctctgtggattcttgtccaatgttccagcatcccgtgggaagaggtggctggctttcccaagcactgtcacagcatatatctcaactgagaggatgcggtaaccatcagacggggacagtggtgggatagactcacctttgacccatgattagcccaaacacagacagccatagttgggagctggtgagcagtcactggatggaactgtagcccttgtaaaaactattcatcctttccatctcctgaagcagggaggcagagaagcatgggatcgagaccagggtgggagcaccaggatctcacagggatgaaagaaacagatacatgaggctttcacttaggatcctcagtatctgccttcaacaacccttacgattagtgctaggtccttctattgtgtcttaataagaatggttgaaaaggaagggctttgaggaaaataagactcaaccattcgctcagattttgcctacggagtatcttccagtcccagtgacctaccagccttttatggagatcatgtgagaatctgctcgaaattccagcaaggatgttcctccgtggcaatgagtctgctcttgtgaatgttcacggggttaagcggagtgtagaaacagcctttctccttggatttccatatgtggttgaccgagcatttatgcagcctttgtagcacccataagggcttctagagataataattagatggtgtcctttgtcttgtttctgcgaagttctgcgactgtgttgatgagtctttagtggtagaaagggagccctactgactggctgtgtggttcttctttgcatctgactcccccccaccagagaaatgtggtattctcattgaccctacacacaagcatgcataccctgcatactcaatctcttcctgctgccttgtatcttcctttgaacactttgatctgcattgccagatcccattgatcaaagatataagctacaagctgagtcccagcatcccccgccagaactctgcccagtgtcatgcccaacccaccctcctttcaccagccatacccacagactgctttctccttgtgccaaggaaactgaagtagcctttcactcatacagggacaatggaccccttgcccttcgttgctagaaggaaagaaggttcagtggacaggatctttcatacttggcttcatgactacctggataaaaatgacaaatgctacctgtcaccaggacagtagggaacagtgtctaagaaaaccagtggacatctacaccagattatcaactctccacccaacatggaattttcccaatgactgttttgaacataattatcaaaccttctgcaatcctgacaatttctggatggcagcagaattagcctgcagctggggaccaaaggggcacgaaggagtgtagatcgtgtgtttttatctgtcctatgacaatctctgtctcttttgtttatgatcttgtcgtgtgtgtatgtgtgtgtgtgtgtccatgacacagtccaagtaacagacaagtccagttaaatccctttctgcctggtcctaggttgttcgtatcttcaaatgaaaaagagagagattttcctaggccttgtttgattcataaacatttttttctattagttggggttcccatcttcttaatctgactaggaacccaaggcccaactgtgtcttttaccctcctctggtgccttggttccaaattctggaacttgtatgaagagaaggtctacattcctttctcacacttctcaaccatccagagctctggagaagtccaactgaacacagtagatagcccttcctttgccaaagtcagcacattcctggaacagtcaggaaatcagtagaaagaacgtggctggtgagtagaggccaagtgacaaacccctactgctcctaaatttgggcctagagaacaaggatctaggtcaagtatggagtaaactctctggcaatcagggtttttagccttatcataccagttttcagacatctccaaggagaaggatggcccctctctccctgagtgattgaaatgtcctcaatcatcagctagaaaaacattgagcaaggagctgtggaaggagtgtctggatttcaaaagagctactccaagcccacggaagctgatgttaagtgtcctgaccaattctgttcttcaacaagccccagctctgaaacaggtgtcagcagcaagagaactagaggggtggggagtgaggaaaggtcaagccttaaaccccaccaccaccaggtcatctcactgtatggaaagctcttctgtgtggtcactctgttgccagccttggcaaaggctgacggctccatagtctgctttggaaattatggggggaaaaaaatcctaccctaggtgtttttccagccagataacctagctagagaaatgtggcccttgcctggccctgggatgcccctccactgtgtctgccaaagaatttgccaatggagaagtagttgggggagcttggctctcactcgataaggtccatgttctacagctggtgccctggggaaacgtatcctggaaggtgtgacgggaaaaccaccctacctatgatgtcagtaaagggcacaatcccctccttgagcatttcatcattcctccccctccccctcctccccctatttcccgtcctcccctctccctccttctcttccttctcatctacctgctcatccctttcttctctgcttcttcctctcttttacctgtcctcctcctcctcttcttcctctacaaacccagtgaagggaacagaggtgaaaggaactcactggagattctcacaatgtttttgtttatttgtttgtttgtttgtttgttttgtgtgccatattgtcaccttgttaggaagtcagttgaatgccacacacacacacacacacacacacacacacacacacacaggtataagtgctggaggtaatggccacatagtgattttttttttcctacagaaggggagggctgtggtcagcatgttcaacctgtttaatgtgtggctgtgtgtcccagaacacctgtgaatatgacccagtacatttatagctgatgtcctattagaacagaaaagcactgcgcacctttgaagagggacacgtggaagaaactagaacagtttccacaggtagaaatagggcccgtgttcttcatctacactgaggaaatgctgccactcttaagcccacccttttcctccaactgtcttaagaagtttgatccacatagtatgtgaaaaagagcctggtcttcctggtgtgttaggaagacctgttaagccatctcgggaagggagttggagaatggagctgaacagatcaagcattgcaaatcaattcagtgctgtgagtagtctcaactgagatctttctattacatttctcttaggtctccactagcaatcaggaagacaaggccaggtaaaacttggtgcagatatgaaatgtcatatcaccagaaccaaactgtctcagatgttcactgctttagaggtataaaccccacgtcctcatgagaaatcctagggcctgcaattcccccagaatgcaaaccacttgatggggcaaggcttacagaataggtggcatgccacttgatccaacataaatgaggcaattcttgcaaatttggcaccttaaatccccccatgcaccattcagcaggctcgtgacagggacagcttgggaatgcagaagccatagggaattggagggttgtttcttttcttttttcttttttcttttttttgtgtgtgtgggggtggggggagtgtgcaggtcctgggagttgaaccaagggctttatgcatgctaaacaagtgctttagctcttatttgagatagtctgtgtctcctaggatttcccagcatggagaaacacaccaaagttaaaagtagggagaaaccattggtaattaaggacagatggtttataagcaagtggtccctgcaaagggccccctagaaggcatcacggtgacccttgaactgtgggcacctttctgttctgcacaccacacacatccacagctgcaccagcccctcagacttgaaatccacctaccagaccatgcacccatctgtcttaccctgcttggacatttggtatttttggtttgtttgtttttatttgcccacttctctgagcaaagcacagatgacagagaaacagtgaggtttatacatctctgtgatcacagcagttaagaacaacctgtgggaagaaatagtctttgaaaaatggatggcagagccctggagtgagtgctgcaatgtctgctgctctcagaaattcagcctgccagtgttactaaggaaaacttccctccgtgaaaagggtcacataaagccgctccccatatgtgtactcagtccacttttatgtccccaagaaaacctgtcatgtgccatgcctgttcccagaggcatggaaagatgaacaggcctctagaccactcatacacacctgcccatcccacacctgcccctccaggctccacgacaccacagtctgactgttgtaaatattgttgtacagtttgtaatcaaatactcatgtcgtcaaaggccctgcctgctgcgccttctcccccctcgagcaaggccagggaaactagaagggaaacccttcgaggagagcttcagggtccatctctgtgtgagacgctactgtatattcctgtaagattgcatttttatctaaggaatgatgttatttaaaaaacaaacaaaaacgcaaaaaagaattgcaaataaatttcttaacaatgtc

SEQ ID NO: 14 - DNA, 13340 bp, Mus musculus
  source 1..13340: mol_type = genomic DNA
gacattgttaagaaatttatttgcaattcttttttgcgtttttgtttgttttttaaataacatcattccttagataaaaatgcaatcttacaggaatatacagtagcgtctcacacagagatggaccctgaagctctcctcgaagggtttcccttctagtttccctggccttgctcgaggggggagaaggcgcagcaggcagggcctttgacgacatgagtatttgattacaaactgtacaacaatatttacaacagtcagactgtggtgtcgtggagcctggaggggcaggtgtgggatgggcaggtgtgtatgagtggtctagaggcctgttcatctttccatgcctctgggaacaggcatggcacatgacaggttttcttggggacataaaagtggactgagtacacatatggggagcggctttatgtgacccttttcacggagggaagttttccttagtaacactggcaggctgaatttctgagagcagcagacattgcagcactcactccagggctctgccatccatttttcaaagactatttcttcccacaggttgttcttaactgctgtgatcacagagatgtataaacctcactgtttctctgtcatctgtgctttgctcagagaagtgggcaaataaaaacaaacaaaccaaaaataccaaatgtccaagcagggtaagacagatgggtgcatggtctggtaggtggatttcaagtctgaggggctggtgcagctgtggatgtgtgtggtgtgcagaacagaaaggtgcccacagttcaagggtcaccgtgatgccttctagggggccctttgcagggaccacttgcttataaaccatctgtccttaattaccaatggtttctccctacttttaactttggtgtgtttctccatgctgggaaatcctaggagacacagactatctcaaataagagctaaagcacttgtttagcatgcataaagcccttggttcaactcccaggacctgcacactccccccacccccacacacacaaaaaaaagaaaaaagaaaaaagaaaagaaacaaccctccaattccctatggcttctgcattcccaagctgtccctgtcacgagcctgctgaatggtgcatggggggatttaaggtgccaaatttgcaagaattgcctcatttatgttggatcaagtggcatgccacctattctgtaagccttgccccatcaagtggtttgcattctgggggaattgcaggccctaggatttctcatgaggacgtggggtttatacctctaaagcagtgaacatctgagacagtttggttctggtgatatgacatttcatatctgcaccaagttttacctggccttgtcttcctgattgctagtggagacctaagagaaatgtaatagaaagatctcagttgagactactcacagcactgaattgatttgcaatgcttgatctgttcagctccattctccaactcccttcccgagatggcttaacaggtcttcctaacacaccaggaagaccaggctctttttcacatactatgtggatcaaacttcttaagacagttggaggaaaagggtgggcttaagagtggcagcatttcctcagtgtagatgaagaacacgggccctatttctacctgtggaaactgttctagtttcttccacgtgtccctcttcaaaggtgcgcagtgcttttctgttctaataggacatcagctataaatgtactgggtcatattcacaggtgttctgggacacacagccacacattaaacaggttgaacatgctgaccacagccctccccttctgtaggaaaaaaaaaatcactatgtggccattacctccagcacttatacctgtgtgtgtgtgtgtgtgtgtgtgtgtgtgtgtgtgtgtggcattcaactgacttcctaacaaggtgacaatatggcacacaaaacaaacaaacaaacaaacaaataaacaaaaacattgtgagaatctccagtgagttcctttcacctctgttcccttcactgggtttgtagaggaagaagaggaggaggaggacaggtaaaagagaggaagaagcagagaagaaagggatgagcaggtagatgagaaggaagagaaggagggagaggggaggacgggaaatagggggaggagggggagggggaggaatgatgaaatgctcaaggaggggattgtgccctttactgacatcataggtagggtggttttcccgtcacaccttccaggatacgtttccccagggcaccagctgtagaacatggaccttatcgagtgagagccaagctcccccaactacttctccattggcaaattctttggcagacacagtggaggggcatcccagggccaggcaagggccacatttctctagctaggttatctggctggaaaaacacctagggtaggatttttttccccccataatttccaaagcagactatggagccgtcagcctttgccaaggctggcaacagagtgaccacacagaagagctttccatacagtgagatgacctggtggtggtggggtttaaggcttgacctttcctcactccccacccctctagttctcttgctgctgacacctgtttcagagctggggcttgttgaagaacagaattggtcaggacacttaacatcagcttccgtgggcttggagtagctcttttgaaatccagacactccttccacagctccttgctcaatgtttttctagctgatgattgaggacatttcaatcactcagggagagaggggccatccttctccttggagatgtctgaaaactggtatgataaggctaaaaaccctgattgccagagagtttactccatacttgacctagatccttgttctctaggcccaaatttaggagcagtaggggtttgtcacttggcctctactcaccagccacgttctttctactgatttcctgactgttccaggaatgtgctgactttggcaaaggaagggctatctactgtgttcagttggacttctccagagctctggatggttgagaagtgtgagaaaggaatgtagaccttctcttcatacaagttccagaatttggaaccaaggcaccagaggagggtaaaagacacagttgggccttgggttcctagtcagattaagaagatgggaaccccaactaatagaaaaaaatgtttatgaatcaaacaaggcctaggaaaatctctctctttttcatttgaagatacgaacaacctaggaccaggcagaaagggatttaactggacttgtctgttacttggactgtgtcatggacacacacacacacatacacacacgacaagatcataaacaaaagagacagagattgtcataggacagataaaaacacacgatctacactccttcgtgcccctttggtccccagctgcaggctaattctgctgccatccagaaattgtcaggattgcagaaggtttgataattatgttcaaaacagtcattgggaaaattccatgttgggtggagagttgataatctggtgtagatgtccactggttttcttagacactgttccctactgtcctggtgacaggtagcatttgtcatttttatccaggtagtcatgaagccaagtatgaaagatcctgtccactgaaccttctttccttctagcaacgaagggcaaggggtccattgtccctgtatgagtgaaaggctacttcagtttccttggcacaaggagaaagcagtctgtgggtatggctggtgaaaggagggtgggttgggcatgacactgggcagagttctggcgggggatgctgggactcagcttgtagcttatatctttgatcaatgggatctggcaatgcagatcaaagtgttcaaaggaagatacaaggcagcaggaagagattgagtatgcagggtatgcatgcttgtgtgtagggtcaatgagaataccacatttctctggtgggggggagtcagatgcaaagaagaaccacacagccagtcagtagggctccctttctaccactaaagactcatcaacacagtcgcagaacttcgcagaaacaagacaaaggacaccatctaattattatctctagaagcccttatgggtgctacaaaggctgcataaatgctcggtcaaccacatatggaaatccaaggagaaaggctgtttctacactccgcttaaccccgtgaacattcacaagagcagactcattgccacggaggaacatccttgctggaatttcgagcagattctcacatgatctccataaaaggctggtaggtcactgggactggaagatactccgtaggcaaaatctgagcgaatggttgagtcttattttcctcaaagcccttccttttcaaccattcttattaagacacaatagaaggacctagcactaatcgtaagggttgttgaaggcagatactgaggatcctaagtgaaagcctcatgtatctgtttctttcatccctgtgagatcctggtgctcccaccctggtctcgatcccatgcttctctgcctccctgcttcaggagatggaaaggatgaatagtttttacaagggctacagttccatccagtgactgctcaccagctcccaactatggctgtctgtgtttgggctaatcatgggtcaaaggtgagtctatcccaccactgtccccgtctgatggttaccgcatcctctcagttgagatatatgctgtgacagtgcttgggaaagccagccacctcttcccacgggatgctggaacattggacaagaatccacagagaagagcagaagacagcagaagagctgggtggaacacgtcctgacctcgaaaagcaagattcggcatgggcaaccttaccactgggttttggaaataactgagggatatggaaacaaaacacaagatatgcaaaatggcacctcccctctctctggaaagcagagtgaggacttacaccggggacacctttgttcactttgcaaatgaaagaaaaaccatctttccccccaaccacgtacagaagaagcacttaagagctcaaaggtaaagcttttcacactccaaatacaaaacgatttactttacatgcagcaaaatatacaagaagtgaattttaaaacaaacttaagtcattgtatttgcttggcacaattgcaattcagttttaaaaaaatatttgaaaaatactgaaactgacctgaattcaagtataacagtttcttcaacagaaacattatcaatgcaataaaacattacacagaatatatcgaagcaaaatgtcttcttgagtttttcccttaaatttcgtggttttttttttaaaatagaattttaatgctgacacaactcacaaccatattttaaaatggatattattgcattgcttttgcatatctcgtgggacagaaaaatgcagttaccgattctcgtttcagaagcagaagcagagacagtggtttgttcttgctttcaaatagccccagatttagaactccctgcagtcaaacccaaacggggttctacaggcttttgtgcaggggtggggtggggcgcacacataccacgtgggtgcacatacgcacatactatggacacaagtgtgacacaaagatgcccatatttcttctctcttgaaccagtccatatgcccagcacagaaaggagcccagctcaatcgcccaggcgcacaccgcctgatctaactgcctgttagcctgctgattgtgatgctcaaccaaactcgaaagaaagaaaaaagttgcttttacttaaggaaattggaacaagttactgggcagacacagagcaggtaaaacctttctctggtgatattgaacccttgctccagtggggggtgggggtggcggtgggggtggaccgcaccatttaaagaatacaatcaaaccaaatccgacttaaatacgcaaatgcaaatgtggaaacagtgaagtgaggccgcgcagttgtaaccgctcttattcctcccctccccgtgggaaaacacaacaaatagtaataaagaaaccaaaccccagaaagtcgcaacatgctgacaagaaccctcaaaccatgaaaccccgagcaccaggcagcagcctgcgcccccctggcctggctagctgagggcgggtggtgtgatctgcactggctcctgccacctgcatctcagctccttgcagggaaagagtccctgaagggaccatagggaccagacctgcactgctgggaacctcgcagccacctcccggctcctactgggggcgctggcccattcctgccatagatccctggggccctgctccatagagacggccaggctcagacagaacatgtgcaaatgactgtttatacaagcaaggggaaaacacccttttgctcaggggtgggggtggggtcctttgggcggtgctgccgcggaaggtgctggagcccccgcaccacggccttggccttctcccctgaaaagccgactccgtacaccgcccagctctgaggcttatcccgacagcagtgaatgaagacgctgttccggttacctccaggtcacgagaacagtgaggcacttctgaaacgaacccattaggaacattgaaacgaataaaaaaaccacccgcgtctcgccagccctgaggactacaggttgctgacgtaggacctgctgtccgcgagcgcctcctcgctccggcctcgccccagggcatatgcgcagctctcgtcctctggggccacagccctgtcctgccccgggtccctgcagttcacaaaaggtaagagggtgccgttggggctctgctgggcgcccccactgaggatgttgtctgcggcgttctccatctcctctattgtcatgtcgcaggcgtcagccagctcctgggtggtgacctcgatgaacttgggatcttgagcaaactgtcccagtccttctgaaatcaagaccgcttccaccaggctgctggcactgccatggaactgtctccctggagctccagcctggctgggcacggtgagggagacgggccgggctctccgggccatgctgctgctcccactacaggctgtcgtctcctcagaccaggagctgcagtggatggatgggaagctgctgttgagtttctcgctggactctgccccctccagccgtagggtagggatgggccgtaggggtctgccccggctgcctggagtgacagggggtgtggggcacggcctggggaatgtggtaggagaatggcttctctgcaggagggggctcaagcctgccactgccaatgcctgatgatgaaccagatgcaagggcaaggctgtcttctgagagatgtctcccccttgatccttttgtcgctttagacattccagatggaaggaggcccttcgacctagagaggcagagcgaaggaaactcctctttggagatggctggatctccctcttgtcctcctctgggcaggtcagttgtcggtgttcatcttcctggtaggagaacatatctgtggagagcaggctgggctcactgcagtactcggcttcttcactcatccttacgctgcgggtctcatctggaaatatctcctgattcaccgtggctccctggctctctcgggagtggcacctcttagagctgagcttccatgctgcctcctgtactcggacagcaggggacaagggaggcccatggccctccacagtgctgaccgtgctggagtagccagcgggatgggggaagcggcccagggcagtgttgttggcattgttgatgttggcattggagcccgtggatgagtagctgctgggggtgaacgtggagtccaccagcttctcatgggacggtgactcagtgtcagcttggttgttccctgtcttgttgatgtgcagtgggcgctgggtggcgaacgtctgaggaaagttgcccctgctgtcactctgatagtaggtgacatggttgccgaacaggcctccagccctcctgaagatgtcatcttcggaggcagcagacaccgcctccttcatagccttgtccaactcctcctcagcagtcagatccccagagatggcccgccggatctcaggcccaatgtcatgcaaggtgcgcaagccagcctggagggacagtgcattcctttgtgagggcttgcccaccagcccctgctcttttcgcttcttgaatttcctgaagtactcttggatcaggaaggtggcatagaacttgcccactgtgacctcgtcatcgcctgcagggggcaccacctggtccaacagcttcatgctagtcctcttccagattttcttgatgatggcccgaagctcctcattggcttgctctaggttcccttctgttttgatcctcagggctgtcctgacgagggcaaacagggtagcattgaacatgactgtgccatcgctgttcagaggcatgttcatggacaccaggcgtttgcaggccacacggtgaggacacaatttcccaaaacccagtgggggctgaattcgacggaggagggtcaccacatccaagtgtttgatccgacccttggcttcagggtcatactcggcccagattctcttgaattcatccaggtgatggggaccgaggatagaccaatccctagtcaggtagtcaaagttgtccatgataacagctacaaagaggttgatgatcaggaaggcacagagcatgtagaagctgatgaagtagaagacagcaaagctgctgccacagggggtctccccttccgtgctgttgctgggctcagactctggggcacacttcttgcctggcatgcaggccagcatgatgtcctgccaggcctctccggtggcacacctgaacagcagtaacacagcctgggggaacgtctggaagttgttgttccgattgatctctgtggtgtcattcagggcaatcttcccaaacacctgcatcccaatcactgcatagataaagaacagcatcacaatcaaaagagccacatagggcagagcctggaaggacttgatgaaggtccacagcagggttcggatgccttccccgcggctcagcagcttcaccaggcgcatgacccggaagaggcggaagaaggtgatggagatgcgggagttctcctctgcactcatagagggagagcattgggtatgttcagctggattagtctcactgagaatgacatcaattatgctcccaatgacgatgaggaagtcaaaaacattccagggatcactaaagtaacccttgggtttgaaggcaatgagcttcaggatcatctccactgtgaagaggccggtgaaaagcatgttgagtatattcatggcgattttgaagaggcagctctggccatagtgctgcatggccaggcagatggtgttgagcaggatgagaacgaacatcagatactcgaagtaggtagagttgaccacgtaccacactttgtactggtgctggttcttggggatgtaccttcgcaagggtcgggccttgagggcatattccacacattgtctctggttcttgtccagctcacagttcttgtactcttgttccccctgctcctggaaggtgacaatgacgaaacccacgaagatgttcatcatgaagaaggcaatgatgatgatatagatgatgaagaagatggagatctccacacggtagttgtagatggggcccttgtcttctgtgtgggagtcaatggagcggtacagcagctctggccacccttcgaaggtggagacggtgaagagagccatcatggctgccaaaacattgtcaaagtcaaacttgctgttctcccagcttcgaggctggataatggggtgatcgacctctccatctttgtatgtgatatagttacccttgcattctgcctccgtctgtttagaactatccgaacaggtatagagctttcccttgaagagctggaccccaatgcaggcgaacatgaactgcagcagagtggtgacaattacgatgttcccgatggtccggatggccacaaacacgcactgaaccacatgctttagccccttggccctgttgatggccctcaggggtctgaggactcgcagcactcgtaaaatcttcacaacgttgatcgcgctggactggatgccaaaggagatgagggacacgctaaccaccagcaggtccaggatattgaagtagtttcggcagaaagagcccttgtgcaggaaagccccgtaagcagtcatcttaaggataatttctaatgtaaagatactagtgaagacatagtctgcattgcctaggatatggttcctgaaggaggtgtgctggacggggtcctcagcagccagagagatgctgctgagcagaatgaagaagaggatgaggttggtgaagatcgtgtcattgacaatacggtggcactgcaggcggaacctgttgtttgggctgaagatgaaaaatgcactggcttccggcatgggaactgccttttccttaaggtgcagctcagacaggggccgggggcgtggccccacaggcatctctggctcctcttcatcctcttcccctgcagtgtctgggttggagtggggactcttatcctcgttttcactgggctggaggtcatccatgttgatcttggtagtgggtggggattctccatcggctgtaatggatttcagttcaattttctcctctttgctctcctccacggctggcttctccatcacctcctgtttcttttctgggctggcagtcctggccagcttcttcctctccttctcttcttcctcctccttttgggctgaggtcaggctctccgcatcagccaggttgtccaccgcaatggccaagaacacattcagtaggatataatttccacagatgaagaggatgatgaagtaaatacagactaacatccctggaaaagaggggccgccataagccatgatcccatcatacatcaccgaattccagtcctccccggtcaggatctgaaacacagtgaggagagactgcgggaagttatcgaacgtgctcctacgggtctgcatctcatcgaaattgaacttccctccaaagagctgcatccccaggagggagaagatgatgatgaagaggaagaggagcagcagcagggaggcaatggagcgcactgagttcagcaaggatgccacaaggttgctcaaggaattccagtacctggtgatcttgaagatcctgagcaaccgcacacatctcagcacagagatgcccaggggagacatgatcttcgtctccaccaggatggtctccaggatgcccccacacacaatgaaacagtcaaagcggttgaagagggacacaaaataggcctgaagacccaggctgtacatcttcaggagcatttctgcagtgaaaagggccaggagggctttattggctgtgtcttgcacttctgtgagccagtgaggctggttgtaatgttcggaggcaatggtgagggtgttgaggaacaccaggaagatcacgagccagtagaagacgttggacttaactgctgcacggcattttcttctgcagaatcgattccacctgcgccagtagcggctgaatttggatttggagatccgatgggcaagcctggctccacagttttctccctcgatgtcacctccagccacgttttcagtgttgacagactcagtctcacttgtgggcatgctcatgtttcgaggcttgtcttcatccatgccctcgtcctcattctcggggtcaatgtcttctgcctgggtgatccagtccaggtagcctttgagatcttcttctagttgctgcttctctcgaagcttctggaaatctcctcgggctttggctttctccctctctttggaaaactccccgctcaaaacaccgagaaccagatttagaacgaaaaaggatccaaagatgaccagactgacaaaatacacccagggcaactcatagcccatagcgtcttgcatccagtacagcacgtctgtccagccctccatggtgatacactggaacaccgtcagcatggcgaaggcgaagttgtcgaagttggtgatgccgtgcttgggcccatcccacccgggtttgcacacggtcccgttctgacactgtcgcccatggcctgtctccaaagcacaaggggaaggatcctcttctgccggaacatctattatgccctcctggttgtagcaggtcttgtgcatctttcccatgaagagctccaggccgataatagcataaatgatgatgacgaagagcacaagaagggcaatgtgcagcagaggcaccatggccttgatgatggagttcaggaccacctggagacttgggactccggacactagccgcagtggacggagcacgcggaacgctctcagtgccttcacgtcgaatccagctcctttccctcctagagcattggccccatcagctttggttgcttgttctaaaattgcactaaaaagccctacaaccacgattataaaatccagtaaattccaaccattgcggaggtaagcgttggggtggaagagaagtccgtaggcaattacttttaaaaatgcttccacggtaaaaatgatgaggaagagatactccactcgttccaggttggagttggtggcgttggagtcgtcttccggaaagggaatatagattgctaaggccacacaattggcaaaaatagtcagtaaaataatgatttcaaatggtttccattcaacaatgcttatgcacgccctccggatagggttcttcagggtcagacacagcagagcccggggcggccgtgtggcggttgtgcccccctgcttcttgggtttcccatactgctgccgcttccgctgtgtggaactgacggtagagatggttgcgttgccagcactgcccatgagcttggcctgccgggcggcatcgatggctgcctgccaggacagtgctgcccctggagtagggatgtgctcgggagcaagtcctgcagctgcattggcattcatgttggcatgagctgggcgtgggctcccatagttggaacctccaggagaaatgtagaaacagttgagttgagcttcatgtaccaccttgcccttgaacttcctctctgtttcctcagacgagtgactggagagtggctggtatgggggtgtggatggctgaacaaaggcccgaatcattgtggcttccagttgggtaccaacaactgacttcacaactgaacaagtatcccacttgtaatttttccttgtactttctaaaaactcacaaacgatctctgtgaccacatttgaaggctgtaaagtctcatgtggccctgtcactcagctgtgaatccgagcttctgctttcagattt

SEQ ID NO: 15 - DNA, 8257 bp, Rattus norvegicus
  source 1..8257: mol_type = genomic DNA
cagaattctaaatctgagagcaaaagctcaaattcactgccaagcgataaggccgtatgagattttatggccttcaaacgtggccacagacattgtttctgagtttttaaaaagtacaaggaaaaatacaagtgggatagctgttcagttgtgacatcagctgttggtccccaactggagtcacaatgattcgggccttcgctcagccatccacacccccataccagccgctctccagttgcctgtctgaggacacagagaggaagttcaagggcaaggtggtacacgaagctcaactcaactgtttctacatttctcctggaggttccaactatgggagcccacgcccagctcatgccaacatgaatgccaatgcagctgcaggacttgcccccgagcacatccctactccaggggcagcactgtcctggcaggcagccatcgatgccgcccggcaggccaagttaatgggcagtgctggcaatgcgaccatctctaccgtcagttccacacagcggaagcggcagcagtatgggaaacccaagaagcaggggggcacaactgccacacggccgccccgggctctgctctgcctgactctgaagaaccccatcaggagggcatgcatcagcattgttgaatggaaatcatttgaaataattattttattgacgatttttgccaattgtgtggccttagcaatctatattccctttccggaagatgactccaacgccaccaactccaacctggaacgggtggagtatctcttcctcatcatttttaccgtggaagcatttttaaaagtgattgcctacggactactcttccaccccaacgcttacctccgcaacggttggaatttactagattttataatcgtggttgtagggctttttagtgcaattttagaacaagcaaccaaagctgacggggccaacgctctgggagggaaaggagcgggattcgatgtgaaggcactgagagctttccgtgtgcttcgtcccctgcggctggtgtctggagtcccaagtctccaggtggtcctgaactccatcatcaaggccatggtgcccctgctgcacattgccctcctcgtgctcttcgtcatcatcatctatgccattatcggcctggagctcttcatggggaagatgcacaagacctgctacaaccaggagggcataatagatgttccagcggaagaggatccctccccttgtgctttggagacaggccatgggcgacagtgtcagaacgggaccgtgtgcaagcccgggtgggatgggcccaagcacggcatcaccaacttcgacaacttcgccttcgccatgctgacggtgttccagtgtatcaccatggagggctggacagacgtgctgtactggatgcaagacgctatgggctatgagttgccctgggtgtattttgtcagtctggtcatctttggatcctttttcgttctaaatctggttctcggtgttttgagcggagagttttccaaagagagggagaaagccaaagctcgaggagacttccagaagcttcgtgagaagcagcagctagaagaagatctcaaaggctacctggactggatcacccaggcggaagacatagaccctgagaatgaggacgagggcatggatgaagacaaaccccgaaacatgagcatgcccacaagtgagactgagtctgtcaacaccgaaaacgtggctggaggtgacatcgagggtgaaaactgtggagcccggcttgcccaccggatctccaaatccaagttcagccgctactggcgccggtggaatagattctgcagaagaaagtgccgtgccgcagttaagtccaatgtcttctactggctggtgatcttcctggtgttcctcaacaccctcaccattgcctccgaacactacaaccagcctcattggctcacagaagtgcaagacacggccaacaaggccctcctggcccttttcacggcagaaatgctcctgaagatgtacagcctgggtctgcaggcctactttgtatccctcttcaaccgctttgactgtttcattgtgtgcgggggcatcctggagaccatcctggtggagacgaagatcatgtcgcccctgggcatctctgtgctgagatgtgtgcggctgctcaggattttcaagatcaccaggtactggaactccctgagcaacctcgtggcgtccttgctgaactcagtgcgctccatcgcctccctgctgctactcctcttcctcttcatcatcatcttctccctcctggggatgcagctgtttggtggaaagttcaactttgatgagatgcagacccgtaggagcacgtttgataacttcccacagtctctcctcactgtgtttcagatcctgaccggggaggactggaattcggtgatgtatgatgggatcatggcttatggcggcccctcttttccagggatgttagtctgtatttacttcatcatcctcttcatctgtggaaattatatcctactgaatgtgttcttggccattgcggtggacaacctggctgatgcggagagcctgacctctgcccaaaaagaggaagaagaagagaaggagagaaagaagctggccaggactgccagcccagaaaagaaacaggaggtgatggagaaaccagcagtagaggagagcaaagaggagaaaattgagctgaagtccattacagcagatggagaatccccacccactaccaagatcaacatggatgacctccagcccagtgaaaatgaggacaagagtccccactccaacccagacactgcaggtgaagaggatgaggaggagcccgagatgcctgtgggcccacgcccccggcccctgtctgagctgcaccttaaggaaaaggcagtccccatgccggaagccagtgcatttttcatcttcagcccaaacaacaggttccgcctgcagtgccaccgcattgtcaatgacacgatcttcaccaacctcatcctcttcttcattctgctcagtagcatctccctggcggctgaggaccccgtccagcacacctccttcaggaaccacattctgttttattttgacattgtttttaccaccattttcaccattgaaattgctctaaagatgactgcttacggggctttcctgcacaagggctctttctgccgaaattacttcaatatcctggacctgctggtggttagcgtgtccctcatctcctttggcattcagtccagcgcgatcaacgttgtgaagattttaagagtgcttcgtgtcctcaggcccctgagggccatcaacagggccaaggggctaaagcacgtcgttcagtgtgtgtttgtggccatccggaccattggaaacattgtaattgtcaccactctgctgcagttcatgttcgcctgcattggggtccagctcttcaagggaaagctctatacctgttcggatagttccaaacagacggaggcagaatgcaagggtaactatataacatacaaagacggagaagttgaccaccccattatccagcctcgaagttgggagaacagcaagttcgactttgacaatgttctggcagccatgatggccctctttaccgtctccaccttcgaggggtggccagagctgctgtaccgctccattgactcccacacagaagacaagggtcccatctacaactatcgtgtggagatctccatcttcttcatcatctacatcatcatcattgccttcttcatgatgaacatcttcgtgggtttcgtcattgtcaccttccaggagcagggggaacaagaatacaagaactgtgagctggacaagaaccagagacaatgtgtggaatatgccctcaaggcccgacccttgcgaaggtacatccccaagaaccagcaccagtacaaagtgtggtacgtggtcaactccacctacttcgagtatctgatgttcgtcctcatcctgctcaacaccatctgcctggccatgcagcactacggccagagctgcctcttcaaaatcgccatgaatatactcaacatgcttttcactggcctcttcacggtggagatgatcctgaagctcattgccttcaaacccaagcactatttctgtgatgcatggaatacatttgacgccttgattgttgtgggtagcattgttgatatagcaatcaccgaggtacacccagctgaacatacccaatgctctccctctatgagtgcagaggagaactcccgcatctccatcaccttcttccgcctcttccgggtcatgcgcctggtgaagctgctgagccgaggggaaggcatccggaccctgctgtggaccttcatcaagtccttccaggccctgccctatgtggcccttttgattgtgatgctgttctttatctatgcagtgattgggatgcaggtatttgggaagattgccctgaatgacaccacagagatcaatcggaacaacaacttccagacgttccctcaggctgtgctactgctcttcaggtgcgccactggggaggcctggcaggatatcatgctagcctgtatgccaggcaagaagtgtgctccagagtctgagcccagcaacagcacggaaggggagacaccctgtggcagcagtttcgctgtcttctacttcatcagcttctacatgctctgtgccttcctgatcatcaacctctttgtagctgttatcatggacaactttgactacctgactagggattggtctatccttggtccccatcacctggatgaattcaagagaatctgggccgaatatgaccctgaagccaagggtcggatcaaacacttggatgtggtgaccctcctccgtcgaattcagcccccactgggttttgggaagttgtgtcctcaccgtgtggcctgcaaacgcctggtgtccatgaacatgcctctgaacagtgatgggacggtcatgttcaatgctacactgtttgcccttgtcaggacagccctgaggatcaaaacagaagggaacctagagcaagccaatgaggagctgagagccatcatcaagaaaatctggaagaggaccagcatgaagctgttggaccaggtggtgccccctgcaggtgatgacgaggtcacagtgggcaagttctatgccaccttcctgatccaagagtacttcaggaaattcaagaagcgaaaagagcaggggctggtcggcaagccctcgcagaggaatgcactgtctctgcaggctggcttacgcaccttgcatgacattgggcctgagatccggagagccatctctggggatctgacggctgaggaggagctggacaaggctatgaaggaggcagtgtctgctgcctccgaagacgacatcttcaggagggctggaggcctgtttggcaaccacgtcagctactaccagagtgacagcaggagcaacttccctcagacgtttgccacccaacgcccactgcacatcaacaagacagggaacaaccaagcggacaccgaatcaccgtcccatgagaagctggtggactccactttcacccccagcagctactcatccacgggctccaatgccaacatcaacaatgccaacaacactgccctgggccgcttcccccaccctgctggctactccagcacggtcagcactgtggagggccatgggcctcccttgtcccctgctgtccgggtacaggaggcagcatggaaactcagctctaagaggtgccactcccgagagagccagggggccacggtgagtcaggatatgtttccagatgagacccgcagcagcgtgaggctgagcgaagaagttgagtactgcagtgagcccagcctgctctccacagatatactctcctaccaggacgatgaaaaccgacaactgacctgtctagaggaggacaagagggagatccagccatctccgaagaggagtttccttcgctctgcctctctaggtcgaagggcctccttccatctggaatgtctaaagcgacaaaaggatcaagggggagacatctctcagaagacagccttgcccttgcatctggttcatcaccaggcattggcagtggcaggcttgagccccctcctgcagagaagccattctccttccacgttccccaggccacgccccacgccccctgtcactccaggcagccggggcaggcccctacagcccatccctaccctgcggctggagggggcggagtccagtgagaaactcaacagcagcttcccgtccatccactgcagctcctggtcagaggagaccacagcctgtagtgggggcagcagcatggcccggagagcccggcccgtctccctcaccgtgcccagccaggctggagctccaggcagacagttccacggcagcgccagcagcctggtggaagcggtcttgatttcagaaggactgggacagtttgctcaagatcccaagttcatcgaggtcaccacacaggagctggctgacgcctgcgatatgacaatagaggagatggagaacgccgcagacaacatcctcagcgggggcgcccagcagagccccaacggcaccctcttaccttttgtgaactgcagggacccagggcaggacagggctgtggtcccagaggacgagagctgtgtatatgccctggggcgaggccggagcgaggaagcgctcccggacagcaggtcctatgtcagcaacctgtagtccgcagggctggcgagacgcgggtgttttttattcgtttcaatgttcctaatgggttcgtttcagaagtgcctcactgttctcgtgacctggaggtaaccggaacagcgtcttcattcactgctgtcgggataagcctcagagctgggcggtgtacgaagtcggcttttcaggggagaaggccaaggccgtggtgcgggggctccagcaccttcccacggcagcaccgcccaaaggaccccacccccccctaagcaaaagggtgttttccccttgcttgtataaacagtcatttgcacatgttctgtctgagcctggccgtctctatggagcagggccccagggatctatggcaggaatgggccagtgtccccagtaggagccggaaggtggctgcaaggttcccagcagtgcagatctggtccctatggtcccttcagggacccttcccctgctggaactgaggagcaggtggcaggagccagtgcagaccacaccacctgccctcagctagccagacctgggggcgcaggctgcttgcctggtgctctgggtttcatagtttgatggttcttgtcagcatgttgcggttttctaggttttgatttctttattactatttgttgtgttttcccacggggaggggaggaagaagagcgtttacaactgcgcagcctcacttcaccggttccacatttgcatatttaagttggatttggttttattgtattctttaaatggtgcggtccacccccaccctcacccctattggagcaagggttcattatcaccacggggaggttttacctgctctgtgtatgcccaagtaacgtgttacaattttccttaagtcaaagcaactttttttcccccttttcggtttggttgagcatcacgacctgcaggttaacagtcagtttagataaggcggtgtgtgcctgggcgactgagctgggctcctttctgggcatatggattggttcaggagagaagaaatatgggcatctttgcgtcacacgtgtgtccatagtgggtcgtcttgtgtgtctgtgcatccacacggtacgtgagcaccccaccccacccccgcacaaagtctgtagatccccgttcgggtttgactgcagggagttcaaaatctggggctattcgaaagcaagaacaaaccactgtctctgcttctgcttctgaaacgagaatctggtaactgcattttctgtcccacgagatatgcaaaagcaatgcaataatatccattttaaaatacgattgtgagttgtgtcagcattaaaattctattttaaaaaaacatgaaatttaaggggaaaaactcaagaagacattttgcttcgatatattctgtgtaatgttttattgcattgataatgtttctgttgaagaaactgttatacttgaattcaggtcagtttcagtatttttcaaatatttttttaaaactgaattgcaattgtgccaagcaaatataatgacttaagtttgttttaaaattcacttcttgtatattttgctgcatgtaaagtaaatcattttgtatttgg

SEQ ID NO: 16 - DNA, 8257 bp, Rattus norvegicus
  source 1..8257: mol_type = genomic DNA
ccaaatacaaaatgatttactttacatgcagcaaaatatacaagaagtgaattttaaaacaaacttaagtcattatatttgcttggcacaattgcaattcagttttaaaaaaatatttgaaaaatactgaaactgacctgaattcaagtataacagtttcttcaacagaaacattatcaatgcaataaaacattacacagaatatatcgaagcaaaatgtcttcttgagtttttccccttaaatttcatgtttttttaaaatagaattttaatgctgacacaactcacaatcgtattttaaaatggatattattgcattgcttttgcatatctcgtgggacagaaaatgcagttaccagattctcgtttcagaagcagaagcagagacagtggtttgttcttgctttcgaatagccccagattttgaactccctgcagtcaaacccgaacggggatctacagactttgtgcgggggtggggtggggtgctcacgtaccgtgtggatgcacagacacacaagacgacccactatggacacacgtgtgacgcaaagatgcccatatttcttctctcctgaaccaatccatatgcccagaaaggagcccagctcagtcgcccaggcacacaccgccttatctaaactgactgttaacctgcaggtcgtgatgctcaaccaaaccgaaaagggggaaaaaaagttgctttgacttaaggaaaattgtaacacgttacttgggcatacacagagcaggtaaaacctccccgtggtgataatgaacccttgctccaataggggtgagggtgggggtggaccgcaccatttaaagaatacaataaaaccaaatccaacttaaatatgcaaatgtggaaccggtgaagtgaggctgcgcagttgtaaacgctcttcttcctcccctccccgtgggaaaacacaacaaatagtaataaagaaatcaaaacctagaaaaccgcaacatgctgacaagaaccatcaaactatgaaacccagagcaccaggcaagcagcctgcgcccccaggtctggctagctgagggcaggtggtgtggtctgcactggctcctgccacctgctcctcagttccagcaggggaagggtccctgaagggaccatagggaccagatctgcactgctgggaaccttgcagccaccttccggctcctactggggacactggcccattcctgccatagatccctggggccctgctccatagagacggccaggctcagacagaacatgtgcaaatgactgtttatacaagcaaggggaaaacacccttttgcttaggggggggtggggtcctttgggcggtgctgccgtgggaaggtgctggagcccccgcaccacggccttggccttctcccctgaaaagccgacttcgtacaccgcccagctctgaggcttatcccgacagcagtgaatgaagacgctgttccggttacctccaggtcacgagaacagtgaggcacttctgaaacgaacccattaggaacattgaaacgaataaaaaacacccgcgtctcgccagccctgcggactacaggttgctgacataggacctgctgtccgggagcgcttcctcgctccggcctcgccccagggcatatacacagctctcgtcctctgggaccacagccctgtcctgccctgggtccctgcagttcacaaaaggtaagagggtgccgttggggctctgctgggcgcccccgctgaggatgttgtctgcggcgttctccatctcctctattgtcatatcgcaggcgtcagccagctcctgtgtggtgacctcgatgaacttgggatcttgagcaaactgtcccagtccttctgaaatcaagaccgcttccaccaggctgctggcgctgccgtggaactgtctgcctggagctccagcctggctgggcacggtgagggagacgggccgggctctccgggccatgctgctgcccccactacaggctgtggtctcctctgaccaggagctgcagtggatggacgggaagctgctgttgagtttctcactggactccgccccctccagccgcagggtagggatgggctgtaggggcctgccccggctgcctggagtgacagggggcgtggggcgtggcctggggaacgtggaaggagaatggcttctctgcaggagggggctcaagcctgccactgccaatgcctggtgatgaaccagatgcaagggcaaggctgtcttctgagagatgtctcccccttgatccttttgtcgctttagacattccagatggaaggaggcccttcgacctagagaggcagagcgaaggaaactcctcttcggagatggctggatctccctcttgtcctcctctagacaggtcagttgtcggttttcatcgtcctggtaggagagtatatctgtggagagcaggctgggctcactgcagtactcaacttcttcgctcagcctcacgctgctgcgggtctcatctggaaacatatcctgactcaccgtggccccctggctctctcgggagtggcacctcttagagctgagtttccatgctgcctcctgtacccggacagcaggggacaagggaggcccatggccctccacagtgctgaccgtgctggagtagccagcagggtgggggaagcggcccagggcagtgttgttggcattgttgatgttggcattggagcccgtggatgagtagctgctgggggtgaaagtggagtccaccagcttctcatgggacggtgattcggtgtccgcttggttgttccctgtcttgttgatgtgcagtgggcgttgggtggcaaacgtctgagggaagttgctcctgctgtcactctggtagtagctgacgtggttgccaaacaggcctccagccctcctgaagatgtcgtcttcggaggcagcagacactgcctccttcatagccttgtccagctcctcctcagccgtcagatccccagagatggctctccggatctcaggcccaatgtcatgcaaggtgcgtaagccagcctgcagagacagtgcattcctctgcgagggcttgccgaccagcccctgctcttttcgcttcttgaatttcctgaagtactcttggatcaggaaggtggcatagaacttgcccactgtgacctcgtcatcacctgcagggggcaccacctggtccaacagcttcatgctggtcctcttccagattttcttgatgatggctctcagctcctcattggcttgctctaggttcccttctgttttgatcctcagggctgtcctgacaagggcaaacagtgtagcattgaacatgaccgtcccatcactgttcagaggcatgttcatggacaccaggcgtttgcaggccacacggtgaggacacaacttcccaaaacccagtgggggctgaattcgacggaggagggtcaccacatccaagtgtttgatccgacccttggcttcagggtcatattcggcccagattctcttgaattcatccaggtgatggggaccaaggatagaccaatccctagtcaggtagtcaaagttgtccatgataacagctacaaagaggttgatgatcaggaaggcacagagcatgtagaagctgatgaagtagaagacagcgaaactgctgccacagggtgtctccccttccgtgctgttgctgggctcagactctggagcacacttcttgcctggcatacaggctagcatgatatcctgccaggcctccccagtggcgcacctgaagagcagtagcacagcctgagggaacgtctggaagttgttgttccgattgatctctgtggtgtcattcagggcaatcttcccaaatacctgcatcccaatcactgcatagataaagaacagcatcacaatcaaaagggccacatagggcagggcctggaaggacttgatgaaggtccacagcagggtccggatgccttcccctcggctcagcagcttcaccaggcgcatgacccggaagaggcggaagaaggtgatggagatgcgggagttctcctctgcactcatagagggagagcattgggtatgttcagctgggtgtacctcggtgattgctatatcaacaatgctacccacaacaatcaaggcgtcaaatgtattccatgcatcacagaaatagtgcttgggtttgaaggcaatgagcttcaggatcatctccaccgtgaagaggccagtgaaaagcatgttgagtatattcatggcgattttgaagaggcagctctggccgtagtgctgcatggccaggcagatggtgttgagcaggatgaggacgaacatcagatactcgaagtaggtggagttgaccacgtaccacactttgtactggtgctggttcttggggatgtaccttcgcaagggtcgggccttgagggcatattccacacattgtctctggttcttgtccagctcacagttcttgtattcttgttccccctgctcctggaaggtgacaatgacgaaacccacgaagatgttcatcatgaagaaggcaatgatgatgatgtagatgatgaagaagatggagatctccacacgatagttgtagatgggacccttgtcttctgtgtgggagtcaatggagcggtacagcagctctggccacccctcgaaggtggagacggtaaagagggccatcatggctgccagaacattgtcaaagtcgaacttgctgttctcccaacttcgaggctggataatggggtggtcaacttctccgtctttgtatgttatatagttacccttgcattctgcctccgtctgtttggaactatccgaacaggtatagagctttcccttgaagagctggaccccaatgcaggcgaacatgaactgcagcagagtggtgacaattacaatgtttccaatggtccggatggccacaaacacacactgaacgacgtgctttagccccttggccctgttgatggccctcaggggcctgaggacacgaagcactcttaaaatcttcacaacgttgatcgcgctggactgaatgccaaaggagatgagggacacgctaaccaccagcaggtccaggatattgaagtaatttcggcagaaagagcccttgtgcaggaaagccccgtaagcagtcatctttagagcaatttcaatggtgaaaatggtggtaaaaacaatgtcaaaataaaacagaatgtggttcctgaaggaggtgtgctggacggggtcctcagccgccagggagatgctactgagcagaatgaagaagaggatgaggttggtgaagatcgtgtcattgacaatgcggtggcactgcaggcggaacctgttgtttgggctgaagatgaaaaatgcactggcttccggcatggggactgccttttccttaaggtgcagctcagacaggggccgggggcgtgggcccacaggcatctcgggctcctcctcatcctcttcacctgcagtgtctgggttggagtggggactcttgtcctcattttcactgggctggaggtcatccatgttgatcttggtagtgggtggggattctccatctgctgtaatggacttcagctcaattttctcctctttgctctcctctactgctggtttctccatcacctcctgtttcttttctgggctggcagtcctggccagcttctttctctccttctcttcttcttcctctttttgggcagaggtcaggctctccgcatcagccaggttgtccaccgcaatggccaagaacacattcagtaggatataatttccacagatgaagaggatgatgaagtaaatacagactaacatccctggaaaagaggggccgccataagccatgatcccatcatacatcaccgaattccagtcctccccggtcaggatctgaaacacagtgaggagagactgtgggaagttatcaaacgtgctcctacgggtctgcatctcatcaaagttgaactttccaccaaacagctgcatccccaggagggagaagatgatgatgaagaggaagaggagtagcagcagggaggcgatggagcgcactgagttcagcaaggacgccacgaggttgctcagggagttccagtacctggtgatcttgaaaatcctgagcagccgcacacatctcagcacagagatgcccaggggcgacatgatcttcgtctccaccaggatggtctccaggatgcccccgcacacaatgaaacagtcaaagcggttgaagagggatacaaagtaggcctgcagacccaggctgtacatcttcaggagcatttctgccgtgaaaagggccaggagggccttgttggccgtgtcttgcacttctgtgagccaatgaggctggttgtagtgttcggaggcaatggtgagggtgttgaggaacaccaggaagatcaccagccagtagaagacattggacttaactgcggcacggcactttcttctgcagaatctattccaccggcgccagtagcggctgaacttggatttggagatccggtgggcaagccgggctccacagttttcaccctcgatgtcacctccagccacgttttcggtgttgacagactcagtctcacttgtgggcatgctcatgtttcggggtttgtcttcatccatgccctcgtcctcattctcagggtctatgtcttccgcctgggtgatccagtccaggtagcctttgagatcttcttctagctgctgcttctcacgaagcttctggaagtctcctcgagctttggctttctccctctctttggaaaactctccgctcaaaacaccgagaaccagatttagaacgaaaaaggatccaaagatgaccagactgacaaaatacacccagggcaactcatagcccatagcgtcttgcatccagtacagcacgtctgtccagccctccatggtgatacactggaacaccgtcagcatggcgaaggcgaagttgtcgaagttggtgatgccgtgcttgggcccatcccacccgggcttgcacacggtcccgttctgacactgtcgcccatggcctgtctccaaagcacaaggggagggatcctcttccgctggaacatctattatgccctcctggttgtagcaggtcttgtgcatcttccccatgaagagctccaggccgataatggcatagatgatgatgacgaagagcacgaggagggcaatgtgcagcaggggcaccatggccttgatgatggagttcaggaccacctggagacttgggactccagacaccagccgcaggggacgaagcacacggaaagctctcagtgccttcacatcgaatcccgctcctttccctcccagagcgttggccccgtcagctttggttgcttgttctaaaattgcactaaaaagccctacaaccacgattataaaatctagtaaattccaaccgttgcggaggtaagcgttggggtggaagagtagtccgtaggcaatcacttttaaaaatgcttccacggtaaaaatgatgaggaagagatactccacccgttccaggttggagttggtggcgttggagtcatcttccggaaagggaatatagattgctaaggccacacaattggcaaaaatcgtcaataaaataattatttcaaatgatttccattcaacaatgctgatgcatgccctcctgatggggttcttcagagtcaggcagagcagagcccggggcggccgtgtggcagttgtgcccccctgcttcttgggtttcccatactgctgccgcttccgctgtgtggaactgacggtagagatggtcgcattgccagcactgcccattaacttggcctgccgggcggcatcgatggctgcctgccaggacagtgctgcccctggagtagggatgtgctcgggggcaagtcctgcagctgcattggcattcatgttggcatgagctgggcgtgggctcccatagttggaacctccaggagaaatgtagaaacagttgagttgagcttcgtgtaccaccttgcccttgaacttcctctctgtgtcctcagacaggcaactggagagcggctggtatgggggtgtggatggctgagcgaaggcccgaatcattgtgactccagttggggaccaacagctgatgtcacaactgaacagctatcccacttgtatttttccttgtactttttaaaaactcagaaacaatgtctgtggccacgtttgaaggccataaaatctcatacggccttatcgcttggcagtgaatttgagcttttgctctcagatttagaattctg

SEQ ID NO: 17 - DNA, 13649 bp, Macaca mulatta
  source 1..13649: mol_type = genomic DNA
ggctgggagcagagcagggaagacagaaaatacaaggttgaaaagaatcaagcaagaaggtgttttgttttgttttgtttagaattctaaaatttaaaagtaattttactgtaacctaaacttgcagcgatatgatatggccatgtaaacttttgtggcactgaaatgttactgcaggaatggcttctgggttttaaaaaattacaagagatcatgagcagggtaattatttagctttaaaaatcaaccaattaatatacaactggaaattcacaatgcttcgagcctttgttcagcctggtacgcctgcataccagccgcttcccagccacctgtctgccgacacggaggtcaagtttaagggtactttggtgcacgaagctcaactcaactatttctacatctctcctggaggttccaactatgggagcccacgccccgcccatgccaacatgaatgccaatgcggccgcgggactggcccctgagcacatccccaccccgggggccgccctgtcctggcaggcggccatcgacgcagcccggcaggcgaagctgatgggcagcgctggcaacgcgaccatctccacagtcagctccacgcagcggaagcggcagcaatatgggaaacccaagaagcagggcagcaccacggccacacgcccgccccgagccctgctctgcctgaccctgaagaaccccatccggagggcctgcatcagcattgtcgaatggaaaccatttgaaataattattttactgactatttttgccaattgtgtggccttagcgatctatattccctttccagaagatgattccaacgccactaattccaacctggaacgagtggaatatctctttctcataatttttacggtggaagcatttttaaaagtcatcgcctatggactcctctttcaccccaatgcctacctccgcaacggctggaatctgctcgattttatcattgtggtcgtggggctttttagcgcaattttagaacaagcaaccaaagcagacggggcgaacgctctcggagggaaaggggccggatttgatgtgaaagcgctgagggccttccgcgtgctgcgccccctgcggctggtgtctggagtcccaagtctccaggtggtcctgaattccatcatcaaggccatggtccccctgctgcacatcgccctgctcgtgctgtttgtcatcatcatctatgccatcatcggcctggagctcttcatggggaagatgcacaagacctgctacaaccaggagggcatagcagatgttccagcagaagatgacccttccccttgtgcgctggaaacaggccatgggcggcagtgccagaacggcacggtgtgcaagcccggctgggatggtcccaagcacggcatcaccaactttgacaactttgccttcgccatgctcacggtgttccagtgcatcaccatggagggctggacggacgtgctgtactggatgcaggacgctatgggctatgagttaccctgggtgtattttgtcagtctggtcatctttggatcctttttcgttctaaatctggttctcggtgtgttgagcggagagttttccaaagagagggagaaggccaaggcccggggagatttccagaagctgcgggagaagcagcagctggaagaggatctcaaaggctacctggactggatcactcaggccgaagacatcgatcccgagaacgaggacgaaggcatggatgaggagaagccccgaaacatgagcatgcccaccagtgagactgagtccgtcaacaccgaaaacgtggctggaggtgacatcgagggagaaaactgcggggccaggctggcccaccggatctccaagtcaaagttcagccgctactggcgccggtggaatcggttctgcagaagaaagtgccgtgccgcggtcaagtctaatgtcttctactggctggtgattttcctggtgttcctcaacacgctcaccattgcctctgagcactacaaccagccccactggctcacggaagtccaagacacggcgaacaaggccctgctggcgctgttcacggcagagatgctgctgaagatgtacagcctgggcctgcaggcctacttcgtgtccctcttcaaccgctttgactgcttcgtcgtgtgtggcggcatcctggagaccatcctggtagagaccaagatcatgtccccactgggcatctccgtgctccgatgcgtccggttgctgaggatattcaagatcacgaggtactggaactccttgagcaacctggtggcatccttgctgaactctgtgcgctccatcgcctccctgctccttctcctattcctcttcatcatcatcttctccctcctggggatgcagctctttggaggaaagttcaactttgatgagatgcagacccggaggagcacatttgataacttcccccagtccctcctcactgtgtttcagatcctgaccggggaggactggaattcggtgatgtatgatgggatcatggcttatggcggcccctcttttccagggatgttagtctgtatttacttcatcatcctcttcatctgtggaaactatatcctactgaatgtgttcttggccattgctgtggacaacctggctgacgctgagagcctcacatctgcccaaaaggaggaggaagaggagaaggagagaaagaagctggccaggactgccagcccagagaagaaacaagagatggtggagaagccggcagtggaggaatccaaggaggagaagattgagctgaaatccatcacagctgacggagagtctccacccaccaccaagatcaacatggatgacctccagcccaatgaaaatgaggataagagcccctaccccaacccagagactacaggagaagaggatgaggaggagccagagatgcctgtcggccctcgcccacgcccactctctgagcttcaccttaaggaaaaggcagtgcccatgccagaagccagtgcgtttttcgtcttcagctctaacaacaggtttcgcctgcagtgccaccgcattgtcaacgacacgatcttcaccaacctgatcctcttcttcattctgctcagcagcatttccctggctgctgaggacccggtccagcacacctccttcaggaaccacattctgttttattttgatattgtttttaccaccattttcaccattgaaattgctctgaagatgactgcttatggggcttttctgcacaagggctccttctgccggaactacttcaacatcctggacctgctggtggtcagcgtgtccctcatctcctttggcatccagtccagtgcaatcaatgtcgtgaagatcttgcgagtcctgcgagtactcaggcccctgagggctatcaacagggccaaggggctaaagcatgtggttcagtgtgtgtttgtcgccatccggaccatcgggaacatcgtgattgtcaccaccctgctgcagttcatgttcgcctgcatcggggtccagctcttcaagggaaagctgtacacctgttcagacagttccaagcagacagaggcggaatgcaagggcaactacatcacgtacaaagacggggaggttgaccaccccatcatccaaccccgtagctgggagaacagcaagtttgactttgacaatgttctggccgccatgatggccctcttcaccgtctccaccttcgaagggtggccagagctgctgtaccgctccatcgactcccacaccgaagacaagggtcccatctacaattaccgcgtggagatctccatcttcttcatcatctacatcatcatcatcgccttcttcatgatgaacatcttcgtgggcttcgtcatcgtcaccttccaggagcagggggagcaggagtacaagaactgtgagctggacaagaaccagcgacagtgtgtggaatacgccctcaaggcccggcccctgcggaggtatatccccaagaaccagcaccagtacaaagtgtggtacgtggtcaactccacctacttcgagtacctgatgttcgtcctcatcctgctcaacaccatctgcctggccatgcagcactacggccagagctgcctgttcaaaatcgccatgaacatcctcaacatgctcttcactggcctcttcaccgtggagatgatcctgaagctcattgccttcaaacccaagggttactttagtgatccctggaatgtttttgacttcctcatcgtaattggcagcataattgacgtcattctcagtgagactaatcactatttctgtgatgcatggaatacatttgacgccttgattgttgtgggtagcattgttgatatagcaatcaccgaggtaaacccagctgaacatacccaatgctctccctctatgaacgcagaggaaaactcgcgcatctccatcaccttcttccgcctattccgggtcatgcgcctggtgaagctgctgagccgcggggagggcatccggacgctgctgtggaccttcatcaagtccttccaggccctgccctatgtggccctcctgatcgtgatgctgttcttcatctacgcggtgatcgggatgcaggtgtttgggaaaattgccctgaatgataccacagagatcaaccggaacaacaactttcagaccttcccccaggccgtgctgctcctcttcaggtgtgccaccggggaggcctggcaggacatcatgctggcctgcatgccaggcaagaagtgtgccccggagtccgagcccggcaacagcacggagggtgagacaccctgtggcagcagctttgccgtcttctacttcatcagcttctacatgctctgtgccttcctgatcatcaacctctttgtagctgtcatcatggacaactttgactacctgacaagggactggtccatccttggtccccaccacctggatgagtttaaaagaatctgggcagagtatgaccctgaagccaagggtcgtatcaaacacctggatgtggtgaccctcctccggcggattcagcccccactaggttttgggaagctgtgccctcaccgagtggcttgcaaacgcctggtctccatgaacatgcctctgaacagcgacgggacggtcatgttcaatgccaccctgtttgccctggtcaggacagctctgaggatcaaaacagaagagggacccagcccatcagaggcccaccaaggggctgaggatcctttccgccctgcagggaacctcgaacaggccaatgaggagctgcgggccatcatcaagaagatctggaagcggaccagcatgaagctgctggaccaggtggtgcctcctgcaggcgatgatgaggtcaccgttggcaagttctacgccacattcctgatccaggagtacttccggaaattcaagaagcgcaaagagcagggtcttgtgggcaaaccctcccagaggaacgcgctgtctctgcaggctggcttgcgcacgctgcacgacatcgggcctgagatccgacgggccatctccggagacctcaccgctgaggaggagctggacaaggccatgaaggaggctgtgtccgctgcttctgaagatgacatcttcaggagggccggtggcctgtttggcaaccacgtcagctactaccaaagcgacggccggagcgccttcccccagaccttcaccactcagcgcccgctgcacatcaacaaggcgggcagcagccagggcgacactgagtcgccgtcccacgagaagctggtggactccaccttcacccccagcagctactcgtccaccggctccaatgccaacatcaacaatgccaacaacaccgccctgggtcgcctccctcgccctgccggctaccccagcacggtcagcactgtggagggccatgggccccccttgtcccctgccatccgggtgcaggaggtggcgtggaagctcagctccaaaaggtgccactccggggagagccagacagccatggtgggtccggaggagacgtctcaggatgagacctatgaagtgaagatgaaccatgacgcggaggcctgcagtgagcccagcctgctctccacagacatgctgtcctaccaggatgacgaaaatcggcaactgacgctcccagaggaggacaagagggacatgcggcaatccccaaagaggggtttcctccgctccgcctcactaggtcgaagggcctccttccacctggaatgtctgaagcgacagaaggaccgagggggagacatctctcagaagacagtcctgcccttgcatctggttcatcatcaggcattggcagtggcaggcctgagccccctcctccagagaagccattcccctgcctcattccccaggccttttgccacccccccggccacacctggcagccgaggctggccgccacagcccatccccaccctgcggctggagggcgccgagtccagtgagaaactcaacagcagcttcccgtccatccactgcggctcctgggctgagaccacccccggtggcggggacagcaacaccacccggagagcccggcccgtctccctcatggtgcccagccaggctggggccccggggaggcagttccacggcagtgccagcagcctggtggaagcggtcttgatttctgaaggactggggcagttcgctcaagatcccaagttcatcgaggtcaccacccaggagctggcggacgcctgcgacatgaccatagaggagatggagagcgcggccgacaacatcctcagcgggggcgccccgcagagccccaatggcgccctcttaccctttgtgaactgcagggacgcggggcaggaccgagccgggggcgaagaggacgcgggctgtgcgcgcgcgcgggggcgcctgagcgaggaggagctccaggacagcagggtctacgtcagcagcctgtagtgggcgctgccagatgcgggctttttttatttgtttcaatgttcctaatgggttcgtttcagaagtgcctcactgttctcgtgacctggagttaaccggaacagcgtcttcattcatttctgttgggacaagacgcggagcctgggtgcgcgagccgccctccgggaggaaggcgcccggctgcgtctgcagaggcggggagaggaggcggcgaaggtcccggggcgcgaggaaggcgcctgccctctcccagcccgcaggccccgggcccagccacgcctctgcggggagagcaccccggcttcccgcgcgccctcacccaaaggaccctacagcaaacgggtgtctttcgactctgcttgtagaaaccatttgcacatattctgtacgagcctcgctgtctccctagagccagggtcccgcggatttggagaagggagcggggcaggacttccaggaggaccccagcccggcccggagagggaggcggcggccgtcaggggcgcggagctttggggatgggcgtcgggccggccatggtgccgctcaccccgacccgcccctgcccacctgcgacgggatcccccgaccggcacgggccacgccgagctcccggccagccgccggcccgcaggcagcgcaagggaggagctgcgccgccgggaaggggccgccggctccgcgcaaccaggtggtgctgagcttccgctgagcgctcttttgttttgtggtttgacacttttcttgacagcatgttgcagtttctttttggttttgggttttttttattttttattttgttttcccagggggaggggaggaagaagagtgtttacaaagtcctgtagccccctcacctttctgttttcacttttgccaatgtacatccggtttggttttcttgtattatttaaacggttgtggtttcctttttccacggaggttcaatagaagccgctgcaggagagttttaccaaccattgtgtatgcccaataatttgttatcatttccttaggtagcaacctatttttgttctggtttggttcggttttctcatggaaaggtaattgcaatgcacttgatgtggtcttgcacatgtgggtgatagagttgggttccttttaatgctgggtgtacaggtgggtttgggagagaggagcatgcgcgagagtctccgagtgtgtgcgacgcgtgtgtgtgtggtgggttgtctgtgtgcatatgtcctgcctatgtatatgcacccacaccatgtgcccgtgcacaccagtgactacgcagtcccccctttctggtttagctgtgagaagatctgaatctggggccatttgaaagcaaaaacaaaccactgtctctgcttctgaaatgggaatcagtaactctttgcattttctgtcccacaagatatgcaaaaacaatgcaataatattcatttaaaaatacaattgtgagttgtgttggcattaaaactgtattttaaaaaaaagacacagaaatttaagggaaaaacacaagaaggcattttgcttcactatattccgtgtaatgttttattgcattgataatgtttctgttgaagaaaccgttatacttgaattcaggtcagtttcagtatttttcaaatatttttttaaaactgaattgcaattgtgccaagcgaatataatgaattgaattaagttggttttcggattcacttcttgtatattttgctgcatgtaaagtaaatcattttgtatttggagtgtgacaagctttacctttgaactcttaagtgcttttctatatgtggttgggggaagggaacaagttttctctaatttgcacaatgagcaaaggtatcaccagtgtagtcattattctgctctccacaaacaggtttggacattactgttttgcatatcttgtgttcgcttccgtttgcctcaatttttccaaaatcatttgctgggtatgttcgtaccgcctcttgctgtgatagaccaggacctattttattccaggcttcactgtccactctgctctggtcatctgatttggtacttctccaagaacagcccttcactgttaggcgtagggaggcgttctgaccagccctcagtcaccgggctggcatccgcatcccccacggaagaggtggctggctttgccttcgctcccaccacacagacttttctcgttggcttccttaggaaagtgtacaccaaccgggaggataaaattaaagtcaggctgcttggagggagggcatcctcacttcaggattccgctctacccagcgagggcagcaggggctcgagaaaggaacgggtgaaaccctgatccatctgaaagtcaactctgcgtgctcctttctccatcccttcctcactctggagcagcctttccttcgggcttgccctaatgtttgggctgctgaggaggaggccaggacagaggaagaggcatccggagatcacagtgggggtgggaacagattttgtaggggcatctctgatgctcacgtatctccctagaacatcactcttttggtgctgtgtccttcaaatgtgtatcaacagtgatggctgaaaagggactgctttggggaaaactggacccaaccattcccccagaactgacccattgaatctctttcagtcctagtgttccctcagcccctcttggcacatatataagtaagctagaaattaaaaaaagggacagtccattcctctatgacagcttgctggactgattcatgaaaaagtggagaaatgtacttgatactccctggttaacacagtctagaaacagagtttctttatgggtatccacaccgaagtcatccggactttcgtgattccttttcagtgccaccaaggtcctctagaaattgagtttaggtatcatcctttataaagttccgaagatttctacccggaggtacacacgggcgttccctgtctaggacgggaggactgtccgagactgatcttccgatctagaataagactggtgtacgatgcctgtcatcagaacagactggcacaagtagtgacaccaatgaaccgcatccacagttttccgagtgatgtctactctccacctaaaatggaattttccccatgaccttataaaacataattgtcacatcttccatacccctcctgacagcccccaagtggcaggagaaaacagccaggggctaagggcccaagggacttgaagaaacagtttaaggtctgcagtttggtcagcttaattctttgtcctctgaccagccctgcctctttcatttccagaccttagagaatttttcccagctttgattcagaaggtattattataacccctttcctccttcttaatccagtaggtctcactctgggaaatccactcaaaagagcaaggcaatgactctcattctgtttcccagttccaaattccaggtgcttgtctggagtgaagctgcctgtttttttttctcccagcttttctccacccagcatgtctcctgactgtgcagctgaagacacggggggcaacctcaggaaacgcagccctttccatgcccaagttcatctcctgagaaatagggacaccttgaaaatgaggactttggaagtcacccaaaggatggtggctactttatggagtcctgaagatacacagccaccactcctaaaggcaaagaagtagaacaaggatgtaggtcagggatagagtggaaccctggtcatcagggtttttagcctcatcgtgggagaggtggcaaaggaggatgacggcctctccgtccctagaggcctagaataattgaaatatcattgttgaggatttagaaacaattcaacaaagaggccacaacaggggctgctgactcccagaagacctctttaaaccccaggggcggcaaatacttgctgatgcagtccgggccaattccatgttttaatgaagacctgcctctggggcaaatgtcagcacagggaggactgggaggagaatggaggcaagaaaagggcatagtttgactccctctgggtctcttcccagttcatggaaggacgtattcagctcacccacccacagtgatccgtgtggtggagccgctgacatctcaaggatttgggaaggtgagaagagcacacgttccatctgggggtgttgtcccagccatgtcagcctacctggcggggtgtgagggtgtctgccgccctgacccccctctgctgatgtccctcccctcacgtggtccaggtgccacctgacacaggctcctgtgcaaagacaggcagggaagcccgcatctcactcacagggaggccctcagctgccagagtccaggttctccagcggctacgatttgaggaggttgagggggaagataggaggcagagaagagtcctacaactgtcaggaatggggcacctttccctgtccctaagcagagcttcctcttcccactgccctccccggccccagctctctgtctttcccaacacctagtgagaaagacggtgcgtggaagggagtcccatgggcagatgcttacacaacctctttgtgaagccacttctgggcttaacttcattcatcaatttatttttacgtcaaagcaatgaaacacttctttgtggagccagataccagtataacaggtgaatgggtttctgccacatctccacattactgggggggatgcttgaaccacctccctaggacacacacctttaaggcacaagggctggggttgagctctagataagggactttcctgctcctgcaagggtgagcactgtatacacagacaaggagggcgcagcagagtggctccctcgggtggaagtagtaccatcagaagctcctgttattatgagatacattctatttatgtacattgagagaatactacaatcaacacttttacctgggatgactttaagaggtttgagccaaagtacctgaagtggcaaagatccgtggtctttgtggggtattagagaagcgttccaggcactctggatcttgcagctgagtggatgaagggtaaacacatctgcggagcaccgagaggagtcagagttagcatttttcatgaaaattctcccacatctctactaagaatgaggaggaaaagatgaagactaagtaattacactgaggtttgaaatgttacgtcaccagagccaagtcctctcccttcagataggttactggctgctacacagggacacccccaccttttcagggcatcccatgcaccccaattctcagaatctaaggaatttgactttgtagggatcccagaaagggcaccgtgccacttcccctggtgtgaatcagacatacattgtacattcatttctaaaattcactcatgcacctcaaaccaaggttattatcaaaaagctctgggtggaagagcttgtaggttttttaagagtgggtcatttctatgtgaggaaatgcagaaatggacagaatgattcttattcactgtttgggtctggagaattcccgttatggaattcttagagatctcaagtttattaccaagggaattaggaaaaagaagtgagcaggcaccaggccaagcagtgactcccttgccaaggaacctgaggctgcaggattcagggacctccttgaggaaacctctcctggccactggccaggagaaaagagaaggttctcctatagagtgaaaagaagcaaaagagagtgggtcactgggtcctgtacatagcacccaaccccaagacttcccaacatggagaaactataccaatgtttaaaagggggaaaggaaagaacttgcacatcaagggaagacgatttgtaaacacacagtcctgtgcaaaaagatctccttcaggaggtgtctccagcatcccaaagctgtgcgcacctcctcttttcctgctcaggccacctatgcatccagctgcagcccatccccacacctgaaatccatctcttgaatcccagccagattatataccaccccatttccatgtcctgtcctgcccagaatgcatgctgttctcccagagcctgatgggaatgaggccttgcaatgaggccatgggaaacagagatgagcatgtctggacaagtctgtgatggtagtggatgagaataacccatggcaaaacacacacgctcattaagaaatagggtgacagattccccactggtgaagcactgaaaggtctattactctcataacattgctgtttcattttaatccaccagagctaccatgcaaaactttcctccagtgaaaggctccagataaagctcccctctcctcgtgtcctcctgctcagacccaccttcatccgccaaaccaatctgtatcatgcctgttatcagagaggcacagaaagatgggcactgcctccattgtcactgttccccacacccctacacacccccacatcctcccctccaggctccacgacttcacagtcttactgttgtaaatatcattgtacagtttgtaatcctcaaataatcccattgtcagaggcctcgcctgatggccttctcaccctcgagaaaggccagggaacctggaaggggcaacccttcaaggagagcttcagggtcatctctgtgtgagacactattgtatattcctgtaagattgcatttttatctaaggaatgatgttatttaaaaaacaaacaaaaaacacaaaaaataagaattgcaaataaatttcttaacaatgtcta

SEQ ID NO: 18 - DNA, 13649 bp, Macaca mulatta
  source 1..13649: mol_type = genomic DNA
tagacattgttaagaaatttatttgcaattcttattttttgtgttttttgtttgttttttaaataacatcattccttagataaaaatgcaatcttacaggaatatacaatagtgtctcacacagagatgaccctgaagctctccttgaagggttgccccttccaggttccctggcctttctcgagggtgagaaggccatcaggcgaggcctctgacaatgggattatttgaggattacaaactgtacaatgatatttacaacagtaagactgtgaagtcgtggagcctggaggggaggatgtgggggtgtgtaggggtgtggggaacagtgacaatggaggcagtgcccatctttctgtgcctctctgataacaggcatgatacagattggtttggcggatgaaggtgggtctgagcaggaggacacgaggagaggggagctttatctggagcctttcactggaggaaagttttgcatggtagctctggtggattaaaatgaaacagcaatgttatgagagtaatagacctttcagtgcttcaccagtggggaatctgtcaccctatttcttaatgagcgtgtgtgttttgccatgggttattctcatccactaccatcacagacttgtccagacatgctcatctctgtttcccatggcctcattgcaaggcctcattcccatcaggctctgggagaacagcatgcattctgggcaggacaggacatggaaatggggtggtatataatctggctgggattcaagagatggatttcaggtgtggggatgggctgcagctggatgcataggtggcctgagcaggaaaagaggaggtgcgcacagctttgggatgctggagacacctcctgaaggagatctttttgcacaggactgtgtgtttacaaatcgtcttcccttgatgtgcaagttctttcctttcccccttttaaacattggtatagtttctccatgttgggaagtcttggggttgggtgctatgtacaggacccagtgacccactctcttttgcttcttttcactctataggagaaccttctcttttctcctggccagtggccaggagaggtttcctcaaggaggtccctgaatcctgcagcctcaggttccttggcaagggagtcactgcttggcctggtgcctgctcacttctttttcctaattcccttggtaataaacttgagatctctaagaattccataacgggaattctccagacccaaacagtgaataagaatcattctgtccatttctgcatttcctcacatagaaatgacccactcttaaaaaacctacaagctcttccacccagagctttttgataataaccttggtttgaggtgcatgagtgaattttagaaatgaatgtacaatgtatgtctgattcacaccaggggaagtggcacggtgccctttctgggatccctacaaagtcaaattccttagattctgagaattggggtgcatgggatgccctgaaaaggtgggggtgtccctgtgtagcagccagtaacctatctgaagggagaggacttggctctggtgacgtaacatttcaaacctcagtgtaattacttagtcttcatcttttcctcctcattcttagtagagatgtgggagaattttcatgaaaaatgctaactctgactcctctcggtgctccgcagatgtgtttacccttcatccactcagctgcaagatccagagtgcctggaacgcttctctaataccccacaaagaccacggatctttgccacttcaggtactttggctcaaacctcttaaagtcatcccaggtaaaagtgttgattgtagtattctctcaatgtacataaatagaatgtatctcataataacaggagcttctgatggtactacttccacccgagggagccactctgctgcgccctccttgtctgtgtatacagtgctcacccttgcaggagcaggaaagtcccttatctagagctcaaccccagcccttgtgccttaaaggtgtgtgtcctagggaggtggttcaagcatcccccccagtaatgtggagatgtggcagaaacccattcacctgttatactggtatctggctccacaaagaagtgtttcattgctttgacgtaaaaataaattgatgaatgaagttaagcccagaagtggcttcacaaagaggttgtgtaagcatctgcccatgggactcccttccacgcaccgtctttctcactaggtgttgggaaagacagagagctggggccggggagggcagtgggaagaggaagctctgcttagggacagggaaaggtgccccattcctgacagttgtaggactcttctctgcctcctatcttccccctcaacctcctcaaatcgtagccgctggagaacctggactctggcagctgagggcctccctgtgagtgagatgcgggcttccctgcctgtctttgcacaggagcctgtgtcaggtggcacctggaccacgtgaggggagggacatcagcagaggggggtcagggcggcagacaccctcacaccccgccaggtaggctgacatggctgggacaacacccccagatggaacgtgtgctcttctcaccttcccaaatccttgagatgtcagcggctccaccacacggatcactgtgggtgggtgagctgaatacgtccttccatgaactgggaagagacccagagggagtcaaactatgcccttttcttgcctccattctcctcccagtcctccctgtgctgacatttgccccagaggcaggtcttcattaaaacatggaattggcccggactgcatcagcaagtatttgccgcccctggggtttaaagaggtcttctgggagtcagcagcccctgttgtggcctctttgttgaattgtttctaaatcctcaacaatgatatttcaattattctaggcctctagggacggagaggccgtcatcctcctttgccacctctcccacgatgaggctaaaaaccctgatgaccagggttccactctatccctgacctacatccttgttctacttctttgcctttaggagtggtggctgtgtatcttcaggactccataaagtagccaccatcctttgggtgacttccaaagtcctcattttcaaggtgtccctatttctcaggagatgaacttgggcatggaaagggctgcgtttcctgaggttgccccccgtgtcttcagctgcacagtcaggagacatgctgggtggagaaaagctgggagaaaaaaaaacaggcagcttcactccagacaagcacctggaatttggaactgggaaacagaatgagagtcattgccttgctcttttgagtggatttcccagagtgagacctactggattaagaaggaggaaaggggttataataataccttctgaatcaaagctgggaaaaattctctaaggtctggaaatgaaagaggcagggctggtcagaggacaaagaattaagctgaccaaactgcagaccttaaactgtttcttcaagtcccttgggcccttagcccctggctgttttctcctgccacttgggggctgtcaggaggggtatggaagatgtgacaattatgttttataaggtcatggggaaaattccattttaggtggagagtagacatcactcggaaaactgtggatgcggttcattggtgtcactacttgtgccagtctgttctgatgacaggcatcgtacaccagtcttattctagatcggaagatcagtctcggacagtcctcccgtcctagacagggaacgcccgtgtgtacctccgggtagaaatcttcggaactttataaaggatgatacctaaactcaatttctagaggaccttggtggcactgaaaaggaatcacgaaagtccggatgacttcggtgtggatacccataaagaaactctgtttctagactgtgttaaccagggagtatcaagtacatttctccactttttcatgaatcagtccagcaagctgtcatagaggaatggactgtccctttttttaatttctagcttacttatatatgtgccaagaggggctgagggaacactaggactgaaagagattcaatgggtcagttctgggggaatggttgggtccagttttccccaaagcagtcccttttcagccatcactgttgatacacatttgaaggacacagcaccaaaagagtgatgttctagggagatacgtgagcatcagagatgcccctacaaaatctgttcccacccccactgtgatctccggatgcctcttcctctgtcctggcctcctcctcagcagcccaaacattagggcaagcccgaaggaaaggctgctccagagtgaggaagggatggagaaaggagcacgcagagttgactttcagatggatcagggtttcacccgttcctttctcgagcccctgctgccctcgctgggtagagcggaatcctgaagtgaggatgccctccctccaagcagcctgactttaattttatcctcccggttggtgtacactttcctaaggaagccaacgagaaaagtctgtgtggtgggagcgaaggcaaagccagccacctcttccgtgggggatgcggatgccagcccggtgactgagggctggtcagaacgcctccctacgcctaacagtgaagggctgttcttggagaagtaccaaatcagatgaccagagcagagtggacagtgaagcctggaataaaataggtcctggtctatcacagcaagaggcggtacgaacatacccagcaaatgattttggaaaaattgaggcaaacggaagcgaacacaagatatgcaaaacagtaatgtccaaacctgtttgtggagagcagaataatgactacactggtgatacctttgctcattgtgcaaattagagaaaacttgttcccttcccccaaccacatatagaaaagcacttaagagttcaaaggtaaagcttgtcacactccaaatacaaaatgatttactttacatgcagcaaaatatacaagaagtgaatccgaaaaccaacttaattcaattcattatattcgcttggcacaattgcaattcagttttaaaaaaatatttgaaaaatactgaaactgacctgaattcaagtataacggtttcttcaacagaaacattatcaatgcaataaaacattacacggaatatagtgaagcaaaatgccttcttgtgtttttcccttaaatttctgtgtcttttttttaaaatacagttttaatgccaacacaactcacaattgtatttttaaatgaatattattgcattgtttttgcatatcttgtgggacagaaaatgcaaagagttactgattcccatttcagaagcagagacagtggtttgtttttgctttcaaatggccccagattcagatcttctcacagctaaaccagaaaggggggactgcgtagtcactggtgtgcacgggcacatggtgtgggtgcatatacataggcaggacatatgcacacagacaacccaccacacacacacgcgtcgcacacactcggagactctcgcgcatgctcctctctcccaaacccacctgtacacccagcattaaaaggaacccaactctatcacccacatgtgcaagaccacatcaagtgcattgcaattacctttccatgagaaaaccgaaccaaaccagaacaaaaataggttgctacctaaggaaatgataacaaattattgggcatacacaatggttggtaaaactctcctgcagcggcttctattgaacctccgtggaaaaaggaaaccacaaccgtttaaataatacaagaaaaccaaaccggatgtacattggcaaaagtgaaaacagaaaggtgagggggctacaggactttgtaaacactcttcttcctcccctccccctgggaaaacaaaataaaaaataaaaaaaacccaaaaccaaaaagaaactgcaacatgctgtcaagaaaagtgtcaaaccacaaaacaaaagagcgctcagcggaagctcagcaccacctggttgcgcggagccggcggccccttcccggcggcgcagctcctcccttgcgctgcctgcgggccggcggctggccgggagctcggcgtggcccgtgccggtcgggggatcccgtcgcaggtgggcaggggcgggtcggggtgagcggcaccatggccggcccgacgcccatccccaaagctccgcgcccctgacggccgccgcctccctctccgggccgggctggggtcctcctggaagtcctgccccgctcccttctccaaatccgcgggaccctggctctagggagacagcgaggctcgtacagaatatgtgcaaatggtttctacaagcagagtcgaaagacacccgtttgctgtagggtcctttgggtgagggcgcgcgggaagccggggtgctctccccgcagaggcgtggctgggcccggggcctgcgggctgggagagggcaggcgccttcctcgcgccccgggaccttcgccgcctcctctccccgcctctgcagacgcagccgggcgccttcctcccggagggcggctcgcgcacccaggctccgcgtcttgtcccaacagaaatgaatgaagacgctgttccggttaactccaggtcacgagaacagtgaggcacttctgaaacgaacccattaggaacattgaaacaaataaaaaaagcccgcatctggcagcgcccactacaggctgctgacgtagaccctgctgtcctggagctcctcctcgctcaggcgcccccgcgcgcgcgcacagcccgcgtcctcttcgcccccggctcggtcctgccccgcgtccctgcagttcacaaagggtaagagggcgccattggggctctgcggggcgcccccgctgaggatgttgtcggccgcgctctccatctcctctatggtcatgtcgcaggcgtccgccagctcctgggtggtgacctcgatgaacttgggatcttgagcgaactgccccagtccttcagaaatcaagaccgcttccaccaggctgctggcactgccgtggaactgcctccccggggccccagcctggctgggcaccatgagggagacgggccgggctctccgggtggtgttgctgtccccgccaccgggggtggtctcagcccaggagccgcagtggatggacgggaagctgctgttgagtttctcactggactcggcgccctccagccgcagggtggggatgggctgtggcggccagcctcggctgccaggtgtggccgggggggtggcaaaaggcctggggaatgaggcaggggaatggcttctctggaggagggggctcaggcctgccactgccaatgcctgatgatgaaccagatgcaagggcaggactgtcttctgagagatgtctccccctcggtccttctgtcgcttcagacattccaggtggaaggaggcccttcgacctagtgaggcggagcggaggaaacccctctttggggattgccgcatgtccctcttgtcctcctctgggagcgtcagttgccgattttcgtcatcctggtaggacagcatgtctgtggagagcaggctgggctcactgcaggcctccgcgtcatggttcatcttcacttcataggtctcatcctgagacgtctcctccggacccaccatggctgtctggctctccccggagtggcaccttttggagctgagcttccacgccacctcctgcacccggatggcaggggacaaggggggcccatggccctccacagtgctgaccgtgctggggtagccggcagggcgagggaggcgacccagggcggtgttgttggcattgttgatgttggcattggagccggtggacgagtagctgctgggggtgaaggtggagtccaccagcttctcgtgggacggcgactcagtgtcgccctggctgctgcccgccttgttgatgtgcagcgggcgctgagtggtgaaggtctgggggaaggcgctccggccgtcgctttggtagtagctgacgtggttgccaaacaggccaccggccctcctgaagatgtcatcttcagaagcagcggacacagcctccttcatggccttgtccagctcctcctcagcggtgaggtctccggagatggcccgtcggatctcaggcccgatgtcgtgcagcgtgcgcaagccagcctgcagagacagcgcgttcctctgggagggtttgcccacaagaccctgctctttgcgcttcttgaatttccggaagtactcctggatcaggaatgtggcgtagaacttgccaacggtgacctcatcatcgcctgcaggaggcaccacctggtccagcagcttcatgctggtccgcttccagatcttcttgatgatggcccgcagctcctcattggcctgttcgaggttccctgcagggcggaaaggatcctcagccccttggtgggcctctgatgggctgggtccctcttctgttttgatcctcagagctgtcctgaccagggcaaacagggtggcattgaacatgaccgtcccgtcgctgttcagaggcatgttcatggagaccaggcgtttgcaagccactcggtgagggcacagcttcccaaaacctagtgggggctgaatccgccggaggagggtcaccacatccaggtgtttgatacgacccttggcttcagggtcatactctgcccagattcttttaaactcatccaggtggtggggaccaaggatggaccagtcccttgtcaggtagtcaaagttgtccatgatgacagctacaaagaggttgatgatcaggaaggcacagagcatgtagaagctgatgaagtagaagacggcaaagctgctgccacagggtgtctcaccctccgtgctgttgccgggctcggactccggggcacacttcttgcctggcatgcaggccagcatgatgtcctgccaggcctccccggtggcacacctgaagaggagcagcacggcctgggggaaggtctgaaagttgttgttccggttgatctctgtggtatcattcagggcaattttcccaaacacctgcatcccgatcaccgcgtagatgaagaacagcatcacgatcaggagggccacatagggcagggcctggaaggacttgatgaaggtccacagcagcgtccggatgccctccccgcggctcagcagcttcaccaggcgcatgacccggaataggcggaagaaggtgatggagatgcgcgagttttcctctgcgttcatagagggagagcattgggtatgttcagctgggtttacctcggtgattgctatatcaacaatgctacccacaacaatcaaggcgtcaaatgtattccatgcatcacagaaatagtgattagtctcactgagaatgacgtcaattatgctgccaattacgatgaggaagtcaaaaacattccagggatcactaaagtaacccttgggtttgaaggcaatgagcttcaggatcatctccacggtgaagaggccagtgaagagcatgttgaggatgttcatggcgattttgaacaggcagctctggccgtagtgctgcatggccaggcagatggtgttgagcaggatgaggacgaacatcaggtactcgaagtaggtggagttgaccacgtaccacactttgtactggtgctggttcttggggatatacctccgcaggggccgggccttgagggcgtattccacacactgtcgctggttcttgtccagctcacagttcttgtactcctgctccccctgctcctggaaggtgacgatgacgaagcccacgaagatgttcatcatgaagaaggcgatgatgatgatgtagatgatgaagaagatggagatctccacgcggtaattgtagatgggacccttgtcttcggtgtgggagtcgatggagcggtacagcagctctggccacccttcgaaggtggagacggtgaagagggccatcatggcggccagaacattgtcaaagtcaaacttgctgttctcccagctacggggttggatgatggggtggtcaacctccccgtctttgtacgtgatgtagttgcccttgcattccgcctctgtctgcttggaactgtctgaacaggtgtacagctttcccttgaagagctggaccccgatgcaggcgaacatgaactgcagcagggtggtgacaatcacgatgttcccgatggtccggatggcgacaaacacacactgaaccacatgctttagccccttggccctgttgatagccctcaggggcctgagtactcgcaggactcgcaagatcttcacgacattgattgcactggactggatgccaaaggagatgagggacacgctgaccaccagcaggtccaggatgttgaagtagttccggcagaaggagcccttgtgcagaaaagccccataagcagtcatcttcagagcaatttcaatggtgaaaatggtggtaaaaacaatatcaaaataaaacagaatgtggttcctgaaggaggtgtgctggaccgggtcctcagcagccagggaaatgctgctgagcagaatgaagaagaggatcaggttggtgaagatcgtgtcgttgacaatgcggtggcactgcaggcgaaacctgttgttagagctgaagacgaaaaacgcactggcttctggcatgggcactgccttttccttaaggtgaagctcagagagtgggcgtgggcgagggccgacaggcatctctggctcctcctcatcctcttctcctgtagtctctgggttggggtaggggctcttatcctcattttcattgggctggaggtcatccatgttgatcttggtggtgggtggagactctccgtcagctgtgatggatttcagctcaatcttctcctccttggattcctccactgccggcttctccaccatctcttgtttcttctctgggctggcagtcctggccagcttctttctctccttctcctcttcctcctccttttgggcagatgtgaggctctcagcgtcagccaggttgtccacagcaatggccaagaacacattcagtaggatatagtttccacagatgaagaggatgatgaagtaaatacagactaacatccctggaaaagaggggccgccataagccatgatcccatcatacatcaccgaattccagtcctccccggtcaggatctgaaacacagtgaggagggactgggggaagttatcaaatgtgctcctccgggtctgcatctcatcaaagttgaactttcctccaaagagctgcatccccaggagggagaagatgatgatgaagaggaataggagaaggagcagggaggcgatggagcgcacagagttcagcaaggatgccaccaggttgctcaaggagttccagtacctcgtgatcttgaatatcctcagcaaccggacgcatcggagcacggagatgcccagtggggacatgatcttggtctctaccaggatggtctccaggatgccgccacacacgacgaagcagtcaaagcggttgaagagggacacgaagtaggcctgcaggcccaggctgtacatcttcagcagcatctctgccgtgaacagcgccagcagggccttgttcgccgtgtcttggacttccgtgagccagtggggctggttgtagtgctcagaggcaatggtgagcgtgttgaggaacaccaggaaaatcaccagccagtagaagacattagacttgaccgcggcacggcactttcttctgcagaaccgattccaccggcgccagtagcggctgaactttgacttggagatccggtgggccagcctggccccgcagttttctccctcgatgtcacctccagccacgttttcggtgttgacggactcagtctcactggtgggcatgctcatgtttcggggcttctcctcatccatgccttcgtcctcgttctcgggatcgatgtcttcggcctgagtgatccagtccaggtagcctttgagatcctcttccagctgctgcttctcccgcagcttctggaaatctccccgggccttggccttctccctctctttggaaaactctccgctcaacacaccgagaaccagatttagaacgaaaaaggatccaaagatgaccagactgacaaaatacacccagggtaactcatagcccatagcgtcctgcatccagtacagcacgtccgtccagccctccatggtgatgcactggaacaccgtgagcatggcgaaggcaaagttgtcaaagttggtgatgccgtgcttgggaccatcccagccgggcttgcacaccgtgccgttctggcactgccgcccatggcctgtttccagcgcacaaggggaagggtcatcttctgctggaacatctgctatgccctcctggttgtagcaggtcttgtgcatcttccccatgaagagctccaggccgatgatggcatagatgatgatgacaaacagcacgagcagggcgatgtgcagcagggggaccatggccttgatgatggaattcaggaccacctggagacttgggactccagacaccagccgcagggggcgcagcacgcggaaggccctcagcgctttcacatcaaatccggcccctttccctccgagagcgttcgccccgtctgctttggttgcttgttctaaaattgcgctaaaaagccccacgaccacaatgataaaatcgagcagattccagccgttgcggaggtaggcattggggtgaaagaggagtccataggcgatgacttttaaaaatgcttccaccgtaaaaattatgagaaagagatattccactcgttccaggttggaattagtggcgttggaatcatcttctggaaagggaatatagatcgctaaggccacacaattggcaaaaatagtcagtaaaataattatttcaaatggtttccattcgacaatgctgatgcaggccctccggatggggttcttcagggtcaggcagagcagggctcggggcgggcgtgtggccgtggtgctgccctgcttcttgggtttcccatattgctgccgcttccgctgcgtggagctgactgtggagatggtcgcgttgccagcgctgcccatcagcttcgcctgccgggctgcgtcgatggccgcctgccaggacagggcggcccccggggtggggatgtgctcaggggccagtcccgcggccgcattggcattcatgttggcatgggcggggcgtgggctcccatagttggaacctccaggagagatgtagaaatagttgagttgagcttcgtgcaccaaagtacccttaaacttgacctccgtgtcggcagacaggtggctgggaagcggctggtatgcaggcgtaccaggctgaacaaaggctcgaagcattgtgaatttccagttgtatattaattggttgatttttaaagctaaataattaccctgctcatgatctcttgtaattttttaaaacccagaagccattcctgcagtaacatttcagtgccacaaaagtttacatggccatatcatatcgctgcaagtttaggttacagtaaaattacttttaaattttagaattctaaacaaaacaaaacaaaacaccttcttgcttgattcttttcaaccttgtattttctgtcttccctgctctgctcccagcc

SEQ ID NO: 19-20 - skipped (2 entries)

SEQ ID NO: 21 - DNA, 8602 bp, Homo sapiens
  source 1..8602: mol_type = genomic DNA
gtgcgcggggctcctcgccgccgctttcgctcgctcgctccgcgtctcggccggaggaggaggctgtggcgccggcgacagctacggcagcggcagccaccgcggcggctgcggcggcggcatctccgcctccactcccgcccgggactgccccccactgtctccccgcccctcccggacagtgagcccgcggcggggcgggggaaggagccgcccccaccccctccaagcccacccctaaagagatccctcctcccctcccccgccgcctggcgcggagccgggacgatgctgaccccttagatccggctccagctgcgccgcgggaagagggggcgcccctccccggacccccgccctccgccgctgccccccttttcgttcgccctctcggggcggcttcgccgaaggtagcgccgaatccggcaaccggagcctgggcgcgaagcgaagaagccggaacaaagtgagggggagccggccggctggcccgggaagccccaggggcgcaggggaagcgggactcgcgccgggcggggtttccctgcgccccggcgccccgcgggcagcatgcccctgcgggcagggggagctgggctgaactggccctcccgggggctcagcttgcgccctagagcccaccagatgtgcccccgccggggcccccgggttgcgtgaggacacctcctctgaggggcgccgcttgcccctctccggatcgcccggggccccggctggccagaggatggacgaggaggaggatggagcgggcgccgaggagtcgggacagccccggagcttcatgcggctcaacgacctgtcgggggccgggggccggccggggccggggtcagcagaaaaggacccgggcagcgcggactccgaggcggaggggctgccgtacccggcgctggccccggtggttttcttctacttgagccaggacagccgcccgcggagctggtgtctccgcacggtctgtaacccctggtttgagcgcatcagcatgttggtcatccttctcaactgcgtgaccctgggcatgttccggccatgcgaggacatcgcctgtgactcccagcgctgccggatcctgcaggcctttgatgacttcatctttgccttctttgccgtggagatggtggtgaagatggtggccttgggcatctttgggaaaaagtgttacctgggagacacttggaaccggcttgactttttcatcgtcatcgcagggatgctggagtactcgctggacctgcagaacgtcagcttctcagctgtcaggacagtccgtgtgctgcgaccgctcagggccattaaccgggtgcccagcatgcgcatccttgtcacgttgctgctggatacgctgcccatgctgggcaacgtcctgctgctctgcttcttcgtcttcttcatcttcggcatcgtcggcgtccagctgtgggcagggctgcttcggaaccgatgcttcctacctgagaatttcagcctccccctgagcgtggacctggagcgctattaccagacagagaacgaggatgagagccccttcatctgctcccagccacgcgagaacggcatgcggtcctgcagaagcgtgcccacgctgcgcggggacgggggcggtggcccaccttgcggtctggactatgaggcctacaacagctccagcaacaccacctgtgtcaactggaaccagtactacaccaactgctcagcgggggagcacaaccccttcaagggcgccatcaactttgacaacattggctatgcctggatcgccatcttccaggtcatcacgctggagggctgggtcgacatcatgtactttgtgatggatgctcattccttctacaatttcatctacttcatcctcctcatcatcgtgggctccttcttcatgatcaacctgtgcctggtggtgattgccacgcagttctcagagaccaagcagcgggaaagccagctgatgcgggagcagcgtgtgcggttcctgtccaacgccagcaccctggctagcttctctgagcccggcagctgctatgaggagctgctcaagtacctggtgtacatccttcgtaaggcagcccgcaggctggctcaggtctctcgggcagcaggtgtgcgggttgggctgctcagcagcccagcacccctcgggggccaggagacccagcccagcagcagctgctctcgctcccaccgccgcctatccgtccaccacctggtgcaccaccaccaccaccatcaccaccactaccacctgggcaatgggacgctcagggccccccgggccagcccggagatccaggacagggatgccaatgggtcccgccggctcatgctgccaccaccctcgacgcctgccctctccggggccccccctggtggcgcagagtctgtgcacagcttctaccatgccgactgccacttagagccagtccgctgccaggcgccccctcccaggtccccatctgaggcatccggcaggactgtgggcagcgggaaggtgtatcccaccgtgcacaccagccctccaccggagacgctgaaggagaaggcactagtagaggtggctgccagctctgggcccccaaccctcaccagcctcaacatcccacccgggccctacagctccatgcacaagctgctggagacacagagtacaggtgcctgccaaagctcttgcaagatctccagcccttgcttgaaagcagacagtggagcctgtggtccagacagctgcccctactgtgcccgggccggggcaggggaggtggagctcgccgaccgtgaaatgcctgactcagacagcgaggcagtttatgagttcacacaggatgcccagcacagcgacctccgggacccccacagccggcggcaacggagcctgggcccagatgcagagcccagctctgtgctggccttctggaggctaatctgtgacaccttccgaaagattgtggacagcaagtactttggccggggaatcatgatcgccatcctggtcaacacactcagcatgggcatcgaataccacgagcagcccgaggagcttaccaacgccctagaaatcagcaacatcgtcttcaccagcctctttgccctggagatgctgctgaagctgcttgtgtatggtccctttggctacatcaagaatccctacaacatcttcgatggtgtcattgtggtcatcagcgtgtgggagatcgtgggccagcaggggggcggcctgtcggtgctgcggaccttccgcctgatgcgtgtgctgaagctggtgcgcttcctgccggcgctgcagcggcagctggtggtgctcatgaagaccatggacaacgtggccaccttctgcatgctgcttatgctcttcatcttcatcttcagcatcctgggcatgcatctcttcggctgcaagtttgcctctgagcgggatggggacaccctgccagaccggaagaattttgactccttgctctgggccatcgtcactgtctttcagatcctgacccaggaggactggaacaaagtcctctacaatggtatggcctccacgtcgtcctgggcggccctttatttcattgccctcatgaccttcggcaactacgtgctcttcaatttgctggtcgccattctggtggagggcttccaggcggaggaaatcagcaaacgggaagatgcgagtggacagttaagctgtattcagctgcctgtcgactcccaggggggagatgccaacaagtccgaatcagagcccgatttcttctcacccagcctggatggtgatggggacaggaagaagtgcttggccttggtgtccctgggagagcacccggagctgcggaagagcctgctgccgcctctcatcatccacacggccgccacacccatgtcgctgcccaagagcaccagcacgggcctgggcgaggcgctgggccctgcgtcgcgccgcaccagcagcagcgggtcggcagagcctggggcggcccacgagatgaagtcaccgcccagcgcccgcagctctccgcacagcccctggagcgctgcaagcagctggaccagcaggcgctccagccggaacagcctcggccgtgcacccagcctgaagcggagaagcccaagtggagagcggcggtccctgttgtcgggagaaggccaggagagccaggatgaagaggagagctcagaagaggagcgggccagccctgcgggcagtgaccatcgccacagggggtccctggagcgggaggccaagagttcctttgacctgccagacacactgcaggtgccagggctgcatcgcactgccagtggccgagggtctgcttctgagcaccaggactgcaatggcaagtcggcttcagggcgcctggcccgggccctgcggcctgatgaccccccactggatggggatgacgccgatgacgagggcaacctgagcaaaggggaacgggtccgcgcgtggatccgagcccgactccctgcctgctgcctcgagcgagactcctggtcagcctacatcttccctcctcagtccaggttccgcctcctgtgtcaccggatcatcacccacaagatgttcgaccacgtggtccttgtcatcatcttccttaactgcatcaccatcgccatggagcgccccaaaattgacccccacagcgctgaacgcatcttcctgaccctctccaattacatcttcaccgcagtctttctggctgaaatgacagtgaaggtggtggcactgggctggtgcttcggggagcaggcgtacctgcggagcagttggaacgtgctggacgggctgttggtgctcatctccgtcatcgacattctggtgtccatggtctctgacagcggcaccaagatcctgggcatgctgagggtgctgcggctgctgcggaccctgcgcccgctcagggtgatcagccgggcgcaggggctgaagctggtggtggagacgctgatgtcctcactgaaacccatcggcaacattgtagtcatctgctgtgccttcttcatcattttcggcatcttgggggtgcagctcttcaaagggaagtttttcgtgtgccagggcgaggataccaggaacatcaccaataaatcggactgtgccgaggccagttaccggtgggtccggcacaagtacaactttgacaaccttggccaggccctgatgtccctgttcgttttggcctccaaggatggttgggtggacatcatgtacgatgggctggatgctgtgggcgtggaccagcagcccatcatgaaccacaacccctggatgctgctgtacttcatctcgttcctgctcattgtggccttctttgtcctgaacatgtttgtgggtgtggtggtggagaacttccacaagtgtcggcagcaccaggaggaagaggaggcccggcggcgggaggagaagcgcctacgaagactggagaaaaagagaaggaatctaatgctggacgatgtaattgcttccggcagctcagccagcgctgcgtcagaagcccagtgcaaaccttactactccgactactcccgcttccggctcctcgtccaccacttgtgcaccagccactacctggacctcttcatcacaggtgtcatcgggctgaacgtggtcaccatggccatggagcactaccagcagccccagattctggatgaggctctgaagatctgcaactacatcttcactgtcatctttgtcttggagtcagttttcaaacttgtggcctttggtttccgtcggttcttccaggacaggtggaaccagctggacctggccattgtgctgctgtccatcatgggcatcacgctggaggaaatcgaggtcaacgcctcgctgcccatcaaccccaccatcatccgcatcatgagggtgctgcgcattgcccgagtgctgaagctgctgaagatggctgtgggcatgcgggcgctgctggacacggtgatgcaggccctgccccaggtggggaacctgggacttctcttcatgttgttgtttttcatctttgcagctctgggcgtggagctctttggagacctggagtgtgacgagacacacccctgtgagggcctgggccgtcatgccacctttcggaactttggcatggccttcctaaccctcttccgagtctccacaggtgacaattggaatggcattatgaaggacaccctccgggactgtgaccaggagtccacctgctacaacacggtcatctcgcctatctactttgtgtccttcgtgctgacggcccagttcgtgctagtcaacgtggtgatcgccgtgctgatgaagcacctggaggagagcaacaaggaggccaaggaggaggccgagctagaggctgagctggagctggagatgaagaccctcagcccccagccccactcgccactgggcagccccttcctctggcctggggtcgagggccccgacagccccgacagccccaagcctggggctctgcacccagcggcccacgcgagatcagcctcccacttttccctggagcaccccacggacaggcagctgtttgacaccatatccctgctgatccagggctccctggagtgggagctgaagctgatggacgagctggcaggcccagggggccagccctctgccttcccttctgcccccagcctgggaggctccgacccacagatccctctagctgagatggaggctctgtctctgacgtcagagattgtgtctgaaccgtcctgctctctagctctgacggatgactctttgcctgatgacatgcacacactcttacttagtgccctggagagcaatatgcagccccaccccacggagctgccaggaccagacttactgactgtgcggaagtctggggtcagccgaacgcactctctgcccaatgacagctacatgtgtcggcatgggagcactgccgaggggcccctgggacacaggggctgggggctccccaaagctcagtcaggctccgtcttgtccgttcactcccagccagcagataccagctacatcctgcagcttcccaaagatgcacctcatctgctccagccccacagcgccccaacctggggcaccatccccaaactgcccccaccaggacgctcccctttggctcagaggccactcaggcgccaggcagcaataaggactgactccttggacgttcagggtctgggcagccgggaagacctgctggcagaggtgagtgggccctccccgcccctggcccgggcctactctttctggggccagtcaagtacccaggcacagcagcactcccgcagccacagcaagatctccaagcacatgaccccgccagccccttgcccaggcccagaacccaactggggcaagggccctccagagaccagaagcagcttagagttggacacggagctgagctggatttcaggagacctcctgccccctggcggccaggaggagcccccatccccacgggacctgaagaagtgctacagcgtggaggcccagagctgccagcgccggcctacgtcctggctggatgagcagaggagacactctatcgccgtcagctgcctggacagcggctcccaaccccacctgggcacagacccctctaaccttgggggccagcctcttggggggcctgggagccggcccaagaaaaaactcagcccgcctagtatcaccatagacccccccgagagccaaggtcctcggaccccgcccagccctggtatctgcctccggaggagggctccgtccagcgactccaaggatcccttggcctctggcccccctgacagcatggctgcctcgccctccccaaagaaagatgtgctgagtctctccggtttatcctctgacccagcagacctggacccctgagtcctgccccactttcccactcacctttctccactgggtgccaagtcctagctcctcctcctgggctatattcctgacaaaagttccatatagacaccaaggaggcggaggcgctcctccctgcctcagtggctctgggtacctgcaagcagaacttccaaagagagttaaaagcagcagccccggcaactctggctccaggcagaaggagaggcccggtgcagctgaggttcccgacaccagaagctgttgggagaaagcaatacgtttgtgcagaatctctatgtatattctattttattaaattaattgaatctagtatatgcgggatgtacgacattttgtgactgaagagacttgtttccttctacttttatgtgtctcagaatatttttgaggcgaaggcgtctgtctcttggctattttaacctaaaataacagtctagttatattccctcttcttgcaaagcacaagctgggaccgcgagcacattgcagccccaacggtggcccatcttcagcggagagcgagaaccattttggaaactgtaatgtaacttattttttcctttaacctcgtcatcattttctgtagggaaaaaaaaaagaaaaagaaaaaatgagattttacaagtgaaatggaacctttttatatatacatacatacatatctatctatctatctatatatatataaaataaagtaattttcctaaataaaaa

SEQ ID NO: 22 - DNA, 8602 bp, Homo sapiens
  source 1..8602: mol_type = genomic DNA
tttttatttaggaaaattactttattttatatatatatagatagatagatagatatgtatgtatgtatatataaaaaggttccatttcacttgtaaaatctcattttttctttttcttttttttttccctacagaaaatgatgacgaggttaaaggaaaaaataagttacattacagtttccaaaatggttctcgctctccgctgaagatgggccaccgttggggctgcaatgtgctcgcggtcccagcttgtgctttgcaagaagagggaatataactagactgttattttaggttaaaatagccaagagacagacgccttcgcctcaaaaatattctgagacacataaaagtagaaggaaacaagtctcttcagtcacaaaatgtcgtacatcccgcatatactagattcaattaatttaataaaatagaatatacatagagattctgcacaaacgtattgctttctcccaacagcttctggtgtcgggaacctcagctgcaccgggcctctccttctgcctggagccagagttgccggggctgctgcttttaactctctttggaagttctgcttgcaggtacccagagccactgaggcagggaggagcgcctccgcctccttggtgtctatatggaacttttgtcaggaatatagcccaggaggaggagctaggacttggcacccagtggagaaaggtgagtgggaaagtggggcaggactcaggggtccaggtctgctgggtcagaggataaaccggagagactcagcacatctttctttggggagggcgaggcagccatgctgtcaggggggccagaggccaagggatccttggagtcgctggacggagccctcctccggaggcagataccagggctgggcggggtccgaggaccttggctctcgggggggtctatggtgatactaggcgggctgagttttttcttgggccggctcccaggccccccaagaggctggcccccaaggttagaggggtctgtgcccaggtggggttgggagccgctgtccaggcagctgacggcgatagagtgtctcctctgctcatccagccaggacgtaggccggcgctggcagctctgggcctccacgctgtagcacttcttcaggtcccgtggggatgggggctcctcctggccgccagggggcaggaggtctcctgaaatccagctcagctccgtgtccaactctaagctgcttctggtctctggagggcccttgccccagttgggttctgggcctgggcaaggggctggcggggtcatgtgcttggagatcttgctgtggctgcgggagtgctgctgtgcctgggtacttgactggccccagaaagagtaggcccgggccaggggcggggagggcccactcacctctgccagcaggtcttcccggctgcccagaccctgaacgtccaaggagtcagtccttattgctgcctggcgcctgagtggcctctgagccaaaggggagcgtcctggtgggggcagtttggggatggtgccccaggttggggcgctgtggggctggagcagatgaggtgcatctttgggaagctgcaggatgtagctggtatctgctggctgggagtgaacggacaagacggagcctgactgagctttggggagcccccagcccctgtgtcccaggggcccctcggcagtgctcccatgccgacacatgtagctgtcattgggcagagagtgcgttcggctgaccccagacttccgcacagtcagtaagtctggtcctggcagctccgtggggtggggctgcatattgctctccagggcactaagtaagagtgtgtgcatgtcatcaggcaaagagtcatccgtcagagctagagagcaggacggttcagacacaatctctgacgtcagagacagagcctccatctcagctagagggatctgtgggtcggagcctcccaggctgggggcagaagggaaggcagagggctggccccctgggcctgccagctcgtccatcagcttcagctcccactccagggagccctggatcagcagggatatggtgtcaaacagctgcctgtccgtggggtgctccagggaaaagtgggaggctgatctcgcgtgggccgctgggtgcagagccccaggcttggggctgtcggggctgtcggggccctcgaccccaggccagaggaaggggctgcccagtggcgagtggggctgggggctgagggtcttcatctccagctccagctcagcctctagctcggcctcctccttggcctccttgttgctctcctccaggtgcttcatcagcacggcgatcaccacgttgactagcacgaactgggccgtcagcacgaaggacacaaagtagataggcgagatgaccgtgttgtagcaggtggactcctggtcacagtcccggagggtgtccttcataatgccattccaattgtcacctgtggagactcggaagagggttaggaaggccatgccaaagttccgaaaggtggcatgacggcccaggccctcacaggggtgtgtctcgtcacactccaggtctccaaagagctccacgcccagagctgcaaagatgaaaaacaacaacatgaagagaagtcccaggttccccacctggggcagggcctgcatcaccgtgtccagcagcgcccgcatgcccacagccatcttcagcagcttcagcactcgggcaatgcgcagcaccctcatgatgcggatgatggtggggttgatgggcagcgaggcgttgacctcgatttcctccagcgtgatgcccatgatggacagcagcacaatggccaggtccagctggttccacctgtcctggaagaaccgacggaaaccaaaggccacaagtttgaaaactgactccaagacaaagatgacagtgaagatgtagttgcagatcttcagagcctcatccagaatctggggctgctggtagtgctccatggccatggtgaccacgttcagcccgatgacacctgtgatgaagaggtccaggtagtggctggtgcacaagtggtggacgaggagccggaagcgggagtagtcggagtagtaaggtttgcactgggcttctgacgcagcgctggctgagctgccggaagcaattacatcgtccagcattagattccttctctttttctccagtcttcgtaggcgcttctcctcccgccgccgggcctcctcttcctcctggtgctgccgacacttgtggaagttctccaccaccacacccacaaacatgttcaggacaaagaaggccacaatgagcaggaacgagatgaagtacagcagcatccaggggttgtggttcatgatgggctgctggtccacgcccacagcatccagcccatcgtacatgatgtccacccaaccatccttggaggccaaaacgaacagggacatcagggcctggccaaggttgtcaaagttgtacttgtgccggacccaccggtaactggcctcggcacagtccgatttattggtgatgttcctggtatcctcgccctggcacacgaaaaacttccctttgaagagctgcacccccaagatgccgaaaatgatgaagaaggcacagcagatgactacaatgttgccgatgggtttcagtgaggacatcagcgtctccaccaccagcttcagcccctgcgcccggctgatcaccctgagcgggcgcagggtccgcagcagccgcagcaccctcagcatgcccaggatcttggtgccgctgtcagagaccatggacaccagaatgtcgatgacggagatgagcaccaacagcccgtccagcacgttccaactgctccgcaggtacgcctgctccccgaagcaccagcccagtgccaccaccttcactgtcatttcagccagaaagactgcggtgaagatgtaattggagagggtcaggaagatgcgttcagcgctgtgggggtcaattttggggcgctccatggcgatggtgatgcagttaaggaagatgatgacaaggaccacgtggtcgaacatcttgtgggtgatgatccggtgacacaggaggcggaacctggactgaggagggaagatgtaggctgaccaggagtctcgctcgaggcagcaggcagggagtcgggctcggatccacgcgcggacccgttcccctttgctcaggttgccctcgtcatcggcgtcatccccatccagtggggggtcatcaggccgcagggcccgggccaggcgccctgaagccgacttgccattgcagtcctggtgctcagaagcagaccctcggccactggcagtgcgatgcagccctggcacctgcagtgtgtctggcaggtcaaaggaactcttggcctcccgctccagggaccccctgtggcgatggtcactgcccgcagggctggcccgctcctcttctgagctctcctcttcatcctggctctcctggccttctcccgacaacagggaccgccgctctccacttgggcttctccgcttcaggctgggtgcacggccgaggctgttccggctggagcgcctgctggtccagctgcttgcagcgctccaggggctgtgcggagagctgcgggcgctgggcggtgacttcatctcgtgggccgccccaggctctgccgacccgctgctgctggtgcggcgcgacgcagggcccagcgcctcgcccaggcccgtgctggtgctcttgggcagcgacatgggtgtggcggccgtgtggatgatgagaggcggcagcaggctcttccgcagctccgggtgctctcccagggacaccaaggccaagcacttcttcctgtccccatcaccatccaggctgggtgagaagaaatcgggctctgattcggacttgttggcatctcccccctgggagtcgacaggcagctgaatacagcttaactgtccactcgcatcttcccgtttgctgatttcctccgcctggaagccctccaccagaatggcgaccagcaaattgaagagcacgtagttgccgaaggtcatgagggcaatgaaataaagggccgcccaggacgacgtggaggccataccattgtagaggactttgttccagtcctcctgggtcaggatctgaaagacagtgacgatggcccagagcaaggagtcaaaattcttccggtctggcagggtgtccccatcccgctcagaggcaaacttgcagccgaagagatgcatgcccaggatgctgaagatgaagatgaagagcataagcagcatgcagaaggtggccacgttgtccatggtcttcatgagcaccaccagctgccgctgcagcgccggcaggaagcgcaccagcttcagcacacgcatcaggcggaaggtccgcagcaccgacaggccgcccccctgctggcccacgatctcccacacgctgatgaccacaatgacaccatcgaagatgttgtagggattcttgatgtagccaaagggaccatacacaagcagcttcagcagcatctccagggcaaagaggctggtgaagacgatgttgctgatttctagggcgttggtaagctcctcgggctgctcgtggtattcgatgcccatgctgagtgtgttgaccaggatggcgatcatgattccccggccaaagtacttgctgtccacaatctttcggaaggtgtcacagattagcctccagaaggccagcacagagctgggctctgcatctgggcccaggctccgttgccgccggctgtgggggtcccggaggtcgctgtgctgggcatcctgtgtgaactcataaactgcctcgctgtctgagtcaggcatttcacggtcggcgagctccacctcccctgccccggcccgggcacagtaggggcagctgtctggaccacaggctccactgtctgctttcaagcaagggctggagatcttgcaagagctttggcaggcacctgtactctgtgtctccagcagcttgtgcatggagctgtagggcccgggtgggatgttgaggctggtgagggttgggggcccagagctggcagccacctctactagtgccttctccttcagcgtctccggtggagggctggtgtgcacggtgggatacaccttcccgctgcccacagtcctgccggatgcctcagatggggacctgggagggggcgcctggcagcggactggctctaagtggcagtcggcatggtagaagctgtgcacagactctgcgccaccagggggggccccggagagggcaggcgtcgagggtggtggcagcatgagccggcgggacccattggcatccctgtcctggatctccgggctggcccggggggccctgagcgtcccattgcccaggtggtagtggtggtgatggtggtggtggtggtgcaccaggtggtggacggataggcggcggtgggagcgagagcagctgctgctgggctgggtctcctggcccccgaggggtgctgggctgctgagcagcccaacccgcacacctgctgcccgagagacctgagccagcctgcgggctgccttacgaaggatgtacaccaggtacttgagcagctcctcatagcagctgccgggctcagagaagctagccagggtgctggcgttggacaggaaccgcacacgctgctcccgcatcagctggctttcccgctgcttggtctctgagaactgcgtggcaatcaccaccaggcacaggttgatcatgaagaaggagcccacgatgatgaggaggatgaagtagatgaaattgtagaaggaatgagcatccatcacaaagtacatgatgtcgacccagccctccagcgtgatgacctggaagatggcgatccaggcatagccaatgttgtcaaagttgatggcgcccttgaaggggttgtgctcccccgctgagcagttggtgtagtactggttccagttgacacaggtggtgttgctggagctgttgtaggcctcatagtccagaccgcaaggtgggccaccgcccccgtccccgcgcagcgtgggcacgcttctgcaggaccgcatgccgttctcgcgtggctgggagcagatgaaggggctctcatcctcgttctctgtctggtaatagcgctccaggtccacgctcagggggaggctgaaattctcaggtaggaagcatcggttccgaagcagccctgcccacagctggacgccgacgatgccgaagatgaagaagacgaagaagcagagcagcaggacgttgcccagcatgggcagcgtatccagcagcaacgtgacaaggatgcgcatgctgggcacccggttaatggccctgagcggtcgcagcacacggactgtcctgacagctgagaagctgacgttctgcaggtccagcgagtactccagcatccctgcgatgacgatgaaaaagtcaagccggttccaagtgtctcccaggtaacactttttcccaaagatgcccaaggccaccatcttcaccaccatctccacggcaaagaaggcaaagatgaagtcatcaaaggcctgcaggatccggcagcgctgggagtcacaggcgatgtcctcgcatggccggaacatgcccagggtcacgcagttgagaaggatgaccaacatgctgatgcgctcaaaccaggggttacagaccgtgcggagacaccagctccgcgggcggctgtcctggctcaagtagaagaaaaccaccggggccagcgccgggtacggcagcccctccgcctcggagtccgcgctgcccgggtccttttctgctgaccccggccccggccggcccccggcccccgacaggtcgttgagccgcatgaagctccggggctgtcccgactcctcggcgcccgctccatcctcctcctcgtccatcctctggccagccggggccccgggcgatccggagaggggcaagcggcgcccctcagaggaggtgtcctcacgcaacccgggggccccggcgggggcacatctggtgggctctagggcgcaagctgagcccccgggagggccagttcagcccagctccccctgcccgcaggggcatgctgcccgcggggcgccggggcgcagggaaaccccgcccggcgcgagtcccgcttcccctgcgcccctggggcttcccgggccagccggccggctccccctcactttgttccggcttcttcgcttcgcgcccaggctccggttgccggattcggcgctaccttcggcgaagccgccccgagagggcgaacgaaaaggggggcagcggcggagggcgggggtccggggaggggcgccccctcttcccgcggcgcagctggagccggatctaaggggtcagcatcgtcccggctccgcgccaggcggcgggggaggggaggagggatctctttaggggtgggcttggagggggtgggggcggctccttcccccgccccgccgcgggctcactgtccgggaggggcggggagacagtggggggcagtcccgggcgggagtggaggcggagatgccgccgccgcagccgccgcggtggctgccgctgccgtagctgtcgccggcgccacagcctcctcctccggccgagacgcggagcgagcgagcgaaagcggcggcgaggagccccgcgcac

SEQ ID NO: 23 - DNA, 8238 bp, Mus musculus
  source 1..8238: mol_type = genomic DNA
cggtcctctagcccgccgcggggcggaggaaggagccagcccccaccccctccaaacccacccccaaagagatccctcctcccctccccctccccccgccgtctctggcgtggagccgggacgatgctgaccccttagatcctgctccagctgcgccgagggaagagggggcgcccctccccggacccccgcccttcaccgggtggccccttttttcctcctcctctcgggggctgcttcaccgaaggtagcgcccattcgggcaaccggagcctgggcgcgaagggaagaagccggaacaaagtgaggggaagccggccggctagtcggggagcccccgggaacccaggggaagcgggactctcgccaggcggggcttccctgggacccggcgccccgcgggcagcatgcccctgagggcagggggagctgagctgaactggccctcctgggggctcagcaagctctctagagccccccacatgctcccccaccggggtcccccggttgtgtgaggacacctcctcggaggggctccgatcgcccctcttcggacccccgggaccccagctggccagaggatggatgaggaagaggatggagcgggcgccgaggagtcgggacagccccggagcttcacgcagctcaacgacctgtctggggccgggggccggcaggggccggggtcgacggaaaaggacccgggcagcgcggactccgaggcggaggggctgccctacccggcgctggccccggtggttttcttctacttgagccaggacagccgcccgcggagctggtgtctccgcacggtctgtaacccgtggttcgagcgagtcagcatgctggttattctcctcaactgtgtgactctgggtatgttcaggccgtgtgaggacattgcctgtgactcccaacgctgccggatcctgcaggccttcgacgacttcatctttgccttctttgctgtggaaatggtggtgaagatggtcgctttgggtatctttgggaagaaatgttacctgggagacacttggaaccggcttgacttttttatcgtcattgctgggatgctggagtactcgctggacctgcagaatgtcagcttctccgcagtcaggacagtccgtgtgctgcgaccgctcagggccattaaccgggtgcccagcatgcgcattctcgtcacattactgctggataccttgcctatgctgggcaatgtcctgctgctctgtttcttcgtctttttcatctttggcatcgttggtgttcagctgtgggcagggctacttcgaaaccgatgcttcctccctgagaatttcagcctcccgctgagtgtggacttggagccttactaccagacagagaatgaggacgagagccccttcatctgctctcagcctcgggagaacggcatgcgatcctgcaggagcgtgcccacactgcgcggggaaggcggtggtggtccaccctgcggtctggactatgaggcctataacagttccagcaataccacctgtgtcaactggaaccaatactataccaactgctctgcaggcgagcacaaccccttcaaaggcgccatcaactttgacaacattggctatgcctggatcgccatcttccaggtcatcacactggagggctgggtcgacatcatgtactttgtgatggatgctcattccttctacaacttcatctacttcattcttctcatcatcgtgggctccttcttcatgatcaacctgtgcctggtggtgatcgccacacagttctctgagaccaagcaacgggagagtcagctgatgcgggagcagcgtgtacgattcctgtccaatgctagcaccctggcaagcttctctgagccaggcagctgctatgaggagcttctcaagtacctggtgtacatcctccgcaaagcagcccgcaggctggcccaggtctctagggctgtaggcgtgcgggctgggttgctcagcagcccagtggcccgtggtgggcaggagccccagcccagtggcagctgctctcgttcacaccgtcgtctgtctgtccaccacctggtccaccaccatcaccaccaccatcaccactaccacctgggtaatgggacgctcagagttccccgggccagcccagagatccaggacagggatgccaatgggtcccgctggctcatgctgccaccaccctctacccccactccctctgggggccctccgaggggtgcggagtctgtacacagcttctaccatgctgactgccacttggagccagtccgttgccaggcgccccctcccaggtccccatcggaggcatctggcaggactgtgggtagtgggaaggtataccccactgtgcataccagccctccaccagagatgctgaaggataaggcactagtggaggtggcccccagccctgggccccccaccctcaccagcttcaacatcccacctgggcccttcagctccatgcacaagctcctggagacacagagtacgggagcctgccatagctcctgcaaaatctccagcccttgctccaaggcagacagtggagcctgtgggccggacagttgtccctactgtgcccggacaggagcaggggagccagagtccgctgaccatgaaatgcctgactcagacagtgaggctgtgtatgagttcacacaggacgctcagcacagcgacctccgggatccccacagacggcgacggccgagcctgggcccagatgcagagcctagttctgtgctggccttctggaggctgatctgcgacacattccggaagatcgtagatagcaaatactttggccggggaatcatgatcgctatcctggtcaataccctcagcatgggcatcgagtaccacgagcagcccgaggagctcaccaacgccctggaaatcagcaacatcgtcttcaccagcctcttcgccttggagatgctgctgaagctgctcgtctacggtcccttcggctacattaagaatccctacaacatctttgatggcgtcattgtggtcatcagcgtgtgggagattgtgggccagcagggaggtggcctgtcggtgctgcggaccttccgcctgatgcgggtgctgaagctagttcgcttcctgccggcactgcagcggcagctcgtggtgctcatgaagaccatggacaacgtggccaccttctgcatgctgctcatgctcttcatcttcatcttcagcatcctgggcatgcacctttttggttgcaagttcgcatctgaacgggatggggacacgttgccagaccggaagaattttgactccctgctctgggccattgtcactgtctttcagattctgactcaggaagactggaataaagtcctttacaacggcatggcctccacgtcatcttgggctgctctttacttcatcgccctcatgacttttggcaactacgtgctctttaacctgcttgtcgccattctcgtggagggtttccaggcagaggaaatcggcaaacgggaagatacgagtggacagttaagctgtattcagctgcctgtcaactcccaggggggagatgccaccaagtctgagtcagagcctgatttcttttcgcccagtgtggatggtgatggggacaggaagaagcgcttggccctggtggccttgggagaacactcggaactacgaaagagccttttgccacctctcatcatccacacagctgctacaccgatgtcactgcccaagagctccagcacaggtgtgggggaagcactgggctctggctctcgccgcaccagtagcagtgggtccgctgagcctggaactgcccatcatgagatgaaatcaccgccaagtgcccgaagctccccgcacagtccctggagcgcagcaagcagctggaccagcaggcgctccagccggaacagcctgggccgggcccccagcctgaagcgtaggagcccaagcggggagcggaggtccctgctgtctggagagggtcaggagagccaggatgaggaggagagttcagaagaggaccgggccagcccagcaggcagtgatcatcgccacaggggttccttggaacgtgaggccaagagttcctttgacctgcctgacaccctgcaggtgcccgggcttcatcgaacagccagcggtcggagctctgcctctgaacaccaagactgtaatggcaagtcggcttcagggcgtttggcccgcaccctgcgggctgatgaccccccactggatggggatgatggcgatgatgagggcaacctgagcaaaggggaacgcttacgagcctgggtccgagcccggctccctgcctgttgccgagagcgagattcctggtctgcctatatcttccctccccagtcaaggtttcgtctcctgtgtcaccggatcatcacccacaagatgtttgaccatgtggtcctcgtcatcatcttcctcaactgtatcaccatcgctatggagcgccccaaaattgacccccacagcgctgaacgcatcttcctgaccctctccaactacatcttcacggcagtcttcctggctgaaatgacagtgaaggtggtggcactgggctggtgctttggggagcaggcctacctgcgcagcagctggaacgtgctggacggcttgctggtgctcatctctgtcatcgacatcctggtgtccatggtctctgacagcggcaccaagattctcggcatgctgagggtgctgcggctgctgcggaccctacgtccactcagggtcatcagccgggcccaggggctgaagctggtggtagagactctgatgtcatccctcaaacccattggcaacattgtggtcatctgctgtgccttcttcatcatttttggaattcttggggtgcagctcttcaaagggaagttcttcgtgtgtcagggtgaggacaccaggaacatcactaacaagtccgactgtgctgaggccagttaccggtgggtccggcacaagtacaactttgacaacctgggccaggctctgatgtccctgtttgtgctggcctccaaggatggctgggttgacatcatgtatgatggactggatgctgtgggagtggaccagcagcccatcatgaaccacaacccttggatgctgctctacttcatctccttcctcctcatcgtggccttcttcgtcctgaacatgtttgtgggcgtggtggtggagaacttccataagtgcaggcagcaccaggaggaggaggaggcgcggcggcgggaggagaagcgactaaagaggctggagaaaaagagaaggagtaaggagaagcagatggccgatctaatgttggacgatgtaattgcttccggcagctcagccagcgctgcgtcagaagcccagtgcaaaccctactactctgactactcgcgcttccggctcctcgtccaccacctgtgtaccagccactacctggacctcttcatcactggtgtcatcgggctgaatgtggtcacgatggccatggaacattaccagcagccccagatcctggacgaggctctgaagatctgcaactacatctttaccgtcatctttgtcttggagtcagtattcaaacttgtggccttcggcttccgccggttcttccaggacaggtggaaccagctggacctggctattgtgcttctgtccatcatgggcatcacgctggaagagattgaggtcaatgcttcactgcccatcaaccccaccatcatccgtatcatgagggtgctccgcattgctcgagttctgaagctgttgaagatggctgtgggcatgcgggcactgctggacacggtgatgcaggccctgccccaggtggggaacctgggacttctcttcatgctattatttttcatctttgcagctctgggcgtggagctctttggagacctggagtgtgatgagacacacccttgtgagggcttgggccggcatgccacctttaggaactttggtatggcctttctgaccctcttccgagtctccactggtgacaactggaatggtattatgaaggacaccctccgggactgtgaccaggagtccacctgctacaacaccgtcatctcacccatctacttcgtgtccttcgtgctgacggcccagtttgtgctggtcaacgtggtcatagccgtgctgatgaagcacctggaagagagcaacaaagaggccaaggaggaggcggagttggaggcggagctggagctagagatgaagacactcagcccgcagccccactccccgctgggcagccccttcctctggcctggggtggaaggtgtcaatagccctgacagccctaagcctggggctccacacaccacggcccacattggagcagcctcttcaggcttctcccttgagcaccccacgatggtacctcacactgaggaggggccagtccccctaggaccagacctgctgactgtgaggaagtctggtgtcagccggacacactctctgcccaatgacagctacatgtgccgcaatgggagcactgccgagagatccctaggacacaggggctgggggctccccaaagcccagtcaggctccatcttgtctgttcactcccaaccagcagacaccagctgcatcctacagcttcccaaagatgcacactatctgctccagcctcatggggctcccacctggggcgccatccctaaactacccccacctggccgctcccctctggctcagaggcctctcaggcgccaggcagcaataaggactgactccctggacgtgcagggcctgggtagccgggaagacctgttgtcagaggtgagtgggccctcctgccctctgacccgctcctcatccttctggggcgggtcgagcatccaggtgcagcagcgctccggcagccagagcaaagtctccaagcacatccgcctgccagccccttgcccaggcctggaacccagctgggccaaggaccctcaagagaccagaagcagcttagagctggacacggagctgagctggatttcaggagacctcctgcccagcagtcaggaagaacccctgtccccacgggacttgaaaaaatgctacagtgtagaggcccagagctgccggcgcaggcctgggtcctggctagacgaacagaggagacactccatcgctgtcagctgcctggacagcggctcccagccccgcctatgtccaagcccctcaagcctcgggggccaacctcttgggggccctgggagccggcctaagaaaaaactcagcccacccagtatctctatagaccccccggagagccagggccctcggcccccatgcagtcctggcgtctgcctcaggaggagggcgccggccagtgactcgaaggatccctcggcctccagcccccttgacagcacggctgcctcaccctccccaaagaaagatgcgctgagtctctctggtttgtcttctgacccaacagacctggatccctgagtcctacccactctgtccccatcacctttctccactgggtgcagatcctagctccgcctcctgggcagtccttctgaaaagtcccatgtaagcagcaaaggggcgtaagtagccacgaggcacctcgcatgccttcttcagtggctgagggatgacaagcaggacttcctgagagtcagtctgaagagaacacagccctggagccccccggcctccgggaagaaggagaaggagatgcccagtgtggccaaggctctcgacaccaggagctgttgggagaaagcaatacgtttgtgcagaatctctatgtatattctattttattaaattaattgaatctagtatatgctggatgtacgacattttgtgactgaagagacttggttccttcttcttttatgtgtctcagaatatttttgaggcgaaagcgtctgtctcttggctattttaacctaaaataaccagtctagttctatcccctcttcttgtaaagcacaagccgggggccgtgagtgtattacaacccaacggcggcccatcttcaacggaaagcgagaaccattttggaaactgtcatgtaacttattttctcctttaacctcgtcatcgttttctgtaggggaaaaaaaagagaaaaagagaaaaaaaaatgagattttacaaatgaaatggaacctttttatatatatacatacatatctatatatctatatatctatataaaataaagtaattttccaaaataaaaagttaaaaaaaaaaaaaaaaa

SEQ ID NO: 24 - DNA, 8238 bp, Mus musculus
  source 1..8238: mol_type = genomic DNA
tttttttttttttttttaactttttattttggaaaattactttattttatatagatatatagatatatagatatgtatgtatatatataaaaaggttccatttcatttgtaaaatctcatttttttttctctttttctcttttttttcccctacagaaaacgatgacgaggttaaaggagaaaataagttacatgacagtttccaaaatggttctcgctttccgttgaagatgggccgccgttgggttgtaatacactcacggcccccggcttgtgctttacaagaagaggggatagaactagactggttattttaggttaaaatagccaagagacagacgctttcgcctcaaaaatattctgagacacataaaagaagaaggaaccaagtctcttcagtcacaaaatgtcgtacatccagcatatactagattcaattaatttaataaaatagaatatacatagagattctgcacaaacgtattgctttctcccaacagctcctggtgtcgagagccttggccacactgggcatctccttctccttcttcccggaggccggggggctccagggctgtgttctcttcagactgactctcaggaagtcctgcttgtcatccctcagccactgaagaaggcatgcgaggtgcctcgtggctacttacgcccctttgctgcttacatgggacttttcagaaggactgcccaggaggcggagctaggatctgcacccagtggagaaaggtgatggggacagagtgggtaggactcagggatccaggtctgttgggtcagaagacaaaccagagagactcagcgcatctttctttggggagggtgaggcagccgtgctgtcaagggggctggaggccgagggatccttcgagtcactggccggcgccctcctcctgaggcagacgccaggactgcatgggggccgagggccctggctctccggggggtctatagagatactgggtgggctgagttttttcttaggccggctcccagggcccccaagaggttggcccccgaggcttgaggggcttggacataggcggggctgggagccgctgtccaggcagctgacagcgatggagtgtctcctctgttcgtctagccaggacccaggcctgcgccggcagctctgggcctctacactgtagcattttttcaagtcccgtggggacaggggttcttcctgactgctgggcaggaggtctcctgaaatccagctcagctccgtgtccagctctaagctgcttctggtctcttgagggtccttggcccagctgggttccaggcctgggcaaggggctggcaggcggatgtgcttggagactttgctctggctgccggagcgctgctgcacctggatgctcgacccgccccagaaggatgaggagcgggtcagagggcaggagggcccactcacctctgacaacaggtcttcccggctacccaggccctgcacgtccagggagtcagtccttattgctgcctggcgcctgagaggcctctgagccagaggggagcggccaggtgggggtagtttagggatggcgccccaggtgggagccccatgaggctggagcagatagtgtgcatctttgggaagctgtaggatgcagctggtgtctgctggttgggagtgaacagacaagatggagcctgactgggctttggggagcccccagcccctgtgtcctagggatctctcggcagtgctcccattgcggcacatgtagctgtcattgggcagagagtgtgtccggctgacaccagacttcctcacagtcagcaggtctggtcctagggggactggcccctcctcagtgtgaggtaccatcgtggggtgctcaagggagaagcctgaagaggctgctccaatgtgggccgtggtgtgtggagccccaggcttagggctgtcagggctattgacaccttccaccccaggccagaggaaggggctgcccagcggggagtggggctgcgggctgagtgtcttcatctctagctccagctccgcctccaactccgcctcctccttggcctctttgttgctctcttccaggtgcttcatcagcacggctatgaccacgttgaccagcacaaactgggccgtcagcacgaaggacacgaagtagatgggtgagatgacggtgttgtagcaggtggactcctggtcacagtcccggagggtgtccttcataataccattccagttgtcaccagtggagactcggaagagggtcagaaaggccataccaaagttcctaaaggtggcatgccggcccaagccctcacaagggtgtgtctcatcacactccaggtctccaaagagctccacgcccagagctgcaaagatgaaaaataatagcatgaagagaagtcccaggttccccacctggggcagggcctgcatcaccgtgtccagcagtgcccgcatgcccacagccatcttcaacagcttcagaactcgagcaatgcggagcaccctcatgatacggatgatggtggggttgatgggcagtgaagcattgacctcaatctcttccagcgtgatgcccatgatggacagaagcacaatagccaggtccagctggttccacctgtcctggaagaaccggcggaagccgaaggccacaagtttgaatactgactccaagacaaagatgacggtaaagatgtagttgcagatcttcagagcctcgtccaggatctggggctgctggtaatgttccatggccatcgtgaccacattcagcccgatgacaccagtgatgaagaggtccaggtagtggctggtacacaggtggtggacgaggagccggaagcgcgagtagtcagagtagtagggtttgcactgggcttctgacgcagcgctggctgagctgccggaagcaattacatcgtccaacattagatcggccatctgcttctccttactccttctctttttctccagcctctttagtcgcttctcctcccgccgccgcgcctcctcctcctcctggtgctgcctgcacttatggaagttctccaccaccacgcccacaaacatgttcaggacgaagaaggccacgatgaggaggaaggagatgaagtagagcagcatccaagggttgtggttcatgatgggctgctggtccactcccacagcatccagtccatcatacatgatgtcaacccagccatccttggaggccagcacaaacagggacatcagagcctggcccaggttgtcaaagttgtacttgtgccggacccaccggtaactggcctcagcacagtcggacttgttagtgatgttcctggtgtcctcaccctgacacacgaagaacttccctttgaagagctgcaccccaagaattccaaaaatgatgaagaaggcacagcagatgaccacaatgttgccaatgggtttgagggatgacatcagagtctctaccaccagcttcagcccctgggcccggctgatgaccctgagtggacgtagggtccgcagcagccgcagcaccctcagcatgccgagaatcttggtgccgctgtcagagaccatggacaccaggatgtcgatgacagagatgagcaccagcaagccgtccagcacgttccagctgctgcgcaggtaggcctgctccccaaagcaccagcccagtgccaccaccttcactgtcatttcagccaggaagactgccgtgaagatgtagttggagagggtcaggaagatgcgttcagcgctgtgggggtcaattttggggcgctccatagcgatggtgatacagttgaggaagatgatgacgaggaccacatggtcaaacatcttgtgggtgatgatccggtgacacaggagacgaaaccttgactggggagggaagatataggcagaccaggaatctcgctctcggcaacaggcagggagccgggctcggacccaggctcgtaagcgttcccctttgctcaggttgccctcatcatcgccatcatccccatccagtggggggtcatcagcccgcagggtgcgggccaaacgccctgaagccgacttgccattacagtcttggtgttcagaggcagagctccgaccgctggctgttcgatgaagcccgggcacctgcagggtgtcaggcaggtcaaaggaactcttggcctcacgttccaaggaacccctgtggcgatgatcactgcctgctgggctggcccggtcctcttctgaactctcctcctcatcctggctctcctgaccctctccagacagcagggacctccgctccccgcttgggctcctacgcttcaggctgggggcccggcccaggctgttccggctggagcgcctgctggtccagctgcttgctgcgctccagggactgtgcggggagcttcgggcacttggcggtgatttcatctcatgatgggcagttccaggctcagcggacccactgctactggtgcggcgagagccagagcccagtgcttcccccacacctgtgctggagctcttgggcagtgacatcggtgtagcagctgtgtggatgatgagaggtggcaaaaggctctttcgtagttccgagtgttctcccaaggccaccagggccaagcgcttcttcctgtccccatcaccatccacactgggcgaaaagaaatcaggctctgactcagacttggtggcatctcccccctgggagttgacaggcagctgaatacagcttaactgtccactcgtatcttcccgtttgccgatttcctctgcctggaaaccctccacgagaatggcgacaagcaggttaaagagcacgtagttgccaaaagtcatgagggcgatgaagtaaagagcagcccaagatgacgtggaggccatgccgttgtaaaggactttattccagtcttcctgagtcagaatctgaaagacagtgacaatggcccagagcagggagtcaaaattcttccggtctggcaacgtgtccccatcccgttcagatgcgaacttgcaaccaaaaaggtgcatgcccaggatgctgaagatgaagatgaagagcatgagcagcatgcagaaggtggccacgttgtccatggtcttcatgagcaccacgagctgccgctgcagtgccggcaggaagcgaactagcttcagcacccgcatcaggcggaaggtccgcagcaccgacaggccacctccctgctggcccacaatctcccacacgctgatgaccacaatgacgccatcaaagatgttgtagggattcttaatgtagccgaagggaccgtagacgagcagcttcagcagcatctccaaggcgaagaggctggtgaagacgatgttgctgatttccagggcgttggtgagctcctcgggctgctcgtggtactcgatgcccatgctgagggtattgaccaggatagcgatcatgattccccggccaaagtatttgctatctacgatcttccggaatgtgtcgcagatcagcctccagaaggccagcacagaactaggctctgcatctgggcccaggctcggccgtcgccgtctgtggggatcccggaggtcgctgtgctgagcgtcctgtgtgaactcatacacagcctcactgtctgagtcaggcatttcatggtcagcggactctggctcccctgctcctgtccgggcacagtagggacaactgtccggcccacaggctccactgtctgccttggagcaagggctggagattttgcaggagctatggcaggctcccgtactctgtgtctccaggagcttgtgcatggagctgaagggcccaggtgggatgttgaagctggtgagggtggggggcccagggctgggggccacctccactagtgccttatccttcagcatctctggtggagggctggtatgcacagtggggtataccttcccactacccacagtcctgccagatgcctccgatggggacctgggagggggcgcctggcaacggactggctccaagtggcagtcagcatggtagaagctgtgtacagactccgcacccctcggagggcccccagagggagtgggggtagagggtggtggcagcatgagccagcgggacccattggcatccctgtcctggatctctgggctggcccggggaactctgagcgtcccattacccaggtggtagtggtgatggtggtggtgatggtggtggaccaggtggtggacagacagacgacggtgtgaacgagagcagctgccactgggctggggctcctgcccaccacgggccactgggctgctgagcaacccagcccgcacgcctacagccctagagacctgggccagcctgcgggctgctttgcggaggatgtacaccaggtacttgagaagctcctcatagcagctgcctggctcagagaagcttgccagggtgctagcattggacaggaatcgtacacgctgctcccgcatcagctgactctcccgttgcttggtctcagagaactgtgtggcgatcaccaccaggcacaggttgatcatgaagaaggagcccacgatgatgagaagaatgaagtagatgaagttgtagaaggaatgagcatccatcacaaagtacatgatgtcgacccagccctccagtgtgatgacctggaagatggcgatccaggcatagccaatgttgtcaaagttgatggcgcctttgaaggggttgtgctcgcctgcagagcagttggtatagtattggttccagttgacacaggtggtattgctggaactgttataggcctcatagtccagaccgcagggtggaccaccaccgccttccccgcgcagtgtgggcacgctcctgcaggatcgcatgccgttctcccgaggctgagagcagatgaaggggctctcgtcctcattctctgtctggtagtaaggctccaagtccacactcagcgggaggctgaaattctcagggaggaagcatcggtttcgaagtagccctgcccacagctgaacaccaacgatgccaaagatgaaaaagacgaagaaacagagcagcaggacattgcccagcataggcaaggtatccagcagtaatgtgacgagaatgcgcatgctgggcacccggttaatggccctgagcggtcgcagcacacggactgtcctgactgcggagaagctgacattctgcaggtccagcgagtactccagcatcccagcaatgacgataaaaaagtcaagccggttccaagtgtctcccaggtaacatttcttcccaaagatacccaaagcgaccatcttcaccaccatttccacagcaaagaaggcaaagatgaagtcgtcgaaggcctgcaggatccggcagcgttgggagtcacaggcaatgtcctcacacggcctgaacatacccagagtcacacagttgaggagaataaccagcatgctgactcgctcgaaccacgggttacagaccgtgcggagacaccagctccgcgggcggctgtcctggctcaagtagaagaaaaccaccggggccagcgccgggtagggcagcccctccgcctcggagtccgcgctgcccgggtccttttccgtcgaccccggcccctgccggcccccggccccagacaggtcgttgagctgcgtgaagctccggggctgtcccgactcctcggcgcccgctccatcctcttcctcatccatcctctggccagctggggtcccgggggtccgaagaggggcgatcggagcccctccgaggaggtgtcctcacacaaccgggggaccccggtgggggagcatgtggggggctctagagagcttgctgagcccccaggagggccagttcagctcagctccccctgccctcaggggcatgctgcccgcggggcgccgggtcccagggaagccccgcctggcgagagtcccgcttcccctgggttcccgggggctccccgactagccggccggcttcccctcactttgttccggcttcttcccttcgcgcccaggctccggttgcccgaatgggcgctaccttcggtgaagcagcccccgagaggaggaggaaaaaaggggccacccggtgaagggcgggggtccggggaggggcgccccctcttccctcggcgcagctggagcaggatctaaggggtcagcatcgtcccggctccacgccagagacggcggggggagggggaggggaggagggatctctttgggggtgggtttggagggggtgggggctggctccttcctccgccccgcggcgggctagaggaccg

SEQ ID NO: 25 - DNA, 8084 bp, Rattus norvegicus
  source 1..8084: mol_type = genomic DNA
ccgtctctggcgcggagccgggacgatgctgaccccttagatcctgctccagctgcgccgagggaagagggggcgcccctccccggacccccgccctccatcgggtggccccttttttttctcttcctctcgggggctgcttcgccgaaggtagcgcctgttcgggcaaccggagcctgggcgcgaagcgaagaagccggaacaaagtgaggggaagccggccggctagtcggggagcccccgggaacccaggggaagcgggactctagccaggcggggcttccctgagacccggcgccccgcgggcagcatgcccctgagggcagggggagctgagctgaactggccctcctggggactcagcaagctctctagagccccccacatgctcccccaccggggtcccccggttgcgtgaggacacctcctctgaggggctccgctcgcccctcttcggaccccccggggccccggctggccagaggatggacgaggaggaggatggagcgggcgccgaggagtcgggacagccccgtagcttcacgcagctcaacgacctgtccggggccgggggccggcaggggccggggtcgacggaaaaggacccgggcagcgcggactccgaggcggaggggctgccgtacccggcgctagccccggtggttttcttctacttgagccaggacagccgcccgcggagctggtgtctccgcacggtctgtaacccgtggttcgagcgagtcagtatgctggtcattcttctcaactgtgtgactctgggtatgttcaggccgtgtgaggacattgcctgtgactcccagcgctgccggatcctgcaggccttcgatgacttcatctttgccttctttgctgtggaaatggtggtgaagatggtggccttgggcatctttgggaagaaatgttacctgggagacacttggaaccggcttgactttttcattgtcattgcagggatgctggagtattcgctggacctgcagaacgtcagcttctccgcagtcaggacagtccgtgtgctgcgaccgctcagggccattaaccgggtgcccagcatgcgcattctcgtcacattactgctggacaccttgcctatgctgggcaacgtcctgctgctctgtttcttcgtctttttcatctttggcatcgtgggcgtccagctgtgggcaggactgcttcgcaaccgatgcttcctccccgagaacttcagcctccccctgagcgtggacctggagccttattaccagacagagaatgaggacgagagccccttcatctgctctcagcctcgggagaatggcatgagatcctgcaggagtgtgcccacactgcgtggggaaggcggtggtggcccaccctgcagtctggactatgagacctataacagttccagcaacaccacctgtgtcaactggaaccagtactataccaactgctctgcgggcgagcacaaccccttcaaaggcgccatcaactttgacaacattggctatgcctggatcgccatcttccaggtcatcacactggagggctgggtcgacatcatgtacttcgtaatggacgctcactccttctacaacttcatctacttcattcttctcatcatcgtgggctccttcttcatgatcaacctgtgcctggtggtgattgccacgcagttctccgagaccaaacagcgggagagtcagctgatgcgggagcagcgtgtacgattcctgtccaatgctagcaccctggcaagcttctctgagccaggcagctgctatgaggagctactcaagtacctggtgtacatcctccgaaaagcagcccgaaggctggcccaggtctctagggctataggcgtgcgggctgggctgctcagcagcccagtggcccgtagtgggcaggagccccagcccagtggcagctgcactcgctcacaccgtcgtctgtctgtccaccacctggtccaccaccatcaccaccaccatcaccactaccacctgggtaatgggacgctcagagttccccgggccagcccagagatccaggacagggatgccaatgggtctcgccggctcatgctaccaccaccctctacacccactccctctgggggccctccgaggggtgcggagtctgtacacagcttctaccatgctgactgccacttggagccagtccgttgccaggcaccccctcccagatgcccatcggaggcatctggtaggactgtgggtagtgggaaggtgtaccccactgtgcataccagccctccaccagagatactgaaggataaagcactagtggaggtggcccccagccctgggccccccaccctcaccagcttcaacatcccacctgggcccttcagctccatgcacaagctcctggagacacagagtacgggagcctgccatagctcctgcaaaatctccagcccttgctccaaggcagacagtggagcctgcgggccggacagttgtccctactgtgcccggacaggagcaggagagccagagtccgctgaccatgtcatgcctgactcagacagcgaggctgtgtatgagttcacacaggacgctcagcacagtgacctccgggatccccacagccggcggcgacagcggagcctgggcccagatgcagagcctagttctgtgctggctttctggaggctgatctgtgacacattccggaagatcgtagatagcaaatactttggccggggaatcatgatcgccatcctggtcaatacactcagcatgggcatcgagtaccacgagcagcccgaggagctcaccaacgccctggaaatcagcaacatcgtcttcaccagcctcttcgccttggagatgctgctgaaactgcttgtctacggtccctttggctacattaagaatccctacaacatctttgatggtgtcattgtggtcatcagtgtgtgggagattgtgggccagcagggaggtggcctgtcggtgctgcggaccttccgcctgatgcgggtgctgaagctggtgcgcttcctgccggccctgcagcgccagctcgtggtgctcatgaagaccatggacaacgtggccaccttctgcatgctcctcatgctgttcatcttcatcttcagcatcctgggcatgcatctctttggttgcaagttcgcatctgaacgggatggggacacgttgccagaccggaagaatttcgactccctgctctgggccatcgtcactgtctttcagattctgactcaggaagactggaataaagtcctctacaacggcatggcctccacatcgtcttgggctgctctttacttcatcgccctcatgacttttggcaactatgtgctctttaacctgctggtggccattcttgtggaaggcttccaggcagaggaaatcggcaaacgggaagatgcgagtggacagttaagctgtattcagctgcctgtcaactctcaggggggagatgccaccaagtctgagtcagagcctgatttcttttcgcccagtgtggatggtgatggggacagaaagaagcgcttggccctggtggctttgggagaacacgcggaactacgaaagagccttttgccacccctcatcatccatacggctgcgacaccaatgtcactacccaagagctccagcacaggtgtgggggaagcactgggctctggctctcgacgtaccagtagcagtgggtccgctgagcctggagctgcccaccatgagatgaaatctccgccaagtgcccgcagctccccgcacagtccctggagtgcggcaagcagctggaccagcaggcgctccagcaggaacagcctgggccgggcccccagcctaaagcggaggagcccgagcggggagcggaggtccctgctgtctggagagggccaggagagtcaggatgaggaggaaagttcagaagaggaccgggccagcccagcaggcagtgaccatcgccacaggggttccttggaacgtgaggccaagagttcctttgacctgcctgacactctgcaggtgccggggctgcaccgcacagccagcggccggagctctgcctctgagcaccaagactgtaatggcaagtcggcttcagggcgtttggcccgcaccctgaggactgatgacccccaactggatggggatgatgacaatgatgagggaaatctgagcaaaggggaacgcatacaagcctgggtcagatcccggcttcctgcctgttgccgagagcgagattcctggtcggcctatatctttcctcctcagtcaaggtttcgtctcctgtgtcaccggatcatcacccacaagatgtttgaccatgtggtcctcgtcatcatcttcctcaactgtatcaccatcgctatggagcgccccaaaattgacccccacagcgctgagcgcatcttcctgaccctctccaactacatcttcacggcagtctttctagctgaaatgacagtgaaggtggtggcactgggctggtgctttggggagcaggcctacctgcgcagcagctggaatgtgctggacggcttgctggtgctcatctccgtcatcgacatcctggtctccatggtctccgacagcggcaccaagatccttggcatgctgagggtgctgcggctgctgcggaccctgcgtccactcagggtcatcagccgggcccagggactgaagctggtggtagagactctgatgtcatccctcaaacccattggcaacattgtggtcatttgctgtgccttcttcatcatttttggaattctcggggtgcagctcttcaaagggaagttcttcgtgtgtcagggtgaggacaccaggaacatcactaacaaatccgactgcgctgaggccagctaccgatgggtccggcacaagtacaactttgacaacctgggccaggctctgatgtccctgtttgtgctggcctccaaggatggttgggttgacatcatgtatgatgggctggatgctgtgggtgtggatcagcagcccatcatgaaccacaacccctggatgctgctatacttcatctccttcctcctcatcgtggccttctttgtcctgaacatgtttgtgggcgtggtggtggagaacttccataagtgcagacagcaccaggaggaggaggaggcgaggcggcgtgaggagaagcgactacggaggctggagaaaaagagaaggaatctaatgttggacgatgtaattgcttccggcagctcagccagcgctgcgtcagaagcccagtgcaagccctactactctgactactcgagattccggctccttgtccaccacctgtgtaccagccactacctggacctcttcatcactggtgtcatcgggctgaacgtggtcactatggccatggaacattaccagcagccccagatcctggacgaggctctgaagatctgcaattacatctttaccgtcatctttgtctttgagtcagttttcaaacttgtggcctttggcttccgccgtttcttccaggacaggtggaaccagctggacctggctattgtgcttctgtccatcatgggcatcacactggaggagattgaggtcaatgcttcgctgcccatcaaccccaccatcatccgtatcatgagggtgctccgcattgctcgagttctgaagctgttgaagatggctgtgggcatgcgggcactgctggacacggtgatgcaggccctgccccaggtggggaacctgggacttctcttcatgttattgtttttcatctttgcagctctgggcgtggagctctttggagacctggagtgtgatgagacacacccttgtgagggcttgggtcggcatgccacctttaggaactttggtatggcctttctgaccctcttccgagtctccactggtgacaactggaatggtattatgaaggacaccctccgggactgtgaccaggagtccacctgctacaacactgtcatctcccctatctactttgtgtccttcgtgctgacggcccagtttgtgctggtcaacgtggtcatagctgtgctgatgaagcacctggaagaaagcaacaaagaggccaaggaggaggccgagctcgaggccgagctggagctggagatgaagacgctcagcccgcagccccactccccgctgggcagccccttcctctggcccggggtggagggtgtcaacagtcctgacagccctaagcctggggctccacacaccactgcccacattggagcagcctcgggcttctcccttgagcaccccacgatggtaccccaccccgaggaggtgccagtccccctaggaccagacctgctgactgtgaggaagtctggtgtcagccggacgcactctctgcccaatgacagctacatgtgccgcaatgggagcactgctgagagatccctaggacacaggggctgggggctccccaaagcccagtcaggctccatcttgtccgttcactcccaaccagcagacaccagctgcatcctacagcttcccaaagatgtgcactatctgctccagcctcatggggcccccacctggggcgccatccctaaactacccccacctggccgctcccctctggctcagaggcctctcaggcgccaggcagcaataaggactgactccctggatgtgcagggcctgggtagccgggaagacctgttgtcagaggtgagtgggccctcctgccctctgacccggtcctcatccttctggggcgggtcgagcatccaggtgcagcagcgttccggcatccagagcaaagtctccaagcacatccgcctgccagccccttgcccaggcctggaacccagctgggccaaggaccctccagagaccagaagcagcttagagctggacacggagctgagctggatttcaggagacctccttcccagcagccaggaagaacccctgtccccacgggacctgaagaagtgctacagtgtagagacccagagctgcaggcgcaggcctgggtcctggctagatgaacagcggagacactccattgctgtcagctgtctggacagcggctcccaaccccgcctatgtccaagcccctcaagcctcgggggccaacctcttgggggtcctgggagccggcctaagaaaaaactcagcccacccagtatctctatagaccccccggagagccagggctctcggcccccatgcagtcctggtgtctgcctcaggaggagggcgccggccagtgactctaaggatccctcggtctccagcccccttgacagcacggctgcctcaccctccccaaagaaagacacgctgagtctctctggtttgtcttctgacccaacagacatggacccctgagtcctacccactctcccccatcacctttctccaccgggtgcagatcctagctccgcctcctgggcagcgtttctgaaaagtcccacgtaagcagcaagcagccacgaggcacctcacctgccttcttcagtggctggtggggatgacgagcagaacttccggagagtcgatctgaagagaacacagccctggagcccctgcctccgggaagaaggaaaaggagaaagcccagtgtggccaaggctcccgacaccaggagctgttgggagaaagcaatacgtttgtgcagaatctctatgtatattctattttattaaattaattgaatctagtatatgctggatgtacgacattttgtgactgaagagacttggttccttctacttttatgtgtctcagaatatttttgaggcgaaagcgtctgtctcttggctattttaacctaaaataaccagtctagttatattccctcttcttgtaaagcacaagctgggagcgtgagtgtattacaacccaacggcggcccatcttcagcaggaagcaagaaccattttggaaactgtcatgtaacttactttctcctttaacctcgtcatcgttttctgtagggggaaaaaaaacagagaaaaagagaaaaaaatgagttttacaaatgaaatggaacctttttatatatacatacatacatatctatatatctatataaaataaagtaattttccaaaataaaaa

SEQ ID NO: 26 - DNA, 8084 bp, Rattus norvegicus
  source 1..8084: mol_type = genomic DNA
tttttattttggaaaattactttattttatatagatatatagatatgtatgtatgtatatataaaaaggttccatttcatttgtaaaactcatttttttctctttttctctgttttttttccccctacagaaaacgatgacgaggttaaaggagaaagtaagttacatgacagtttccaaaatggttcttgcttcctgctgaagatgggccgccgttgggttgtaatacactcacgctcccagcttgtgctttacaagaagagggaatataactagactggttattttaggttaaaatagccaagagacagacgctttcgcctcaaaaatattctgagacacataaaagtagaaggaaccaagtctcttcagtcacaaaatgtcgtacatccagcatatactagattcaattaatttaataaaatagaatatacatagagattctgcacaaacgtattgctttctcccaacagctcctggtgtcgggagccttggccacactgggctttctccttttccttcttcccggaggcaggggctccagggctgtgttctcttcagatcgactctccggaagttctgctcgtcatccccaccagccactgaagaaggcaggtgaggtgcctcgtggctgcttgctgcttacgtgggacttttcagaaacgctgcccaggaggcggagctaggatctgcacccggtggagaaaggtgatgggggagagtgggtaggactcaggggtccatgtctgttgggtcagaagacaaaccagagagactcagcgtgtctttctttggggagggtgaggcagccgtgctgtcaagggggctggagaccgagggatccttagagtcactggccggcgccctcctcctgaggcagacaccaggactgcatgggggccgagagccctggctctccggggggtctatagagatactgggtgggctgagttttttcttaggccggctcccaggacccccaagaggttggcccccgaggcttgaggggcttggacataggcggggttgggagccgctgtccagacagctgacagcaatggagtgtctccgctgttcatctagccaggacccaggcctgcgcctgcagctctgggtctctacactgtagcacttcttcaggtcccgtggggacaggggttcttcctggctgctgggaaggaggtctcctgaaatccagctcagctccgtgtccagctctaagctgcttctggtctctggagggtccttggcccagctgggttccaggcctgggcaaggggctggcaggcggatgtgcttggagactttgctctggatgccggaacgctgctgcacctggatgctcgacccgccccagaaggatgaggaccgggtcagagggcaggagggcccactcacctctgacaacaggtcttcccggctacccaggccctgcacatccagggagtcagtccttattgctgcctggcgcctgagaggcctctgagccagaggggagcggccaggtgggggtagtttagggatggcgccccaggtgggggccccatgaggctggagcagatagtgcacatctttgggaagctgtaggatgcagctggtgtctgctggttgggagtgaacggacaagatggagcctgactgggctttggggagcccccagcccctgtgtcctagggatctctcagcagtgctcccattgcggcacatgtagctgtcattgggcagagagtgcgtccggctgacaccagacttcctcacagtcagcaggtctggtcctagggggactggcacctcctcggggtggggtaccatcgtggggtgctcaagggagaagcccgaggctgctccaatgtgggcagtggtgtgtggagccccaggcttagggctgtcaggactgttgacaccctccaccccgggccagaggaaggggctgcccagcggggagtggggctgcgggctgagcgtcttcatctccagctccagctcggcctcgagctcggcctcctccttggcctctttgttgctttcttccaggtgcttcatcagcacagctatgaccacgttgaccagcacaaactgggccgtcagcacgaaggacacaaagtagataggggagatgacagtgttgtagcaggtggactcctggtcacagtcccggagggtgtccttcataataccattccagttgtcaccagtggagactcggaagagggtcagaaaggccataccaaagttcctaaaggtggcatgccgacccaagccctcacaagggtgtgtctcatcacactccaggtctccaaagagctccacgcccagagctgcaaagatgaaaaacaataacatgaagagaagtcccaggttccccacctggggcagggcctgcatcaccgtgtccagcagtgcccgcatgcccacagccatcttcaacagcttcagaactcgagcaatgcggagcaccctcatgatacggatgatggtggggttgatgggcagcgaagcattgacctcaatctcctccagtgtgatgcccatgatggacagaagcacaatagccaggtccagctggttccacctgtcctggaagaaacggcggaagccaaaggccacaagtttgaaaactgactcaaagacaaagatgacggtaaagatgtaattgcagatcttcagagcctcgtccaggatctggggctgctggtaatgttccatggccatagtgaccacgttcagcccgatgacaccagtgatgaagaggtccaggtagtggctggtacacaggtggtggacaaggagccggaatctcgagtagtcagagtagtagggcttgcactgggcttctgacgcagcgctggctgagctgccggaagcaattacatcgtccaacattagattccttctctttttctccagcctccgtagtcgcttctcctcacgccgcctcgcctcctcctcctcctggtgctgtctgcacttatggaagttctccaccaccacgcccacaaacatgttcaggacaaagaaggccacgatgaggaggaaggagatgaagtatagcagcatccaggggttgtggttcatgatgggctgctgatccacacccacagcatccagcccatcatacatgatgtcaacccaaccatccttggaggccagcacaaacagggacatcagagcctggcccaggttgtcaaagttgtacttgtgccggacccatcggtagctggcctcagcgcagtcggatttgttagtgatgttcctggtgtcctcaccctgacacacgaagaacttccctttgaagagctgcaccccgagaattccaaaaatgatgaagaaggcacagcaaatgaccacaatgttgccaatgggtttgagggatgacatcagagtctctaccaccagcttcagtccctgggcccggctgatgaccctgagtggacgcagggtccgcagcagccgcagcaccctcagcatgccaaggatcttggtgccgctgtcggagaccatggagaccaggatgtcgatgacggagatgagcaccagcaagccgtccagcacattccagctgctgcgcaggtaggcctgctccccaaagcaccagcccagtgccaccaccttcactgtcatttcagctagaaagactgccgtgaagatgtagttggagagggtcaggaagatgcgctcagcgctgtgggggtcaattttggggcgctccatagcgatggtgatacagttgaggaagatgatgacgaggaccacatggtcaaacatcttgtgggtgatgatccggtgacacaggagacgaaaccttgactgaggaggaaagatataggccgaccaggaatctcgctctcggcaacaggcaggaagccgggatctgacccaggcttgtatgcgttcccctttgctcagatttccctcatcattgtcatcatccccatccagttgggggtcatcagtcctcagggtgcgggccaaacgccctgaagccgacttgccattacagtcttggtgctcagaggcagagctccggccgctggctgtgcggtgcagccccggcacctgcagagtgtcaggcaggtcaaaggaactcttggcctcacgttccaaggaacccctgtggcgatggtcactgcctgctgggctggcccggtcctcttctgaactttcctcctcatcctgactctcctggccctctccagacagcagggacctccgctccccgctcgggctcctccgctttaggctgggggcccggcccaggctgttcctgctggagcgcctgctggtccagctgcttgccgcactccagggactgtgcggggagctgcgggcacttggcggagatttcatctcatggtgggcagctccaggctcagcggacccactgctactggtacgtcgagagccagagcccagtgcttcccccacacctgtgctggagctcttgggtagtgacattggtgtcgcagccgtatggatgatgaggggtggcaaaaggctctttcgtagttccgcgtgttctcccaaagccaccagggccaagcgcttctttctgtccccatcaccatccacactgggcgaaaagaaatcaggctctgactcagacttggtggcatctcccccctgagagttgacaggcagctgaatacagcttaactgtccactcgcatcttcccgtttgccgatttcctctgcctggaagccttccacaagaatggccaccagcaggttaaagagcacatagttgccaaaagtcatgagggcgatgaagtaaagagcagcccaagacgatgtggaggccatgccgttgtagaggactttattccagtcttcctgagtcagaatctgaaagacagtgacgatggcccagagcagggagtcgaaattcttccggtctggcaacgtgtccccatcccgttcagatgcgaacttgcaaccaaagagatgcatgcccaggatgctgaagatgaagatgaacagcatgaggagcatgcagaaggtggccacgttgtccatggtcttcatgagcaccacgagctggcgctgcagggccggcaggaagcgcaccagcttcagcacccgcatcaggcggaaggtccgcagcaccgacaggccacctccctgctggcccacaatctcccacacactgatgaccacaatgacaccatcaaagatgttgtagggattcttaatgtagccaaagggaccgtagacaagcagtttcagcagcatctccaaggcgaagaggctggtgaagacgatgttgctgatttccagggcgttggtgagctcctcgggctgctcgtggtactcgatgcccatgctgagtgtattgaccaggatggcgatcatgattccccggccaaagtatttgctatctacgatcttccggaatgtgtcacagatcagcctccagaaagccagcacagaactaggctctgcatctgggcccaggctccgctgtcgccgccggctgtggggatcccggaggtcactgtgctgagcgtcctgtgtgaactcatacacagcctcgctgtctgagtcaggcatgacatggtcagcggactctggctctcctgctcctgtccgggcacagtagggacaactgtccggcccgcaggctccactgtctgccttggagcaagggctggagattttgcaggagctatggcaggctcccgtactctgtgtctccaggagcttgtgcatggagctgaagggcccaggtgggatgttgaagctggtgagggtggggggcccagggctgggggccacctccactagtgctttatccttcagtatctctggtggagggctggtatgcacagtggggtacaccttcccactacccacagtcctaccagatgcctccgatgggcatctgggagggggtgcctggcaacggactggctccaagtggcagtcagcatggtagaagctgtgtacagactccgcacccctcggagggcccccagagggagtgggtgtagagggtggtggtagcatgagccggcgagacccattggcatccctgtcctggatctctgggctggcccggggaactctgagcgtcccattacccaggtggtagtggtgatggtggtggtgatggtggtggaccaggtggtggacagacagacgacggtgtgagcgagtgcagctgccactgggctggggctcctgcccactacgggccactgggctgctgagcagcccagcccgcacgcctatagccctagagacctgggccagccttcgggctgcttttcggaggatgtacaccaggtacttgagtagctcctcatagcagctgcctggctcagagaagcttgccagggtgctagcattggacaggaatcgtacacgctgctcccgcatcagctgactctcccgctgtttggtctcggagaactgcgtggcaatcaccaccaggcacaggttgatcatgaagaaggagcccacgatgatgagaagaatgaagtagatgaagttgtagaaggagtgagcgtccattacgaagtacatgatgtcgacccagccctccagtgtgatgacctggaagatggcgatccaggcatagccaatgttgtcaaagttgatggcgcctttgaaggggttgtgctcgcccgcagagcagttggtatagtactggttccagttgacacaggtggtgttgctggaactgttataggtctcatagtccagactgcagggtgggccaccaccgccttccccacgcagtgtgggcacactcctgcaggatctcatgccattctcccgaggctgagagcagatgaaggggctctcgtcctcattctctgtctggtaataaggctccaggtccacgctcagggggaggctgaagttctcggggaggaagcatcggttgcgaagcagtcctgcccacagctggacgcccacgatgccaaagatgaaaaagacgaagaaacagagcagcaggacgttgcccagcataggcaaggtgtccagcagtaatgtgacgagaatgcgcatgctgggcacccggttaatggccctgagcggtcgcagcacacggactgtcctgactgcggagaagctgacgttctgcaggtccagcgaatactccagcatccctgcaatgacaatgaaaaagtcaagccggttccaagtgtctcccaggtaacatttcttcccaaagatgcccaaggccaccatcttcaccaccatttccacagcaaagaaggcaaagatgaagtcatcgaaggcctgcaggatccggcagcgctgggagtcacaggcaatgtcctcacacggcctgaacatacccagagtcacacagttgagaagaatgaccagcatactgactcgctcgaaccacgggttacagaccgtgcggagacaccagctccgcgggcggctgtcctggctcaagtagaagaaaaccaccggggctagcgccgggtacggcagcccctccgcctcggagtccgcgctgcccgggtccttttccgtcgaccccggcccctgccggcccccggccccggacaggtcgttgagctgcgtgaagctacggggctgtcccgactcctcggcgcccgctccatcctcctcctcgtccatcctctggccagccggggccccggggggtccgaagaggggcgagcggagcccctcagaggaggtgtcctcacgcaaccgggggaccccggtgggggagcatgtggggggctctagagagcttgctgagtccccaggagggccagttcagctcagctccccctgccctcaggggcatgctgcccgcggggcgccgggtctcagggaagccccgcctggctagagtcccgcttcccctgggttcccgggggctccccgactagccggccggcttcccctcactttgttccggcttcttcgcttcgcgcccaggctccggttgcccgaacaggcgctaccttcggcgaagcagcccccgagaggaagagaaaaaaaaggggccacccgatggagggcgggggtccggggaggggcgccccctcttccctcggcgcagctggagcaggatctaaggggtcagcatcgtcccggctccgcgccagagacgg

SEQ ID NO: 27 - DNA, 10040 bp, Macaca mulatta
  source 1..10040: mol_type = genomic DNA
ccgggctcctcgccgccgctttcgctcgctcgctccgcgtctcggccggaggaggaggcagtggcgccggcgacagctacggcagcggcagccaccgcggcggctgcggcggcggcatctccgcctccactcccgcccgggactgccccccaccgtctccccgcccctcccggaccgtgagcccgccgcggggcgggggaaggagccgcccccaccccctccaagcccacccctaaagagatccctcctcccctcccccgccgcctggcgcggagccgggacgatgctgaccccttagatccggctccagctgcgccgcgggaagagggggcgcccctccccggacccccgcccttcgccgctgccccccttttcgctcgccctctcggggccgcttcgccgaaggtagcgccgaatccggcaaccggagcctgggcgcgaagcgaagaagccggaacaaagtgagggggagccggccggctggcccggggagccccaggggcgcaggggaagcgggacttgcgccgggcggggtttccctgcgccccggcgccccgcgggcagcatgcccctgcgggcagggggagctggactgaactggccctcccgggggctcagcttgcgccctagagccccccagatgtgcccccgccggggctcccgggttgcgtgaggacatctcctcggaggggcgccgcttgcccctctccggaccgcccggggccccggctggccagaggatggacgaggaggaggatggagcgggcgcagaggagtcgggacagccccggagcttcatgcggctcaacgacctgtcgggggccgggggccggcgggggccggggtcagcagaaaaggacccgggcagcgcggactccgaggcggagggactgccgtacccggcgctggccccggtggttttcttctacttgagccaggacagccgcccgcggagctggtgtctccgcacggtctgtaacccctggtttgagcgtatcagcatgttggtcatccttctcaactgcgtgaccctgggcatgttccggccgtgcgaggacatcgcctgtgactcccagcgctgccggatcctgcaggcctttgatgacttcatctttgccttcttcgccgtggagatggtggtgaagatggtggccttgggcatctttgggaaaaagtgttacctgggagacacttggaaccggcttgactttttcatcgtcattgcagggatgttggagtactcgctggacctgcagaacgtcagcttctcagctgtcaggacagtccgtgtgctgcgaccgctcagggccattaaccgggtgcccagcatgcgcatccttgtcacgttgttgctggacacactgcccatgctgggcaacgtcctgctgctctgcttcttcgtcttcttcatctttggcatcgtcggcgtccagctgtgggcagggctgcttcggaatcgatgcttcctacctgagaattttagcctccccctaagcgtggacctggagcgctattaccagacagagaatgaggatgagagccccttcatctgctcccagccacgcgagaacggcatgcggtcctgcagaagcgtgcccacgttgcgtggggaggggggcggtggcccaccttgtggtctggactatgaggcctacaacagctccagcaataccacctgtgtcaactggaaccagtactataccaactgctcagcgggggagcacaaccccttcaagggcgccatcaactttgacaacattggctatgcctggatcgccatcttccaggtcatcacactggagggctgggtcgacatcatgtactttgtgatggatgctcattccttctacaatttcatctacttcatcctcctcatcatcgtgggctccttcttcatgatcaacctgtgcctggtggtgattgccacgcagttctcagagaccaagcagagggaaagccagctgatgcgggagcagcgtgtgcggttcctgtccaacgccagcaccctggctagcttctctgagcccggcagctgctatgaggagctgctcaagtacctggtgtacatccttcgtaaggcagcccgcaggctggctcaggtctctcgggcagcaggtgtgcgggctgggctgctcagcagcccagcaccccttgggggccaggagacccagcccagcagcagctgctctcgctctcaccgccgcctgtccgtccaccacctggtgcaccaccaccaccaccatcaccaccactaccacctgggcaatggaacgctcagggtcccccgggccagcccagagatccaggacagggatgccaatgggtcccgccggctcatgctgccaccaccctcgacgcctgccgtctccgggggccccccaggtggcgcagagtctgtgcacagcttctaccatgccgactgccacttagagccagtccgctgccaggcaccccctcccaggtccccatctgaggcatccggcaggactgtgggcagcgggaaggtgtatcccaccgtgcacaccagccctccaccggagacgctgaaagagaaggcactagtagaggtggctgccagctctgggcccgcaaccctcaccagcctcaacatcccacctgggccctacagctccatgcacaagctgctggagacacagagtacaggtgcctgccaaagctcttgcaagatctccagcccttgcttgaaggcagacagtggagcctctggtccagacagctgcccctactgtgcccgggcgggggcaggggaggtagagctcgccgaccgtgaaatgcctgactcagacagcgaggcggtttatgagttcacacaggatgcccagcacagtgacctccgggacccccacagccggcggcaacggagcctgggcccagatgcagagcccagctctgtgctggccttctggaggctaatctgtgacaccttccgaaagattgtggacagcaagtactttggccggggaatcatgattgccatcctggtcaatacactcagcatgggcatcgaataccatgagcagcccgaggagcttaccaacgccctagaaatcagcaacatcgtcttcaccagcctctttgccctggagatgctgctgaagctgctcgtgtatggtccctttggctacatcaagaatccctacaacatcttcgacggtgtcattgtggtcatcagcgtgtgggagatcgtgggccagcaggggggcggcctgtcggtgctgcggaccttccgcctgatgcgcgtgctgaagctggtgcgcttcctgccggcgctgcagcggcagctggtggtgctcatgaagaccatggacaacgtggccaccttctgcatgctgctcatgctcttcatcttcatcttcagcatcctgggcatgcatctcttcggctgcaagtttgcctccgagcgggatggggacaccctgccagaccggaagaattttgactccttgctctgggccatcgtcactgtctttcagatcctcacccaggaggactggaacaaagtcctgtacaatggtatggcctccacgtcatcctgggcagccctttacttcattgccctcatgaccttcggcaactacgtgctcttcaatttgctggtcgctattctggtggagggcttccaggcggaggaaatcagcaaacgggaagatgcgagtggacagttaagctgtattcagctgcctgtcgactcccaggggggagatgccaacaagtccgaatcagagcccgatttcttctcacccagcctggatggtgatggggacaggaagaagtgcttggccttggtgtccctgggagagcatccggagctgcggaagagcctgctgccgcctctcatcatccacacggccgccacacccatgtcgctgcccaagagcaccagcacgggcctgggcgaggcgctgggccccatgtcgcgccgcaccagcagcagcgggtcggcggagcccggggcggcccacgagatgaagtcgccgcccagtgcccgcagctccccgcacagcccctggagcgctgcaagcagctggaccagcaggcgctccagccggaacagcctcggccgtgcccccagcctgaagcggagaagcccaagtggggagcggcggtccctgttgtcaggagaaggccaggagagccaggatgaggaggagagctcagaagaggagcgggccagccctgcgggcagcgaccgtcgccacagggagtccctggagcgggaggccaagagttcctttgacctgccagacacactgcaggtgccagggctgcaccgcactgccagtggccgaggctctgcttctgagcaccaggactgcaatggcaagtcggcttcggggcgtctggcccgggccctgcggcccgacgaccccccactggatggggatgacgcggatgacgagggcaacctgagcaaaggggaacgggtccgcgcgtggatccgagcccgactccctgcctgctgccttgagcgagactcctggtcagcctacatcttccctcctcagtccaggttccgcctcctgtgtcaccggatcatcacccacaagatgtttgaccacgtggtcctcgtcatcatcttccttaactgcatcaccatcgccatggagcgccccaaaattgacccccacagcgctgaacgcatcttcctgaccctctccaattacatcttcaccgcagtctttctggctgaaatgacagtgaaggtggtggcgctgggctggtgcttcggggagcaggcgtacctgcgcagcagctggaacgtgctggacgggctgttggtgctcatctccgtcatcgacattctggtgtccatggtctctgacagcggcaccaagatcctgggcatgctgagggtgctgcggctgctgcggaccctgcgcccgctcagggtgatcagccgggcgcaggggctgaagctggtggtggagacgctgatgtcctcactgaaacccatcggcaacattgtagtcatctgctgtgccttcttcatcattttcggcatcttgggggtgcagctcttcaaagggaagtttttcgtgtgccagggcgaggataccaggaacatcaccaataaatcggactgtgctgaggccagttaccggtgggtccggcacaagtacaactttgacaaccttggccaggccctgatgtccctgttcgttttggcctccaaggacggctgggtggacatcatgtatgatgggctggatgctgtgggcgtggaccagcagcccatcatgaaccacaacccctggatgctgctgtacttcatctcgttcctgctcattgtggccttctttgtcctgaacatgtttgtgggtgtggtggtggagaacttccacaagtgtcggcagcaccaggaggaagaggaggcccggcggcgggaggagaagcgtctacgaagactggagaaaaagagaaggaatctaatgctggacgatgtaattgcttccggcagctcagccagcgctgcgtcagaagcccagtgcaaaccttactactccgactactcccgcttccggctcctcgtccaccacttgtgcaccagccactacctggatctcttcatcacaggtgtcatcgggttgaacgtggtcaccatggccatggagcactaccagcagccccagattctggatgaagctctgaagatctgcaactacatcttcactgtcatctttgttttggagtcagttttcaaacttgtggcctttggtttccgtcggttcttccaggacaggtggaaccagctggacctggccattgtgctgctgtccatcatgggcatcacgctggaggaaatcgaggtcaacgcctcactgcccatcaaccccaccatcatccgcatcatgagggtactgcgcattgcccgagtgctgaagctgctgaagatggctgtgggcatgcgggcgctgctggacacggtgatgcaggccctgccccaggtggggaacctgggacttctcttcatgttgttgtttttcatctttgcagctctgggcgtggagctctttggagacctggagtgtgacgagacacacccctgtgagggcctgggccggcatgccacctttcggaactttggcatggccttcctaaccctcttccgagtctccacaggtgacaactggaacggcattatgaaggacaccctccgggactgtgaccaggagtccacctgctacaacacggtcatctcgcccatctactttgtgtccttcgtgctgacggcccagtttgtgctggtcaacgtggtgatcgctgtgctgatgaagcacctggaggagagcaacaaggaggccaaggaggaggctgagctggaggctgagctggagctagagatgaagaccctcagcccccagccccactcgccgctgggcagccccttcctctggcctggggtcgagggccccgacagccccgacagccccaagcctggggccctgcacccagcggcccatgcgagatcagcctcccacttttccctggagcaccccacggacgggcagctgtttgacaccatatccctgctgatccagggctccctggagtgggagctgaagctgatggacgagctggcaggcccaggtggccagccctctgccttcccttctgcccccagcctgggcggctccgacccacagatccctctagctgagatggaggctctgtctctgacgtcagagattgtgtctgaaccgtcctgctctctagctctgacggatgactctttgcctgatgacatgcacacactcttacttagtgccccggagagcaatgtacagccccaccccacggagctgccaggaccagacttactgaccgtgcggaagtctggggtcagccgaacgcactctctgcccaatgacagctacatgtgtcggcatgggagcattgccgaggggcccctgggacagaggggctgggggctccccaaagctcagtcaggctccgtcttgtccgttcactcccagccagcagacaccagctacatcctgcagcttcccaaagatgcacctcatctgcttcagccctacagcaccccaacctggggcaccatccccaaactgcccccaccaggacgctcccctttggctcaaaggccactcaggcgccaggcagcaataaggactgactccttggacgttcagggcctgggcagccgggaagacctgctggcagaggtgagtgggccctccctgcccctggcccgggcctactctttctggggccagtcgagcacccaggcgcagcagcactcccgcagccacagcaacatctccaagcacatgcccccgcgagccccttgcccaggcccacaacccaactgggacaagggccctccagagaccagaagcagcttagagttggacacggagctgagctggatttcaggagacctcctgccccctggcggccaggaggagcccccatccccacgggacctgaagaagtgctacagcgtggaggcccagagctgccagcgccggcccacgtcctggctggatgagcagaggagacactctatcgccgtcagctgcctggacagtggctcccaaccccacctgggcacagacccctctaaccttgggggccagcctcttggggggcctgggagccgacccaagaaaaaactcagcccgcccagtatctccatagacccccccgagagccaaggccctcggcccccgcccagccctggcgtctgcctccggaggagggctccatccagcgactccaaggatcccttggcctccggcccccctgacagcatggctgcctcgccctccccaaagaaagatgtgctgagtctctccggtttatcctctgacccggcagacctggacccctgagtcctgccccactttcccactcacctttctccactgggtgccaagtcctagctcctcctcctgggctatattcctgacaaaagttccatatagacaccaaggaggcggaggcgctcctccctgcctcagtggctctgggtacctgcaagcagaacttccaaagagagttaaaagcagcagccctggcaactctggctccaggcagaaggagaggcccggtgcagctgaggttcccaacaccaggagctgttgggagaaagcaatacgtctgtgcagaatctctatgtatattctattttattaaattaattgaatctagtatatgcgggatgtacgacattttgtgactgaagagacttgtttccttctacttttatgtgtctcagaatatttttgaggcgaaggcgtctgtctcttggctattttaacctaaaataacagtctagttataatccctcttcttgcaaagcacaagctgggaccgcgagcgcattgcagccccaacggtggcccatcttcagcggagagcgagaaccattttggaaactgtaatgtaacttattttctcctttaacctcgtcatcattttctgtagggaaaaaaaaagaaaaagaaaaaatgagattttacaaatgaaatggaatctttttatatatacatacatacatatctatatatatatatataaaataaagtaattttcctaaataaaaagctaatcacggtccagagtaaaagcaaaagggatggagagttaggcacgtccagatggcactgatgagagagagatcctggagatggggagtgggcggtggggagggaagcttcagggctgcctctttgtgtatgagtgtgtatgtgtttgtgtatatgagtgtgtgtgtatatgagtgtgagtgtgtgcgtgtctgagagtgagagaacctgaaccctttgctctggaaggctgcacctctagcccgccctccccagctgtgaaggagaggagaagcccctccgcctggtgcaggctggggaggcagggtctcctctgctgctatcaaagctttactgcttcctctagctaggcagctcagtgaatgggagtaattccagattaactcttatttctgctgacagctatcagccgcacattgaaagctggaaattggcataatgaagctgttttggttaatggggccgactgaggctgggggaggttgcctcagaggctgcagatctggatctgtgggttggtgggggaggggggaagtgtttctgggttttccttcctgaagcttcagcacagatttgccacacttctggctggatgcgtgacctgagctgcctggacttcagcctcctgcccttgggggtgggcttagctgactggcattacaggcactgcccgatggggacctcatccacctgcccgcaatggaattaagctgtgtaaatggactgggctgcccttcctgaggatgagggtccagggctgggcgtccagaggcaaccttctggtggaggtggtagggtcggaggccaggctgcaggctgctgagtggggagctggccccctgggtggtgatgagcgagcgctcaagatgtttacatgcactgctgctgctgcctgcccagggggagcccgtggagaagggaggtttgaaggtggtcagggacagacaggcgggaagagggggagtggcgtggcccaggccacctgtctggtgctactgcagacaatattctcttgtctgaaatcttggtgccaagaggtggcgaccatgggtccaggcagcctgtcacctagccactcccaaacatctgtcccaaccccactcccttgaacagccctatcccctcgcccccaaggccttcaaaccccaggagtggattgggttcttgaaacctcactggcaatgctcgttcacgcactgtctgacctggtcagctgggaactgggagcaccaggctgccgggcgagtggacctggaggcgctgtccagccttgtgttttctaagctgggtgagagctttcctcattgctcttttggagagaactgataccagtccttgaagccaatgcttggttttctccttttagggtgtgcaataatgtcagactttttcctctggcctccttgggtggggagagggagcgcttgtaggagctgccatttaagattt

SEQ ID NO: 28 - DNA, 10040 bp, Macaca mulatta
  source 1..10040: mol_type = genomic DNA
aaatcttaaatggcagctcctacaagcgctccctctccccacccaaggaggccagaggaaaaagtctgacattattgcacaccctaaaaggagaaaaccaagcattggcttcaaggactggtatcagttctctccaaaagagcaatgaggaaagctctcacccagcttagaaaacacaaggctggacagcgcctccaggtccactcgcccggcagcctggtgctcccagttcccagctgaccaggtcagacagtgcgtgaacgagcattgccagtgaggtttcaagaacccaatccactcctggggtttgaaggccttgggggcgaggggatagggctgttcaagggagtggggttgggacagatgtttgggagtggctaggtgacaggctgcctggacccatggtcgccacctcttggcaccaagatttcagacaagagaatattgtctgcagtagcaccagacaggtggcctgggccacgccactccccctcttcccgcctgtctgtccctgaccaccttcaaacctcccttctccacgggctccccctgggcaggcagcagcagcagtgcatgtaaacatcttgagcgctcgctcatcaccacccagggggccagctccccactcagcagcctgcagcctggcctccgaccctaccacctccaccagaaggttgcctctggacgcccagccctggaccctcatcctcaggaagggcagcccagtccatttacacagcttaattccattgcgggcaggtggatgaggtccccatcgggcagtgcctgtaatgccagtcagctaagcccacccccaagggcaggaggctgaagtccaggcagctcaggtcacgcatccagccagaagtgtggcaaatctgtgctgaagcttcaggaaggaaaacccagaaacacttcccccctcccccaccaacccacagatccagatctgcagcctctgaggcaacctcccccagcctcagtcggccccattaaccaaaacagcttcattatgccaatttccagctttcaatgtgcggctgatagctgtcagcagaaataagagttaatctggaattactcccattcactgagctgcctagctagaggaagcagtaaagctttgatagcagcagaggagaccctgcctccccagcctgcaccaggcggaggggcttctcctctccttcacagctggggagggcgggctagaggtgcagccttccagagcaaagggttcaggttctctcactctcagacacgcacacactcacactcatatacacacacactcatatacacaaacacatacacactcatacacaaagaggcagccctgaagcttccctccccaccgcccactccccatctccaggatctctctctcatcagtgccatctggacgtgcctaactctccatcccttttgcttttactctggaccgtgattagctttttatttaggaaaattactttattttatatatatatatatagatatgtatgtatgtatatataaaaagattccatttcatttgtaaaatctcattttttctttttctttttttttccctacagaaaatgatgacgaggttaaaggagaaaataagttacattacagtttccaaaatggttctcgctctccgctgaagatgggccaccgttggggctgcaatgcgctcgcggtcccagcttgtgctttgcaagaagagggattataactagactgttattttaggttaaaatagccaagagacagacgccttcgcctcaaaaatattctgagacacataaaagtagaaggaaacaagtctcttcagtcacaaaatgtcgtacatcccgcatatactagattcaattaatttaataaaatagaatatacatagagattctgcacagacgtattgctttctcccaacagctcctggtgttgggaacctcagctgcaccgggcctctccttctgcctggagccagagttgccagggctgctgcttttaactctctttggaagttctgcttgcaggtacccagagccactgaggcagggaggagcgcctccgcctccttggtgtctatatggaacttttgtcaggaatatagcccaggaggaggagctaggacttggcacccagtggagaaaggtgagtgggaaagtggggcaggactcaggggtccaggtctgccgggtcagaggataaaccggagagactcagcacatctttctttggggagggcgaggcagccatgctgtcaggggggccggaggccaagggatccttggagtcgctggatggagccctcctccggaggcagacgccagggctgggcgggggccgagggccttggctctcgggggggtctatggagatactgggcgggctgagttttttcttgggtcggctcccaggccccccaagaggctggcccccaaggttagaggggtctgtgcccaggtggggttgggagccactgtccaggcagctgacggcgatagagtgtctcctctgctcatccagccaggacgtgggccggcgctggcagctctgggcctccacgctgtagcacttcttcaggtcccgtggggatgggggctcctcctggccgccagggggcaggaggtctcctgaaatccagctcagctccgtgtccaactctaagctgcttctggtctctggagggcccttgtcccagttgggttgtgggcctgggcaaggggctcgcgggggcatgtgcttggagatgttgctgtggctgcgggagtgctgctgcgcctgggtgctcgactggccccagaaagagtaggcccgggccaggggcagggagggcccactcacctctgccagcaggtcttcccggctgcccaggccctgaacgtccaaggagtcagtccttattgctgcctggcgcctgagtggcctttgagccaaaggggagcgtcctggtgggggcagtttggggatggtgccccaggttggggtgctgtagggctgaagcagatgaggtgcatctttgggaagctgcaggatgtagctggtgtctgctggctgggagtgaacggacaagacggagcctgactgagctttggggagcccccagcccctctgtcccaggggcccctcggcaatgctcccatgccgacacatgtagctgtcattgggcagagagtgcgttcggctgaccccagacttccgcacggtcagtaagtctggtcctggcagctccgtggggtggggctgtacattgctctccggggcactaagtaagagtgtgtgcatgtcatcaggcaaagagtcatccgtcagagctagagagcaggacggttcagacacaatctctgacgtcagagacagagcctccatctcagctagagggatctgtgggtcggagccgcccaggctgggggcagaagggaaggcagagggctggccacctgggcctgccagctcgtccatcagcttcagctcccactccagggagccctggatcagcagggatatggtgtcaaacagctgcccgtccgtggggtgctccagggaaaagtgggaggctgatctcgcatgggccgctgggtgcagggccccaggcttggggctgtcggggctgtcggggccctcgaccccaggccagaggaaggggctgcccagcggcgagtggggctgggggctgagggtcttcatctctagctccagctcagcctccagctcagcctcctccttggcctccttgttgctctcctccaggtgcttcatcagcacagcgatcaccacgttgaccagcacaaactgggccgtcagcacgaaggacacaaagtagatgggcgagatgaccgtgttgtagcaggtggactcctggtcacagtcccggagggtgtccttcataatgccgttccagttgtcacctgtggagactcggaagagggttaggaaggccatgccaaagttccgaaaggtggcatgccggcccaggccctcacaggggtgtgtctcgtcacactccaggtctccaaagagctccacgcccagagctgcaaagatgaaaaacaacaacatgaagagaagtcccaggttccccacctggggcagggcctgcatcaccgtgtccagcagcgcccgcatgcccacagccatcttcagcagcttcagcactcgggcaatgcgcagtaccctcatgatgcggatgatggtggggttgatgggcagtgaggcgttgacctcgatttcctccagcgtgatgcccatgatggacagcagcacaatggccaggtccagctggttccacctgtcctggaagaaccgacggaaaccaaaggccacaagtttgaaaactgactccaaaacaaagatgacagtgaagatgtagttgcagatcttcagagcttcatccagaatctggggctgctggtagtgctccatggccatggtgaccacgttcaacccgatgacacctgtgatgaagagatccaggtagtggctggtgcacaagtggtggacgaggagccggaagcgggagtagtcggagtagtaaggtttgcactgggcttctgacgcagcgctggctgagctgccggaagcaattacatcgtccagcattagattccttctctttttctccagtcttcgtagacgcttctcctcccgccgccgggcctcctcttcctcctggtgctgccgacacttgtggaagttctccaccaccacacccacaaacatgttcaggacaaagaaggccacaatgagcaggaacgagatgaagtacagcagcatccaggggttgtggttcatgatgggctgctggtccacgcccacagcatccagcccatcatacatgatgtccacccagccgtccttggaggccaaaacgaacagggacatcagggcctggccaaggttgtcaaagttgtacttgtgccggacccaccggtaactggcctcagcacagtccgatttattggtgatgttcctggtatcctcgccctggcacacgaaaaacttccctttgaagagctgcacccccaagatgccgaaaatgatgaagaaggcacagcagatgactacaatgttgccgatgggtttcagtgaggacatcagcgtctccaccaccagcttcagcccctgcgcccggctgatcaccctgagcgggcgcagggtccgcagcagccgcagcaccctcagcatgcccaggatcttggtgccgctgtcagagaccatggacaccagaatgtcgatgacggagatgagcaccaacagcccgtccagcacgttccagctgctgcgcaggtacgcctgctccccgaagcaccagcccagcgccaccaccttcactgtcatttcagccagaaagactgcggtgaagatgtaattggagagggtcaggaagatgcgttcagcgctgtgggggtcaattttggggcgctccatggcgatggtgatgcagttaaggaagatgatgacgaggaccacgtggtcaaacatcttgtgggtgatgatccggtgacacaggaggcggaacctggactgaggagggaagatgtaggctgaccaggagtctcgctcaaggcagcaggcagggagtcgggctcggatccacgcgcggacccgttcccctttgctcaggttgccctcgtcatccgcgtcatccccatccagtggggggtcgtcgggccgcagggcccgggccagacgccccgaagccgacttgccattgcagtcctggtgctcagaagcagagcctcggccactggcagtgcggtgcagccctggcacctgcagtgtgtctggcaggtcaaaggaactcttggcctcccgctccagggactccctgtggcgacggtcgctgcccgcagggctggcccgctcctcttctgagctctcctcctcatcctggctctcctggccttctcctgacaacagggaccgccgctccccacttgggcttctccgcttcaggctgggggcacggccgaggctgttccggctggagcgcctgctggtccagctgcttgcagcgctccaggggctgtgcggggagctgcgggcactgggcggcgacttcatctcgtgggccgccccgggctccgccgacccgctgctgctggtgcggcgcgacatggggcccagcgcctcgcccaggcccgtgctggtgctcttgggcagcgacatgggtgtggcggccgtgtggatgatgagaggcggcagcaggctcttccgcagctccggatgctctcccagggacaccaaggccaagcacttcttcctgtccccatcaccatccaggctgggtgagaagaaatcgggctctgattcggacttgttggcatctcccccctgggagtcgacaggcagctgaatacagcttaactgtccactcgcatcttcccgtttgctgatttcctccgcctggaagccctccaccagaatagcgaccagcaaattgaagagcacgtagttgccgaaggtcatgagggcaatgaagtaaagggctgcccaggatgacgtggaggccataccattgtacaggactttgttccagtcctcctgggtgaggatctgaaagacagtgacgatggcccagagcaaggagtcaaaattcttccggtctggcagggtgtccccatcccgctcggaggcaaacttgcagccgaagagatgcatgcccaggatgctgaagatgaagatgaagagcatgagcagcatgcagaaggtggccacgttgtccatggtcttcatgagcaccaccagctgccgctgcagcgccggcaggaagcgcaccagcttcagcacgcgcatcaggcggaaggtccgcagcaccgacaggccgcccccctgctggcccacgatctcccacacgctgatgaccacaatgacaccgtcgaagatgttgtagggattcttgatgtagccaaagggaccatacacgagcagcttcagcagcatctccagggcaaagaggctggtgaagacgatgttgctgatttctagggcgttggtaagctcctcgggctgctcatggtattcgatgcccatgctgagtgtattgaccaggatggcaatcatgattccccggccaaagtacttgctgtccacaatctttcggaaggtgtcacagattagcctccagaaggccagcacagagctgggctctgcatctgggcccaggctccgttgccgccggctgtgggggtcccggaggtcactgtgctgggcatcctgtgtgaactcataaaccgcctcgctgtctgagtcaggcatttcacggtcggcgagctctacctcccctgcccccgcccgggcacagtaggggcagctgtctggaccagaggctccactgtctgccttcaagcaagggctggagatcttgcaagagctttggcaggcacctgtactctgtgtctccagcagcttgtgcatggagctgtagggcccaggtgggatgttgaggctggtgagggttgcgggcccagagctggcagccacctctactagtgccttctctttcagcgtctccggtggagggctggtgtgcacggtgggatacaccttcccgctgcccacagtcctgccggatgcctcagatggggacctgggagggggtgcctggcagcggactggctctaagtggcagtcggcatggtagaagctgtgcacagactctgcgccacctggggggcccccggagacggcaggcgtcgagggtggtggcagcatgagccggcgggacccattggcatccctgtcctggatctctgggctggcccgggggaccctgagcgttccattgcccaggtggtagtggtggtgatggtggtggtggtggtgcaccaggtggtggacggacaggcggcggtgagagcgagagcagctgctgctgggctgggtctcctggcccccaaggggtgctgggctgctgagcagcccagcccgcacacctgctgcccgagagacctgagccagcctgcgggctgccttacgaaggatgtacaccaggtacttgagcagctcctcatagcagctgccgggctcagagaagctagccagggtgctggcgttggacaggaaccgcacacgctgctcccgcatcagctggctttccctctgcttggtctctgagaactgcgtggcaatcaccaccaggcacaggttgatcatgaagaaggagcccacgatgatgaggaggatgaagtagatgaaattgtagaaggaatgagcatccatcacaaagtacatgatgtcgacccagccctccagtgtgatgacctggaagatggcgatccaggcatagccaatgttgtcaaagttgatggcgcccttgaaggggttgtgctcccccgctgagcagttggtatagtactggttccagttgacacaggtggtattgctggagctgttgtaggcctcatagtccagaccacaaggtgggccaccgcccccctccccacgcaacgtgggcacgcttctgcaggaccgcatgccgttctcgcgtggctgggagcagatgaaggggctctcatcctcattctctgtctggtaatagcgctccaggtccacgcttagggggaggctaaaattctcaggtaggaagcatcgattccgaagcagccctgcccacagctggacgccgacgatgccaaagatgaagaagacgaagaagcagagcagcaggacgttgcccagcatgggcagtgtgtccagcaacaacgtgacaaggatgcgcatgctgggcacccggttaatggccctgagcggtcgcagcacacggactgtcctgacagctgagaagctgacgttctgcaggtccagcgagtactccaacatccctgcaatgacgatgaaaaagtcaagccggttccaagtgtctcccaggtaacactttttcccaaagatgcccaaggccaccatcttcaccaccatctccacggcgaagaaggcaaagatgaagtcatcaaaggcctgcaggatccggcagcgctgggagtcacaggcgatgtcctcgcacggccggaacatgcccagggtcacgcagttgagaaggatgaccaacatgctgatacgctcaaaccaggggttacagaccgtgcggagacaccagctccgcgggcggctgtcctggctcaagtagaagaaaaccaccggggccagcgccgggtacggcagtccctccgcctcggagtccgcgctgcccgggtccttttctgctgaccccggcccccgccggcccccggcccccgacaggtcgttgagccgcatgaagctccggggctgtcccgactcctctgcgcccgctccatcctcctcctcgtccatcctctggccagccggggccccgggcggtccggagaggggcaagcggcgcccctccgaggagatgtcctcacgcaacccgggagccccggcgggggcacatctggggggctctagggcgcaagctgagcccccgggagggccagttcagtccagctccccctgcccgcaggggcatgctgcccgcggggcgccggggcgcagggaaaccccgcccggcgcaagtcccgcttcccctgcgcccctggggctccccgggccagccggccggctccccctcactttgttccggcttcttcgcttcgcgcccaggctccggttgccggattcggcgctaccttcggcgaagcggccccgagagggcgagcgaaaaggggggcagcggcgaagggcgggggtccggggaggggcgccccctcttcccgcggcgcagctggagccggatctaaggggtcagcatcgtcccggctccgcgccaggcggcgggggaggggaggagggatctctttaggggtgggcttggagggggtgggggcggctccttcccccgccccgcggcgggctcacggtccgggaggggcggggagacggtggggggcagtcccgggcgggagtggaggcggagatgccgccgccgcagccgccgcggtggctgccgctgccgtagctgtcgccggcgccactgcctcctcctccggccgagacgcggagcgagcgagcgaaagcggcggcgaggagcccgg

SEQ ID NO: 29 - DNA, 8299 bp, Macaca fascicularis
  source 1..8299: mol_type = genomic DNA
cgccgccgctttcgctcgctcgctccgcgtctcggccggaggaggaggcagtggcgccggcgacagctacggcagcggcagccaccgcggcggctgcggcggcggcatctccgcctccactcccgcccgggactgccccccaccgtctccccgcccctcccggaccgtgagcccgccgcggggcgggggaaggagccgcccccaccccctccaagcccacccctaaagagatccctcctcccctcccccgccgcctggcgcggagccgggacgatgctgaccccttagatccggctccagctgcgccgcgggaagagggggcgcccctccccggacccccgcccttcgccgctgccccccttttcgctcgccctctcggggccgcttcgccgaaggtagcgccgaatccggcaaccggagcctgggcgcgaagcgaagaagccggaacaaagtgagggggagccggccggctggcccggggagccccaggggcgcaggggaagcgggacttgcgccgggcggggtttccctgcgccccggcgccccgcgggcagcatgcccctgcgggcagggggagctggactgaactggccctcccgggggctcagcttgcgccctagagccccccagatgtgcccccgccggggctcccgggttgcgtgaggacatctcctcggaggggcgccgcttgcccctctccggaccgcccggggccccggctggccagaggatggacgaggaggaggatggagcgggcgcagaggagtcgggacagccccggagcttcatgcggctcaacgacctgtcgggggccgggggccggcgggggccggggtcagcagaaaaggacccgggcagcgcggactccgaggcggagggactgccgtacccggcgctggccccggtggttttcttctacttgagccaggacagccgcccgcggagctggtgtctccgcacggtctgtaacccctggtttgagcgtatcagcatgttggtcatccttctcaactgcgtgaccctgggcatgttccggccgtgcgaggacatcgcctgtgactcccagcgctgccggatcctgcaggcctttgatgacttcatctttgccttcttcgccgtggagatggtggtgaagatggtggccttgggcatctttgggaaaaagtgttacctgggagacacttggaaccggcttgactttttcatcgtcattgcagggatgttggagtactcgctggacctgcagaacgtcagcttctcagctgtcaggacagtccgtgtgctgcgaccgctcagggccattaaccgggtgcccagcatgcgcatccttgtcacgttgttgctggacacactgcccatgctgggcaacgtcctgctgctctgcttcttcgtcttcttcatctttggcatcgtcggcgtccagctgtgggcagggctgcttcggaatcgatgcttcctacctgagaattttagcctccccctaagcgtggacctggagcgctattaccagacagagaatgaggatgagagccccttcatctgctcccagccacgcgagaacggcatgcggtcctgcagaagcgtgcccacgttgcgtggggaggggggcggtggcccaccttgtggtctggactatgaggcctacaacagctccagcaataccacctgtgtcaactggaaccagtactacaccaactgctcagcgggggagcacaaccccttcaagggcgccatcaactttgacaacattggctatgcctggatcgccatcttccaggtcatcacactggagggctgggtcgacatcatgtactttgtgatggatgctcattccttctacaatttcatctacttcatcctcctcatcatcgtgggctccttcttcatgatcaacctgtgcctggtggtgattgccacgcagttctcagagaccaagcagagggaaagccagctgatgcgggagcagcgtgtgcggttcctgtccaacgccagcaccctggctagcttctctgagcccggcagctgctatgaggagctgctcaagtacctggtgtacatccttcgtaaggcagcccgcaggctggctcaggtctctcgggcagcaggtgtgcgggctgggctgctcagcagcccagcaccccttgggggccaggagacccagcccagcagcagctgctctcgctctcaccgccgcctgtccgtccaccacctggtgcaccaccaccaccaccatcaccaccactaccacctgggcaatggaacgctcagggtcccccgggccagcccagagatccaggacagggatgccaatgggtcccgccggctcatgctgccaccaccctcgacgcctgccctctccgggggccccccaggtggcgcagagtctgtgcacagcttctaccatgccgactgccacttagagccagtccgctgccaggcaccccctcccaggtccccatctgaggcatccggcaggactgtgggcagcgggaaggtgtatcccaccgtgcacaccagccctccaccggagacgctgaaagagaaggcactagtagaggtggctgccagctctgggcccacaaccctcaccagcctcaacatcccacctgggccctacagctccatgcacaagctgctggagacacagagtacaggtgcctgccaaagctcttgcaagatctccagcccttgcttgaaggcagacagtggagcctctggtccagacagctgcccctactgtgcccgggcgggggcaggggaggtagagctcgccgaccgtgaaatgcctgactcagacagcgaggcggtttatgagttcacacaggatgcccagcacagtgacctccgggacccccacagccggcggcaacggagcctgggcccagatgcagagcccagctctgtgctggccttctggaggctaatctgtgacaccttccgaaagattgtggacagcaagtactttggccggggaatcatgattgccatcctggtcaatacactcagcatgggcatcgaataccatgagcagcccgaggagcttaccaacgccctagaaatcagcaacatcgtcttcaccagcctctttgccctggagatgctgctgaagctgctcgtgtatggtccctttggctacatcaagaatccctacaacatcttcgacggtgtcattgtggtcatcagcgtgtgggagatcgtgggccagcaggggggcggcctgtcggtgctgcggaccttccgcctgatgcgcgtgctgaagctggtgcgcttcctgccggcgctgcagcggcagctggtggtgctcatgaagaccatggacaacgtggccaccttctgcatgctgctcatgctcttcatcttcatcttcagcatcctgggcatgcatctcttcggctgcaagtttgcctccgagcgggatggggacaccctgccagaccggaagaattttgactccttgctctgggccatcgtcactgtctttcagatcctcacccaggaggactggaacaaagtcctgtacaatggtatggcctccacgtcatcctgggcagccctttacttcattgccctcatgaccttcggcaactacgtgctcttcaatttgctggtcgctattctggtggagggcttccaggcggaggaaatcagcaaacgggaagatgcgagtggacagttaagctgtattcagctgcctgtcgactcccaggggggagatgccaacaagtccgaatcagagcccgatttcttctcacccagcctggatggtgatggggacaggaagaagtgcttggccttggtgtccctgggagagcatccggagctgcggaagagcctgctgccgcctctcatcatccacacggccgccacacccatgtcgctgcccaagagcaccagcacgggcctgggcgaggcgctgggccccatgtcgcgccgcaccagcagcagcgggtcggcggagcccggggcggcccacgagatgaagtcaccgcccagtgctcgcagctccccgcacagcccctggagcgctgcaagcagctggaccagcaggcgctccagccggaacagcctcggccgtgcccccagcctgaagcggagaagcccaagtggggagcggcggtccctgttgtcaggagaaggccaggagagccaggatgaggaggagagctcagaagaggagcgggccagccccgcgggcagcgaccgtcgccacagggagtccctggagcgggaggccaagagttcctttgacctgccagacacactgcaggtgccagggctgcaccgcactgccagtggccgaggctctgcttctgagcaccaggactgcaatggcaagtcggcttcggggcgtctggcccgggccctgcggcccgacgaccccccactggatggggatgacgcggatgacgagggcaacctgagcaaaggggaacgggtccgtgcgtggatccgagcccgactccctgcctgctgcctcgagcgagactcctggtcagcctacatcttccctcctcagtccaggttccgcctcctgtgtcaccgcatcatcacccacaagatgtttgaccacgtggtcctcgtcatcatcttccttaactgcatcaccatcgccatggagcgccccaaaattgacccccacagcgctgaacgcatcttcctgaccctctccaattacatcttcaccgcagtctttctggctgaaatgacagtgaaggtggtggcactgggctggtgcttcggggagcaggcgtacctgcgcagcagctggaacgtgctggacgggctgttggtgctcatctccgtcatcgacattctggtgtccatggtctctgacagcggcaccaagatcctgggcatgctgagggtgctgcggctgctgcggaccctgcgcccgctcagggtgatcagccgggcgcaggggctgaagctggtggtggagacgctgatgtcctcactgaaacccatcggcaacattgtagtcatctgctgtgccttcttcatcattttcggcatcttgggggtgcagctcttcaaagggaagtttttcgtgtgccagggcgaggataccaggaacatcaccaataaatcggactgtgctgaggccagttaccggtgggtccggcacaagtacaactttgacaaccttggccaggctctgatgtccctgttcgttttggcctccaaggacggctgggtggacatcatgtatgatgggctggatgctgtgggcgtggaccagcagcccatcatgaaccacaacccctggatgctgctgtacttcatctcgttcctgctcattgtggccttctttgtcctgaacatgtttgtgggtgtggtggtggagaacttccacaagtgtcggcagcaccaggaggaagaggaggcccggcggcgggaggagaagcgtctacgaagactggagaaaaagagaaggaatctaatgctggacgatgtaattgcttccggcagctcagccagcgctgcgtcagaagcccagtgcaaaccttactactccgactactcccgcttccggctcctcgtccaccacttgtgcaccagccactacctggatctcttcatcacaggtgtcatcgggttgaacgtggtcaccatggccatggagcactaccagcagccccagattctggatgaagctctgaagatctgcaactacatcttcactgtcatctttgttttggagtcagttttcaaacttgtggcctttggtttccgtcggttcttccaggacaggtggaaccagctggacctggccattgtgctgctgtccatcatgggcatcacgctggaggaaatcgaggtcaacgcctcactgcccatcaaccccaccatcatccgcatcatgagggtactgcgcattgcccgagtgctgaagctgctgaagatggctgtgggcatgcgggcgctgctggacacggtgatgcaggccctgccccaggtggggaacctgggacttctcttcatgttgttgtttttcatctttgcagctctgggcgtggagctctttggagacctggagtgtgacgagacacacccctgtgagggcctgggccggcatgccacctttcggaactttggcatggccttcctaaccctcttccgagtctccacaggcgacaactggaacggcattatgaaggacaccctccgggactgtgaccaggagtccacctgctacaacacggtcatctcgcccatctactttgtgtccttcgtgctgacggcccagttcgtgctggtcaacgtggtgatcgctgtgctgatgaagcacctggaggagagcaacaaggaggccaaggaggaggctgagctggaggctgagctggagctggagatgaagaccctcagcccccagccccactcgccgctgggcagccccttcctctggcctggggtcgagggccccgacagccccgacagccccaagcctggggccctgcacccagcggcccatgcgagatcagcctcccacttttccctggagcaccccacggtacagccccaccccacggagctgccaggaccagacttactgaccgtgcggaagtctggggtcagccgaacgcactctctgcccaatgacagctacatgtgtcggcacgggagcattgccgaggggcccctgggacagaggggctgggggctccccaaagctcagtcaggctccgtcttgtccgttcactcccagccagcagacaccagctacatcctgcagcttcccaaagatgcacctcatctgcttcagccctacagcaccccaacctggggcaccatccccaaactgcccccaccaggacgctcccctttggctcaaaggccactcaggcgccaggcagcaataaggactgactccttggacgttcagggcctgggcagccgggaagacctgctggcagaggtgagtgggccctccctgcccctggcccgggcctactctttctggggccagtcgagcacccaggcgcagcagcactcccgcagccacagcaacatctccaagcacatgcccccgcgagccccttgcccaggcccacaacccaactgggacaagggccctccagagaccagaagcagcttagagttggacacggagctgagctggatttcaggagacctcctgccccctggcggccaggaggagcccccatccccacgggacctgaagaagtgctacagcgtggaggcccagagctgccagcgccggcccacgtcctggctggatgagcagaggagacactctatcgccgtcagctgcctggacagtggctcccaaccccacctgggcacagacccctctaaccttgggggccagcctcttggggggcctgggagccgacccaagaaaaaactcagcccgcccagtatctccatagacccccccgagagccaaggccctcggcccccgcccagccctggcgtctgcctccggaggagggctccatccagcgactccaaggatcccttggcctccggcccccctgacagcatggctgcctcgccctccccaaagaaagatgtgctgagtctctccggtttatcctctgacccggcagacctggacccctgagtcctgccccactttcccactcacctttctccactgggtgccaagtcctagctcctcctcctgggctatattcctgacaaaagttccatatagacaccaaggaggcggaggcgctcctccctgcctcagtggctctgggtacctgcaagcagaacttccaaagagagttaaaagcagcagccctggcaactctggctccaggcagaaggagaggcccggtgcagctgaggttcccaacaccaggagctgttgggagaaagcaatacgtctgtgcagaatctctatgaatattctattttattaaattaattgaatctagtatatgcgggatgtacgacattttgtgactgaagagacttgtttccttctacttttatgtgtctcagaatatttttgaggcgaaggcgtctgtctcttggctattttaacctaaaataacagtctagttataatccctcttcttgcaaagcacaagctgggaccgcgagcgcattgcagccccaacggtggcccatcttcagcggagagcgagaaccattttggaaactgtaatgtaacttattttctcctttaacctcgtcatcattttctgtagggaaaaaaaaagaaaaagaaaaaatgagattttacaaatgaaatggaatctttttatatatacatacatacatatctatatatatatatataaaataaagtaattttcctaaataaaaa

SEQ ID NO: 30 - DNA, 8299 bp, Macaca fascicularis
  source 1..8299: mol_type = genomic DNA
tttttatttaggaaaattactttattttatatatatatatatagatatgtatgtatgtatatataaaaagattccatttcatttgtaaaatctcattttttctttttctttttttttccctacagaaaatgatgacgaggttaaaggagaaaataagttacattacagtttccaaaatggttctcgctctccgctgaagatgggccaccgttggggctgcaatgcgctcgcggtcccagcttgtgctttgcaagaagagggattataactagactgttattttaggttaaaatagccaagagacagacgccttcgcctcaaaaatattctgagacacataaaagtagaaggaaacaagtctcttcagtcacaaaatgtcgtacatcccgcatatactagattcaattaatttaataaaatagaatattcatagagattctgcacagacgtattgctttctcccaacagctcctggtgttgggaacctcagctgcaccgggcctctccttctgcctggagccagagttgccagggctgctgcttttaactctctttggaagttctgcttgcaggtacccagagccactgaggcagggaggagcgcctccgcctccttggtgtctatatggaacttttgtcaggaatatagcccaggaggaggagctaggacttggcacccagtggagaaaggtgagtgggaaagtggggcaggactcaggggtccaggtctgccgggtcagaggataaaccggagagactcagcacatctttctttggggagggcgaggcagccatgctgtcaggggggccggaggccaagggatccttggagtcgctggatggagccctcctccggaggcagacgccagggctgggcgggggccgagggccttggctctcgggggggtctatggagatactgggcgggctgagttttttcttgggtcggctcccaggccccccaagaggctggcccccaaggttagaggggtctgtgcccaggtggggttgggagccactgtccaggcagctgacggcgatagagtgtctcctctgctcatccagccaggacgtgggccggcgctggcagctctgggcctccacgctgtagcacttcttcaggtcccgtggggatgggggctcctcctggccgccagggggcaggaggtctcctgaaatccagctcagctccgtgtccaactctaagctgcttctggtctctggagggcccttgtcccagttgggttgtgggcctgggcaaggggctcgcgggggcatgtgcttggagatgttgctgtggctgcgggagtgctgctgcgcctgggtgctcgactggccccagaaagagtaggcccgggccaggggcagggagggcccactcacctctgccagcaggtcttcccggctgcccaggccctgaacgtccaaggagtcagtccttattgctgcctggcgcctgagtggcctttgagccaaaggggagcgtcctggtgggggcagtttggggatggtgccccaggttggggtgctgtagggctgaagcagatgaggtgcatctttgggaagctgcaggatgtagctggtgtctgctggctgggagtgaacggacaagacggagcctgactgagctttggggagcccccagcccctctgtcccaggggcccctcggcaatgctcccgtgccgacacatgtagctgtcattgggcagagagtgcgttcggctgaccccagacttccgcacggtcagtaagtctggtcctggcagctccgtggggtggggctgtaccgtggggtgctccagggaaaagtgggaggctgatctcgcatgggccgctgggtgcagggccccaggcttggggctgtcggggctgtcggggccctcgaccccaggccagaggaaggggctgcccagcggcgagtggggctgggggctgagggtcttcatctccagctccagctcagcctccagctcagcctcctccttggcctccttgttgctctcctccaggtgcttcatcagcacagcgatcaccacgttgaccagcacgaactgggccgtcagcacgaaggacacaaagtagatgggcgagatgaccgtgttgtagcaggtggactcctggtcacagtcccggagggtgtccttcataatgccgttccagttgtcgcctgtggagactcggaagagggttaggaaggccatgccaaagttccgaaaggtggcatgccggcccaggccctcacaggggtgtgtctcgtcacactccaggtctccaaagagctccacgcccagagctgcaaagatgaaaaacaacaacatgaagagaagtcccaggttccccacctggggcagggcctgcatcaccgtgtccagcagcgcccgcatgcccacagccatcttcagcagcttcagcactcgggcaatgcgcagtaccctcatgatgcggatgatggtggggttgatgggcagtgaggcgttgacctcgatttcctccagcgtgatgcccatgatggacagcagcacaatggccaggtccagctggttccacctgtcctggaagaaccgacggaaaccaaaggccacaagtttgaaaactgactccaaaacaaagatgacagtgaagatgtagttgcagatcttcagagcttcatccagaatctggggctgctggtagtgctccatggccatggtgaccacgttcaacccgatgacacctgtgatgaagagatccaggtagtggctggtgcacaagtggtggacgaggagccggaagcgggagtagtcggagtagtaaggtttgcactgggcttctgacgcagcgctggctgagctgccggaagcaattacatcgtccagcattagattccttctctttttctccagtcttcgtagacgcttctcctcccgccgccgggcctcctcttcctcctggtgctgccgacacttgtggaagttctccaccaccacacccacaaacatgttcaggacaaagaaggccacaatgagcaggaacgagatgaagtacagcagcatccaggggttgtggttcatgatgggctgctggtccacgcccacagcatccagcccatcatacatgatgtccacccagccgtccttggaggccaaaacgaacagggacatcagagcctggccaaggttgtcaaagttgtacttgtgccggacccaccggtaactggcctcagcacagtccgatttattggtgatgttcctggtatcctcgccctggcacacgaaaaacttccctttgaagagctgcacccccaagatgccgaaaatgatgaagaaggcacagcagatgactacaatgttgccgatgggtttcagtgaggacatcagcgtctccaccaccagcttcagcccctgcgcccggctgatcaccctgagcgggcgcagggtccgcagcagccgcagcaccctcagcatgcccaggatcttggtgccgctgtcagagaccatggacaccagaatgtcgatgacggagatgagcaccaacagcccgtccagcacgttccagctgctgcgcaggtacgcctgctccccgaagcaccagcccagtgccaccaccttcactgtcatttcagccagaaagactgcggtgaagatgtaattggagagggtcaggaagatgcgttcagcgctgtgggggtcaattttggggcgctccatggcgatggtgatgcagttaaggaagatgatgacgaggaccacgtggtcaaacatcttgtgggtgatgatgcggtgacacaggaggcggaacctggactgaggagggaagatgtaggctgaccaggagtctcgctcgaggcagcaggcagggagtcgggctcggatccacgcacggacccgttcccctttgctcaggttgccctcgtcatccgcgtcatccccatccagtggggggtcgtcgggccgcagggcccgggccagacgccccgaagccgacttgccattgcagtcctggtgctcagaagcagagcctcggccactggcagtgcggtgcagccctggcacctgcagtgtgtctggcaggtcaaaggaactcttggcctcccgctccagggactccctgtggcgacggtcgctgcccgcggggctggcccgctcctcttctgagctctcctcctcatcctggctctcctggccttctcctgacaacagggaccgccgctccccacttgggcttctccgcttcaggctgggggcacggccgaggctgttccggctggagcgcctgctggtccagctgcttgcagcgctccaggggctgtgcggggagctgcgagcactgggcggtgacttcatctcgtgggccgccccgggctccgccgacccgctgctgctggtgcggcgcgacatggggcccagcgcctcgcccaggcccgtgctggtgctcttgggcagcgacatgggtgtggcggccgtgtggatgatgagaggcggcagcaggctcttccgcagctccggatgctctcccagggacaccaaggccaagcacttcttcctgtccccatcaccatccaggctgggtgagaagaaatcgggctctgattcggacttgttggcatctcccccctgggagtcgacaggcagctgaatacagcttaactgtccactcgcatcttcccgtttgctgatttcctccgcctggaagccctccaccagaatagcgaccagcaaattgaagagcacgtagttgccgaaggtcatgagggcaatgaagtaaagggctgcccaggatgacgtggaggccataccattgtacaggactttgttccagtcctcctgggtgaggatctgaaagacagtgacgatggcccagagcaaggagtcaaaattcttccggtctggcagggtgtccccatcccgctcggaggcaaacttgcagccgaagagatgcatgcccaggatgctgaagatgaagatgaagagcatgagcagcatgcagaaggtggccacgttgtccatggtcttcatgagcaccaccagctgccgctgcagcgccggcaggaagcgcaccagcttcagcacgcgcatcaggcggaaggtccgcagcaccgacaggccgcccccctgctggcccacgatctcccacacgctgatgaccacaatgacaccgtcgaagatgttgtagggattcttgatgtagccaaagggaccatacacgagcagcttcagcagcatctccagggcaaagaggctggtgaagacgatgttgctgatttctagggcgttggtaagctcctcgggctgctcatggtattcgatgcccatgctgagtgtattgaccaggatggcaatcatgattccccggccaaagtacttgctgtccacaatctttcggaaggtgtcacagattagcctccagaaggccagcacagagctgggctctgcatctgggcccaggctccgttgccgccggctgtgggggtcccggaggtcactgtgctgggcatcctgtgtgaactcataaaccgcctcgctgtctgagtcaggcatttcacggtcggcgagctctacctcccctgcccccgcccgggcacagtaggggcagctgtctggaccagaggctccactgtctgccttcaagcaagggctggagatcttgcaagagctttggcaggcacctgtactctgtgtctccagcagcttgtgcatggagctgtagggcccaggtgggatgttgaggctggtgagggttgtgggcccagagctggcagccacctctactagtgccttctctttcagcgtctccggtggagggctggtgtgcacggtgggatacaccttcccgctgcccacagtcctgccggatgcctcagatggggacctgggagggggtgcctggcagcggactggctctaagtggcagtcggcatggtagaagctgtgcacagactctgcgccacctggggggcccccggagagggcaggcgtcgagggtggtggcagcatgagccggcgggacccattggcatccctgtcctggatctctgggctggcccgggggaccctgagcgttccattgcccaggtggtagtggtggtgatggtggtggtggtggtgcaccaggtggtggacggacaggcggcggtgagagcgagagcagctgctgctgggctgggtctcctggcccccaaggggtgctgggctgctgagcagcccagcccgcacacctgctgcccgagagacctgagccagcctgcgggctgccttacgaaggatgtacaccaggtacttgagcagctcctcatagcagctgccgggctcagagaagctagccagggtgctggcgttggacaggaaccgcacacgctgctcccgcatcagctggctttccctctgcttggtctctgagaactgcgtggcaatcaccaccaggcacaggttgatcatgaagaaggagcccacgatgatgaggaggatgaagtagatgaaattgtagaaggaatgagcatccatcacaaagtacatgatgtcgacccagccctccagtgtgatgacctggaagatggcgatccaggcatagccaatgttgtcaaagttgatggcgcccttgaaggggttgtgctcccccgctgagcagttggtgtagtactggttccagttgacacaggtggtattgctggagctgttgtaggcctcatagtccagaccacaaggtgggccaccgcccccctccccacgcaacgtgggcacgcttctgcaggaccgcatgccgttctcgcgtggctgggagcagatgaaggggctctcatcctcattctctgtctggtaatagcgctccaggtccacgcttagggggaggctaaaattctcaggtaggaagcatcgattccgaagcagccctgcccacagctggacgccgacgatgccaaagatgaagaagacgaagaagcagagcagcaggacgttgcccagcatgggcagtgtgtccagcaacaacgtgacaaggatgcgcatgctgggcacccggttaatggccctgagcggtcgcagcacacggactgtcctgacagctgagaagctgacgttctgcaggtccagcgagtactccaacatccctgcaatgacgatgaaaaagtcaagccggttccaagtgtctcccaggtaacactttttcccaaagatgcccaaggccaccatcttcaccaccatctccacggcgaagaaggcaaagatgaagtcatcaaaggcctgcaggatccggcagcgctgggagtcacaggcgatgtcctcgcacggccggaacatgcccagggtcacgcagttgagaaggatgaccaacatgctgatacgctcaaaccaggggttacagaccgtgcggagacaccagctccgcgggcggctgtcctggctcaagtagaagaaaaccaccggggccagcgccgggtacggcagtccctccgcctcggagtccgcgctgcccgggtccttttctgctgaccccggcccccgccggcccccggcccccgacaggtcgttgagccgcatgaagctccggggctgtcccgactcctctgcgcccgctccatcctcctcctcgtccatcctctggccagccggggccccgggcggtccggagaggggcaagcggcgcccctccgaggagatgtcctcacgcaacccgggagccccggcgggggcacatctggggggctctagggcgcaagctgagcccccgggagggccagttcagtccagctccccctgcccgcaggggcatgctgcccgcggggcgccggggcgcagggaaaccccgcccggcgcaagtcccgcttcccctgcgcccctggggctccccgggccagccggccggctccccctcactttgttccggcttcttcgcttcgcgcccaggctccggttgccggattcggcgctaccttcggcgaagcggccccgagagggcgagcgaaaaggggggcagcggcgaagggcgggggtccggggaggggcgccccctcttcccgcggcgcagctggagccggatctaaggggtcagcatcgtcccggctccgcgccaggcggcgggggaggggaggagggatctctttaggggtgggcttggagggggtgggggcggctccttcccccgccccgcggcgggctcacggtccgggaggggcggggagacggtggggggcagtcccgggcgggagtggaggcggagatgccgccgccgcagccgccgcggtggctgccgctgccgtagctgtcgccggcgccactgcctcctcctccggccgagacgcggagcgagcgagcgaaagcggcggcg

SEQ ID NO: 31 - DNA, 2324 bp, Homo sapiens
  source 1..2324: mol_type = genomic DNA
attccagcgcctgacagccaggaccccaggcagcagcgagtgacaggacgtctggaccggcgcgccgctagcagctctgccgggccgcggcggtgatcgatggggagcggctggagcggacccagcgagtgagggcgcacagccgggacgccgaggcggcgggcgggagacccgcaccagcgcagccggccctcggcgggacgtgacgcagcgcccggggcgcgggtttgatatttgacaaattgatctaaaatggctgggtttttatctgaataactcactgatgccatcccagaaagtcggcaccaggtgtatttgatatagtgtttgcaacaaattcgacccaggtgatcaaaatgattctcaactcttctactgaagatggtattaaaagaatccaagatgattgtcccaaagctggaaggcataattacatatttgtcatgattcctactttatacagtatcatctttgtggtgggaatatttggaaacagcttggtggtgatagtcatttacttttatatgaagctgaagactgtggccagtgtttttcttttgaatttagcactggctgacttatgctttttactgactttgccactatgggctgtctacacagctatggaataccgctggccctttggcaattacctatgtaagattgcttcagccagcgtcagtttcaacctgtacgctagtgtgtttctactcacgtgtctcagcattgatcgatacctggctattgttcacccaatgaagtcccgccttcgacgcacaatgcttgtagccaaagtcacctgcatcatcatttggctgctggcaggcttggccagtttgccagctataatccatcgaaatgtatttttcattgagaacaccaatattacagtttgtgctttccattatgagtcccaaaattcaaccctcccgatagggctgggcctgaccaaaaatatactgggtttcctgtttccttttctgatcattcttacaagttatactcttatttggaaggccctaaagaaggcttatgaaattcagaagaacaaaccaagaaatgatgatatttttaagataattatggcaattgtgcttttctttttcttttcctggattccccaccaaatattcacttttctggatgtattgattcaactaggcatcatacgtgactgtagaattgcagatattgtggacacggccatgcctatcaccatttgtatagcttattttaacaattgcctgaatcctcttttttatggctttctggggaaaaaatttaaaagatattttctccagcttctaaaatatattcccccaaaagccaaatcccactcaaacctttcaacaaaaatgagcacgctttcctaccgcccctcagataatgtaagctcatccaccaagaagcctgcaccatgttttgaggttgagtgacatgttcgaaacctgtccataaagtaattttgtgaaagaaggagcaagagaacattcctctgcagcacttcactaccaaatgagcattagctacttttcagaattgaaggagaaaatgcattatgtggactgaaccgacttttctaaagctctgaacaaaagcttttctttccttttgcaacaagacaaagcaaagccacattttgcattagacagatgacggctgctcgaagaacaatgtcagaaactcgatgaatgtgttgatttgagaaattttactgacagaaatgcaatctccctagcctgcttttgtcctgttattttttatttccacataaaggtatttagaatatattaaatcgttagaggagcaacaggagatgagagttccagattgttctgtccagtttccaaagggcagtaaagttttcgtgccggttttcagctattagcaactgtgctacacttgcacctggtactgcacattttgtacaaagatatgctaagcagtagtcgtcaagttgcagatctttttgtgaaattcaacctgtgtcttataggtttccactgccaaaacaatgcccgtaagatggcttatttgtataatggtgttactaaagtcacatataaaagttaaactacttgtaaaggtgctgcactggtcccaagtagtagtgtcttcctagtatattagtttgatttaatatctgagaagtgtatatagtttgtggtaaaaagattatatatcataaagtatgccttcctgtttaaaaaaagtatatattctacacatatatgtatatgtatatctatatctctaaactgctgttaattgattaaaatctggcaaagttatatttactttaaaataaaataattttattgcaa

SEQ ID NO: 32 - DNA, 2324 bp, Homo sapiens
  source 1..2324: mol_type = genomic DNA
ttgcaataaaattattttattttaaagtaaatataactttgccagattttaatcaattaacagcagtttagagatatagatatacatatacatatatgtgtagaatatatactttttttaaacaggaaggcatactttatgatatataatctttttaccacaaactatatacacttctcagatattaaatcaaactaatatactaggaagacactactacttgggaccagtgcagcacctttacaagtagtttaacttttatatgtgactttagtaacaccattatacaaataagccatcttacgggcattgttttggcagtggaaacctataagacacaggttgaatttcacaaaaagatctgcaacttgacgactactgcttagcatatctttgtacaaaatgtgcagtaccaggtgcaagtgtagcacagttgctaatagctgaaaaccggcacgaaaactttactgccctttggaaactggacagaacaatctggaactctcatctcctgttgctcctctaacgatttaatatattctaaatacctttatgtggaaataaaaaataacaggacaaaagcaggctagggagattgcatttctgtcagtaaaatttctcaaatcaacacattcatcgagtttctgacattgttcttcgagcagccgtcatctgtctaatgcaaaatgtggctttgctttgtcttgttgcaaaaggaaagaaaagcttttgttcagagctttagaaaagtcggttcagtccacataatgcattttctccttcaattctgaaaagtagctaatgctcatttggtagtgaagtgctgcagaggaatgttctcttgctccttctttcacaaaattactttatggacaggtttcgaacatgtcactcaacctcaaaacatggtgcaggcttcttggtggatgagcttacattatctgaggggcggtaggaaagcgtgctcatttttgttgaaaggtttgagtgggatttggcttttgggggaatatattttagaagctggagaaaatatcttttaaattttttccccagaaagccataaaaaagaggattcaggcaattgttaaaataagctatacaaatggtgataggcatggccgtgtccacaatatctgcaattctacagtcacgtatgatgcctagttgaatcaatacatccagaaaagtgaatatttggtggggaatccaggaaaagaaaaagaaaagcacaattgccataattatcttaaaaatatcatcatttcttggtttgttcttctgaatttcataagccttctttagggccttccaaataagagtataacttgtaagaatgatcagaaaaggaaacaggaaacccagtatatttttggtcaggcccagccctatcgggagggttgaattttgggactcataatggaaagcacaaactgtaatattggtgttctcaatgaaaaatacatttcgatggattatagctggcaaactggccaagcctgccagcagccaaatgatgatgcaggtgactttggctacaagcattgtgcgtcgaaggcgggacttcattgggtgaacaatagccaggtatcgatcaatgctgagacacgtgagtagaaacacactagcgtacaggttgaaactgacgctggctgaagcaatcttacataggtaattgccaaagggccagcggtattccatagctgtgtagacagcccatagtggcaaagtcagtaaaaagcataagtcagccagtgctaaattcaaaagaaaaacactggccacagtcttcagcttcatataaaagtaaatgactatcaccaccaagctgtttccaaatattcccaccacaaagatgatactgtataaagtaggaatcatgacaaatatgtaattatgccttccagctttgggacaatcatcttggattcttttaataccatcttcagtagaagagttgagaatcattttgatcacctgggtcgaatttgttgcaaacactatatcaaatacacctggtgccgactttctgggatggcatcagtgagttattcagataaaaacccagccattttagatcaatttgtcaaatatcaaacccgcgccccgggcgctgcgtcacgtcccgccgagggccggctgcgctggtgcgggtctcccgcccgccgcctcggcgtcccggctgtgcgccctcactcgctgggtccgctccagccgctccccatcgatcaccgccgcggcccggcagagctgctagcggcgcgccggtccagacgtcctgtcactcgctgctgcctggggtcctggctgtcaggcgctggaat

SEQ ID NO: 33 - DNA, 2284 bp, Mus musculus
  source 1..2284: mol_type = genomic DNA
gaggagtgcaaagccttagggttggaacctgcggagtagcaacgtccccctaggctataaatatggaagtgcctcgctgctgatcgccaggcagttgggagggactggatgatgctgtctggccggagaggactcgaggcttgagtcctggtccacgggtcgctggggtgggtcgctggggtggctgaagccagtaccagctctgcggctctcccagctctgctgctctcccggacttaacatatgaaagattggtataaaatggctggcattttgtctggataactcacagcaaccctccaagaaagccatcaccagatcaagtgcattttgaacagtgtctgagaccaactcaacccagaaaagcaaaatggcccttaactcttctactgaagatggcatcaaaagaattcaagatgactgccccagggctggcaggcacagttacatatttgtcatgatccctactctctacagcatcatctttgtggtgggaatatttggaaacagcttggtggtgatcgtcatctacttttacatgaagctgaagactgtggccagtgtctttcttctaaatctcgccctggctgacttatgctttttgctgactttgcccctgtgggctgtctataccgctatggaataccgctggcccttcggcaatcacctatgtaagatcgcttcggccagcgtcagtttcaacctctacgccagcgtgttcctgctcacgtgtctcagcatcgatcgctacctggccattgtccacccgatgaagtctcgcctccgccgcacgatgctggtggccaaagtcacctgcatcatcatctggctgatggctggcttggccagtttgccagccgtcatccaccgaaatgtgtatttcattgagaacaccaatatcactgtttgcgcttttcattacgagtcccggaattcaacgctccccataggactgggcctaaccaagaacatcctgggcttcctgttccctttcctaatcattcttaccagctatactcttatatggaaagctctaaagaaggcttatgaaattcagaagaacaagccaagaaatgatgacatctttaggataattatggcgattgtgcttttcttcttcttctcctgggtcccccaccaaatattcacattcctggatgtgctgattcagctgggcgtcatccatgactgtaaaattgccgacatcgtggacactgccatgcccataaccatctgcatagcgtattttaacaactgcctgaaccctctgttttacggctttctggggaaaaaatttaaaaagtatttcctccagctcctgaaatatattcccccaaaggccaagtcgcactcaagcctgtctacgaaaatgagcacgctctcctaccgcccctcagataacatgagctcagccgccaaaaagcctgcgtcttgttctgaggtggagtgacaggttcaaagcttgctggcaatgtaatgccctgacagaaaccagggcagcatcggactaaatggctcacgaccaaaggaccagtccccccccccccctcaggatctaagcagaaaatgcgttcaacagactgtagatattgtctgaagctctgagagaaagctttgaagaagtaattatgcaaagctgtcttacattaatagatgatggctgccccaaggacaagtcaggagctggatggatttgtgggtttaaaacggtttgctggcagacacgcaatcgcagcggtctccttttgatttccacacataggtatgtagcatgtgctaaatatttagacaagaaacaagaaatggaagtcgaggttacttgttctgctcagttccccaagggcaaggaaccttgtttgtccctttagtcattagcaatggagacccacgtgtccctgttactacacatactttgaaaagatctgctaacctggagtcatcaagtttcaggagccctttgtaaaattcagccagtgtcttagaaacctgtactgtccccaaacaatgccagttagtggtgtatttatgtagcagtgtaagcaaagttacacatcaaagttgcactgcttgtaccaaccgtgacatagtaggtatatcagctttagttcacatctgagaaacataaacagtcggtggtgaatagactacatatcatacaatctgccttgttctctaaaagtatatatcctccacatatatgtacatatgtatctctaagctgtcatttgatgaagttttggcaatgtatgtttacctctaaataaagtaattttattgtaacgta

SEQ ID NO: 34 - DNA, 2284 bp, Mus musculus
  source 1..2284: mol_type = genomic DNA
tacgttacaataaaattactttatttagaggtaaacatacattgccaaaacttcatcaaatgacagcttagagatacatatgtacatatatgtggaggatatatacttttagagaacaaggcagattgtatgatatgtagtctattcaccaccgactgtttatgtttctcagatgtgaactaaagctgatatacctactatgtcacggttggtacaagcagtgcaactttgatgtgtaactttgcttacactgctacataaatacaccactaactggcattgtttggggacagtacaggtttctaagacactggctgaattttacaaagggctcctgaaacttgatgactccaggttagcagatcttttcaaagtatgtgtagtaacagggacacgtgggtctccattgctaatgactaaagggacaaacaaggttccttgcccttggggaactgagcagaacaagtaacctcgacttccatttcttgtttcttgtctaaatatttagcacatgctacatacctatgtgtggaaatcaaaaggagaccgctgcgattgcgtgtctgccagcaaaccgttttaaacccacaaatccatccagctcctgacttgtccttggggcagccatcatctattaatgtaagacagctttgcataattacttcttcaaagctttctctcagagcttcagacaatatctacagtctgttgaacgcattttctgcttagatcctgagggggggggggggactggtcctttggtcgtgagccatttagtccgatgctgccctggtttctgtcagggcattacattgccagcaagctttgaacctgtcactccacctcagaacaagacgcaggctttttggcggctgagctcatgttatctgaggggcggtaggagagcgtgctcattttcgtagacaggcttgagtgcgacttggcctttgggggaatatatttcaggagctggaggaaatactttttaaattttttccccagaaagccgtaaaacagagggttcaggcagttgttaaaatacgctatgcagatggttatgggcatggcagtgtccacgatgtcggcaattttacagtcatggatgacgcccagctgaatcagcacatccaggaatgtgaatatttggtgggggacccaggagaagaagaagaaaagcacaatcgccataattatcctaaagatgtcatcatttcttggcttgttcttctgaatttcataagccttctttagagctttccatataagagtatagctggtaagaatgattaggaaagggaacaggaagcccaggatgttcttggttaggcccagtcctatggggagcgttgaattccgggactcgtaatgaaaagcgcaaacagtgatattggtgttctcaatgaaatacacatttcggtggatgacggctggcaaactggccaagccagccatcagccagatgatgatgcaggtgactttggccaccagcatcgtgcggcggaggcgagacttcatcgggtggacaatggccaggtagcgatcgatgctgagacacgtgagcaggaacacgctggcgtagaggttgaaactgacgctggccgaagcgatcttacataggtgattgccgaagggccagcggtattccatagcggtatagacagcccacaggggcaaagtcagcaaaaagcataagtcagccagggcgagatttagaagaaagacactggccacagtcttcagcttcatgtaaaagtagatgacgatcaccaccaagctgtttccaaatattcccaccacaaagatgatgctgtagagagtagggatcatgacaaatatgtaactgtgcctgccagccctggggcagtcatcttgaattcttttgatgccatcttcagtagaagagttaagggccattttgcttttctgggttgagttggtctcagacactgttcaaaatgcacttgatctggtgatggctttcttggagggttgctgtgagttatccagacaaaatgccagccattttataccaatctttcatatgttaagtccgggagagcagcagagctgggagagccgcagagctggtactggcttcagccaccccagcgacccaccccagcgacccgtggaccaggactcaagcctcgagtcctctccggccagacagcatcatccagtccctcccaactgcctggcgatcagcagcgaggcacttccatatttatagcctagggggacgttgctactccgcaggttccaaccctaaggctttgcactcctc

SEQ ID NO: 35 - DNA, 2208 bp, Rattus norvegicus
  source 1..2208: mol_type = genomic DNA
gggactggatgatgctgtcccgctggagaggattcgtggcttgagtcctgttccacccgatcaccgatcaccggggtggccgaggccggtaccagcgctgcggctctctcagctctgccacattccctgagttaacatatgagagattggtataaaatggctggcattttgtctggataaatcacacaaccctcccagaaagtgatcaccaggtcaagtggatttcgaatagtgtctgagaccaactcaacccagaaaaacaaaatggcccttaactcttctgctgaagatggtatcaaaagaatccaagatgactgccccaaggctggcaggcacagttacatatttgtcatgatccctaccctctacagcatcatctttgtggtgggaatatttggaaacagcttggtggtgattgtcatttacttttacatgaagctgaagactgtggccagcgtctttcttctcaatctcgccttggctgacttatgctttttgctgactttgcccctgtgggcagtctataccgctatggagtaccgctggcccttcggcaatcacctatgtaagatcgcttcggccagcgtgagcttcaacctctacgccagtgtgttccttctcacgtgtctcagcatcgaccgctacctggccatcgtccacccaatgaagtctcgccttcgccgcacgatgctggtggccaaagtcacctgcatcatcatctggctgatggctggcttggccagtttgccagctgtcatccaccgaaatgtatacttcatcgagaacaccaatatcacagtgtgcgcgtttcattatgagtctcggaattcgacgctccccatagggctgggccttaccaagaatattctgggcttcttgttccctttccttatcattctcaccagctatacccttatttggaaagctctaaagaaggcttatgaaattcaaaagaacaaaccaagaaacgatgacatctttaggataattatggcgattgtgcttttcttcttcttttcctgggtcccccaccaaatattcactttcctggatgtgctgattcagctgggcgtcatccatgactgtaaaatttctgacatcgtggacactgccatgcccatcaccatctgcatagcgtattttaacaactgcctgaaccctctgttctacggctttctggggaagaaatttaaaaagtatttcctccagctcctgaaatatattcccccaaaggccaagtcccactcaagcctgtctacgaaaatgagcacgctttcttaccggccttcggataacatgagctcatcggccaaaaagcctgcgtcttgttttgaggtggagtgacaggttcaaagcacactggcaatgtaatgccctgacagaagccagggcagcctctgactaaatggcttacgaccaaaggaccattcaccctgcctcaggatctaagcagaaaatgcgctcatcagactgtagataatgactaaaactctgagagaagactttgaaggagtaaccaagcaaagccgtcttgcattaatagatgatggctagccaaaggaagagtcaggagctggatggattggtgggtctggaaaacagttcgctggcagaaatgcaatctcatcagtctccctttgctatgttccttttgatttccacacgtaggtatgtggcccatgctaaatatttaggcaagaaacaagagatggaaatcaaggtcacttgttctgttcaactcccaaagggcaaggaacctttgttgtccctgtagtcattagcagtggagacccacttgtcactgttactacacctatcgtgcaaagatttgctaatctgtagttatcaagtttcaggactcctttgtaaaattcagccagtgttttagaaacatgtactgtccccagacaatgctagccagtggtgtacttatgtagcagtgttacccaagtccacacatcaaagtcacactgctttaataacgtgacatactaggtacatctgcgttatttcgcatctgagaaatgtacacagtcagaggtgaatacactatattccatacagtctgccttgctctctaaaaatatatattctccacatacgtgaacatctttatctctaaactgtcatttgatgaaattttggcaatgtatgtttacctctaaataaagtaattttattgtaaaaaaaaaaaaaaaaaaaaaaaaa

SEQ ID NO: 36 - DNA, 2208 bp, Rattus norvegicus
  source 1..2208: mol_type = genomic DNA
tttttttttttttttttttttttttacaataaaattactttatttagaggtaaacatacattgccaaaatttcatcaaatgacagtttagagataaagatgttcacgtatgtggagaatatatatttttagagagcaaggcagactgtatggaatatagtgtattcacctctgactgtgtacatttctcagatgcgaaataacgcagatgtacctagtatgtcacgttattaaagcagtgtgactttgatgtgtggacttgggtaacactgctacataagtacaccactggctagcattgtctggggacagtacatgtttctaaaacactggctgaattttacaaaggagtcctgaaacttgataactacagattagcaaatctttgcacgataggtgtagtaacagtgacaagtgggtctccactgctaatgactacagggacaacaaaggttccttgccctttgggagttgaacagaacaagtgaccttgatttccatctcttgtttcttgcctaaatatttagcatgggccacatacctacgtgtggaaatcaaaaggaacatagcaaagggagactgatgagattgcatttctgccagcgaactgttttccagacccaccaatccatccagctcctgactcttcctttggctagccatcatctattaatgcaagacggctttgcttggttactccttcaaagtcttctctcagagttttagtcattatctacagtctgatgagcgcattttctgcttagatcctgaggcagggtgaatggtcctttggtcgtaagccatttagtcagaggctgccctggcttctgtcagggcattacattgccagtgtgctttgaacctgtcactccacctcaaaacaagacgcaggctttttggccgatgagctcatgttatccgaaggccggtaagaaagcgtgctcattttcgtagacaggcttgagtgggacttggcctttgggggaatatatttcaggagctggaggaaatactttttaaatttcttccccagaaagccgtagaacagagggttcaggcagttgttaaaatacgctatgcagatggtgatgggcatggcagtgtccacgatgtcagaaattttacagtcatggatgacgcccagctgaatcagcacatccaggaaagtgaatatttggtgggggacccaggaaaagaagaagaaaagcacaatcgccataattatcctaaagatgtcatcgtttcttggtttgttcttttgaatttcataagccttctttagagctttccaaataagggtatagctggtgagaatgataaggaaagggaacaagaagcccagaatattcttggtaaggcccagccctatggggagcgtcgaattccgagactcataatgaaacgcgcacactgtgatattggtgttctcgatgaagtatacatttcggtggatgacagctggcaaactggccaagccagccatcagccagatgatgatgcaggtgactttggccaccagcatcgtgcggcgaaggcgagacttcattgggtggacgatggccaggtagcggtcgatgctgagacacgtgagaaggaacacactggcgtagaggttgaagctcacgctggccgaagcgatcttacataggtgattgccgaagggccagcggtactccatagcggtatagactgcccacaggggcaaagtcagcaaaaagcataagtcagccaaggcgagattgagaagaaagacgctggccacagtcttcagcttcatgtaaaagtaaatgacaatcaccaccaagctgtttccaaatattcccaccacaaagatgatgctgtagagggtagggatcatgacaaatatgtaactgtgcctgccagccttggggcagtcatcttggattcttttgataccatcttcagcagaagagttaagggccattttgtttttctgggttgagttggtctcagacactattcgaaatccacttgacctggtgatcactttctgggagggttgtgtgatttatccagacaaaatgccagccattttataccaatctctcatatgttaactcagggaatgtggcagagctgagagagccgcagcgctggtaccggcctcggccaccccggtgatcggtgatcgggtggaacaggactcaagccacgaatcctctccagcgggacagcatcatccagtccc

SEQ ID NO: 37 - DNA, 2163 bp, Macaca mulatta
  source 1..2163: mol_type = genomic DNA
gacttcaggggtggggtgctaagtttcatgtcacggtgtcctaactgctggctctatactgggaagctctctgggaccaaggaaagagcgaccgtagttctggtcaacgcctgcccctggagctggccacacttcaccagatcaggtgcatttgatatagtgtttgtgacaaattcgacccaggagatcaaaatgattctcaactcttctaccgaagatggtattaaaagaatccaagacgattgtcccaaagctggaaggcataattacatatttgtcatgattcctactttatacagtatcatctttgtggtgggaatatttggaaacagcttggtggtgatagtcatttacttttacatgaagctgaagactgtggccagtgtttttcttttgaatttagcactggctgacttatgctttttactgactttgccactatgggctgtctacacagctatggaataccgctggccctttggcaattacctatgtaagattgcttcagccagcgtcagtttcaacctgtatgctagtgtgttcctactcacgtgtctcagcattgatcgatacctggctattgttcacccaatgaagtcccgccttcgacgcacaatgcttgtagccaaagtcacctgcatcgtcatttggctgctggcaggcttggccagtttgccagctataatccatcgaaatgtatttttcattgagaacaccaatattacagtttgtgctttccattatgagtcccaaaattcaacccttccgataggactgggcctgaccaaaaatatactgggtttcctgtttccttttctgatcattcttacaagttatactcttatttggaaggccctaaagaaggcttatgaaattcagaagaacaaaccaagaaatgatgatatttttaagataattatggcaattgtgcttttctttttcttttcctggattccccaccaaatattcacttttctggatgtattgattcaactaggcatcatacgtgactgtagaatttcagatattgtggacacagccatgcccatcaccatttgtatagcttattttaacaattgcctgaatcctcttttttatggctttctggggaaaaaatttaaaaaatattttctccagcttctaaaatacattcccccaaaagccaaatcccactcaaacctttcaacaaaaatgagcacgctttcctaccgcccctcagataatgcaagctcatccaccaagaagcctgcaccatgttttgaggttgagtgacatgttcgaaacctgtccataaagtaattttgtgaaagaaggagcaagagaacattcctcggcagcacttcactaccaaatgagcattagctgcttttcagaattgaaggagaaaatggattatgtggactgaactgacttttctaaagctctgaacaaaagcttttctttccctttgcaacaagacacagcaaagccacattttgcattagacagatgatggctgctcgaagaacaatgtcagaaactcattgaatgtgttgatttgagaaattttactgacagaaatgcaatctccctagtctgtttttgtcctgttatttttttatttccacataaaggtatttagaacatattaaattgttagaggagcaacaggaaatgagagttcaagattgttctgtccaatttccaaagggcagtaaagcttttgtgcctgtttttagctattagcaactgtgccacacttgcacctattactgcacattttgtacaaagatttgctaagcagtagttgtcaagtttcagatctttttgtgaaatgcaacctgtgtctcataggtttacactgccaaaacaatgcccgtaagatggcttatttgtataatggtgttactaaagtcacatataaaagttaaactacttgtaaaggtgctgcgcgggtcccaagtagtagtgtcttcctagtatattagtttgatttaatatctgagaagtgtatatagtttgtggtaaaaagattatatatcatgaagtatgccttcttgttttaaaaaagtatatattctacacatatatgtatatgtatatctatatctgaactgctgttaattgattaaaatttggcaaagttatatatactttaaaataaaataattttattgcaatgta

SEQ ID NO: 38 - DNA, 2163 bp, Macaca mulatta
  source 1..2163: mol_type = genomic DNA
tacattgcaataaaattattttattttaaagtatatataactttgccaaattttaatcaattaacagcagttcagatatagatatacatatacatatatgtgtagaatatatacttttttaaaacaagaaggcatacttcatgatatataatctttttaccacaaactatatacacttctcagatattaaatcaaactaatatactaggaagacactactacttgggacccgcgcagcacctttacaagtagtttaacttttatatgtgactttagtaacaccattatacaaataagccatcttacgggcattgttttggcagtgtaaacctatgagacacaggttgcatttcacaaaaagatctgaaacttgacaactactgcttagcaaatctttgtacaaaatgtgcagtaataggtgcaagtgtggcacagttgctaatagctaaaaacaggcacaaaagctttactgccctttggaaattggacagaacaatcttgaactctcatttcctgttgctcctctaacaatttaatatgttctaaatacctttatgtggaaataaaaaaataacaggacaaaaacagactagggagattgcatttctgtcagtaaaatttctcaaatcaacacattcaatgagtttctgacattgttcttcgagcagccatcatctgtctaatgcaaaatgtggctttgctgtgtcttgttgcaaagggaaagaaaagcttttgttcagagctttagaaaagtcagttcagtccacataatccattttctccttcaattctgaaaagcagctaatgctcatttggtagtgaagtgctgccgaggaatgttctcttgctccttctttcacaaaattactttatggacaggtttcgaacatgtcactcaacctcaaaacatggtgcaggcttcttggtggatgagcttgcattatctgaggggcggtaggaaagcgtgctcatttttgttgaaaggtttgagtgggatttggcttttgggggaatgtattttagaagctggagaaaatattttttaaattttttccccagaaagccataaaaaagaggattcaggcaattgttaaaataagctatacaaatggtgatgggcatggctgtgtccacaatatctgaaattctacagtcacgtatgatgcctagttgaatcaatacatccagaaaagtgaatatttggtggggaatccaggaaaagaaaaagaaaagcacaattgccataattatcttaaaaatatcatcatttcttggtttgttcttctgaatttcataagccttctttagggccttccaaataagagtataacttgtaagaatgatcagaaaaggaaacaggaaacccagtatatttttggtcaggcccagtcctatcggaagggttgaattttgggactcataatggaaagcacaaactgtaatattggtgttctcaatgaaaaatacatttcgatggattatagctggcaaactggccaagcctgccagcagccaaatgacgatgcaggtgactttggctacaagcattgtgcgtcgaaggcgggacttcattgggtgaacaatagccaggtatcgatcaatgctgagacacgtgagtaggaacacactagcatacaggttgaaactgacgctggctgaagcaatcttacataggtaattgccaaagggccagcggtattccatagctgtgtagacagcccatagtggcaaagtcagtaaaaagcataagtcagccagtgctaaattcaaaagaaaaacactggccacagtcttcagcttcatgtaaaagtaaatgactatcaccaccaagctgtttccaaatattcccaccacaaagatgatactgtataaagtaggaatcatgacaaatatgtaattatgccttccagctttgggacaatcgtcttggattcttttaataccatcttcggtagaagagttgagaatcattttgatctcctgggtcgaatttgtcacaaacactatatcaaatgcacctgatctggtgaagtgtggccagctccaggggcaggcgttgaccagaactacggtcgctctttccttggtcccagagagcttcccagtatagagccagcagttaggacaccgtgacatgaaacttagcaccccacccctgaagtc

SEQ ID NO: 39 - DNA, 2172 bp, Macaca fascicularis
  source 1..2172: mol_type = genomic DNA
ggcacgcttgggggacttcaggggtggggtgctaagtttcatgtcacggtgtcctaactgctggctctatactgggaagctctctgggaccaaggaaagagcgaccgtagttctggtcaacgcctgcccctggagctggccacacttcaccagatcaggtgcatttgatatagtgtttgtgacaaattcgacccaggagatcaaaatgattctcaactcttctaccgaagatggtattaaaagaatccaagacgattgtcccaaagctggaaggcataattacatatttgtcatgattcctactttatacagtatcatctttgtggtgggaatatttggaaacagcttggtggtgatagtcatttacttttacatgaagctgaagactgtggccagtgtttttcttttgaatttagcactggctgacttatgctttttactgactttgccactatgggctgtctacacagctatggaataccgctggccctttggcaattacctatgtaagattgcttcagccagcgtcagtttcaacctgtatgctagtgtgttcctactcacgtgtctcagcattgatcgatacctggctattgttcacccaatgaagtcccgccttcgacgcacaatgcttgtagccaaagtcacctgcatcgtcatttggctgctggcaggcttggccagtttgccagctataatccatcgaaatgtatttttcattgagaacaccaatattacagtttgtgctttccattatgagtcccaaaattcaacccttccgataggactgggcctgaccaaaaatatactgggtttcctgtttccttttctgatcattcttacaagttatactcttatttggaaggccctaaagaaggcttatgaaattcagaagaacaaaccaagaaatgatgatatttttaagataattatggcaattgtgcttttctttttcttttcctggattccccaccaaatattcacttttctggatgtattgattcaactaggcatcatacgtgactgtagaatttcagatattgtggacacagccatgcccatcaccatttgtatagcttattttaacaattgcctgaatcctcttttttatggctttctggggaaaaaatttaaaaaatattttctccagcttctaaaatacattcccccaaaagccaaatcccactcaaacctttcaacaaaaatgagcacgctttcctaccgcccctcagataatgcaagctcatccaccaagaagcctgcaccatgttttgaggttgagtgacatgttcgaaacctgtccataaagtaattttgtgaaagaaggagcaagagaacattcctcggcagcacttcactaccaaatgagcattagctgcttttcagaattgaaggagaaaatggattatgtggactgaactgacttttctaaagctctgaacaaaagcttttctttccctttgcaacaagacacagcaaagccacattttgcattagacagatgatggctgctcgaagaacaatgtcagaaactcattgaatgtgttgatttgagaaattttactgacagaaatgcaatctccctagtctgtttttgtcctgttatttttttatttccacataaaggtatttagaacatattaaattgttagaggagcaacaggaaatgagagttcaagattgttctgtccaatttccaaagggcagtaaagcttttgtgcctgtttttagctattagcaactgtgccacacttgcacctattactgcacattttgtacaaagatttgctaagcagtagttgtcaagtttcagatctttttgtgaaatgcaacctgtgtctcataggtttacactgccaaaacaatgcccgtaagatggcttatttgtataatggtgttactaaagtcacatataaaagttaaactacttgtaaaggtgctgcgcgggtcccacgtagtagtgtcttcctaatatattagtttgatttaatatctgagaagtgtatatagtttgtggtaaaaagattatatatcatgaagtatgccttcttgttttaaaaaagtatatattctacacatatatgtatatgtatatctatatctgaactgctgttaattgattaaaatttggcaaagttatatatactttaaaataaaataattttattgcaa

SEQ ID NO: 40 - DNA, 2172 bp, Macaca fascicularis
  source 1..2172: mol_type = genomic DNA
ttgcaataaaattattttattttaaagtatatataactttgccaaattttaatcaattaacagcagttcagatatagatatacatatacatatatgtgtagaatatatacttttttaaaacaagaaggcatacttcatgatatataatctttttaccacaaactatatacacttctcagatattaaatcaaactaatatattaggaagacactactacgtgggacccgcgcagcacctttacaagtagtttaacttttatatgtgactttagtaacaccattatacaaataagccatcttacgggcattgttttggcagtgtaaacctatgagacacaggttgcatttcacaaaaagatctgaaacttgacaactactgcttagcaaatctttgtacaaaatgtgcagtaataggtgcaagtgtggcacagttgctaatagctaaaaacaggcacaaaagctttactgccctttggaaattggacagaacaatcttgaactctcatttcctgttgctcctctaacaatttaatatgttctaaatacctttatgtggaaataaaaaaataacaggacaaaaacagactagggagattgcatttctgtcagtaaaatttctcaaatcaacacattcaatgagtttctgacattgttcttcgagcagccatcatctgtctaatgcaaaatgtggctttgctgtgtcttgttgcaaagggaaagaaaagcttttgttcagagctttagaaaagtcagttcagtccacataatccattttctccttcaattctgaaaagcagctaatgctcatttggtagtgaagtgctgccgaggaatgttctcttgctccttctttcacaaaattactttatggacaggtttcgaacatgtcactcaacctcaaaacatggtgcaggcttcttggtggatgagcttgcattatctgaggggcggtaggaaagcgtgctcatttttgttgaaaggtttgagtgggatttggcttttgggggaatgtattttagaagctggagaaaatattttttaaattttttccccagaaagccataaaaaagaggattcaggcaattgttaaaataagctatacaaatggtgatgggcatggctgtgtccacaatatctgaaattctacagtcacgtatgatgcctagttgaatcaatacatccagaaaagtgaatatttggtggggaatccaggaaaagaaaaagaaaagcacaattgccataattatcttaaaaatatcatcatttcttggtttgttcttctgaatttcataagccttctttagggccttccaaataagagtataacttgtaagaatgatcagaaaaggaaacaggaaacccagtatatttttggtcaggcccagtcctatcggaagggttgaattttgggactcataatggaaagcacaaactgtaatattggtgttctcaatgaaaaatacatttcgatggattatagctggcaaactggccaagcctgccagcagccaaatgacgatgcaggtgactttggctacaagcattgtgcgtcgaaggcgggacttcattgggtgaacaatagccaggtatcgatcaatgctgagacacgtgagtaggaacacactagcatacaggttgaaactgacgctggctgaagcaatcttacataggtaattgccaaagggccagcggtattccatagctgtgtagacagcccatagtggcaaagtcagtaaaaagcataagtcagccagtgctaaattcaaaagaaaaacactggccacagtcttcagcttcatgtaaaagtaaatgactatcaccaccaagctgtttccaaatattcccaccacaaagatgatactgtataaagtaggaatcatgacaaatatgtaattatgccttccagctttgggacaatcgtcttggattcttttaataccatcttcggtagaagagttgagaatcattttgatctcctgggtcgaatttgtcacaaacactatatcaaatgcacctgatctggtgaagtgtggccagctccaggggcaggcgttgaccagaactacggtcgctctttccttggtcccagagagcttcccagtatagagccagcagttaggacaccgtgacatgaaacttagcaccccacccctgaagtcccccaagcgtgcc

SEQ ID NO: 41 - DNA, 8630 bp, Homo sapiens
  source 1..8630: mol_type = genomic DNA
aagcatgatggaattttagctgcagtcttcttggtgccagcttatcaatcccaaactctgggtgtaaaagattctacagggcactttcttatgcaaggagctaaacagtgattaaaggagcaggatgaaaagatggcacagtcagtgctggtaccgccaggacctgacagcttccgcttctttaccagggaatcccttgctgctattgaacaacgcattgcagaagagaaagctaagagacccaaacaggaacgcaaggatgaggatgatgaaaatggcccaaagccaaacagtgacttggaagcaggaaaatctcttccatttatttatggagacattcctccagagatggtgtcagtgcccctggaggatctggacccctactatatcaataagaaaacgtttatagtattgaataaagggaaagcaatctctcgattcagtgccacccctgccctttacattttaactcccttcaaccctattagaaaattagctattaagattttggtacattctttattcaatatgctcattatgtgcacgattcttaccaactgtgtatttatgaccatgagtaaccctccagactggacaaagaatgtggagtatacctttacaggaatttatacttttgaatcacttattaaaatacttgcaaggggcttttgtttagaagatttcacatttttacgggatccatggaattggttggatttcacagtcattacttttgcatatgtgacagagtttgtggacctgggcaatgtctcagcgttgagaacattcagagttctccgagcattgaaaacaatttcagtcattccaggcctgaagaccattgtgggggccctgatccagtcagtgaagaagctttctgatgtcatgatcttgactgtgttctgtctaagcgtgtttgcgctaataggattgcagttgttcatgggcaacctacgaaataaatgtttgcaatggcctccagataattcttcctttgaaataaatatcacttccttctttaacaattcattggatgggaatggtactactttcaataggacagtgagcatatttaactgggatgaatatattgaggataaaagtcacttttattttttagaggggcaaaatgatgctctgctttgtggcaacagctcagatgcaggccagtgtcctgaaggatacatctgtgtgaaggctggtagaaaccccaactatggctacacgagctttgacacctttagttgggcctttttgtccttatttcgtctcatgactcaagacttctgggaaaacctttatcaactgacactacgtgctgctgggaaaacgtacatgatattttttgtgctggtcattttcttgggctcattctatctaataaatttgatcttggctgtggtggccatggcctatgaggaacagaatcaggccacattggaagaggctgaacagaaggaagctgaatttcagcagatgctcgaacagttgaaaaagcaacaagaagaagctcaggcggcagctgcagccgcatctgctgaatcaagagacttcagtggtgctggtgggataggagttttttcagagagttcttcagtagcatctaagttgagctccaaaagtgaaaaagagctgaaaaacagaagaaagaaaaagaaacagaaagaacagtctggagaagaagagaaaaatgacagagtccgaaaatcggaatctgaagacagcataagaagaaaaggtttccgtttttccttggaaggaagtaggctgacatatgaaaagagattttcttctccacaccagtccttactgagcatccgtggctcccttttctctccaagacgcaacagtagggcgagccttttcagcttcagaggtcgagcaaaggacattggctctgagaatgactttgctgatgatgagcacagcacctttgaggacaatgacagccgaagagactctctgttcgtgccgcacagacatggagaacggcgccacagcaatgtcagccaggccagccgtgcctccagggtgctccccatcctgcccatgaatgggaagatgcatagcgctgtggactgcaatggtgtggtctccctggtcgggggcccttctaccctcacatctgctgggcagctcctaccagagggcacaactactgaaacagaaataagaaagagacggtccagttcttatcatgtttccatggatttattggaagatcctacatcaaggcaaagagcaatgagtatagccagtattttgaccaacaccatggaagaacttgaagaatccagacagaaatgcccaccatgctggtataaatttgctaatatgtgtttgatttgggactgttgtaaaccatggttaaaggtgaaacaccttgtcaacctggttgtaatggacccatttgttgacctggccatcaccatctgcattgtcttaaatacactcttcatggctatggagcactatcccatgacggagcagttcagcagtgtactgtctgttggaaacctggtcttcacagggatcttcacagcagaaatgtttctcaagataattgccatggatccatattattactttcaagaaggctggaatatttttgatggttttattgtgagccttagtttaatggaacttggtttggcaaatgtggaaggattgtcagttctccgatcattccggctgctccgagttttcaagttggcaaaatcttggccaactctaaatatgctaattaagatcattggcaattctgtgggggctctaggaaacctcaccttggtattggccatcatcgtcttcatttttgctgtggtcggcatgcagctctttggtaagagctacaaagaatgtgtctgcaagatttccaatgattgtgaactcccacgctggcacatgcatgactttttccactccttcctgatcgtgttccgcgtgctgtgtggagagtggatagagaccatgtgggactgtatggaggtcgctggccaaaccatgtgccttactgtcttcatgatggtcatggtgattggaaatctagtggttctgaacctcttcttggccttgcttttgagttccttcagttctgacaatcttgctgccactgatgatgataacgaaatgaataatctccagattgctgtgggaaggatgcagaaaggaatcgattttgttaaaagaaaaatacgtgaatttattcagaaagcctttgttaggaagcagaaagctttagatgaaattaaaccgcttgaagatctaaataataaaaaagacagctgtatttccaaccataccaccatagaaataggcaaagacctcaattatctcaaagacggaaatggaactactagtggcataggcagcagtgtagaaaaatatgtcgtggatgaaagtgattacatgtcatttataaacaaccctagcctcactgtgacagtaccaattgctgttggagaatctgactttgaaaatttaaatactgaagaattcagcagcgagtcagatatggaggaaagcaaagagaagctaaatgcaactagttcatctgaaggcagcacggttgatattggagctcccgccgagggagaacagcctgaggttgaacctgaggaatcccttgaacctgaagcctgttttacagaagactgtgtacggaagttcaagtgttgtcagataagcatagaagaaggcaaagggaaactctggtggaatttgaggaaaacatgctataagatagtggagcacaattggttcgaaaccttcattgtcttcatgattctgctgagcagtggggctctggcctttgaagatatatacattgagcagcgaaaaaccattaagaccatgttagaatatgctgacaaggttttcacttacatattcattctggaaatgctgctaaagtgggttgcatatggttttcaagtgtattttaccaatgcctggtgctggctagacttcctgattgttgatgtctcactggttagcttaactgcaaatgccttgggttactcagaacttggtgccatcaaatccctcagaacactaagagctctgaggccactgagagctttgtcccggtttgaaggaatgagggttgttgtaaatgctcttttaggagccattccatctatcatgaatgtacttctggtttgtctgatcttttggctaatattcagtatcatgggagtgaatctctttgctggcaagttttaccattgtattaattacaccactggagagatgtttgatgtaagcgtggtcaacaactacagtgagtgcaaagctctcattgagagcaatcaaactgccaggtggaaaaatgtgaaagtaaactttgataacgtaggacttggatatctgtctctacttcaagtagccacgtttaagggatggatggatattatgtatgcagctgttgattcacgaaatgtagaattacaacccaagtatgaagacaacctgtacatgtatctttattttgtcatctttattatttttggttcattctttaccttgaatcttttcattggtgtcatcatagataacttcaaccaacagaaaaagaagtttggaggtcaagacatttttatgacagaagaacagaagaaatactacaatgcaatgaaaaaactgggttcaaagaaaccacaaaaacccatacctcgacctgctaacaaattccaaggaatggtctttgattttgtaaccaaacaagtctttgatatcagcatcatgatcctcatctgccttaacatggtcaccatgatggtggaaaccgatgaccagagtcaagaaatgacaaacattctgtactggattaatctggtgtttattgttctgttcactggagaatgtgtgctgaaactgatctctcttcgttactactatttcactattggatggaatatttttgattttgtggtggtcattctctccattgtaggaatgtttctggctgaactgatagaaaagtattttgtgtcccctaccctgttccgagtgatccgtcttgccaggattggccgaatcctacgtctgatcaaaggagcaaaggggatccgcacgctgctctttgctttgatgatgtcccttcctgcgttgtttaacatcggcctccttcttttcctggtcatgttcatctacgccatctttgggatgtccaattttgcctatgttaagagggaagttgggatcgatgacatgttcaactttgagacctttggcaacagcatgatctgcctgttccaaattacaacctctgctggctgggatggattgctagcacctattcttaatagtggacctccagactgtgaccctgacaaagatcaccctggaagctcagttaaaggagactgtgggaacccatctgttgggattttcttttttgtcagttacatcatcatatccttcctggttgtggtgaacatgtacatcgcggtcatcctggagaacttcagtgttgctactgaagaaagtgcagagcctctgagtgaggatgactttgagatgttctatgaggtttgggagaagtttgatcccgatgcgacccagtttatagagtttgccaaactttctgattttgcagatgccctggatcctcctcttctcatagcaaaacccaacaaagtccagctcattgccatggatctgcccatggtgagtggtgaccggatccactgtcttgacatcttatttgcttttacaaagcgtgttttgggtgagagtggagagatggatgcccttcgaatacagatggaagagcgattcatggcatcaaacccctccaaagtctcttatgagcccattacgaccacgttgaaacgcaaacaagaggaggtgtctgctattattatccagagggcttacagacgctacctcttgaagcaaaaagttaaaaaggtatcaagtatatacaagaaagacaaaggcaaagaatgtgatggaacacccatcaaagaagatactctcattgataaactgaatgagaattcaactccagagaaaaccgatatgacgccttccaccacgtctccaccctcgtatgatagtgtgaccaaaccagaaaaagaaaaatttgaaaaagacaaatcagaaaaggaagacaaagggaaagatatcagggaaagtaaaaagtaaaaagaaaccaagaattttccattttgtgatcaattgtttacagcccgtgatggtgatgtgtttgtgtcaacaggactcccacaggaggtctatgccaaactgactgtttttacaaatgtatacttaaggtcagtgcctataacaagacagagacctctggtcagcaaactggaactcagtaaactggagaaatagtatcgatgggaggtttctattttcacaaccagctgacactgctgaagagcagaggcgtaatggctactcagacgataggaaccaatttaaaggggggagggaagttaaatttttatgtaaattcaacatgtgacacttgataatagtaattgtcaccagtgtttatgttttaactgccacacctgccatatttttacaaaacgtgtgctgtgaatttatcacttttctttttaattcacaggttgtttactattatatgtgactatttttgtaaatgggtttgtgtttggggagagggattaaagggagggaattctacatttctctattgtattgtataactggatatattttaaatggaggcatgctgcaattctcattcacacataaaaaaatcacatcacaaaagggaagagtttacttcttgtttcaggatgtttttagatttttgaggtgcttaaatagctattcgtatttttaaggtgtctcatccagaaaaaatttaatgtgcctgtaaatgttccatagaatcacaagcattaaagagttgttttatttttacataacccattaaatgtacatgtatatatgtatatatgtatatgtgcgtgtatatacatatatatgtatacacacatgcacacacagagatatacacataccattacattgtcattcacagtcccagcagcatgactatcacatttttgataagtgtcctttggcataaaataaaaatatcctatcagtcctttctaagaagcctgaattgaccaaaaaacatccccaccaccactttataaagttgattctgctttatcctgcagtattgtttagccatcttctgctcttggtaaggttgacatagtatatgtcaatttaaaaaataaaagtctgctttgtaaatagtaattttacccagtggtgcatgtttgagcaaacaaaaatgatgatttaagcacactacttattgcatcaaatatgtaccacagtaagtatagtttgcaagctttcaacaggtaatatgatgtaattggttccattatagtttgaagctgtcactgctgcatgtttatcttgcctatgctgctgtatcttattccttccactgttcagaagtctaatatgggaagccatatatcagtggtaaagtgaagcaaattgttctaccaagacctcattcttcatgtcattaagcaataggttgcagcaaacaaggaagagcttcttgctttttattcttccaaccttaattgaacactcaatgatgaaaagcccgactgtacaaacatgttgcaagctgcttaaatctgtttaaaatatatggttagagttttctaagaaaatataaatactgtaaaaagttcattttattttatttttcagccttttgtacgtaaaatgagaaattaaaagtatcttcaggtggatgtcacagtcactattgttagtttctgttcctagcacttttaaattgaagcacttcacaaaataagaagcaaggactaggatgcagtgtaggtttctgcttttttattagtactgtaaacttgcacacatttcaatgtgaaacaaatctcaaactgagttcaatgtttatttgctttcaatagtaatgccttatcattgaaagaggcttaaagaaaaaaaaaatcagctgatactcttggcattgcttgaatccaatgtttccacctagtctttttattcagtaatcatcagtcttttccaatgtttgtttacacagatagatcttattgacccatatggcactagaactgtatcagatataatatgggatcccagctttttttcctctcccacaaaaccaggtagtgaagttatattaccagttacagcaaaatactttgtgtttcacaagcaacaataaatgtagattctttatactgaagctattgacttgtagtgtgttggtgaaatgcatgcaggaaaatgctgttaccataaagaacggtaaaccacattacaatcaagccaaaagaataaaggtttcgcttttgtttttgtatttaattgttgtctttgtttctatctttgaaatgccatttaaaggtagatttctatcatgtaaaaataatctatctgaaaaacaaatgtaaagaacacacattaattactataattcatctttcaattttttcatggaatggaagttaattaagaagagtgtattggataactactttaatattggccaaaaagctagatatggcatcaggtagactagtggaaagttacaaaaattaataaaaaattgactaaca

SEQ ID NO: 42 - DNA, 8630 bp, Homo sapiens
  source 1..8630: mol_type = genomic DNA
tgttagtcaattttttattaatttttgtaactttccactagtctacctgatgccatatctagctttttggccaatattaaagtagttatccaatacactcttcttaattaacttccattccatgaaaaaattgaaagatgaattatagtaattaatgtgtgttctttacatttgtttttcagatagattatttttacatgatagaaatctacctttaaatggcatttcaaagatagaaacaaagacaacaattaaatacaaaaacaaaagcgaaacctttattcttttggcttgattgtaatgtggtttaccgttctttatggtaacagcattttcctgcatgcatttcaccaacacactacaagtcaatagcttcagtataaagaatctacatttattgttgcttgtgaaacacaaagtattttgctgtaactggtaatataacttcactacctggttttgtgggagaggaaaaaaagctgggatcccatattatatctgatacagttctagtgccatatgggtcaataagatctatctgtgtaaacaaacattggaaaagactgatgattactgaataaaaagactaggtggaaacattggattcaagcaatgccaagagtatcagctgattttttttttctttaagcctctttcaatgataaggcattactattgaaagcaaataaacattgaactcagtttgagatttgtttcacattgaaatgtgtgcaagtttacagtactaataaaaaagcagaaacctacactgcatcctagtccttgcttcttattttgtgaagtgcttcaatttaaaagtgctaggaacagaaactaacaatagtgactgtgacatccacctgaagatacttttaatttctcattttacgtacaaaaggctgaaaaataaaataaaatgaactttttacagtatttatattttcttagaaaactctaaccatatattttaaacagatttaagcagcttgcaacatgtttgtacagtcgggcttttcatcattgagtgttcaattaaggttggaagaataaaaagcaagaagctcttccttgtttgctgcaacctattgcttaatgacatgaagaatgaggtcttggtagaacaatttgcttcactttaccactgatatatggcttcccatattagacttctgaacagtggaaggaataagatacagcagcataggcaagataaacatgcagcagtgacagcttcaaactataatggaaccaattacatcatattacctgttgaaagcttgcaaactatacttactgtggtacatatttgatgcaataagtagtgtgcttaaatcatcatttttgtttgctcaaacatgcaccactgggtaaaattactatttacaaagcagacttttattttttaaattgacatatactatgtcaaccttaccaagagcagaagatggctaaacaatactgcaggataaagcagaatcaactttataaagtggtggtggggatgttttttggtcaattcaggcttcttagaaaggactgataggatatttttattttatgccaaaggacacttatcaaaaatgtgatagtcatgctgctgggactgtgaatgacaatgtaatggtatgtgtatatctctgtgtgtgcatgtgtgtatacatatatatgtatatacacgcacatatacatatatacatatatacatgtacatttaatgggttatgtaaaaataaaacaactctttaatgcttgtgattctatggaacatttacaggcacattaaattttttctggatgagacaccttaaaaatacgaatagctatttaagcacctcaaaaatctaaaaacatcctgaaacaagaagtaaactcttcccttttgtgatgtgatttttttatgtgtgaatgagaattgcagcatgcctccatttaaaatatatccagttatacaatacaatagagaaatgtagaattccctccctttaatccctctccccaaacacaaacccatttacaaaaatagtcacatataatagtaaacaacctgtgaattaaaaagaaaagtgataaattcacagcacacgttttgtaaaaatatggcaggtgtggcagttaaaacataaacactggtgacaattactattatcaagtgtcacatgttgaatttacataaaaatttaacttccctcccccctttaaattggttcctatcgtctgagtagccattacgcctctgctcttcagcagtgtcagctggttgtgaaaatagaaacctcccatcgatactatttctccagtttactgagttccagtttgctgaccagaggtctctgtcttgttataggcactgaccttaagtatacatttgtaaaaacagtcagtttggcatagacctcctgtgggagtcctgttgacacaaacacatcaccatcacgggctgtaaacaattgatcacaaaatggaaaattcttggtttctttttactttttactttccctgatatctttccctttgtcttccttttctgatttgtctttttcaaatttttctttttctggtttggtcacactatcatacgagggtggagacgtggtggaaggcgtcatatcggttttctctggagttgaattctcattcagtttatcaatgagagtatcttctttgatgggtgttccatcacattctttgcctttgtctttcttgtatatacttgatacctttttaactttttgcttcaagaggtagcgtctgtaagccctctggataataatagcagacacctcctcttgtttgcgtttcaacgtggtcgtaatgggctcataagagactttggaggggtttgatgccatgaatcgctcttccatctgtattcgaagggcatccatctctccactctcacccaaaacacgctttgtaaaagcaaataagatgtcaagacagtggatccggtcaccactcaccatgggcagatccatggcaatgagctggactttgttgggttttgctatgagaagaggaggatccagggcatctgcaaaatcagaaagtttggcaaactctataaactgggtcgcatcgggatcaaacttctcccaaacctcatagaacatctcaaagtcatcctcactcagaggctctgcactttcttcagtagcaacactgaagttctccaggatgaccgcgatgtacatgttcaccacaaccaggaaggatatgatgatgtaactgacaaaaaagaaaatcccaacagatgggttcccacagtctcctttaactgagcttccagggtgatctttgtcagggtcacagtctggaggtccactattaagaataggtgctagcaatccatcccagccagcagaggttgtaatttggaacaggcagatcatgctgttgccaaaggtctcaaagttgaacatgtcatcgatcccaacttccctcttaacataggcaaaattggacatcccaaagatggcgtagatgaacatgaccaggaaaagaaggaggccgatgttaaacaacgcaggaagggacatcatcaaagcaaagagcagcgtgcggatcccctttgctcctttgatcagacgtaggattcggccaatcctggcaagacggatcactcggaacagggtaggggacacaaaatacttttctatcagttcagccagaaacattcctacaatggagagaatgaccaccacaaaatcaaaaatattccatccaatagtgaaatagtagtaacgaagagagatcagtttcagcacacattctccagtgaacagaacaataaacaccagattaatccagtacagaatgtttgtcatttcttgactctggtcatcggtttccaccatcatggtgaccatgttaaggcagatgaggatcatgatgctgatatcaaagacttgtttggttacaaaatcaaagaccattccttggaatttgttagcaggtcgaggtatgggtttttgtggtttctttgaacccagttttttcattgcattgtagtatttcttctgttcttctgtcataaaaatgtcttgacctccaaacttctttttctgttggttgaagttatctatgatgacaccaatgaaaagattcaaggtaaagaatgaaccaaaaataataaagatgacaaaataaagatacatgtacaggttgtcttcatacttgggttgtaattctacatttcgtgaatcaacagctgcatacataatatccatccatcccttaaacgtggctacttgaagtagagacagatatccaagtcctacgttatcaaagtttactttcacatttttccacctggcagtttgattgctctcaatgagagctttgcactcactgtagttgttgaccacgcttacatcaaacatctctccagtggtgtaattaatacaatggtaaaacttgccagcaaagagattcactcccatgatactgaatattagccaaaagatcagacaaaccagaagtacattcatgatagatggaatggctcctaaaagagcatttacaacaaccctcattccttcaaaccgggacaaagctctcagtggcctcagagctcttagtgttctgagggatttgatggcaccaagttctgagtaacccaaggcatttgcagttaagctaaccagtgagacatcaacaatcaggaagtctagccagcaccaggcattggtaaaatacacttgaaaaccatatgcaacccactttagcagcatttccagaatgaatatgtaagtgaaaaccttgtcagcatattctaacatggtcttaatggtttttcgctgctcaatgtatatatcttcaaaggccagagccccactgctcagcagaatcatgaagacaatgaaggtttcgaaccaattgtgctccactatcttatagcatgttttcctcaaattccaccagagtttccctttgccttcttctatgcttatctgacaacacttgaacttccgtacacagtcttctgtaaaacaggcttcaggttcaagggattcctcaggttcaacctcaggctgttctccctcggcgggagctccaatatcaaccgtgctgccttcagatgaactagttgcatttagcttctctttgctttcctccatatctgactcgctgctgaattcttcagtatttaaattttcaaagtcagattctccaacagcaattggtactgtcacagtgaggctagggttgtttataaatgacatgtaatcactttcatccacgacatatttttctacactgctgcctatgccactagtagttccatttccgtctttgagataattgaggtctttgcctatttctatggtggtatggttggaaatacagctgtcttttttattatttagatcttcaagcggtttaatttcatctaaagctttctgcttcctaacaaaggctttctgaataaattcacgtatttttcttttaacaaaatcgattcctttctgcatccttcccacagcaatctggagattattcatttcgttatcatcatcagtggcagcaagattgtcagaactgaaggaactcaaaagcaaggccaagaagaggttcagaaccactagatttccaatcaccatgaccatcatgaagacagtaaggcacatggtttggccagcgacctccatacagtcccacatggtctctatccactctccacacagcacgcggaacacgatcaggaaggagtggaaaaagtcatgcatgtgccagcgtgggagttcacaatcattggaaatcttgcagacacattctttgtagctcttaccaaagagctgcatgccgaccacagcaaaaatgaagacgatgatggccaataccaaggtgaggtttcctagagcccccacagaattgccaatgatcttaattagcatatttagagttggccaagattttgccaacttgaaaactcggagcagccggaatgatcggagaactgacaatccttccacatttgccaaaccaagttccattaaactaaggctcacaataaaaccatcaaaaatattccagccttcttgaaagtaataatatggatccatggcaattatcttgagaaacatttctgctgtgaagatccctgtgaagaccaggtttccaacagacagtacactgctgaactgctccgtcatgggatagtgctccatagccatgaagagtgtatttaagacaatgcagatggtgatggccaggtcaacaaatgggtccattacaaccaggttgacaaggtgtttcacctttaaccatggtttacaacagtcccaaatcaaacacatattagcaaatttataccagcatggtgggcatttctgtctggattcttcaagttcttccatggtgttggtcaaaatactggctatactcattgctctttgccttgatgtaggatcttccaataaatccatggaaacatgataagaactggaccgtctctttcttatttctgtttcagtagttgtgccctctggtaggagctgcccagcagatgtgagggtagaagggcccccgaccagggagaccacaccattgcagtccacagcgctatgcatcttcccattcatgggcaggatggggagcaccctggaggcacggctggcctggctgacattgctgtggcgccgttctccatgtctgtgcggcacgaacagagagtctcttcggctgtcattgtcctcaaaggtgctgtgctcatcatcagcaaagtcattctcagagccaatgtcctttgctcgacctctgaagctgaaaaggctcgccctactgttgcgtcttggagagaaaagggagccacggatgctcagtaaggactggtgtggagaagaaaatctcttttcatatgtcagcctacttccttccaaggaaaaacggaaaccttttcttcttatgctgtcttcagattccgattttcggactctgtcatttttctcttcttctccagactgttctttctgtttctttttctttcttctgtttttcagctctttttcacttttggagctcaacttagatgctactgaagaactctctgaaaaaactcctatcccaccagcaccactgaagtctcttgattcagcagatgcggctgcagctgccgcctgagcttcttcttgttgctttttcaactgttcgagcatctgctgaaattcagcttccttctgttcagcctcttccaatgtggcctgattctgttcctcataggccatggccaccacagccaagatcaaatttattagatagaatgagcccaagaaaatgaccagcacaaaaaatatcatgtacgttttcccagcagcacgtagtgtcagttgataaaggttttcccagaagtcttgagtcatgagacgaaataaggacaaaaaggcccaactaaaggtgtcaaagctcgtgtagccatagttggggtttctaccagccttcacacagatgtatccttcaggacactggcctgcatctgagctgttgccacaaagcagagcatcattttgcccctctaaaaaataaaagtgacttttatcctcaatatattcatcccagttaaatatgctcactgtcctattgaaagtagtaccattcccatccaatgaattgttaaagaaggaagtgatatttatttcaaaggaagaattatctggaggccattgcaaacatttatttcgtaggttgcccatgaacaactgcaatcctattagcgcaaacacgcttagacagaacacagtcaagatcatgacatcagaaagcttcttcactgactggatcagggcccccacaatggtcttcaggcctggaatgactgaaattgttttcaatgctcggagaactctgaatgttctcaacgctgagacattgcccaggtccacaaactctgtcacatatgcaaaagtaatgactgtgaaatccaaccaattccatggatcccgtaaaaatgtgaaatcttctaaacaaaagccccttgcaagtattttaataagtgattcaaaagtataaattcctgtaaaggtatactccacattctttgtccagtctggagggttactcatggtcataaatacacagttggtaagaatcgtgcacataatgagcatattgaataaagaatgtaccaaaatcttaatagctaattttctaatagggttgaagggagttaaaatgtaaagggcaggggtggcactgaatcgagagattgctttccctttattcaatactataaacgttttcttattgatatagtaggggtccagatcctccaggggcactgacaccatctctggaggaatgtctccataaataaatggaagagattttcctgcttccaagtcactgtttggctttgggccattttcatcatcctcatccttgcgttcctgtttgggtctcttagctttctcttctgcaatgcgttgttcaatagcagcaagggattccctggtaaagaagcggaagctgtcaggtcctggcggtaccagcactgactgtgccatcttttcatcctgctcctttaatcactgtttagctccttgcataagaaagtgccctgtagaatcttttacacccagagtttgggattgataagctggcaccaagaagactgcagctaaaattccatcatgctt

SEQ ID NO: 43 - DNA, 8819 bp, Mus musculus
  source 1..8819: mol_type = genomic DNA
ggtgtggtctttaaaggagaatttgaaaaaaaaaaaaatttttttttttttaaagcctgatggaattttagctgcagtcttcttgcttccagcctatcaacccaaaactctgtaacagcttcttcagggcactttcttatgcgaggagctaaacagtgattaaagaagcaggatgaaaagatggcacaatcagtgctggtaccgccaggacctgacagcttccgcttctttaccagggaatcccttgctgctattgaacaacgcattgcagaagagaaagctaagagacccaaacaggaacgcaaggacgaagacgacgaaaatggcccaaagccaaatagtgacttggaagcaggaaaatcccttccttttatttatggagacattcctccagagatggtgtcagagcccctggaggacctggacccctactatatcaataagaaaacctttatagtattgaataaagggaaagcaatctctcggttcagtgccacctccgccctgtacattttaactcccttcaaccccattagaaaattagctattaagattttggtacattctttattcaatgtgcttatcatgtgcacaattcttaccaactgtgtatttatgaccatgagcaaccctccagactggacaaagaatgtggagtatacttttacaggaatttatacttttgaatcacttattaaaatacttgcaaggggcttttgtctagaagatttcacatttctacgggatccctggaactggctggatttcacagtcattacctttgcgtatgtaacagaatttgtaaacctaggcaatgtttcagctcttcgaactttcagagtcttgagagctttgaaaactatttctgtaattccaggcctgaagaccatcgtgggggccctgatccagtcggtgaagaagctgtctgacgtcatgatactcactgtgttctgtctgagtgtctttgctctcatcgggctgcagctcttcatgggcaacctgaggaataaatgcttgcagtggcccccagacaattctacctttgaaataaacatcacttccttctttaataactcattggattggaatggtactgccttcaataggacaatgaacatgtttaactgggatgaatatattgaagataaaagtcacttttattttttggaaggacaaaacgatgctctgctttgtggtaacagctcggatgctggccagtgtccggaaggatacatctgtgtgaaggctgggagaaaccccaactatggctacacgagttttgacaccttcagctgggccttcttgtccttatttcgtcttatgactcaagacttctgggaaaacctttatcagctgaccttgcgtgctgctgggaaaacatatatgatatttttcgtgcttgtgattttcttgggctcattctacctaataaatttgatcctggctgtggtggccatggcctatgaagaacagaaccaggccacgctggaggaagctgaacagaaggaggcagagtttcagcagatgctggagcaacttaagaagcagcaagaagaagctcaggcagcagctgcagcagcgtctgcagaatccagagacttcagtggagcaggtgggataggtgttttctcggagagttcttccgtagcttcaaagttaagttccaagagtgaaaaggagctgaaaaacagaaggaagaaaaagaaacagaaagagcaggctggagaggaagagaaggaagatgctgtgcggaaatctgcctctgaagacagcatacgaaagaaaggcttccggttttccctagaagggagtagactgacctacgagaagaggttttcctctccacaccagtctctcttgagcatccgaggctcccttttttctccgagacgcaacagtagagcaagccttttcagcttcaaaggtcgggtgaaggatattggttctgaaaatgactttgcggacgatgaacacagcacgtttgaggacaacgacagcaggagagactctctatttgtaccacacagacatggagaaaggcgtcccagcaacgttagccaggccagccgtgcctcccgggggatacccactctacccatgaatgggaagatgcacagtgcagtggactgcaacggtgtggtctccctagttggaggcccttctgctctcacatctcctgtggggcagctactaccagagggcacaactactgaaacagaaataaggaagaggaggtccagttcttaccatgtttctatggacttgttggaagaccctacatcaaggcaaagagcaatgagtatggccagcattttgaccaacactatggaagaacttgaagaatccagacagaaatgccctccatgctggtataaatttgctaatatgtgcctgatttgggactgttgtaagccatggctaaaggtaaaacatgttgtcaatctggtagtgatggatccattcgttgacctggccatcaccatctgcattgtgttaaatacactcttcatggccatggagcactacccgatgacggagcagttcagcagtgtgctgtctgttgggaatttggtcttcactgggatcttcaccgcagaaatgtttctcaagataatagccatggatccatattattactttcaagaaggctggaatatctttgatggctttatagtgagccttagtttaatggaactcggcttggcgaatgtggaaggactgtcagttctccgatctttccgactgcttagagtcttcaagttggcaaaatcctggcccacactgaatatgctcattaagatcatcggcaactcggtgggcgcgctgggcaacctgaccctggtgctggccatcatcgtcttcatttttgccgtggtcggcatgcagctgtttggaaagagctacaaggagtgtgtttgcaagatttccaatgattgtgagctgccgcgctggcacatgcatgacttcttccactcgttcctgatcgtgttccgcgtgctgtgtggggagtggatagagaccatgtgggactgcatggaggtcgcaggccagaccatgtgtcttactgtcttcatgatggtcatggtgattgggaaccttgtcgttctgaacctcttcttggccttgctcctcagttctttcagctcggacaacctggctgccacagatgacgataacgaaatgaacaacctccagatagccgtgggaaggatgcagaaggggattgattttgttaaaaggaagatacgtgaattcattcagaaagcctttgtcagaaagcagaaagctctagatgaaatcaaaccccttgaagatctgaataacaagaaagacagttgtatctccaaccacacaaccatagaaataggcaaggacctgaattacctcaaagatggaaacgggacgaccagtggcataggcagcagtgtggagaagtacgtggtagatgagagtgattacatgtcattcatcaacaaccccagcctcaccgtgactgtgcccattgctgtgggagagtctgactttgaaaacttaaatacagaagaattcagcagtgaatcagatatggaagaaagcaaggagaaattgaatgcaactagttcatctgaaggcagtacagttgatataggtgctcctgcagagggagagcaaccagaggccgaaccagaagagtcccttgagccagaagcctgtttcacagaagactgtgtaagaaagttcaagtgttgtcagataagcatagaagaaggcaaaggcaaactctggtggaacttgaggaaaacctgctacaagatagtagagcacaactggtttgaaaccttcatcgtcttcatgattctgctcagcagcggtgctctggcctttgaagacatttacatcgagcagcgaaaaaccatcaagaccatgctggagtatgctgacaaggtcttcacttacatcttcatcctggagatgttgctaaagtgggttgcatatggtttccaaatgtacttcaccaatgcctggtgctggctggacttcctgatcgttgatgtctcactggttagcttaactgcaaatgccttgggctattcagaacttggtgccatcaaatccctccgaacattaagagcactgaggcctctacgagccttatcccgatttgaaggaatgagggttgttgtaaacgctctcctaggtgcaatcccatccataatgaacgtacttctggtctgcctgatcttttggctaatattcagtatcatgggggtgaatctctttgccggcaagttctatcattgcatcaactacaccaccggggaaatgtttgatgtgagcgtggtcaacaactacagtgagtgccaggctctcatagagagcaatcagacagccaggtggaagaatgtgaaagtcaactttgacaacgtgggacttggatatctttctctgcttcaagtagccacatttaaaggatggatggatatcatgtatgcagctgttgactcaagaaatgtagaactgcaacccaaatatgaagacaatctatacatgtacctttactttgtcatctttattattttcggctcattcttcacactgaacctgttcatcggcgtcatcatagataacttcaaccaacagaagaagaagtttggaggtcaagacatttttatgacagaagaacagaagaaatactacaatgcaatgaagaagctaggctcaaagaaaccacaaaaaccgatacctcgccctgctaacaagtttcaagggatggtctttgattttgtaaccaaacaagtgtttgacatcagcatcatgatcctcatctgcctcaacatggtgaccatgatggtggaaacggacgaccagagccaagagatgaccaacatcctgtattggatcaacctggtgttcatcgtcctgttcaccggcgagtgtgtgctcaagcttatctcactccgtcattattatttcaccattggatggaacatttttgattttgtggtggtcatcctctccattgtagggatgtttctcgcggagctgatagagaagtatttcgtgtcccctaccctgttccgagtcatccgcctggccaggattggacgaatcctacgcctgatcaaaggcgccaaggggatccgcacgctgctctttgctctgatgatgtcccttcctgcgctgtttaacatcggcctcctgcttttcctggtcatgttcatctacgccatctttgggatgtccaactttgcctacgttaagagggaagttgggattgatgacatgttcaactttgagacctttggcaacagcatgatctgcctgttccaaatcaccacttctgcgggctgggatggactgctggcccctatactaaatagtggacctcccgattgtgaccctgaaaaagatcatcctggaagctcggtgaagggagactgtgggaacccatctgtggggattttcttttttgtcagctacatcatcatatccttcctggttgtggtgaacatgtacattgctgtcatcctggagaacttcagcgttgccacagaagaaagtgcagagcctctgagtgaggacgactttgagatgttctacgaagtctgggagaagttcgaccctgacgccacccagttcatagagttctgcaagctctctgactttgcagctgccctggatcctcccctcctcatcgcaaagccaaacaaagtgcagctcattgccatggacctgcccatggtgagtggagaccgcatccactgcctggacatcttatttgcttttacaaagcgggtcctgggtgagagtggagagatggatgctcttcgaatccagatggaagagcggttcatggcttccaatccctccaaggtctcttatgagcccattaccaccactctgaagcgcaaacaagaggaggtgtctgctattgtcatccagcgagcttacagacgctatcttctgaaacagaaagttaagaaggtttcgtctatatataaaaaagacaagggtaaagaagatgagggaacgcccatcaaagaagacatcatcacggataaactgaatgagaattcaactccagagaagactgacgtgacaccctccaccacttcgccaccttcctacgatagcgtgaccaaaccggagaaggaaaaatttgaaaaggacaaatcagaaaaagaggacaaggggaaagatatcagggaaagtaaaaagtaaaaaaataaaaaattaatgaaaattaaaaattaaaaaaaaaagaatattccattttgtgatcaactgtttacagcctgtgttggtgatgtatctgcgactccctcaggaggtctatgccaaactgactgtttctataagtgtatacttaaggtcagtgcctataaccagacaggacctcgggtcagcaaagtgggactcgccaaaccagacaaagagcaccgacaggaggcttctgttttcgcaaccagctgacactgctgaagagtggaggagagcaatggctactcagaccagaggaacatttggaaatggggaggaaagttaaatttttatgtaaatttaacatgtgacacttgatagcattaactgtcaccaccgtttgtgttttaactgccacacctgccatatttttacaaaatgtgtgctgtgactttatcaccttttttttttttttaattcacgggttgtttactcttatatgtgactatttttgtaactgggtttacgtttggggagagggattaaggaggggatactacatttctctgtgtataatgagatctattttcaatgaaggcatgctgcagttttcatccacacatgacaatatcccatcacacacggaaagggtatacttctcatttcaggatgtttttagattttttgaggtgcttaaatagctattcatatttttaaggtgtttcatccagaagaattttaatgtgcctgtaaatgttccatagagtcacaaccatcaaagagttgttttatttttacatagttcattatatgtacatgtatatatgtatatatgtatatggccgtgtatatacatatatatgtatacacacatgcatacatatgcacacacagaccatcacatgctcagagtccaggcagcatgactataacattttttgataagtgtcctttggtaaaaaaaaaaaaaaagtatatatatatatatatcctctcagtcctttctaagaaacccaaactaccaaaaaccatccccacagccactttctgaagttggttctgctttttttcctgcagtattgtttagccatcttctgctcttggtaaggttgacatagtgtatgtcaattaaaacaaaacaaaacaaaacaaaagtctgctttgtaaatagtaattttacccagtggtgcatgtttgagccaacgaaaatgatttaagcacagtatttactgcatcaaatatgtaccacagttaagtatagtttgcaagctttcaacaggtgacatgacgtcattggttcccttagagtttgaagctgtcactgctgcatgtctctcttgctgctgctgctgtatcttaacccttctgctgttcagaagtctaatagggaagccatatgtcagaggtggagtgaagtggattgttccatcaggaactcaatcttcacgacactgagcaatgtgttgcagtaaacaaggaagaaatccctgctctttgttctccctacccttaattgaacactccggtgagatgtctgacagtgtaaacaagtggcaagctacttagatctgttgaaggtatatggttagagttttctaagaaatatacatattgtaaaaaaaaatggggggagttcagtttattttatttcgaagccttttgtacataaaatgggaaattaaaagtatcttcaggttgatgtcacagtcctatcattagtttctgttcccggcactttttaattaaggcactccgccaaggaagagagagataaggcctaagaggcagtacagggctctgctgtcattgttggtactgtggacttgcacatatttccacttgaaacaattctcattccaagtctaatgtccatttgctttcaatagtgatgccttatcattgacaagagatttcaaggggagcagatgatagatactctaggcattatctgagtgggatgtactcacctagccttcccctccattcatccatcttcttaatgttcgtttatacagatagatggatagatagaatcttactgacccacatggcactagagctgtatcagatatgatttgggaaccaagttttcttctctctctctctctctctctctctctctctctctctctctctctctctctctctctctctttctctcactgttttccaccaaaccagttagtgaaatgatcttgccaatcacaaacgttttgtttcacaaaaacaaccttcattgtagatcctttatactaaagctgttgatttgtagtgtgttgaatgcatgcgggaaaatgctatgaccatacagagctaccggtaagccacattacaatcaagccaaaagaataaagatttttttttttgcttttgtttctgtatttattgttttgtctgtgtttctatcctcgagatgccagttagaggtaaatttctatcgtgtaaaaatgatctatctgaaaattttaaatgtaaaaagtacgcattaagtataataattcatctttaaatttttcatggaatggaaactgagaagaatgtattggatatctagttttaatattggccaaaatccacagatatggtaccaggtagagtagtggaaagttacaaaaaattaataaaaaaattgactaaca

SEQ ID NO: 44 - DNA, 8819 bp, Mus musculus
  source 1..8819: mol_type = genomic DNA
tgttagtcaatttttttattaattttttgtaactttccactactctacctggtaccatatctgtggattttggccaatattaaaactagatatccaatacattcttctcagtttccattccatgaaaaatttaaagatgaattattatacttaatgcgtactttttacatttaaaattttcagatagatcatttttacacgatagaaatttacctctaactggcatctcgaggatagaaacacagacaaaacaataaatacagaaacaaaagcaaaaaaaaaaatctttattcttttggcttgattgtaatgtggcttaccggtagctctgtatggtcatagcattttcccgcatgcattcaacacactacaaatcaacagctttagtataaaggatctacaatgaaggttgtttttgtgaaacaaaacgtttgtgattggcaagatcatttcactaactggtttggtggaaaacagtgagagaaagagagagagagagagagagagagagagagagagagagagagagagagagagagagagagaagaaaacttggttcccaaatcatatctgatacagctctagtgccatgtgggtcagtaagattctatctatccatctatctgtataaacgaacattaagaagatggatgaatggaggggaaggctaggtgagtacatcccactcagataatgcctagagtatctatcatctgctccccttgaaatctcttgtcaatgataaggcatcactattgaaagcaaatggacattagacttggaatgagaattgtttcaagtggaaatatgtgcaagtccacagtaccaacaatgacagcagagccctgtactgcctcttaggccttatctctctcttccttggcggagtgccttaattaaaaagtgccgggaacagaaactaatgataggactgtgacatcaacctgaagatacttttaatttcccattttatgtacaaaaggcttcgaaataaaataaactgaactccccccatttttttttacaatatgtatatttcttagaaaactctaaccatataccttcaacagatctaagtagcttgccacttgtttacactgtcagacatctcaccggagtgttcaattaagggtagggagaacaaagagcagggatttcttccttgtttactgcaacacattgctcagtgtcgtgaagattgagttcctgatggaacaatccacttcactccacctctgacatatggcttccctattagacttctgaacagcagaagggttaagatacagcagcagcagcaagagagacatgcagcagtgacagcttcaaactctaagggaaccaatgacgtcatgtcacctgttgaaagcttgcaaactatacttaactgtggtacatatttgatgcagtaaatactgtgcttaaatcattttcgttggctcaaacatgcaccactgggtaaaattactatttacaaagcagacttttgttttgttttgttttgttttaattgacatacactatgtcaaccttaccaagagcagaagatggctaaacaatactgcaggaaaaaaagcagaaccaacttcagaaagtggctgtggggatggtttttggtagtttgggtttcttagaaaggactgagaggatatatatatatatatactttttttttttttttaccaaaggacacttatcaaaaaatgttatagtcatgctgcctggactctgagcatgtgatggtctgtgtgtgcatatgtatgcatgtgtgtatacatatatatgtatatacacggccatatacatatatacatatatacatgtacatataatgaactatgtaaaaataaaacaactctttgatggttgtgactctatggaacatttacaggcacattaaaattcttctggatgaaacaccttaaaaatatgaatagctatttaagcacctcaaaaaatctaaaaacatcctgaaatgagaagtataccctttccgtgtgtgatgggatattgtcatgtgtggatgaaaactgcagcatgccttcattgaaaatagatctcattatacacagagaaatgtagtatcccctccttaatccctctccccaaacgtaaacccagttacaaaaatagtcacatataagagtaaacaacccgtgaattaaaaaaaaaaaaaaggtgataaagtcacagcacacattttgtaaaaatatggcaggtgtggcagttaaaacacaaacggtggtgacagttaatgctatcaagtgtcacatgttaaatttacataaaaatttaactttcctccccatttccaaatgttcctctggtctgagtagccattgctctcctccactcttcagcagtgtcagctggttgcgaaaacagaagcctcctgtcggtgctctttgtctggtttggcgagtcccactttgctgacccgaggtcctgtctggttataggcactgaccttaagtatacacttatagaaacagtcagtttggcatagacctcctgagggagtcgcagatacatcaccaacacaggctgtaaacagttgatcacaaaatggaatattcttttttttttaatttttaattttcattaattttttatttttttactttttactttccctgatatctttccccttgtcctctttttctgatttgtccttttcaaatttttccttctccggtttggtcacgctatcgtaggaaggtggcgaagtggtggagggtgtcacgtcagtcttctctggagttgaattctcattcagtttatccgtgatgatgtcttctttgatgggcgttccctcatcttctttacccttgtcttttttatatatagacgaaaccttcttaactttctgtttcagaagatagcgtctgtaagctcgctggatgacaatagcagacacctcctcttgtttgcgcttcagagtggtggtaatgggctcataagagaccttggagggattggaagccatgaaccgctcttccatctggattcgaagagcatccatctctccactctcacccaggacccgctttgtaaaagcaaataagatgtccaggcagtggatgcggtctccactcaccatgggcaggtccatggcaatgagctgcactttgtttggctttgcgatgaggaggggaggatccagggcagctgcaaagtcagagagcttgcagaactctatgaactgggtggcgtcagggtcgaacttctcccagacttcgtagaacatctcaaagtcgtcctcactcagaggctctgcactttcttctgtggcaacgctgaagttctccaggatgacagcaatgtacatgttcaccacaaccaggaaggatatgatgatgtagctgacaaaaaagaaaatccccacagatgggttcccacagtctcccttcaccgagcttccaggatgatctttttcagggtcacaatcgggaggtccactatttagtataggggccagcagtccatcccagcccgcagaagtggtgatttggaacaggcagatcatgctgttgccaaaggtctcaaagttgaacatgtcatcaatcccaacttccctcttaacgtaggcaaagttggacatcccaaagatggcgtagatgaacatgaccaggaaaagcaggaggccgatgttaaacagcgcaggaagggacatcatcagagcaaagagcagcgtgcggatccccttggcgcctttgatcaggcgtaggattcgtccaatcctggccaggcggatgactcggaacagggtaggggacacgaaatacttctctatcagctccgcgagaaacatccctacaatggagaggatgaccaccacaaaatcaaaaatgttccatccaatggtgaaataataatgacggagtgagataagcttgagcacacactcgccggtgaacaggacgatgaacaccaggttgatccaatacaggatgttggtcatctcttggctctggtcgtccgtttccaccatcatggtcaccatgttgaggcagatgaggatcatgatgctgatgtcaaacacttgtttggttacaaaatcaaagaccatcccttgaaacttgttagcagggcgaggtatcggtttttgtggtttctttgagcctagcttcttcattgcattgtagtatttcttctgttcttctgtcataaaaatgtcttgacctccaaacttcttcttctgttggttgaagttatctatgatgacgccgatgaacaggttcagtgtgaagaatgagccgaaaataataaagatgacaaagtaaaggtacatgtatagattgtcttcatatttgggttgcagttctacatttcttgagtcaacagctgcatacatgatatccatccatcctttaaatgtggctacttgaagcagagaaagatatccaagtcccacgttgtcaaagttgactttcacattcttccacctggctgtctgattgctctctatgagagcctggcactcactgtagttgttgaccacgctcacatcaaacatttccccggtggtgtagttgatgcaatgatagaacttgccggcaaagagattcacccccatgatactgaatattagccaaaagatcaggcagaccagaagtacgttcattatggatgggattgcacctaggagagcgtttacaacaaccctcattccttcaaatcgggataaggctcgtagaggcctcagtgctcttaatgttcggagggatttgatggcaccaagttctgaatagcccaaggcatttgcagttaagctaaccagtgagacatcaacgatcaggaagtccagccagcaccaggcattggtgaagtacatttggaaaccatatgcaacccactttagcaacatctccaggatgaagatgtaagtgaagaccttgtcagcatactccagcatggtcttgatggtttttcgctgctcgatgtaaatgtcttcaaaggccagagcaccgctgctgagcagaatcatgaagacgatgaaggtttcaaaccagttgtgctctactatcttgtagcaggttttcctcaagttccaccagagtttgcctttgccttcttctatgcttatctgacaacacttgaactttcttacacagtcttctgtgaaacaggcttctggctcaagggactcttctggttcggcctctggttgctctccctctgcaggagcacctatatcaactgtactgccttcagatgaactagttgcattcaatttctccttgctttcttccatatctgattcactgctgaattcttctgtatttaagttttcaaagtcagactctcccacagcaatgggcacagtcacggtgaggctggggttgttgatgaatgacatgtaatcactctcatctaccacgtacttctccacactgctgcctatgccactggtcgtcccgtttccatctttgaggtaattcaggtccttgcctatttctatggttgtgtggttggagatacaactgtctttcttgttattcagatcttcaaggggtttgatttcatctagagctttctgctttctgacaaaggctttctgaatgaattcacgtatcttccttttaacaaaatcaatccccttctgcatccttcccacggctatctggaggttgttcatttcgttatcgtcatctgtggcagccaggttgtccgagctgaaagaactgaggagcaaggccaagaagaggttcagaacgacaaggttcccaatcaccatgaccatcatgaagacagtaagacacatggtctggcctgcgacctccatgcagtcccacatggtctctatccactccccacacagcacgcggaacacgatcaggaacgagtggaagaagtcatgcatgtgccagcgcggcagctcacaatcattggaaatcttgcaaacacactccttgtagctctttccaaacagctgcatgccgaccacggcaaaaatgaagacgatgatggccagcaccagggtcaggttgcccagcgcgcccaccgagttgccgatgatcttaatgagcatattcagtgtgggccaggattttgccaacttgaagactctaagcagtcggaaagatcggagaactgacagtccttccacattcgccaagccgagttccattaaactaaggctcactataaagccatcaaagatattccagccttcttgaaagtaataatatggatccatggctattatcttgagaaacatttctgcggtgaagatcccagtgaagaccaaattcccaacagacagcacactgctgaactgctccgtcatcgggtagtgctccatggccatgaagagtgtatttaacacaatgcagatggtgatggccaggtcaacgaatggatccatcactaccagattgacaacatgttttacctttagccatggcttacaacagtcccaaatcaggcacatattagcaaatttataccagcatggagggcatttctgtctggattcttcaagttcttccatagtgttggtcaaaatgctggccatactcattgctctttgccttgatgtagggtcttccaacaagtccatagaaacatggtaagaactggacctcctcttccttatttctgtttcagtagttgtgccctctggtagtagctgccccacaggagatgtgagagcagaagggcctccaactagggagaccacaccgttgcagtccactgcactgtgcatcttcccattcatgggtagagtgggtatcccccgggaggcacggctggcctggctaacgttgctgggacgcctttctccatgtctgtgtggtacaaatagagagtctctcctgctgtcgttgtcctcaaacgtgctgtgttcatcgtccgcaaagtcattttcagaaccaatatccttcacccgacctttgaagctgaaaaggcttgctctactgttgcgtctcggagaaaaaagggagcctcggatgctcaagagagactggtgtggagaggaaaacctcttctcgtaggtcagtctactcccttctagggaaaaccggaagcctttctttcgtatgctgtcttcagaggcagatttccgcacagcatcttccttctcttcctctccagcctgctctttctgtttctttttcttccttctgtttttcagctccttttcactcttggaacttaactttgaagctacggaagaactctccgagaaaacacctatcccacctgctccactgaagtctctggattctgcagacgctgctgcagctgctgcctgagcttcttcttgctgcttcttaagttgctccagcatctgctgaaactctgcctccttctgttcagcttcctccagcgtggcctggttctgttcttcataggccatggccaccacagccaggatcaaatttattaggtagaatgagcccaagaaaatcacaagcacgaaaaatatcatatatgttttcccagcagcacgcaaggtcagctgataaaggttttcccagaagtcttgagtcataagacgaaataaggacaagaaggcccagctgaaggtgtcaaaactcgtgtagccatagttggggtttctcccagccttcacacagatgtatccttccggacactggccagcatccgagctgttaccacaaagcagagcatcgttttgtccttccaaaaaataaaagtgacttttatcttcaatatattcatcccagttaaacatgttcattgtcctattgaaggcagtaccattccaatccaatgagttattaaagaaggaagtgatgtttatttcaaaggtagaattgtctgggggccactgcaagcatttattcctcaggttgcccatgaagagctgcagcccgatgagagcaaagacactcagacagaacacagtgagtatcatgacgtcagacagcttcttcaccgactggatcagggcccccacgatggtcttcaggcctggaattacagaaatagttttcaaagctctcaagactctgaaagttcgaagagctgaaacattgcctaggtttacaaattctgttacatacgcaaaggtaatgactgtgaaatccagccagttccagggatcccgtagaaatgtgaaatcttctagacaaaagccccttgcaagtattttaataagtgattcaaaagtataaattcctgtaaaagtatactccacattctttgtccagtctggagggttgctcatggtcataaatacacagttggtaagaattgtgcacatgataagcacattgaataaagaatgtaccaaaatcttaatagctaattttctaatggggttgaagggagttaaaatgtacagggcggaggtggcactgaaccgagagattgctttccctttattcaatactataaaggttttcttattgatatagtaggggtccaggtcctccaggggctctgacaccatctctggaggaatgtctccataaataaaaggaagggattttcctgcttccaagtcactatttggctttgggccattttcgtcgtcttcgtccttgcgttcctgtttgggtctcttagctttctcttctgcaatgcgttgttcaatagcagcaagggattccctggtaaagaagcggaagctgtcaggtcctggcggtaccagcactgattgtgccatcttttcatcctgcttctttaatcactgtttagctcctcgcataagaaagtgccctgaagaagctgttacagagttttgggttgataggctggaagcaagaagactgcagctaaaattccatcaggctttaaaaaaaaaaaaatttttttttttttcaaattctcctttaaagaccacacc

SEQ ID NO: 45 - DNA, 8556 bp, Rattus norvegicus
  source 1..8556: mol_type = genomic DNA
ccctgtctttgcttttcctctttagtaaggatattattgcacatgtgagatttttacttcctactgtaggctgaattctagaaacctgcactggagactgctacattcaacacgcacatggattctgtgctatgattaccattccttttatttcagcactttcttacgcgaggagctaaacagtgactaaagaagcaggatgaaaagatggcacggtcagtgctggtacctccaggacctgacagcttccgcttctttaccagggaatcccttgctgctatcgaacagcgcattgcagaagagaaagctaagagacccaaacaggaacgcaaggacgaagacgatgaaaatggcccaaagccaaatagtgacttggaagcaggaaaatcccttccttttatttatggagacattcctccagagatggtgtcagaaccactggaggacctggacccctactatatcaataagaaaacctttatagtattgaataaggggaaagcaatctcgcggttcagcgccacctctgccctgtacattttaactcccttcaaccccattagaaaattagctattaagattttggtacattctttattcaatgtgcttatcatgtgcacaattcttaccaactgtgtgtttatgaccatgagtaaccctccagactggacaaagaatgtggagtatacttttacaggaatttatacttttgaatcacttattaaaatccttgcaaggggcttttgtctagaagatttcacatttctacgggatccctggaattggttggatttcacagtcattacttttgcgtatgtaacagaatttgtaaacctaggcaatgtttcagctcttcgaactttcagagtcttgagagctttgaaaactatttctgtaattccaggcctgaagaccatcgtgggggccctgatccagtcagtgaagaagctctctgacgtcatgatcctcaccgtgttctgtctcagtgtctttgctctaatcgggctgcagctcttcatgggcaacctgaggaataaatgcttgcagtggcccccagacaattctacctttgaaataaatatcacttccttctttaataactcattggattggaatggtactgccttcaataggacggtgaacatgtttaactgggacgaatatattgaagataaaagtcacttttattttttggaaggacaaaacgatgctctgctttgtgggaacagctcggatgctggacagtgtccagaaggatacatctgtgtgaaggctgggagaaaccccaactacggctacacaagttttgacaccttcagctgggccttcttgtccttatttcgtctcatgactcaagacttctgggaaaacctttatcagctgaccttgcgtgctgccgggaaaacatacatgatattttttgtgctggtcattttcttgggctcattctacctgataaatttgatcctggctgtggtggccatggcctacgaggaacagaaccaggccacactggaggaggctgaacagaaggaggcagagtttcagcagatgctggagcaactgaagaagcagcaggaggaagctcaggcagcagctgcagcagcgtccgcagaatccagagacttcagcggggcaggcgggataggtgttttctcggagagttcgtcagtagcctcaaagttaagttccaaaagtgaaaaggagttgaaaaacagaagaaagaaaaagaaacagaaagaacaggctggggaggaagagaaggaagacgcggtgcggaaatctgcctctgaggacagcatacgaaagaaaggcttccggttttccctggaaggaagtagattgacctacgagaagagattttcctctccgcaccagtctctcttgagcatccgaggctccctattttctccaagacgcaacagtagagcaagccttttcagcttcaaaggtcgagtgaaggatattggttccgaaaatgactttgcagacgatgaacacagcacatttgaggacaacgacagcagaagagactctctatttgtaccacacagacatggagaaaggcgtcctagcaatgtcagccaggccagccgtgcctcccgggggatacccactctacccatgaatgggaagatgcacagtgcagtggactgcaacggtgtggtgtccctggttggaggcccctctgcgctcacatcgcctgtggggcagctgctgccggagggcacaactactgagacagaaataaggaagaggagatccagttcttaccacgtctctatggacttgttggaagacccttcaaggcaaagggcaatgagtatggccagtattttgacgaacactatggaagaacttgaagaatccagacagaaatgcccaccctgctggtataaatttgctaatatgtgcctgatttgggactgttgtaagccatggctaaaggtaaaacacgttgtcaatctggtagtgatggatccatttgttgacctggccatcaccatctgcattgtgttaaatacgctcttcatggccatggagcactaccccatgactgagcagttcagcagtgtgctgtctgttgggaatttggtcttcactgggatcttcacggcagaaatgtttctcaagataatagccatggatccatattattacttccaagaaggctggaatatctttgatggctttatagtgagccttagtttaatggaactcggcttggcgaatgtggaaggattgtcagttctccgatcattccggctgcttagagtcttcaagttggcaaagtcctggcccacactgaacatgctcattaagatcatcggcaactcggtgggtgcactgggcaacctgaccctggtgctggccatcatcgtcttcatttttgctgtggtcggcatgcagctgtttggaaagagctacaaggagtgtgtctgtaagatttccaatgattgtgagctcccgcgctggcacatgcacgacttcttccactccttcctgatcgtgtttcgagtgctgtgtggggagtggatagagaccatgtgggactgcatggaggtcgcgggccagaccatgtgccttactgtcttcatgatggtcatggtgattgggaaccttgttgtcctgaacctcttcttggccttgctcctcagttctttcagctcagacaacctggctgccacagatgacgataacgaaatgaacaacctccagatagccgtgggaaggatgcagaagggaattgattttgttaaaaggaagatacgtgaattcattcagaaagcctttgtcagaaagcagaaagctttagatgaaatcaaaccgctggaagatctgaataacaagaaagacagttgtatctccaaccacacgaccatagaaataggcaaggacctcaattacctcaaagatggaaacgggacgaccagtggcataggcagcagtgtggagaagtatgtggtagatgagagtgattacatgtcgttcataaacaaccccagcctcaccgtgactgtgcccatcgcccttggagagtctgactttgaaaacttaaacacggaagaattcagtagtgagtcagatatggaagaaagcaaggagaaattgaatgcaactagctcatctgagggcagtacggttgatataggcgctccggcagagggagagcagccagaggccgaaccggaagaatcgcttgaaccggaagcgtgtttcacagaagactgtgtgagaaagttcaagtgttgtcagataagcatagaagagggcaaaggcaagctctggtggaacttgaggaaaacgtgctacaagatagtagagcataactggtttgaaaccttcatcgtctttatgattctgctcagcagtggtgctctggcctttgaagacatttatattgagcagcgaaagaccatcaagaccatgctggagtatgctgacaaggttttcacttatatcttcatcctggagatgcttctaaagtgggtggcctatggtttccaaatgtatttcaccaatgcctggtgctggctggacttcctgatcgttgatgtctccttggttagcttaactgcaaatgccttgggctattcggaacttggtgccatcaagtccctccgaacgttaagagctctgagacctctacgagccttatcccgatttgaaggaatgagggttgttgtaaacgctctcttaggcgccatcccctccataatgaacgtacttctggtctgcctgatcttttggctaatattcagtatcatgggggtgaatctctttgctggcaagttctaccattgcatcaactacaccacgggggaaatgtttgatgtgagcgtggtcaacaactacagtgaatgccaagctctcattgagagcaatcagacggccaggtggaagaacgtgaaggtcaacttcgataacgtgggactcggatacctttctctgctccaagtagccacctttaaaggatggatggatatcatgtatgcagctgttgactcaagaaatgtagaactgcagcccaaatacgaagacaatctctacatgtacctttactttgtcatcttcatcatcttcggctcattcttcaccctgaacctgttcattggtgtcatcatagacaacttcaaccagcagaagaagaagtttggaggtcaagacatctttatgacagaagaacagaagaaatactacaatgcaatgaagaagctcggctccaagaaaccgcagaagcccattcctcggcctgcaaacaaatttcaagggatggtctttgattttgtaaccaaacaagtctttgacatcagcatcatgatcctcatctgcctcaacatggtgaccatgatggtggaaacggacgaccagagtcaggagatgaccaacatcctgtactggatcaacctggtgttcattgtcctgttcacgggcgagtgtgtgctgaagctcatctccctccgccattattatttcaccatcggctggaatatttttgattttgtggtagtcatcctctccattgtaggaatgtttctcgcggagctgatagagaagtatttcgtgtcccctaccctgttccgagtcatccgcctggccaggattggacgaatcctacgcctgatcaaaggcgccaaggggatccgcactctgctctttgctctgatgatgtcccttcctgcgctgttcaacatcggcctcctgcttttcctggtcatgttcatctacgccatctttgggatgtccaactttgcctacgttaagagggaagttggaattgatgacatgttcaactttgagacttttggcaacagcatgatctgcctgttccaaatcaccacctctgccggctgggacggactgctggcccctatactaaatagcggacctcctgactgtgaccctgaaaaagatcaccctggaagctcggtgaagggggactgtgggaacccatctgtggggattttcttttttgtcagctacatcatcatatccttcctggtggtggtgaacatgtacatcgctgtcatcctggagaacttcagcgtcgccaccgaagaaagtgcagagcctctgagtgaggacgactttgagatgttctacgaggtctgggagaagttcgaccctgacgccactcagttcatagagttctgcaagctttctgactttgcagctgccctggatcctcccctcctcatcgcaaagccaaacaaagtccagctcattgccatggacctgcccatggtgagtggagaccgcatccactgcctggacatcttgtttgcttttacaaagcgggtcctgggcgagagtggagagatggacgctcttcgaatccagatggaagaaaggttcatggcttccaacccctccaaggtctcttatgagcccattaccaccaccctgaaacggaaacaagaggaggtgtctgctattgtcatccagcgagcatacaggcggtatctcctgaagcagaaagttaagaaagtttcgtctatctataaaaaagacaaaggtaaagaagacgagggaacgcccatcaaagaagacatcatcacagataaactgaacgagaattcaactccagagaagactgatgtgacaccttccacaacttctccaccttcctacgatagcgtgacgaaaccggagaaggaaaaatttgaaaaggacaaatcagaaaaagaggacaaagggaaagatatcagggaaagtaaaaagtaaaaaaataaaataataataataataacgaaaattaaaaattaaaaaaaaaagaatattccatttcgtgatcaactgtttacagcctgtgttggtgatgtatctgtgactccctcaggaggtccatgccaaactgactgtttctctaagtgtatacttaaggtcagtgcctataacaagacaggacctcgggtcagcacactgggattcaccaaaccagacaaagagcaccgacgggaggcttctatgttcacaaccagctgacactgctgaagagcggagagcaatggctactcagactagaagaacatggaaacggggaggaaagttaaatttttatgtaaatttaacatgtgacacttgatagcggtaactgtcaccactgtttgtgttttaactgccacacctgccatatttttacaaaatgtgtgctgtgactttatcactttttttttttttgattcacgggttgtttactcttatatgtgactatttttgtaaacgggtttatgttcggggagagggattacggaggggattcgacgtttctctatgtataacgagatctattttcaacgaaggtaatgctgcagctctcattcacacacgacgatatcccatcacaccaggaaagagcttacttctcatttcaggatgtttttagattttttgaggtgcttaaatagctattcatatttttaaggtgtttcatccagaggaattttaatgtgcctgtaaatgttccatagaaccacaaccatcaaaaagagttgttttatttttacatagttcattatatgtacatgtatatatgtctatatgtatatggccgtgtatatacatatatatgtatacacacatgcatacatatgcacacacagaccatcacatgctcagagtcctgacagcatgactataacatttttttaataagtgtcctttggtaaaaaaaatatatatatacatatatatatatctcctatcagtcctttctaagaaacccaaactaccaaaaaccacccccacggccactttctgaagttggttctgcttttttttccctgcagtattgtttagccatcttctgctcttggtaaggttgacatagtgtatgtcaattaaaaaacaacaacagcaacaaagtctgctttgtaaatagtaattttacccagtggtgcatgtttgagcaaatgaaaatgatttaagcacagtatttactgcatcaaatatgtaccacagttaagtatagtttgcaagctttcaacaggcgacatggtgtcactgggtcccttagagtttgaagctgtcaccgctgcatgtctctcttgctgatgccgctgtatcttaacccttctgctgttcagaagtctaacagggaagccatacgtcggtggcgaagtgaagcaaatcggtccaccaggaactcactcttcgtgacatgagccatgggttgcggtaaacgggaaggagatccttgttcttggttctcccaaaccttaatggaacagccggtgagatgtctgacagtgtaagctgcttagatctgttaaaagtatgtgcttcgagttttctaaggaaatatacatattgtaaaaaaggggggctcattttattttatttcaaagccttttgtacataaaatgggaaattaaaagtatcttcaggttgacgtcacagttctaccgttagtttctgttccccggcactttttaatcaaggcacttcgtcacggaagagataaggcctaagaggcagtgtagggctctggctgtcgttgttggtactgtggacttgcgcgtatttccacttgaaacaattctcattccaagtctaatgtccatttgctttcaatagtgatgccttatcattgacaagagatttcaaggggagcagatgacactcttggcattgcctgagtaggatgtcctcacctagtgtttctcctctactcatccatcttttttaatgttcgtttacacagatagatagatggatagatagaatcttactcatccacatggcaccagagctgtttcaggtatgattcgggaaccaagcgctctctctctctctctctctctctctctctctctctctctctctctctctctctctctctctctgttttccacaaaaccagttagtgaaatgatatcgccaattacagccaaacactttgtttcacagacaaccttcaatgtagattctttatactaaagctgttgacttgtagcgtgttcatgaatgcatgcaggaaaatgctattaccatacagagctaccggtaagccacattacgatcaagccaaaagaataaagattttttttttgcttt

SEQ ID NO: 46 - DNA, 8556 bp, Rattus norvegicus
  source 1..8556: mol_type = genomic DNA
aaagcaaaaaaaaaatctttattcttttggcttgatcgtaatgtggcttaccggtagctctgtatggtaatagcattttcctgcatgcattcatgaacacgctacaagtcaacagctttagtataaagaatctacattgaaggttgtctgtgaaacaaagtgtttggctgtaattggcgatatcatttcactaactggttttgtggaaaacagagagagagagagagagagagagagagagagagagagagagagagagagagagagagagagagcgcttggttcccgaatcatacctgaaacagctctggtgccatgtggatgagtaagattctatctatccatctatctatctgtgtaaacgaacattaaaaaagatggatgagtagaggagaaacactaggtgaggacatcctactcaggcaatgccaagagtgtcatctgctccccttgaaatctcttgtcaatgataaggcatcactattgaaagcaaatggacattagacttggaatgagaattgtttcaagtggaaatacgcgcaagtccacagtaccaacaacgacagccagagccctacactgcctcttaggccttatctcttccgtgacgaagtgccttgattaaaaagtgccggggaacagaaactaacggtagaactgtgacgtcaacctgaagatacttttaatttcccattttatgtacaaaaggctttgaaataaaataaaatgagccccccttttttacaatatgtatatttccttagaaaactcgaagcacatacttttaacagatctaagcagcttacactgtcagacatctcaccggctgttccattaaggtttgggagaaccaagaacaaggatctccttcccgtttaccgcaacccatggctcatgtcacgaagagtgagttcctggtggaccgatttgcttcacttcgccaccgacgtatggcttccctgttagacttctgaacagcagaagggttaagatacagcggcatcagcaagagagacatgcagcggtgacagcttcaaactctaagggacccagtgacaccatgtcgcctgttgaaagcttgcaaactatacttaactgtggtacatatttgatgcagtaaatactgtgcttaaatcattttcatttgctcaaacatgcaccactgggtaaaattactatttacaaagcagactttgttgctgttgttgttttttaattgacatacactatgtcaaccttaccaagagcagaagatggctaaacaatactgcagggaaaaaaaagcagaaccaacttcagaaagtggccgtgggggtggtttttggtagtttgggtttcttagaaaggactgataggagatatatatatatgtatatatatattttttttaccaaaggacacttattaaaaaaatgttatagtcatgctgtcaggactctgagcatgtgatggtctgtgtgtgcatatgtatgcatgtgtgtatacatatatatgtatatacacggccatatacatatagacatatatacatgtacatataatgaactatgtaaaaataaaacaactctttttgatggttgtggttctatggaacatttacaggcacattaaaattcctctggatgaaacaccttaaaaatatgaatagctatttaagcacctcaaaaaatctaaaaacatcctgaaatgagaagtaagctctttcctggtgtgatgggatatcgtcgtgtgtgaatgagagctgcagcattaccttcgttgaaaatagatctcgttatacatagagaaacgtcgaatcccctccgtaatccctctccccgaacataaacccgtttacaaaaatagtcacatataagagtaaacaacccgtgaatcaaaaaaaaaaaaagtgataaagtcacagcacacattttgtaaaaatatggcaggtgtggcagttaaaacacaaacagtggtgacagttaccgctatcaagtgtcacatgttaaatttacataaaaatttaactttcctccccgtttccatgttcttctagtctgagtagccattgctctccgctcttcagcagtgtcagctggttgtgaacatagaagcctcccgtcggtgctctttgtctggtttggtgaatcccagtgtgctgacccgaggtcctgtcttgttataggcactgaccttaagtatacacttagagaaacagtcagtttggcatggacctcctgagggagtcacagatacatcaccaacacaggctgtaaacagttgatcacgaaatggaatattcttttttttttaatttttaattttcgttattattattattattttatttttttactttttactttccctgatatctttccctttgtcctctttttctgatttgtccttttcaaatttttccttctccggtttcgtcacgctatcgtaggaaggtggagaagttgtggaaggtgtcacatcagtcttctctggagttgaattctcgttcagtttatctgtgatgatgtcttctttgatgggcgttccctcgtcttctttacctttgtcttttttatagatagacgaaactttcttaactttctgcttcaggagataccgcctgtatgctcgctggatgacaatagcagacacctcctcttgtttccgtttcagggtggtggtaatgggctcataagagaccttggaggggttggaagccatgaacctttcttccatctggattcgaagagcgtccatctctccactctcgcccaggacccgctttgtaaaagcaaacaagatgtccaggcagtggatgcggtctccactcaccatgggcaggtccatggcaatgagctggactttgtttggctttgcgatgaggaggggaggatccagggcagctgcaaagtcagaaagcttgcagaactctatgaactgagtggcgtcagggtcgaacttctcccagacctcgtagaacatctcaaagtcgtcctcactcagaggctctgcactttcttcggtggcgacgctgaagttctccaggatgacagcgatgtacatgttcaccaccaccaggaaggatatgatgatgtagctgacaaaaaagaaaatccccacagatgggttcccacagtcccccttcaccgagcttccagggtgatctttttcagggtcacagtcaggaggtccgctatttagtataggggccagcagtccgtcccagccggcagaggtggtgatttggaacaggcagatcatgctgttgccaaaagtctcaaagttgaacatgtcatcaattccaacttccctcttaacgtaggcaaagttggacatcccaaagatggcgtagatgaacatgaccaggaaaagcaggaggccgatgttgaacagcgcaggaagggacatcatcagagcaaagagcagagtgcggatccccttggcgcctttgatcaggcgtaggattcgtccaatcctggccaggcggatgactcggaacagggtaggggacacgaaatacttctctatcagctccgcgagaaacattcctacaatggagaggatgactaccacaaaatcaaaaatattccagccgatggtgaaataataatggcggagggagatgagcttcagcacacactcgcccgtgaacaggacaatgaacaccaggttgatccagtacaggatgttggtcatctcctgactctggtcgtccgtttccaccatcatggtcaccatgttgaggcagatgaggatcatgatgctgatgtcaaagacttgtttggttacaaaatcaaagaccatcccttgaaatttgtttgcaggccgaggaatgggcttctgcggtttcttggagccgagcttcttcattgcattgtagtatttcttctgttcttctgtcataaagatgtcttgacctccaaacttcttcttctgctggttgaagttgtctatgatgacaccaatgaacaggttcagggtgaagaatgagccgaagatgatgaagatgacaaagtaaaggtacatgtagagattgtcttcgtatttgggctgcagttctacatttcttgagtcaacagctgcatacatgatatccatccatcctttaaaggtggctacttggagcagagaaaggtatccgagtcccacgttatcgaagttgaccttcacgttcttccacctggccgtctgattgctctcaatgagagcttggcattcactgtagttgttgaccacgctcacatcaaacatttcccccgtggtgtagttgatgcaatggtagaacttgccagcaaagagattcacccccatgatactgaatattagccaaaagatcaggcagaccagaagtacgttcattatggaggggatggcgcctaagagagcgtttacaacaaccctcattccttcaaatcgggataaggctcgtagaggtctcagagctcttaacgttcggagggacttgatggcaccaagttccgaatagcccaaggcatttgcagttaagctaaccaaggagacatcaacgatcaggaagtccagccagcaccaggcattggtgaaatacatttggaaaccataggccacccactttagaagcatctccaggatgaagatataagtgaaaaccttgtcagcatactccagcatggtcttgatggtctttcgctgctcaatataaatgtcttcaaaggccagagcaccactgctgagcagaatcataaagacgatgaaggtttcaaaccagttatgctctactatcttgtagcacgttttcctcaagttccaccagagcttgcctttgccctcttctatgcttatctgacaacacttgaactttctcacacagtcttctgtgaaacacgcttccggttcaagcgattcttccggttcggcctctggctgctctccctctgccggagcgcctatatcaaccgtactgccctcagatgagctagttgcattcaatttctccttgctttcttccatatctgactcactactgaattcttccgtgtttaagttttcaaagtcagactctccaagggcgatgggcacagtcacggtgaggctggggttgtttatgaacgacatgtaatcactctcatctaccacatacttctccacactgctgcctatgccactggtcgtcccgtttccatctttgaggtaattgaggtccttgcctatttctatggtcgtgtggttggagatacaactgtctttcttgttattcagatcttccagcggtttgatttcatctaaagctttctgctttctgacaaaggctttctgaatgaattcacgtatcttccttttaacaaaatcaattcccttctgcatccttcccacggctatctggaggttgttcatttcgttatcgtcatctgtggcagccaggttgtctgagctgaaagaactgaggagcaaggccaagaagaggttcaggacaacaaggttcccaatcaccatgaccatcatgaagacagtaaggcacatggtctggcccgcgacctccatgcagtcccacatggtctctatccactccccacacagcactcgaaacacgatcaggaaggagtggaagaagtcgtgcatgtgccagcgcgggagctcacaatcattggaaatcttacagacacactccttgtagctctttccaaacagctgcatgccgaccacagcaaaaatgaagacgatgatggccagcaccagggtcaggttgcccagtgcacccaccgagttgccgatgatcttaatgagcatgttcagtgtgggccaggactttgccaacttgaagactctaagcagccggaatgatcggagaactgacaatccttccacattcgccaagccgagttccattaaactaaggctcactataaagccatcaaagatattccagccttcttggaagtaataatatggatccatggctattatcttgagaaacatttctgccgtgaagatcccagtgaagaccaaattcccaacagacagcacactgctgaactgctcagtcatggggtagtgctccatggccatgaagagcgtatttaacacaatgcagatggtgatggccaggtcaacaaatggatccatcactaccagattgacaacgtgttttacctttagccatggcttacaacagtcccaaatcaggcacatattagcaaatttataccagcagggtgggcatttctgtctggattcttcaagttcttccatagtgttcgtcaaaatactggccatactcattgccctttgccttgaagggtcttccaacaagtccatagagacgtggtaagaactggatctcctcttccttatttctgtctcagtagttgtgccctccggcagcagctgccccacaggcgatgtgagcgcagaggggcctccaaccagggacaccacaccgttgcagtccactgcactgtgcatcttcccattcatgggtagagtgggtatcccccgggaggcacggctggcctggctgacattgctaggacgcctttctccatgtctgtgtggtacaaatagagagtctcttctgctgtcgttgtcctcaaatgtgctgtgttcatcgtctgcaaagtcattttcggaaccaatatccttcactcgacctttgaagctgaaaaggcttgctctactgttgcgtcttggagaaaatagggagcctcggatgctcaagagagactggtgcggagaggaaaatctcttctcgtaggtcaatctacttccttccagggaaaaccggaagcctttctttcgtatgctgtcctcagaggcagatttccgcaccgcgtcttccttctcttcctccccagcctgttctttctgtttctttttctttcttctgtttttcaactccttttcacttttggaacttaactttgaggctactgacgaactctccgagaaaacacctatcccgcctgccccgctgaagtctctggattctgcggacgctgctgcagctgctgcctgagcttcctcctgctgcttcttcagttgctccagcatctgctgaaactctgcctccttctgttcagcctcctccagtgtggcctggttctgttcctcgtaggccatggccaccacagccaggatcaaatttatcaggtagaatgagcccaagaaaatgaccagcacaaaaaatatcatgtatgttttcccggcagcacgcaaggtcagctgataaaggttttcccagaagtcttgagtcatgagacgaaataaggacaagaaggcccagctgaaggtgtcaaaacttgtgtagccgtagttggggtttctcccagccttcacacagatgtatccttctggacactgtccagcatccgagctgttcccacaaagcagagcatcgttttgtccttccaaaaaataaaagtgacttttatcttcaatatattcgtcccagttaaacatgttcaccgtcctattgaaggcagtaccattccaatccaatgagttattaaagaaggaagtgatatttatttcaaaggtagaattgtctgggggccactgcaagcatttattcctcaggttgcccatgaagagctgcagcccgattagagcaaagacactgagacagaacacggtgaggatcatgacgtcagagagcttcttcactgactggatcagggcccccacgatggtcttcaggcctggaattacagaaatagttttcaaagctctcaagactctgaaagttcgaagagctgaaacattgcctaggtttacaaattctgttacatacgcaaaagtaatgactgtgaaatccaaccaattccagggatcccgtagaaatgtgaaatcttctagacaaaagccccttgcaaggattttaataagtgattcaaaagtataaattcctgtaaaagtatactccacattctttgtccagtctggagggttactcatggtcataaacacacagttggtaagaattgtgcacatgataagcacattgaataaagaatgtaccaaaatcttaatagctaattttctaatggggttgaagggagttaaaatgtacagggcagaggtggcgctgaaccgcgagattgctttccccttattcaatactataaaggttttcttattgatatagtaggggtccaggtcctccagtggttctgacaccatctctggaggaatgtctccataaataaaaggaagggattttcctgcttccaagtcactatttggctttgggccattttcatcgtcttcgtccttgcgttcctgtttgggtctcttagctttctcttctgcaatgcgctgttcgatagcagcaagggattccctggtaaagaagcggaagctgtcaggtcctggaggtaccagcactgaccgtgccatcttttcatcctgcttctttagtcactgtttagctcctcgcgtaagaaagtgctgaaataaaaggaatggtaatcatagcacagaatccatgtgcgtgttgaatgtagcagtctccagtgcaggtttctagaattcagcctacagtaggaagtaaaaatctcacatgtgcaataatatccttactaaagaggaaaagcaaagacaggg

SEQ ID NO: 47 - DNA, 8776 bp, Macaca mulatta
  source 1..8776: mol_type = genomic DNA
aacagacattgggtaccatcgaatgagtgtcagaacagaaagctaaggtgaaggagggaggatgctgtggtcatcctttcttgtttttttcttctttaatgaggatagaatacatgtgagattttactttctactccagtaaaaattctgaagaattgcattgaagactattatattcaacacatacgtggattctgtgttatgatttacatttttctttatttcagcactttcttatgcaaggagctaaacagtgattaaaggagcaggatgaaaagatggcacagtcagtgctggtaccgccaggacctgacagcttccgcttctttaccagggaatcccttgctgctattgaacaacgcattgcagaagagaaagctaagagacccaaacaggaacgcaaggatgaggatgatgaaaatggcccaaagccaaacagtgacttggaagcaggaaaatctcttccatttatttatggagacattcctccagagatggtgtcagtgcccctggaggatctggacccctactatatcaataagaaaacgtttatagtattgaataaagggaaagcaatctctcgattcagtgccacccccgccctttacattttaactcccttcaaccctattagaaaattagctattaagattttggtacattctttattcaatatgctcattatgtgcactattcttaccaactgtgtatttatgaccatgagtaaccctccagactggacaaagaatgtggagtatacctttacaggaatttatacttttgaatcacttattaaaatacttgcaaggggcttttgtttagaagatttcacatttttacgggatccatggaattggttggatttcacagtcattacttttgcatatgtgacagagtttgtggacctgggcaatgtctcagcgttgagaacattcagagttctccgagcattgaaaacaatttcagtcattccaggcctgaagaccattgtgggggccctgatccagtcagtgaagaagctttctgatgtcatgatcttgactgtgttctgtctaagcgtgtttgcgctaataggattacagttgttcatgggcaacctacgaaataaatgtttgcaatggcctccagataactcttcctttgaaataaatattacttccttctttaacaactcattggatgggaatggtaccactttcaacaggacagtgagcatgtttaactgggatgaatatattgaggataaaagtcacttttattttttagaagggcaaaatgatgctctgctttgtggcaacagctcagatgcaggccagtgtcctgaaggatacatctgtgtgaaggctggtagaaaccccaactatggctacacgagctttgatacctttagttgggcctttttgtccttatttcgtctcatgactcaagacttctgggaaaacctttatcaactgacactacgtgctgctgggaaaacgtacatgatattttttgtgctggtcattttcttgggctcattctatctaataaatctgatcttggctgtggtggccatggcctatgaggaacagaatcaggccacattggaagaggctgaacagaaggaagctgaatttcagcagatgctcgaacagttgaaaaagcaacaagaagaagctcaggcagcagccgcggccgcatctgctgaatcgagagacttcagtggtgctggtgggataggagttttttcagagagttcttcagtagcatctaagttgagctccaaaagtgaaaaagagctgaaaaatagaagaaagaaaaagaaacagaaagaacagtctggagaagaagagaaaaacgacagagtccgaaaatcggaatccgaagacagcataagaagaaaaggtttccgtttttccttggaaggaagtaggctgacatatgaaaagagattttcttctccacaccagtccttactgagcatccgtggctcccttttctctccaagacgcaacagtagggctagtcttttcagcttcagaggtcgaacaaaggacattggctctgagaatgactttgctgatgatgagcacagcacctttgaggacaatgacagccgaagagactctctgttcgtgccgcacagacatggagaacggcgccacagcaatgtcagccaggccagtcgtgcctccagggtgctccccatcctgcccatgaatgggaagatgcatagcgctgtggactgcaacggtgtggtctccctggtcgggggcccttctaccctcacatctgctgggcagctcctaccagagggcacgactactgaaacagaaataagaaagagacggtccagttcttatcatgtttccatggatttactggaagatcctacatcaaggcaaagagcaatgagtatagccagcattttgaccaacaccatggaagaacttgaagaatccagacagaaatgcccaccatgctggtataaatttgctaatatgtgtttgatttgggactgttgtaaaccgtggttaaaggtgaaacaccttgtcaacctggttgtaatggacccatttgttgacctggccatcaccatctgcattgtcttaaatacactcttcatggctatggagcactatcccatgacggagcagttcagcagtgtactgtctgttggaaacctggtcttcacggggatcttcacagcagaaatgtttctgaagataattgccatggatccatattattacttccaagaaggctggaatatttttgatggttttattgtgagccttagtttaatggaacttggtctggcaaatgtggaaggattgtctgttctccgatcattccggctgctccgagttttcaagttggcaaagtcttggccaactctaaatatgctaataaagatcattggcaattctgtgggggctctaggaaacctcaccttggtgttggccatcatcgtcttcatttttgctgtggtcggcatgcagctctttggtaagagctacaaagaatgtgtctgcaagatttccaatgactgtgaactcccacgctggcacatgcatgacttcttccactccttcctgatcgtgttccgagtgctgtgtggagagtggatagagaccatgtgggactgtatggaggtcgctggccaaaccatgtgccttactgtcttcatgatggtcatggtgattggaaatctagtggttctgaacctcttcttggccttgcttttgagttccttcagttctgacaatctggctgccactgatgatgataacgaaatgaataatctccagattgctgtgggaaggatgcagaaaggaatcgattttgttaaaagaaaaatacgtgaatttattcagaaagcctttgttaggaaacagaaagctttagatgaaattaaacctcttgaagatctaaataataaaaaagacagctgtatttccaaccataccaccatagaaataggcaaagacctcaattatctcaaagacggaaatggaactactagtggcataggcagcagtgtagaaaaatatgtcgtggatgaaagtgattacatgtcatttataaacaaccctagcctcactgtgacggtaccaattgctgttggagaatctgattttgaaaatttaaatactgaagaattcagcagcgagtcagatatggaggaaagcaaagagaagctaaatgcaactagttcatctgaaggcagcacagttgatataggagctcccgccgagggagaacaacctgaggttgaacctgaggaatcccttgaacctgaagcctgttttacagaagactgtgtacggaagttcaagtgttgtcagataagcatagaagaaggcaaagggaaactctggtggaatttgaggaaaacatgctataagatagtggagcacaattggtttgaaaccttcattgtcttcatgattctgctgagcagtggggctctggcctttgaagatatatacattgagcagcgaaaaaccattaagaccatgttagaatatgctgacaaggttttcacttacatattcatcctggaaatgctgctaaagtgggttgcatatggttttcaagtgtattttaccaatgcctggtgctggctagacttcttgattgttgatgtctcattggttagcttaactgcaaatgccttgggttactcagaacttggtgccatcaaatccctcagaacactaagagctctgaggccactgagagccttgtcccggtttgaaggaatgagggtggttgtaaatgctcttttaggagccattccatctatcatgaatgtacttctggtttgtctgatcttttggctaatattcagtataatgggagtgaatctctttgctggcaagttttaccattgtattaactacaccactggagagatgtttgatgtaagcgtggttaacaactacagcgagtgcaaagctctcattgaaagcaatcaaactgccaggtggaaaaatgtgaaagtaaacttcgataacgtgggacttggatatctgtctctacttcaagtagccacgtttaagggatggatggatattatgtatgcagctgttgactcaagaaatgtagaattgcaacccaagtatgaagacaacctgtacatgtatctttattttgtcatctttattatttttggttcattctttaccttgaatcttttcattggtgtcatcatagacaacttcaaccaacagaaaaagaagtttggaggtcaagacatttttatgacagaagaacagaagaaatactacaatgcaatgaaaaaactgggttcaaagaaaccacaaaaacccatacctcgacctgctaacaaattccaaggaatggtctttgattttgtaaccaaacaagtctttgatatcagcatcatgatcctcatctgccttaacatggtcaccatgatggtggaaaccgatgaccagagtcaagaaatgacaaacattctgtactggattaatctggtgtttattgttctgttcactggagaatgtgtgctgaaactgatctctcttcgttactactatttcactattggatggaatatttttgattttgtggtggtcattctctccattgtaggaatgtttctggctgaactgatagaaaagtattttgtgtcccctaccctgttccgagtgatccgtcttgccagaattggccgaatcctacgtctgatcaaaggagcaaaggggatccgcacgctgctctttgctttgatgatgtcccttcctgcattatttaacatcggcctcctgctcttcctggtcatgttcatctacgccatctttgggatgtccaactttgcctatgttaagagggaagttgggatcgatgacatgttcaactttgagacctttggcaacagcatgatctgcctgtttcaaattacaacctctgctggttgggatggattgctagctcctattcttaatagtggacctccagactgtgaccctgaaaaagatcaccctggaagctcagttaagggagattgtgggaacccatctgttgggattttcttttttgtcagttacatcatcatatccttcctggttgtggtgaacatgtacatcgcggtcatcctggagaacttcagtgttgctactgaagaaagtgcagagcccctgagtgaggatgactttgagatgttctatgaggtttgggagaagtttgatcccgatgcgacccagtttatagagtttgccaagctctctgattttgcagatgccctggatcctcctcttctcatagcaaaacccaacaaagtccagctcattgccatggatctgcccatggtcagcggtgaccggatccactgcctcgacatcttatttgcttttacaaagcgtgttttgggtgagagtggagagatggatgcccttcgaatacagatggaagagcgattcatggcatcaaacccctccaaagtctcttatgagcccattaccaccacgttgaaacgcaaacaagaggaggtgtctgctattattatccagagggcttacagacgctacctcttgaagcaaaaagttaaaaaggtatcaagtatatacaagaaagacaaaggcaaagaatgtgatggaacacctatcaaagaagatactctcattgataaactgaatgagaattcaactccagagaaaaccgatatgacgccttccaccacatctccaccctcgtatgatagtgtgaccaaaccggaaaaagaaaaatttgaaaaagacaaatcagaaaaggaagacaaagggaaagatatcagggaaagtaaaaagtaaaaagaaaccaagaatattccattttgtgatcaattgtttacagcccgtgatggtgatgtgtttgtgtctacaggactcccacaggaggtctatgccaaactgactgtttttacaaatgtatacttaaggtcagtgcctacaacaagacagagacctctggtcagcaaactggaactcagtaaactggagaagtagtatcgacaggaggtttctattttcacaaccagctgacactgctgaagagcagaggcgtaatggctactcagacgataggaaccaatttaaaggggggagggaagttaaatttttatgtaaattcaacatgtgacacttgataatagtaattgtcaccactgtttatgttttaactgccacacctgccatatttttacaaaacgtgtgctgtgaatttatcacttttctttttaattcacaggttgtttactattatatgtgactatttttgtaaatgggtttgtgtttggggagagggattaaagggagggaattctacatttctctattgtattgtataactggatatattttaaatggaggcatgctgcaattctcattcacacatgaaaaaaaatcacatcacaaaaggaaagactttacttcttgtttcaggatgtttttagatttttgaggtgcttaaatagctattcgtatttttaaggtgtctcatccagaaaaaatttaatgtgcctgtaaatgttccatagaatcacaagcattaaagagttgctttatttttacataatccattaaatgtacatgtatatatgtatatatgtatatgtgcgtgtatatacatatatatgtatacacacacacacagagatgtacacataccattacattgtcattcacagtcccagcagcatgactatcacatttttgataagtgtcctttggcataaaataaaaatatcctatcagtcctttctaagaaacctgaattgaccaaaaaacatccccaccaccactttataaagttgattctgctttatcctgcagtattgtttagccatcttctgctcttggtaaggttgacatagtatatgtcaatttaaaaaataaaagtctgctttgtaaatagtaattttacccagtggtgcatgtttgagcaaacgaaaatgatgatttaagcacactacttattgcatcaaatatgtaccacagtaagtatagtttgcaagctttcaacaggtaatatgatgtaattggttccattatagtttgaagctgtcactgctgcatgtttatcttgcctatgctgctgtatcttattccttccactgttcagaagtctaatatgggaagccatatgtcagtggtaaagtgaagcaaattgttctaccaagacctcattcttcatgtcattaagcaataggttgcagcaaacaaggaagagcttcttgctttttattcttccaaccttaattgaacactctatgatgaaaagcccgactgtacaaacacgttgcaagctgcttaaatctgtttaaaatatatggttagagttttctaaggaaatataaatactgtaaaaagttcattttattttatttttcagccttttgtacataaaatgagaaattaaaagtatcttcaggtggatttcacagtcactattgttagtttctgttcctagcacttttaaattgaagcacttcacaaaataagaagcaaggactaggatgcagtgtaggtttctgcttttttattagtactgtaaacttgcacacgtttcaatgtgaaacaaatctcaaactgagttcaatgtttatttgctttcaatagtaatgccttatcattgaaagaggcttaaagaaaaaaatcagctgatattcttggcattgcttgaatccaatgtttccacctagtctttttattcagtaatcatcagtcttttccaatgtttgtttacacagatagatcttattgacccatatggcactagaactgtatcagatataatatgggatcccagctttttttcccccccacaaaaccaggtagtgaagttatattaccagttacagcaaaatactttgtgtttcacaagcaacaataaatgtagattctctatactaaagctattgacttgtagtgtgttggtgaaatgcatgcaggaaaatgctgttaccataaagaacggtaaaccacattacaatcaagccaaaagaataaaggtttcgcttttgtttttgtatttaactgttgtctttgtttctatctttgaaatgccatttaaaggtacatttctatcatgtaaaaataatctatctgaaaaacaaatgtaaagaacacacattaattatgataattcatctttcaattttttcatggaatggaagttaattaagaagagtgtattggataactactttaatattggccaaaaacctagatatggcattaggtagagtagtggaaagttacaaaaattaataaaaaattgactaacactttaa

SEQ ID NO: 48 - DNA, 8776 bp, Macaca mulatta
  source 1..8776: mol_type = genomic DNA
ttaaagtgttagtcaattttttattaatttttgtaactttccactactctacctaatgccatatctaggtttttggccaatattaaagtagttatccaatacactcttcttaattaacttccattccatgaaaaaattgaaagatgaattatcataattaatgtgtgttctttacatttgtttttcagatagattatttttacatgatagaaatgtacctttaaatggcatttcaaagatagaaacaaagacaacagttaaatacaaaaacaaaagcgaaacctttattcttttggcttgattgtaatgtggtttaccgttctttatggtaacagcattttcctgcatgcatttcaccaacacactacaagtcaatagctttagtatagagaatctacatttattgttgcttgtgaaacacaaagtattttgctgtaactggtaatataacttcactacctggttttgtgggggggaaaaaaagctgggatcccatattatatctgatacagttctagtgccatatgggtcaataagatctatctgtgtaaacaaacattggaaaagactgatgattactgaataaaaagactaggtggaaacattggattcaagcaatgccaagaatatcagctgatttttttctttaagcctctttcaatgataaggcattactattgaaagcaaataaacattgaactcagtttgagatttgtttcacattgaaacgtgtgcaagtttacagtactaataaaaaagcagaaacctacactgcatcctagtccttgcttcttattttgtgaagtgcttcaatttaaaagtgctaggaacagaaactaacaatagtgactgtgaaatccacctgaagatacttttaatttctcattttatgtacaaaaggctgaaaaataaaataaaatgaactttttacagtatttatatttccttagaaaactctaaccatatattttaaacagatttaagcagcttgcaacgtgtttgtacagtcgggcttttcatcatagagtgttcaattaaggttggaagaataaaaagcaagaagctcttccttgtttgctgcaacctattgcttaatgacatgaagaatgaggtcttggtagaacaatttgcttcactttaccactgacatatggcttcccatattagacttctgaacagtggaaggaataagatacagcagcataggcaagataaacatgcagcagtgacagcttcaaactataatggaaccaattacatcatattacctgttgaaagcttgcaaactatacttactgtggtacatatttgatgcaataagtagtgtgcttaaatcatcattttcgtttgctcaaacatgcaccactgggtaaaattactatttacaaagcagacttttattttttaaattgacatatactatgtcaaccttaccaagagcagaagatggctaaacaatactgcaggataaagcagaatcaactttataaagtggtggtggggatgttttttggtcaattcaggtttcttagaaaggactgataggatatttttattttatgccaaaggacacttatcaaaaatgtgatagtcatgctgctgggactgtgaatgacaatgtaatggtatgtgtacatctctgtgtgtgtgtgtatacatatatatgtatatacacgcacatatacatatatacatatatacatgtacatttaatggattatgtaaaaataaagcaactctttaatgcttgtgattctatggaacatttacaggcacattaaattttttctggatgagacaccttaaaaatacgaatagctatttaagcacctcaaaaatctaaaaacatcctgaaacaagaagtaaagtctttccttttgtgatgtgattttttttcatgtgtgaatgagaattgcagcatgcctccatttaaaatatatccagttatacaatacaatagagaaatgtagaattccctccctttaatccctctccccaaacacaaacccatttacaaaaatagtcacatataatagtaaacaacctgtgaattaaaaagaaaagtgataaattcacagcacacgttttgtaaaaatatggcaggtgtggcagttaaaacataaacagtggtgacaattactattatcaagtgtcacatgttgaatttacataaaaatttaacttccctcccccctttaaattggttcctatcgtctgagtagccattacgcctctgctcttcagcagtgtcagctggttgtgaaaatagaaacctcctgtcgatactacttctccagtttactgagttccagtttgctgaccagaggtctctgtcttgttgtaggcactgaccttaagtatacatttgtaaaaacagtcagtttggcatagacctcctgtgggagtcctgtagacacaaacacatcaccatcacgggctgtaaacaattgatcacaaaatggaatattcttggtttctttttactttttactttccctgatatctttccctttgtcttccttttctgatttgtctttttcaaatttttctttttccggtttggtcacactatcatacgagggtggagatgtggtggaaggcgtcatatcggttttctctggagttgaattctcattcagtttatcaatgagagtatcttctttgataggtgttccatcacattctttgcctttgtctttcttgtatatacttgatacctttttaactttttgcttcaagaggtagcgtctgtaagccctctggataataatagcagacacctcctcttgtttgcgtttcaacgtggtggtaatgggctcataagagactttggaggggtttgatgccatgaatcgctcttccatctgtattcgaagggcatccatctctccactctcacccaaaacacgctttgtaaaagcaaataagatgtcgaggcagtggatccggtcaccgctgaccatgggcagatccatggcaatgagctggactttgttgggttttgctatgagaagaggaggatccagggcatctgcaaaatcagagagcttggcaaactctataaactgggtcgcatcgggatcaaacttctcccaaacctcatagaacatctcaaagtcatcctcactcaggggctctgcactttcttcagtagcaacactgaagttctccaggatgaccgcgatgtacatgttcaccacaaccaggaaggatatgatgatgtaactgacaaaaaagaaaatcccaacagatgggttcccacaatctcccttaactgagcttccagggtgatctttttcagggtcacagtctggaggtccactattaagaataggagctagcaatccatcccaaccagcagaggttgtaatttgaaacaggcagatcatgctgttgccaaaggtctcaaagttgaacatgtcatcgatcccaacttccctcttaacataggcaaagttggacatcccaaagatggcgtagatgaacatgaccaggaagagcaggaggccgatgttaaataatgcaggaagggacatcatcaaagcaaagagcagcgtgcggatcccctttgctcctttgatcagacgtaggattcggccaattctggcaagacggatcactcggaacagggtaggggacacaaaatacttttctatcagttcagccagaaacattcctacaatggagagaatgaccaccacaaaatcaaaaatattccatccaatagtgaaatagtagtaacgaagagagatcagtttcagcacacattctccagtgaacagaacaataaacaccagattaatccagtacagaatgtttgtcatttcttgactctggtcatcggtttccaccatcatggtgaccatgttaaggcagatgaggatcatgatgctgatatcaaagacttgtttggttacaaaatcaaagaccattccttggaatttgttagcaggtcgaggtatgggtttttgtggtttctttgaacccagttttttcattgcattgtagtatttcttctgttcttctgtcataaaaatgtcttgacctccaaacttctttttctgttggttgaagttgtctatgatgacaccaatgaaaagattcaaggtaaagaatgaaccaaaaataataaagatgacaaaataaagatacatgtacaggttgtcttcatacttgggttgcaattctacatttcttgagtcaacagctgcatacataatatccatccatcccttaaacgtggctacttgaagtagagacagatatccaagtcccacgttatcgaagtttactttcacatttttccacctggcagtttgattgctttcaatgagagctttgcactcgctgtagttgttaaccacgcttacatcaaacatctctccagtggtgtagttaatacaatggtaaaacttgccagcaaagagattcactcccattatactgaatattagccaaaagatcagacaaaccagaagtacattcatgatagatggaatggctcctaaaagagcatttacaaccaccctcattccttcaaaccgggacaaggctctcagtggcctcagagctcttagtgttctgagggatttgatggcaccaagttctgagtaacccaaggcatttgcagttaagctaaccaatgagacatcaacaatcaagaagtctagccagcaccaggcattggtaaaatacacttgaaaaccatatgcaacccactttagcagcatttccaggatgaatatgtaagtgaaaaccttgtcagcatattctaacatggtcttaatggtttttcgctgctcaatgtatatatcttcaaaggccagagccccactgctcagcagaatcatgaagacaatgaaggtttcaaaccaattgtgctccactatcttatagcatgttttcctcaaattccaccagagtttccctttgccttcttctatgcttatctgacaacacttgaacttccgtacacagtcttctgtaaaacaggcttcaggttcaagggattcctcaggttcaacctcaggttgttctccctcggcgggagctcctatatcaactgtgctgccttcagatgaactagttgcatttagcttctctttgctttcctccatatctgactcgctgctgaattcttcagtatttaaattttcaaaatcagattctccaacagcaattggtaccgtcacagtgaggctagggttgtttataaatgacatgtaatcactttcatccacgacatatttttctacactgctgcctatgccactagtagttccatttccgtctttgagataattgaggtctttgcctatttctatggtggtatggttggaaatacagctgtcttttttattatttagatcttcaagaggtttaatttcatctaaagctttctgtttcctaacaaaggctttctgaataaattcacgtatttttcttttaacaaaatcgattcctttctgcatccttcccacagcaatctggagattattcatttcgttatcatcatcagtggcagccagattgtcagaactgaaggaactcaaaagcaaggccaagaagaggttcagaaccactagatttccaatcaccatgaccatcatgaagacagtaaggcacatggtttggccagcgacctccatacagtcccacatggtctctatccactctccacacagcactcggaacacgatcaggaaggagtggaagaagtcatgcatgtgccagcgtgggagttcacagtcattggaaatcttgcagacacattctttgtagctcttaccaaagagctgcatgccgaccacagcaaaaatgaagacgatgatggccaacaccaaggtgaggtttcctagagcccccacagaattgccaatgatctttattagcatatttagagttggccaagactttgccaacttgaaaactcggagcagccggaatgatcggagaacagacaatccttccacatttgccagaccaagttccattaaactaaggctcacaataaaaccatcaaaaatattccagccttcttggaagtaataatatggatccatggcaattatcttcagaaacatttctgctgtgaagatccccgtgaagaccaggtttccaacagacagtacactgctgaactgctccgtcatgggatagtgctccatagccatgaagagtgtatttaagacaatgcagatggtgatggccaggtcaacaaatgggtccattacaaccaggttgacaaggtgtttcacctttaaccacggtttacaacagtcccaaatcaaacacatattagcaaatttataccagcatggtgggcatttctgtctggattcttcaagttcttccatggtgttggtcaaaatgctggctatactcattgctctttgccttgatgtaggatcttccagtaaatccatggaaacatgataagaactggaccgtctctttcttatttctgtttcagtagtcgtgccctctggtaggagctgcccagcagatgtgagggtagaagggcccccgaccagggagaccacaccgttgcagtccacagcgctatgcatcttcccattcatgggcaggatggggagcaccctggaggcacgactggcctggctgacattgctgtggcgccgttctccatgtctgtgcggcacgaacagagagtctcttcggctgtcattgtcctcaaaggtgctgtgctcatcatcagcaaagtcattctcagagccaatgtcctttgttcgacctctgaagctgaaaagactagccctactgttgcgtcttggagagaaaagggagccacggatgctcagtaaggactggtgtggagaagaaaatctcttttcatatgtcagcctacttccttccaaggaaaaacggaaaccttttcttcttatgctgtcttcggattccgattttcggactctgtcgtttttctcttcttctccagactgttctttctgtttctttttctttcttctatttttcagctctttttcacttttggagctcaacttagatgctactgaagaactctctgaaaaaactcctatcccaccagcaccactgaagtctctcgattcagcagatgcggccgcggctgctgcctgagcttcttcttgttgctttttcaactgttcgagcatctgctgaaattcagcttccttctgttcagcctcttccaatgtggcctgattctgttcctcataggccatggccaccacagccaagatcagatttattagatagaatgagcccaagaaaatgaccagcacaaaaaatatcatgtacgttttcccagcagcacgtagtgtcagttgataaaggttttcccagaagtcttgagtcatgagacgaaataaggacaaaaaggcccaactaaaggtatcaaagctcgtgtagccatagttggggtttctaccagccttcacacagatgtatccttcaggacactggcctgcatctgagctgttgccacaaagcagagcatcattttgcccttctaaaaaataaaagtgacttttatcctcaatatattcatcccagttaaacatgctcactgtcctgttgaaagtggtaccattcccatccaatgagttgttaaagaaggaagtaatatttatttcaaaggaagagttatctggaggccattgcaaacatttatttcgtaggttgcccatgaacaactgtaatcctattagcgcaaacacgcttagacagaacacagtcaagatcatgacatcagaaagcttcttcactgactggatcagggcccccacaatggtcttcaggcctggaatgactgaaattgttttcaatgctcggagaactctgaatgttctcaacgctgagacattgcccaggtccacaaactctgtcacatatgcaaaagtaatgactgtgaaatccaaccaattccatggatcccgtaaaaatgtgaaatcttctaaacaaaagccccttgcaagtattttaataagtgattcaaaagtataaattcctgtaaaggtatactccacattctttgtccagtctggagggttactcatggtcataaatacacagttggtaagaatagtgcacataatgagcatattgaataaagaatgtaccaaaatcttaatagctaattttctaatagggttgaagggagttaaaatgtaaagggcgggggtggcactgaatcgagagattgctttccctttattcaatactataaacgttttcttattgatatagtaggggtccagatcctccaggggcactgacaccatctctggaggaatgtctccataaataaatggaagagattttcctgcttccaagtcactgtttggctttgggccattttcatcatcctcatccttgcgttcctgtttgggtctcttagctttctcttctgcaatgcgttgttcaatagcagcaagggattccctggtaaagaagcggaagctgtcaggtcctggcggtaccagcactgactgtgccatcttttcatcctgctcctttaatcactgtttagctccttgcataagaaagtgctgaaataaagaaaaatgtaaatcataacacagaatccacgtatgtgttgaatataatagtcttcaatgcaattcttcagaatttttactggagtagaaagtaaaatctcacatgtattctatcctcattaaagaagaaaaaaacaagaaaggatgaccacagcatcctccctccttcaccttagctttctgttctgacactcattcgatggtacccaatgtctgtt

SEQ ID NO: 49 - DNA, 8787 bp, Macaca fascicularis
  source 1..8787: mol_type = genomic DNA
ctgttttctaacagacattgggtaccatcgaatgagtgtcagaacagaaagctaaggtaaaggagggaggatgctgtggtcatcctttcttgtttttttcttctttaatgaggatagaatacatgtgagattttactttctactccagtaaaaattctgaagaattgcattgaagactattatattcaacacatacgtggattctgtgttatgatttacatttttctttatttcagcactttcttatgcaaggagctaaacagtgattaaaggagcaggatgaaaagatggcacagtcagtgctggtaccgccaggacctgacagcttccgcttctttaccagggaatcccttgctgctattgaacaacgcattgcagaagagaaagctaagagacccaaacaggaacgcaaggatgaggatgatgaaaatggcccaaagccaaacagtgacttggaagcaggaaaatctcttccatttatttatggagacattcctccagagatggtgtcagtgcccctggaggatctggacccctactatatcaataagaaaacgtttatagtattgaataaagggaaagcaatctctcgattcagtgccacccccgccctttacattttaactcccttcaaccctattagaaaattagctattaagattttggtacattctttattcaatatgctcattatgtgcactattcttaccaactgtgtatttatgaccatgagtaaccctccagactggacaaagaatgtggagtatacctttacaggaatttatacttttgaatcacttattaaaatacttgcaaggggcttttgtttagaagatttcacatttttacgggatccatggaattggttggatttcacagtcattacttttgcatatgtgacagagtttgtggacctgggcaatgtctcagcgttgagaacattcagagttctccgagcattgaaaacaatttcagtcattccaggcctgaagaccattgtgggggccctgatccagtcagtgaagaagctttctgatgtcatgatcttgactgtgttctgtctaagcgtgtttgcgctaataggattacagttgttcatgggcaacctacgaaataaatgtttgcaatggcctccagataactcttcctttgaaataaatattacttccttctttaacaactcattggatgggaatggtaccactttcaataggacagtgagcatgtttaactgggatgaatatattgaggataaaagtcacttttattttttagaagggcaaaatgatgctctgctttgtggcaacagctcagatgcaggccagtgtcctgaaggatacatctgtgtgaaggctggtagaaaccccaactatggctacacgagctttgatacctttagttgggcctttttgtccttatttcgtctcatgactcaagacttctgggaaaacctttatcaactgacactacgtgctgctgggaaaacgtacatgatattttttgtgctggtcattttcttgggctcattctatctaataaatctgatcttggctgtggtggccatggcctatgaggaacagaatcaggccacattggaagaggctgaacagaaggaagctgaatttcagcagatgctcgaacagttgaaaaagcaacaagaagaagctcaggcagcagctgcggccgcatctgctgaatcaagagacttcagtggtgctggtgggataggagttttttcagagagttcttcagtagcatctaagttgagctccaaaagtgaaaaagagctgaaaaatagaagaaagaaaaagaaacagaaagaacagtctggagaagaagagaaaaacgacagagtccgaaaatcggaatccgaagacagcataagaagaaaaggtttccgtttttccttggaaggaagtaggctgacatatgaaaagagattttcttctccacaccagtccttactgagcatccgtggctcccttttctctccaagacgcaacagtagggctagtcttttcagcttcagaggtcgaacaaaggacattggctctgagaatgactttgctgatgatgagcacagcacctttgaggacaatgacagccgaagagactctctgttcgtgccgcacagacatggagaacggcgccacagcaatgtcagccaggccagtcgtgcctccagggtgctccccatcctgcccatgaatgggaagatgcatagcgctgtggactgcaacggtgtggtctccctggtcgggggcccttctaccctcacatctgctgggcagctcctaccagagggcacgactactgaaacagaaataagaaagagacggtccagttcttatcatgtttccatggatttactggaagatcctacatcaaggcaaagagcaatgagtatagccagcattttgaccaacaccatggaagaacttgaagaatccagacagaaatgcccaccatgctggtataaatttgctaatatgtgtttgatttgggactgttgtaaaccatggttaaaggtgaaacaccttgtcaacctggttgtaatggacccatttgttgacctggccatcaccatctgcattgtcttaaatacactcttcatggctatggagcactatcccatgacggagcagttcagcagtgtactgtctgttggaaacctggtcttcacggggatcttcacagcagaaatgtttctgaagataattgccatggatccatattattacttccaagaaggctggaatatttttgatggttttattgtgagccttagtttaatggaacttggtctggcaaatgtggaaggattgtctgttctccgatcattccggctgctccgagttttcaagttggcaaagtcttggccaactctaaatatgctaataaagatcattggcaattctgtgggggctctaggaaacctcaccttggtgttggccatcatcgtcttcatttttgctgtggtcggcatgcagctctttggtaagagctacaaagaatgtgtctgcaagatttccaatgactgtgaactcccacgctggcacatgcatgacttcttccactccttcctgatcgtgttccgagtgctgtgtggagagtggatagagaccatgtgggactgtatggaggtcgctggccaaaccatgtgccttactgtcttcatgatggtcatggtgattggaaatctagtggttctgaacctcttcttggccttgcttttgagttccttcagttctgacaatctggctgccactgatgatgataacgaaatgaataatctccagattgctgtgggaaggatgcagaaaggaatcgattttgttaaaagaaaaatacgtgaatttattcagaaagcctttgttaggaaacagaaagctttagatgaaattaaacctcttgaagatctaaataataaaaaagacagctgtatttccaaccataccaccatagaaataggcaaagacctcaattatctcaaagacggaaatggaactactagtggcataggcagcagtgtagaaaaatatgtcgtggatgaaagtgattacatgtcatttataaacaaccctagcctcactgtgacggtaccaattgctgttggagaatctgattttgaaaatttaaatactgaagaattcagcagcgagtcagatatggaggaaagcaaagagaagctaaatgcaactagttcatctgaaggcagcacagttgatataggagctcccgccgagggagaacaacctgaggttgaacctgaggaatctcttgaacctgaagcctgttttacagaagactgtgtacggaagttcaagtgttgtcagataagcatagaagaaggcaaagggaaactctggtggaatttgaggaaaacatgctataagatagtggagcacaattggtttgaaaccttcattgtcttcatgattctgctgagcagtggggctctggcctttgaagatatatacattgagcagcgaaaaaccattaagaccatgttagaatatgctgacaaggttttcacttacatattcatcctggaaatgctgctaaagtgggttgcatatggttttcaagtgtattttaccaatgcctggtgctggctagacttcctgattgttgatgtctcattggttagcttaactgcaaatgccttgggttactcagaacttggtgccatcaaatccctcagaacactaagagctctgaggccactgagagccttgtcccggtttgaaggaatgagggtggttgtaaatgctcttttaggagccattccatctatcatgaatgtacttctggtttgtctgatcttttggctaatattcagtataatgggagtgaatctctttgctggcaagttttaccattgtattaactacaccactggagagatgtttgatgtaagcgtggttaacaactacagcgagtgcaaagctctcattgaaagcaatcaaactgccaggtggaaaaatgtgaaagtaaacttcgataacgtgggacttggatatctgtctctacttcaagtagccacgtttaagggatggatggatattatgtatgcagctgttgactcaagaaatgtagaattgcaacccaagtatgaagacaacctgtacatgtatctttattttgtcatctttattatttttggttcattctttaccttgaatcttttcattggtgtcatcatagacaacttcaaccaacagaaaaagaagtttggaggtcaagacatttttatgacagaagaacagaagaaatactacaatgcaatgaaaaaactgggttcaaagaaaccacaaaaacccatacctcgacctgctaacaaattccaaggaatggtctttgattttgtaaccaaacaagtctttgatatcagcatcatgatcctcatctgccttaacatggtcaccatgatggtggaaaccgatgaccagagtcaagaaatgacaaacattctgtactggattaatctggtgtttattgttctgttcactggagaatgtgtgctgaaactgatctctcttcgttactactatttcactattggatggaatatttttgattttgtggtggtcattctctccattgtaggaatgtttctggctgaactgatagaaaagtattttgtgtcccctaccctgttccgagtgatccgtcttgccagaattggccgaatcctacgtctgatcaaaggagcaaaggggatccgcacgctgctctttgctttgatgatgtcccttcctgcattatttaacatcggcctcctgctcttcctggtcatgttcatctacgccatctttgggatgtccaactttgcctatgttaagagggaagttgggatcgatgacatgttcaactttgagacctttggcaacagcatgatctgcctgtttcaaattacaacctctgctggttgggatggattgctagcgcctattcttaatagtggacctccagactgtgaccctgaaaaagatcaccctggaagctcagttaagggagattgtgggaacccatctgttgggattttcttttttgtcagttacatcatcatatccttcctggttgtggtgaacatgtacatcgcggtcatcctggagaacttcagtgttgctactgaagaaagtgcagagcccctgagtgaggatgactttgagatgttctatgaggtttgggagaagtttgatcccgatgcgacccagtttatagagtttgccaagctctctgattttgcagatgccctggatcctcctcttctcatagcaaaacccaacaaagtccagctcattgccatggatctgcccatggtcagcggtgaccggatccactgcctcgacatcttatttgcttttacaaagcgtgttttgggtgagagtggagagatggatgcccttcgaatacagatggaagagcgattcatggcatcaaacccctccaaagtctcttatgagcccattaccaccacgttgaaacgcaaacaagaggaggtgtctgctattattatccagagggcttacagacgctacctcttgaagcaaaaagttaaaaaggtatcaagtatatacaagaaagacaaaggcaaagaatgtgatggaacacctatcaaagaagatactctcattgataaactgaatgagaattcaactccagagaaaaccgatatgacgccttccaccacatctccaccctcgtatgatagtgtgaccaaaccggaaaaagaaaaatttgaaaaagacaaatcagaaaaggaagacaaagggaaagatatcagggaaagtaaaaagtaaaaagaaaccaagaatattccattttgtgatcaattgtttacagcccgtgatggtgatgtgtttgtgtctacaggactcccacaggaggtctatgccaaactgactgtttttacaaatgtatacttaaggtcagtgcctacaacaagacagagacctctggtcagcaaactggaactcagtaaactggagaagtagtatcgacaggaggtttctattttcacaaccagctgacactgctgaagagcagaggcgtaatggctactcagacgataggaaccaatttaaaggggggagggaagttaaatttttatgtaaattcaacatgtgacacttgataatagtaattgtcaccactgtttatgttttaactgccacacctgccatatttttacaaaacgtgtgctgtgaatttatcacttttctttttaattcacaggttgtttactattatatgtgactatttttgtaaatgggtttgtgtttggggagagggattaaagggagggaattctacatttctctattgtattgtataactggatatattttaaatggaggcatgctgcaattctcattcacacatgaaaaaaaatcacatcacaaaaggaaagactttacttcttgtttcaggatgtttttagatttttgaggtgcttaaatagctattcgtatttttaaggtgtctcatccagaaaaaatttaatgtgcctgtaaatgttccatagaatcacaagcattaaagagttgctttatttttacataatccattaaatgtacatgtatatatgtatatatgtatatgtgcgtgtatatacatatatatgtatacacacacacacacagagatgtacacataccattacattgtcattcacagtcccagcagcatgactatcacatttttgataagtgtcctttggcataaaataaaaatatcctatcagtcctttctaagaaacctgaattgaccaaaaaacatccccaccaccactttataaagttgattctgctttatcctgcagtattgtttagccatcttctgctcttggtaaggttgacatagtatatgtcaatttaaaaaataaaagtctgctttgtaaatagtaattttacccagtggtgcatgtttgagcaaacgaaaatgatgatttaagcacactacttattgcatcaaatatgtaccacagtaagtatagtttgcaagctttcaacaggtaatatgatgtaattggttccattatagtttgaagctgtcactgctgcatgtttatcttgcctatgctgctgtatcttattccttccactgttcagaagtctaatatgggaagccatatgtcagtggtaaagtgaagcaaattgttctaccaagacctcattcttcatgtcattaagcaataggttgcagcaaacaaggaagagcttcttgctttttattcttccaaccttaattgaacactctatgatgaaaagcccgactgtacaaacacgttgcaagctgcttaaatctgtttaaaatatatggttagagttttctaaggaaatataaatactgtaaaaagttcattttattttatttttcagccttttgtacataaaatgagaaattaaaagtatcttcaggtggatttcacagtcactattgttagtttctgttcctagcacttttaaattgaagcacttcacaaaataagaagcaaggactaggatgcagtgtaggtttctgcttttttattagtactgtaaacttgcacacgtttcaatgtgaaacaaatctcaaactgagttcaatgtttatttgctttcaatagtaatgccttatcattgaaagaggcttaaagaaaaaaatcagctgatattcttggcattgcttgaatccaatgtttccacctagtctttttattcagtaatcatcagtcttttccaatgtttgtttacacagatagatcttattgacccatatggcactagaactgtatcagatataatatgggatcccagctttttttcccccccacaaaaccaggtagtgaagttatattaccagttacagcaaaatactttgtgtttcacaagcaacaataaatgtagattctctatactaaagctattgacttgtagtgtgttggtgaaatgcatgcaggaaaatgctgttaccataaagaacggtaaaccacattacaatcaagccaaaagaataaaggtttcgcttttgtttttgtatttaattgttgtctttgtttctatctttgaaatgccatttaaaggtacatttctatcatgtaaaaataatctatctgaaaaacaaatgtaaagaacacacattaattatgataattcatctttcaattttttcatggaatggaagttaattaagaagagtgtattggataactactttaatattggccaaaaacctagatatggcattaggtagagtagtggaaagttacaaaaattaataaaaaattgactaacactttaa

SEQ ID NO: 50 - DNA, 8787 bp, Macaca fascicularis
  source 1..8787: mol_type = genomic DNA
ttaaagtgttagtcaattttttattaatttttgtaactttccactactctacctaatgccatatctaggtttttggccaatattaaagtagttatccaatacactcttcttaattaacttccattccatgaaaaaattgaaagatgaattatcataattaatgtgtgttctttacatttgtttttcagatagattatttttacatgatagaaatgtacctttaaatggcatttcaaagatagaaacaaagacaacaattaaatacaaaaacaaaagcgaaacctttattcttttggcttgattgtaatgtggtttaccgttctttatggtaacagcattttcctgcatgcatttcaccaacacactacaagtcaatagctttagtatagagaatctacatttattgttgcttgtgaaacacaaagtattttgctgtaactggtaatataacttcactacctggttttgtgggggggaaaaaaagctgggatcccatattatatctgatacagttctagtgccatatgggtcaataagatctatctgtgtaaacaaacattggaaaagactgatgattactgaataaaaagactaggtggaaacattggattcaagcaatgccaagaatatcagctgatttttttctttaagcctctttcaatgataaggcattactattgaaagcaaataaacattgaactcagtttgagatttgtttcacattgaaacgtgtgcaagtttacagtactaataaaaaagcagaaacctacactgcatcctagtccttgcttcttattttgtgaagtgcttcaatttaaaagtgctaggaacagaaactaacaatagtgactgtgaaatccacctgaagatacttttaatttctcattttatgtacaaaaggctgaaaaataaaataaaatgaactttttacagtatttatatttccttagaaaactctaaccatatattttaaacagatttaagcagcttgcaacgtgtttgtacagtcgggcttttcatcatagagtgttcaattaaggttggaagaataaaaagcaagaagctcttccttgtttgctgcaacctattgcttaatgacatgaagaatgaggtcttggtagaacaatttgcttcactttaccactgacatatggcttcccatattagacttctgaacagtggaaggaataagatacagcagcataggcaagataaacatgcagcagtgacagcttcaaactataatggaaccaattacatcatattacctgttgaaagcttgcaaactatacttactgtggtacatatttgatgcaataagtagtgtgcttaaatcatcattttcgtttgctcaaacatgcaccactgggtaaaattactatttacaaagcagacttttattttttaaattgacatatactatgtcaaccttaccaagagcagaagatggctaaacaatactgcaggataaagcagaatcaactttataaagtggtggtggggatgttttttggtcaattcaggtttcttagaaaggactgataggatatttttattttatgccaaaggacacttatcaaaaatgtgatagtcatgctgctgggactgtgaatgacaatgtaatggtatgtgtacatctctgtgtgtgtgtgtgtatacatatatatgtatatacacgcacatatacatatatacatatatacatgtacatttaatggattatgtaaaaataaagcaactctttaatgcttgtgattctatggaacatttacaggcacattaaattttttctggatgagacaccttaaaaatacgaatagctatttaagcacctcaaaaatctaaaaacatcctgaaacaagaagtaaagtctttccttttgtgatgtgattttttttcatgtgtgaatgagaattgcagcatgcctccatttaaaatatatccagttatacaatacaatagagaaatgtagaattccctccctttaatccctctccccaaacacaaacccatttacaaaaatagtcacatataatagtaaacaacctgtgaattaaaaagaaaagtgataaattcacagcacacgttttgtaaaaatatggcaggtgtggcagttaaaacataaacagtggtgacaattactattatcaagtgtcacatgttgaatttacataaaaatttaacttccctcccccctttaaattggttcctatcgtctgagtagccattacgcctctgctcttcagcagtgtcagctggttgtgaaaatagaaacctcctgtcgatactacttctccagtttactgagttccagtttgctgaccagaggtctctgtcttgttgtaggcactgaccttaagtatacatttgtaaaaacagtcagtttggcatagacctcctgtgggagtcctgtagacacaaacacatcaccatcacgggctgtaaacaattgatcacaaaatggaatattcttggtttctttttactttttactttccctgatatctttccctttgtcttccttttctgatttgtctttttcaaatttttctttttccggtttggtcacactatcatacgagggtggagatgtggtggaaggcgtcatatcggttttctctggagttgaattctcattcagtttatcaatgagagtatcttctttgataggtgttccatcacattctttgcctttgtctttcttgtatatacttgatacctttttaactttttgcttcaagaggtagcgtctgtaagccctctggataataatagcagacacctcctcttgtttgcgtttcaacgtggtggtaatgggctcataagagactttggaggggtttgatgccatgaatcgctcttccatctgtattcgaagggcatccatctctccactctcacccaaaacacgctttgtaaaagcaaataagatgtcgaggcagtggatccggtcaccgctgaccatgggcagatccatggcaatgagctggactttgttgggttttgctatgagaagaggaggatccagggcatctgcaaaatcagagagcttggcaaactctataaactgggtcgcatcgggatcaaacttctcccaaacctcatagaacatctcaaagtcatcctcactcaggggctctgcactttcttcagtagcaacactgaagttctccaggatgaccgcgatgtacatgttcaccacaaccaggaaggatatgatgatgtaactgacaaaaaagaaaatcccaacagatgggttcccacaatctcccttaactgagcttccagggtgatctttttcagggtcacagtctggaggtccactattaagaataggcgctagcaatccatcccaaccagcagaggttgtaatttgaaacaggcagatcatgctgttgccaaaggtctcaaagttgaacatgtcatcgatcccaacttccctcttaacataggcaaagttggacatcccaaagatggcgtagatgaacatgaccaggaagagcaggaggccgatgttaaataatgcaggaagggacatcatcaaagcaaagagcagcgtgcggatcccctttgctcctttgatcagacgtaggattcggccaattctggcaagacggatcactcggaacagggtaggggacacaaaatacttttctatcagttcagccagaaacattcctacaatggagagaatgaccaccacaaaatcaaaaatattccatccaatagtgaaatagtagtaacgaagagagatcagtttcagcacacattctccagtgaacagaacaataaacaccagattaatccagtacagaatgtttgtcatttcttgactctggtcatcggtttccaccatcatggtgaccatgttaaggcagatgaggatcatgatgctgatatcaaagacttgtttggttacaaaatcaaagaccattccttggaatttgttagcaggtcgaggtatgggtttttgtggtttctttgaacccagttttttcattgcattgtagtatttcttctgttcttctgtcataaaaatgtcttgacctccaaacttctttttctgttggttgaagttgtctatgatgacaccaatgaaaagattcaaggtaaagaatgaaccaaaaataataaagatgacaaaataaagatacatgtacaggttgtcttcatacttgggttgcaattctacatttcttgagtcaacagctgcatacataatatccatccatcccttaaacgtggctacttgaagtagagacagatatccaagtcccacgttatcgaagtttactttcacatttttccacctggcagtttgattgctttcaatgagagctttgcactcgctgtagttgttaaccacgcttacatcaaacatctctccagtggtgtagttaatacaatggtaaaacttgccagcaaagagattcactcccattatactgaatattagccaaaagatcagacaaaccagaagtacattcatgatagatggaatggctcctaaaagagcatttacaaccaccctcattccttcaaaccgggacaaggctctcagtggcctcagagctcttagtgttctgagggatttgatggcaccaagttctgagtaacccaaggcatttgcagttaagctaaccaatgagacatcaacaatcaggaagtctagccagcaccaggcattggtaaaatacacttgaaaaccatatgcaacccactttagcagcatttccaggatgaatatgtaagtgaaaaccttgtcagcatattctaacatggtcttaatggtttttcgctgctcaatgtatatatcttcaaaggccagagccccactgctcagcagaatcatgaagacaatgaaggtttcaaaccaattgtgctccactatcttatagcatgttttcctcaaattccaccagagtttccctttgccttcttctatgcttatctgacaacacttgaacttccgtacacagtcttctgtaaaacaggcttcaggttcaagagattcctcaggttcaacctcaggttgttctccctcggcgggagctcctatatcaactgtgctgccttcagatgaactagttgcatttagcttctctttgctttcctccatatctgactcgctgctgaattcttcagtatttaaattttcaaaatcagattctccaacagcaattggtaccgtcacagtgaggctagggttgtttataaatgacatgtaatcactttcatccacgacatatttttctacactgctgcctatgccactagtagttccatttccgtctttgagataattgaggtctttgcctatttctatggtggtatggttggaaatacagctgtcttttttattatttagatcttcaagaggtttaatttcatctaaagctttctgtttcctaacaaaggctttctgaataaattcacgtatttttcttttaacaaaatcgattcctttctgcatccttcccacagcaatctggagattattcatttcgttatcatcatcagtggcagccagattgtcagaactgaaggaactcaaaagcaaggccaagaagaggttcagaaccactagatttccaatcaccatgaccatcatgaagacagtaaggcacatggtttggccagcgacctccatacagtcccacatggtctctatccactctccacacagcactcggaacacgatcaggaaggagtggaagaagtcatgcatgtgccagcgtgggagttcacagtcattggaaatcttgcagacacattctttgtagctcttaccaaagagctgcatgccgaccacagcaaaaatgaagacgatgatggccaacaccaaggtgaggtttcctagagcccccacagaattgccaatgatctttattagcatatttagagttggccaagactttgccaacttgaaaactcggagcagccggaatgatcggagaacagacaatccttccacatttgccagaccaagttccattaaactaaggctcacaataaaaccatcaaaaatattccagccttcttggaagtaataatatggatccatggcaattatcttcagaaacatttctgctgtgaagatccccgtgaagaccaggtttccaacagacagtacactgctgaactgctccgtcatgggatagtgctccatagccatgaagagtgtatttaagacaatgcagatggtgatggccaggtcaacaaatgggtccattacaaccaggttgacaaggtgtttcacctttaaccatggtttacaacagtcccaaatcaaacacatattagcaaatttataccagcatggtgggcatttctgtctggattcttcaagttcttccatggtgttggtcaaaatgctggctatactcattgctctttgccttgatgtaggatcttccagtaaatccatggaaacatgataagaactggaccgtctctttcttatttctgtttcagtagtcgtgccctctggtaggagctgcccagcagatgtgagggtagaagggcccccgaccagggagaccacaccgttgcagtccacagcgctatgcatcttcccattcatgggcaggatggggagcaccctggaggcacgactggcctggctgacattgctgtggcgccgttctccatgtctgtgcggcacgaacagagagtctcttcggctgtcattgtcctcaaaggtgctgtgctcatcatcagcaaagtcattctcagagccaatgtcctttgttcgacctctgaagctgaaaagactagccctactgttgcgtcttggagagaaaagggagccacggatgctcagtaaggactggtgtggagaagaaaatctcttttcatatgtcagcctacttccttccaaggaaaaacggaaaccttttcttcttatgctgtcttcggattccgattttcggactctgtcgtttttctcttcttctccagactgttctttctgtttctttttctttcttctatttttcagctctttttcacttttggagctcaacttagatgctactgaagaactctctgaaaaaactcctatcccaccagcaccactgaagtctcttgattcagcagatgcggccgcagctgctgcctgagcttcttcttgttgctttttcaactgttcgagcatctgctgaaattcagcttccttctgttcagcctcttccaatgtggcctgattctgttcctcataggccatggccaccacagccaagatcagatttattagatagaatgagcccaagaaaatgaccagcacaaaaaatatcatgtacgttttcccagcagcacgtagtgtcagttgataaaggttttcccagaagtcttgagtcatgagacgaaataaggacaaaaaggcccaactaaaggtatcaaagctcgtgtagccatagttggggtttctaccagccttcacacagatgtatccttcaggacactggcctgcatctgagctgttgccacaaagcagagcatcattttgcccttctaaaaaataaaagtgacttttatcctcaatatattcatcccagttaaacatgctcactgtcctattgaaagtggtaccattcccatccaatgagttgttaaagaaggaagtaatatttatttcaaaggaagagttatctggaggccattgcaaacatttatttcgtaggttgcccatgaacaactgtaatcctattagcgcaaacacgcttagacagaacacagtcaagatcatgacatcagaaagcttcttcactgactggatcagggcccccacaatggtcttcaggcctggaatgactgaaattgttttcaatgctcggagaactctgaatgttctcaacgctgagacattgcccaggtccacaaactctgtcacatatgcaaaagtaatgactgtgaaatccaaccaattccatggatcccgtaaaaatgtgaaatcttctaaacaaaagccccttgcaagtattttaataagtgattcaaaagtataaattcctgtaaaggtatactccacattctttgtccagtctggagggttactcatggtcataaatacacagttggtaagaatagtgcacataatgagcatattgaataaagaatgtaccaaaatcttaatagctaattttctaatagggttgaagggagttaaaatgtaaagggcgggggtggcactgaatcgagagattgctttccctttattcaatactataaacgttttcttattgatatagtaggggtccagatcctccaggggcactgacaccatctctggaggaatgtctccataaataaatggaagagattttcctgcttccaagtcactgtttggctttgggccattttcatcatcctcatccttgcgttcctgtttgggtctcttagctttctcttctgcaatgcgttgttcaatagcagcaagggattccctggtaaagaagcggaagctgtcaggtcctggcggtaccagcactgactgtgccatcttttcatcctgctcctttaatcactgtttagctccttgcataagaaagtgctgaaataaagaaaaatgtaaatcataacacagaatccacgtatgtgttgaatataatagtcttcaatgcaattcttcagaatttttactggagtagaaagtaaaatctcacatgtattctatcctcattaaagaagaaaaaaacaagaaaggatgaccacagcatcctccctcctttaccttagctttctgttctgacactcattcgatggtacccaatgtctgttagaaaacag

SEQ ID NO: 51 - DNA, 9933 bp, Homo sapiens
  source 1..9933: mol_type = genomic DNA
gagccgagctgagcctcgcctagctccggcagcctcagcttcagcaccagccgcaccggagcccggaccgcagccactaagggcagcggcggcggcgggagccaggcgcgcagctagcagcggcgcggtcgggaagcagcagccgccgccgccgccgccgccgccgcgacgggcagctgggctcgccggcagccggctcgggcccctaccctctcggctacgtgtctccggcgccgggcggccggcgagtctggagcccgcgccgtcgccggccgcgtcctccgggcatggaaggaggcggcaagcccaactcttcgtctaacagccgggacgatggcaacagcgtcttccccgccaaggcgtccgcgacgggcgcggggccggccgcggccgagaagcgcctgggcaccccgccggggggcggcggggccggcgcgaaggagcacggcaactccgtgtgcttcaaggtggacggcggtggcggcggtggcggcggcggcggcggcggcgaggagccggcggggggcttcgaagacgccgaggggccccggcggcagtacggcttcatgcagaggcagttcacctccatgctgcagcccggggtcaacaaattctccctccgcatgtttgggagccagaaggcggtggaaaaggagcaggaaagggttaaaactgcaggcttctggattatccacccttacagtgatttcaggttttactgggatttaataatgcttataatgatggttggaaatctagtcatcataccagttggaatcacattctttacagagcaaacaacaacaccatggattattttcaatgtggcatcagatacagttttcctattggacctgatcatgaattttaggactgggactgtcaatgaagacagttctgaaatcatcctggaccccaaagtgatcaagatgaattatttaaaaagctggtttgtggttgacttcatctcatccatcccagtggattatatctttcttattgtagaaaaaggaatggattctgaagtttacaagacagccagggcacttcgcattgtgaggtttacaaaaattctcagtctcttgcgtttattacgactttcaaggttaattagatacatacatcaatgggaagagatattccacatgacatatgatctcgccagtgcagtggtgagaatttttaatctcatcggcatgatgctgctcctgtgccactgggatggttgtcttcagttcttagtaccactactgcaggacttcccaccagattgctgggtgtctttaaatgaaatggttaatgattcttggggaaagcagtattcatacgcactcttcaaagctatgagtcacatgctgtgcattgggtatggagcccaagccccagtcagcatgtctgacctctggattaccatgctgagcatgatcgtcggggccacctgctatgccatgtttgtcggccatgccaccgctttaatccagtctctggattcttcgaggcggcagtatcaagagaagtataagcaagtggaacaatacatgtcattccataagttaccagctgatatgcgtcagaagatacatgattactatgaacacagataccaaggcaaaatctttgatgaggaaaatattctcaatgaactcaatgatcctctgagagaggagatagtcaacttcaactgtcggaaactggtggctacaatgcctttatttgctaatgcggatcctaattttgtgactgccatgctgagcaagttgagatttgaggtgtttcaacctggagattatatcatacgagaaggagccgtgggtaaaaaaatgtatttcattcaacacggtgttgctggtgtcattacaaaatccagtaaagaaatgaagctgacagatggctcttactttggagagatttgcctgctgaccaaaggacgtcgtactgccagtgttcgagctgatacatattgtcgtctttactcactttccgtggacaatttcaacgaggtcctggaggaatatccaatgatgaggagagcctttgagacagttgccattgaccgactagatcgaataggaaagaaaaattcaattcttctgcaaaagttccagaaggatctgaacactggtgttttcaacaatcaggagaacgaaatcctcaagcagattgtgaaacatgacagggagatggtgcaggcaatcgctcccatcaattatcctcaaatgacaaccctgaattccacatcgtctactacgaccccgacctcccgcatgaggacacaatctccaccggtgtacacagcgaccagcctgtctcacagcaacctgcactcccccagtcccagcacacagaccccccagccatcagccatcctgtcaccctgctcctacaccaccgcggtctgcagccctcctgtacagagccctctggccgctcgaactttccactatgcctcccccaccgcctcccagctgtcactcatgcaacagcagccgcagcagcaggtacagcagtcccagccgccgcagactcagccacagcagccgtccccgcagccacagacacctggcagctccacgccgaaaaatgaagtgcacaagagcacgcaggcgcttcacaacaccaacctgacccgggaagtcaggccactctccgcctcgcagccctcgctgccccatgaggtgtccactctgatttccagacctcatcccactgtgggcgagtccctggcctccatccctcaacccgtgacggcggtccccggaacgggccttcaggcagggggcaggagcactgtcccgcagcgcgtcaccctcttccgacagatgtcgtcgggagccatccccccgaaccgaggagtccctccagcaccccctccaccagcagctgctcttccaagagaatcttcctcagtcttaaacacagacccagacgcagaaaagccacgatttgcttcaaatttatgatccctgctgattgtcaaagcagaaagaaatactctcataaactgagactatactcagatcttattttattctatctcctgatagatccctctagcctactatgaagagatattttagacagctgtggcctacacgtgaaatgtaaaaatatatatacatatactataaaatatatatctaaattcccaagagagggtcaaaagacctgtttagcattcagtgttatatgtcttcctttctttaaatcattaaaggatttaaaatgtcgttgtaagattatttatttctaacctacttttacttaagtcctttgatatgtatatttctctattttatgaagagttcttggattcaatggaaacaaaactgattttaaaaaggcaactcaaatgaactagtaaatagcaccaatcaaaactttctttcattagctgtgtctctgcatctaaattgttaatcattaatggtggagaattaaataacaaatcccattttatagatctaaattgtatttcggtgctttcaatttcaaattaggttaaagaatgcactacttgcttggccaccgtaggagactagcattgccactgtttgttaagaatatcactaacctcaaacatgttcattgatctttcagaaagctgagggaaaattaatatttgtcttcatgtgttatcggacttttaccaagactcgatcaatgttagttgtaaataactttttcaacccaaataaaaatagctattctgtgttgtatgaaggtaaaagtcattgtttaagaatttagttttattgcttcacttcaaaacttagagttttaaattttacaaaacctgattgtgagaattattcaattgtaatgcaatggcttgaaacctacaatattattttaacctgcaatgttttatgcaaaattgtatgctcgaatctacaaattgcttgtattacaccaaaaatcgttacttttctttcttcttgccataatcaagcatctgaaaatagtccctgcatgcttctggggaaaaaaaaataggttcaaatcagtcattgtagagaaaggcttacagtatttctcgtttctagaaaagcataacaattcattaattgcctatcttataattcctataaggctgacttggatctctgacttaagtctagaagtgaggttttcacttttatttaatattattgctattattatttaaataattatttgtaaaccacagcttgatttggagttaagtgttgtctgtgtcttcactgtagctggtaatttactatggtattaatttaaagaaataaattcaatacagcatcacgtctgtttgggaacacacattttgctctatgtatattgtaactaaatggttagtaaactttaaggcatgtggtgactaacgtagcccttagataggaggtttgtcatttttaatgtgttgaaaatagtacagacatggtgacagaaagcaggggtaaagttgaacgtctatgagcattgtctgtctgttttcttaactctttacatgatctgtgagcacctgcttcttctcaaagaactcccttagtaatcatttgtgcctaatgcatcccacacatgtggagtatgactggaacacaattgaaagattcctaacaactggctgcggtaaataacccaagttaagagcatgacttaaagtggaggtcttcagtatctctggcactggcaatacatttaagaacatacagagatcacacattatgtgggacagggcctgcagatagacttgaggacagaaaacaaaaacaaaagcagaaactctaaagtggatccttgctgcctgttatgccttttgtggatataatacctataataccaaaatgagttgttatgtttaatttcaaacaaatcccaactggtgtggaagtaattaactgctagtcgatgtaatgtaatcatcaatatgctggtgacatatgatggcatgtcaggaatactgttgtaagaaagggattgttcagtctacctagaacctatgggaaagctgcaagaccatttacatatcagtacaaaactcctttattttattaaaatatgagaattaacttcaatttattaagattacgtattggtcctttaaattattaaaggtttacatttgataggattaatggatttggtagtgaaatatttttatatatataaatttttggttttttattttgagcactattgggaaacataagcaaaattgaaatgcatggtctttcagtgcaaccatacaatttttattcactttgtaatagaatggacaaaaaaactaaggtttatatattaaactaataaaaaggtacagggtaaattatatacatatatgtatgaatgtatatatacttagattaagaaaaaaaaatgactcacattcctgtaatataaaggtccattgctagttgaaaagtgacctcttttctctgtacatagtgaagcccgtatgtatggagttttaatctgtacagaaagaaatgtattattcattggtctttctgctgctggaaagataatagaatagctgattcttacaacaactgtatgatcagggatgagttagagtatttcttttgtctttgctcaaagccatacatatataaatatatataaagattattaataaattcaacaaaaaataaactacaatcatgaatattttattttatcaatatatgctaatcaaatgttttattttattaatgagtacagctttgcctctatttttacatcataaaatttccaagagcttatacttgataatcacataaaatcaattatattctataattctggaatgagaggactttaaatagaacatggatttttcaaccacttctttgtttacctttttcgtatagtaaaatatgagcttattttcttttttgctctgtgcctttttagaatgtggttgttctccaacttcaaaacacaaccattttgtgtaattattggatatacagatgagaaataattttcctgtaataatggtaaataattgtcctgtaatatatttatacaaacctattttgttataatagttctatgacatacctattttgttataatagttttataacatacctattttgttataatagggccttgggctctattataacaaaacaggtttatataaatacattcatatttatagccttaaacaaaataggtttgtatagtaggcccaaggccctattataacaaaataggtttgtataaatatattcatatttatagccttgggccctgcaaagttatttggagagtgatagaacctccccacacaagtgggttttaaatgatacctaaaagcctgagatagagtttatcataatgagaataagtagtgaagcattcctgaaaacaaggaggataaatagtagcaatggcaatatattctattcaccaaaaaagtagcttgtctccaggtctggatgacctcttcataagtgaacaattccctgatgaatgctgttccactttaaagagatggttattttgcaatttataaacttaactgagcatactattttcaggacactacaaagtacatagtcaagttattaccgtcattcctataggacagagaatgatttaaacaatatgacatgtttaaaattttagatgatttatttcaaatcctgaattatgtctacttcaaattatgagcaatctctattatctttcaggactatttaaaaaatctccatacctcctctttcagcttaggtttttatatttgttaattttactatgttactttgcttctatggccctcacttgcactgtttataatgttaacctgtttgaatgagatatctctccattatatctttatctttttagaacatgtgccataaaacccatgtggttattttgttcatatgcactacaactagcaaacttttattttatgttcacctactttaaaaagtactcatactgtaccatgggaaagaaacatgggccttatagaatggaatgctgagctattttgagtcctgaaaacaatggccaaaaatttaaggaactgtggttgctgcatgcaccaaattgtagcacatacaaataaataaaatacagttctataactgtattcaatatggttattttcaaggaaaaataggatagaaattttctttgaaagatttgctattgtacttagggaagtacacctgctattacccctcaaaagcaatgactttcttaagcaatttcaatttttttcctttttaacaaccctgcacttgcacaaccctgcatctcttgtctcaccctaatgctgaccctgcttccaattcaggctttgacagggacaaatggagattttaaggttttttaatgagagaagccttgctgacactccccgcatcccaccttgaaaattatttaaagatgatcttaaaagaacctacagataatgctctgaatttgtttacaaggtccttgatgtggagagaatgagtaatacattaaatgctggggaaataattatcatttagtgaaaaattaagcatgcttttctaaaatgtggatgtttaacagagcacagctgattgggaacactggcagttcaatgcagctggagtgtctcacagggtgaagaggaacccagatcaagtgggaaatagggatttcaaaaaccttctgaaaggcttttaacatcagggcaaaggttttacagtgttgtactttatattcttaatttaagcttatcaacggggaggattcacattgaaatgtctgttttgctaatgtaacaaggaataaaataatttatgacacagcaaaaactgggggctatttacaaccccaccctgccttgtgaggatgctgggtcctaaggaaggtcctaggtttgctaaatagagtaatgggaataggaaactgaaagtttacttgctttgcgtaagataatatattgcggcagggaaggggtacaagaagataagagctagaacctgtgagaagggaaagaagtgataaaataattttggctaaaataaagcaagttctcaggccaggcgtggtggctcatgcctgtaatcctagcactttgggaggccaaagtgggaggaatgcttgaggccaggaattggagaccaaccagggcagcatgtcaagacctggtctctacaaggaaaaaaaatttttttaattgaccagtatatacttacatacctgcagtgtttagaaaacccgactataggtggtgtattcctgtagtcctagttactcagaaagttaaggcaggaggatcgcttgaacttaggaggtcaaggctgcagtgagccctgttcgttccactgcactccagcttgggggacagagcaaaaccctttctcaagaaaaacccaaacaaacaaaaaagtgaagccagttctttaatttctattggagatatcacacacgctccaaagagtggcaaaggtgaacattctttggagctattatatttctaatgtaacatcaatggccatttactcccaaagggaaacatctttttttttttttttttttaagatggagtctggctctgtcacccaggtgggagtgcaatggcaggatcttggcccactgcaacatcagcctcccaggtttaagcaattctcctgcatcagcctccagagtagctgggattacaggtgcccgccaccatggctagctaaatttttgtaatttttagtagagacagggttttaccatgttggccaggccggtctcgaacccctaacctcaagtgatccgcccgcctcaccctccagaagtgctaggattacaggcctgagccaccgcacccggccctgctatttttttctatgtagttgtttcagtaataccatatgagcagagaatactattgattcattcaattgaagaaatctgaataaattagtaaatataataattcttcaaaagaggaccactttatgtttccaatagattatataattgaattcaggtaacgtagagttattcagacttttttttttaaataacggaattttgcaaaaaaacaggttgcatcgttttctacagagaatattcagatgtgtagaggcaaagagactttcttgaaaggtttttatttcctgttaaatttgtgaggaaaactcctgagaaaggaaagatttacttttgaaggaagaaagaacataacccaaagaaatttgaaagattcaaaaagagttttccaaatgtattctcatttctttctcatatttgttcaaggtcttagtttccaagcattcaaaattaaatcttgtttgcctaactcttctaacatctattaccaacctaacatattacaattctgtttaaaatgtgcagttctaaatgttcttgcgtgcctcactgtggaaagtgtggtgcatggaactgcagcgtcagtatcacccagaagtataattacaagaagtgcagagtccttggccttaccctgtacctacagaagtccgcttttgggcaagatccccagatgattcatatgtgtattaatattgaaaaaattggaactagtaagtcctagaggaggtaaattttaagggctttttaagggaacttccaagtgtgaagacatttctggagatgacaagtcaacatagcatgggatcttggctagacaaggaaagcgagagaacattaaataaacacaagcaacgacaaaccacctatgttataattttatcctggaccatccaaagtttactcttggtcacgctgtctaacccagcctgcctcctggcacttgctagttagaaccagggaagagaaaactaatatgtgttaggtattataatttccttatgtcacataaattttggtgccatagctagcaatgtttcttaatatcacatcagtacaatgtgtccattgccttctgtaacatttttaatgctatcaataatacattgacattataaaaataaatgaatgtggtcaata

SEQ ID NO: 52 - DNA, 9933 bp, Homo sapiens
  source 1..9933: mol_type = genomic DNA
tattgaccacattcatttatttttataatgtcaatgtattattgatagcattaaaaatgttacagaaggcaatggacacattgtactgatgtgatattaagaaacattgctagctatggcaccaaaatttatgtgacataaggaaattataatacctaacacatattagttttctcttccctggttctaactagcaagtgccaggaggcaggctgggttagacagcgtgaccaagagtaaactttggatggtccaggataaaattataacataggtggtttgtcgttgcttgtgtttatttaatgttctctcgctttccttgtctagccaagatcccatgctatgttgacttgtcatctccagaaatgtcttcacacttggaagttcccttaaaaagcccttaaaatttacctcctctaggacttactagttccaattttttcaatattaatacacatatgaatcatctggggatcttgcccaaaagcggacttctgtaggtacagggtaaggccaaggactctgcacttcttgtaattatacttctgggtgatactgacgctgcagttccatgcaccacactttccacagtgaggcacgcaagaacatttagaactgcacattttaaacagaattgtaatatgttaggttggtaatagatgttagaagagttaggcaaacaagatttaattttgaatgcttggaaactaagaccttgaacaaatatgagaaagaaatgagaatacatttggaaaactctttttgaatctttcaaatttctttgggttatgttctttcttccttcaaaagtaaatctttcctttctcaggagttttcctcacaaatttaacaggaaataaaaacctttcaagaaagtctctttgcctctacacatctgaatattctctgtagaaaacgatgcaacctgtttttttgcaaaattccgttatttaaaaaaaaaagtctgaataactctacgttacctgaattcaattatataatctattggaaacataaagtggtcctcttttgaagaattattatatttactaatttattcagatttcttcaattgaatgaatcaatagtattctctgctcatatggtattactgaaacaactacatagaaaaaaatagcagggccgggtgcggtggctcaggcctgtaatcctagcacttctggagggtgaggcgggcggatcacttgaggttaggggttcgagaccggcctggccaacatggtaaaaccctgtctctactaaaaattacaaaaatttagctagccatggtggcgggcacctgtaatcccagctactctggaggctgatgcaggagaattgcttaaacctgggaggctgatgttgcagtgggccaagatcctgccattgcactcccacctgggtgacagagccagactccatcttaaaaaaaaaaaaaaaaaaagatgtttccctttgggagtaaatggccattgatgttacattagaaatataatagctccaaagaatgttcacctttgccactctttggagcgtgtgtgatatctccaatagaaattaaagaactggcttcacttttttgtttgtttgggtttttcttgagaaagggttttgctctgtcccccaagctggagtgcagtggaacgaacagggctcactgcagccttgacctcctaagttcaagcgatcctcctgccttaactttctgagtaactaggactacaggaatacaccacctatagtcgggttttctaaacactgcaggtatgtaagtatatactggtcaattaaaaaaattttttttccttgtagagaccaggtcttgacatgctgccctggttggtctccaattcctggcctcaagcattcctcccactttggcctcccaaagtgctaggattacaggcatgagccaccacgcctggcctgagaacttgctttattttagccaaaattattttatcacttctttcccttctcacaggttctagctcttatcttcttgtaccccttccctgccgcaatatattatcttacgcaaagcaagtaaactttcagtttcctattcccattactctatttagcaaacctaggaccttccttaggacccagcatcctcacaaggcagggtggggttgtaaatagcccccagtttttgctgtgtcataaattattttattccttgttacattagcaaaacagacatttcaatgtgaatcctccccgttgataagcttaaattaagaatataaagtacaacactgtaaaacctttgccctgatgttaaaagcctttcagaaggtttttgaaatccctatttcccacttgatctgggttcctcttcaccctgtgagacactccagctgcattgaactgccagtgttcccaatcagctgtgctctgttaaacatccacattttagaaaagcatgcttaatttttcactaaatgataattatttccccagcatttaatgtattactcattctctccacatcaaggaccttgtaaacaaattcagagcattatctgtaggttcttttaagatcatctttaaataattttcaaggtgggatgcggggagtgtcagcaaggcttctctcattaaaaaaccttaaaatctccatttgtccctgtcaaagcctgaattggaagcagggtcagcattagggtgagacaagagatgcagggttgtgcaagtgcagggttgttaaaaaggaaaaaaattgaaattgcttaagaaagtcattgcttttgaggggtaatagcaggtgtacttccctaagtacaatagcaaatctttcaaagaaaatttctatcctatttttccttgaaaataaccatattgaatacagttatagaactgtattttatttatttgtatgtgctacaatttggtgcatgcagcaaccacagttccttaaatttttggccattgttttcaggactcaaaatagctcagcattccattctataaggcccatgtttctttcccatggtacagtatgagtactttttaaagtaggtgaacataaaataaaagtttgctagttgtagtgcatatgaacaaaataaccacatgggttttatggcacatgttctaaaaagataaagatataatggagagatatctcattcaaacaggttaacattataaacagtgcaagtgagggccatagaagcaaagtaacatagtaaaattaacaaatataaaaacctaagctgaaagaggaggtatggagattttttaaatagtcctgaaagataatagagattgctcataatttgaagtagacataattcaggatttgaaataaatcatctaaaattttaaacatgtcatattgtttaaatcattctctgtcctataggaatgacggtaataacttgactatgtactttgtagtgtcctgaaaatagtatgctcagttaagtttataaattgcaaaataaccatctctttaaagtggaacagcattcatcagggaattgttcacttatgaagaggtcatccagacctggagacaagctacttttttggtgaatagaatatattgccattgctactatttatcctccttgttttcaggaatgcttcactacttattctcattatgataaactctatctcaggcttttaggtatcatttaaaacccacttgtgtggggaggttctatcactctccaaataactttgcagggcccaaggctataaatatgaatatatttatacaaacctattttgttataatagggccttgggcctactatacaaacctattttgtttaaggctataaatatgaatgtatttatataaacctgttttgttataatagagcccaaggccctattataacaaaataggtatgttataaaactattataacaaaataggtatgtcatagaactattataacaaaataggtttgtataaatatattacaggacaattatttaccattattacaggaaaattatttctcatctgtatatccaataattacacaaaatggttgtgttttgaagttggagaacaaccacattctaaaaaggcacagagcaaaaaagaaaataagctcatattttactatacgaaaaaggtaaacaaagaagtggttgaaaaatccatgttctatttaaagtcctctcattccagaattatagaatataattgattttatgtgattatcaagtataagctcttggaaattttatgatgtaaaaatagaggcaaagctgtactcattaataaaataaaacatttgattagcatatattgataaaataaaatattcatgattgtagtttattttttgttgaatttattaataatctttatatatatttatatatgtatggctttgagcaaagacaaaagaaatactctaactcatccctgatcatacagttgttgtaagaatcagctattctattatctttccagcagcagaaagaccaatgaataatacatttctttctgtacagattaaaactccatacatacgggcttcactatgtacagagaaaagaggtcacttttcaactagcaatggacctttatattacaggaatgtgagtcatttttttttcttaatctaagtatatatacattcatacatatatgtatataatttaccctgtacctttttattagtttaatatataaaccttagtttttttgtccattctattacaaagtgaataaaaattgtatggttgcactgaaagaccatgcatttcaattttgcttatgtttcccaatagtgctcaaaataaaaaaccaaaaatttatatatataaaaatatttcactaccaaatccattaatcctatcaaatgtaaacctttaataatttaaaggaccaatacgtaatcttaataaattgaagttaattctcatattttaataaaataaaggagttttgtactgatatgtaaatggtcttgcagctttcccataggttctaggtagactgaacaatccctttcttacaacagtattcctgacatgccatcatatgtcaccagcatattgatgattacattacatcgactagcagttaattacttccacaccagttgggatttgtttgaaattaaacataacaactcattttggtattataggtattatatccacaaaaggcataacaggcagcaaggatccactttagagtttctgcttttgtttttgttttctgtcctcaagtctatctgcaggccctgtcccacataatgtgtgatctctgtatgttcttaaatgtattgccagtgccagagatactgaagacctccactttaagtcatgctcttaacttgggttatttaccgcagccagttgttaggaatctttcaattgtgttccagtcatactccacatgtgtgggatgcattaggcacaaatgattactaagggagttctttgagaagaagcaggtgctcacagatcatgtaaagagttaagaaaacagacagacaatgctcatagacgttcaactttacccctgctttctgtcaccatgtctgtactattttcaacacattaaaaatgacaaacctcctatctaagggctacgttagtcaccacatgccttaaagtttactaaccatttagttacaatatacatagagcaaaatgtgtgttcccaaacagacgtgatgctgtattgaatttatttctttaaattaataccatagtaaattaccagctacagtgaagacacagacaacacttaactccaaatcaagctgtggtttacaaataattatttaaataataatagcaataatattaaataaaagtgaaaacctcacttctagacttaagtcagagatccaagtcagccttataggaattataagataggcaattaatgaattgttatgcttttctagaaacgagaaatactgtaagcctttctctacaatgactgatttgaacctatttttttttccccagaagcatgcagggactattttcagatgcttgattatggcaagaagaaagaaaagtaacgatttttggtgtaatacaagcaatttgtagattcgagcatacaattttgcataaaacattgcaggttaaaataatattgtaggtttcaagccattgcattacaattgaataattctcacaatcaggttttgtaaaatttaaaactctaagttttgaagtgaagcaataaaactaaattcttaaacaatgacttttaccttcatacaacacagaatagctatttttatttgggttgaaaaagttatttacaactaacattgatcgagtcttggtaaaagtccgataacacatgaagacaaatattaattttccctcagctttctgaaagatcaatgaacatgtttgaggttagtgatattcttaacaaacagtggcaatgctagtctcctacggtggccaagcaagtagtgcattctttaacctaatttgaaattgaaagcaccgaaatacaatttagatctataaaatgggatttgttatttaattctccaccattaatgattaacaatttagatgcagagacacagctaatgaaagaaagttttgattggtgctatttactagttcatttgagttgcctttttaaaatcagttttgtttccattgaatccaagaactcttcataaaatagagaaatatacatatcaaaggacttaagtaaaagtaggttagaaataaataatcttacaacgacattttaaatcctttaatgatttaaagaaaggaagacatataacactgaatgctaaacaggtcttttgaccctctcttgggaatttagatatatattttatagtatatgtatatatatttttacatttcacgtgtaggccacagctgtctaaaatatctcttcatagtaggctagagggatctatcaggagatagaataaaataagatctgagtatagtctcagtttatgagagtatttctttctgctttgacaatcagcagggatcataaatttgaagcaaatcgtggcttttctgcgtctgggtctgtgtttaagactgaggaagattctcttggaagagcagctgctggtggagggggtgctggagggactcctcggttcggggggatggctcccgacgacatctgtcggaagagggtgacgcgctgcgggacagtgctcctgccccctgcctgaaggcccgttccggggaccgccgtcacgggttgagggatggaggccagggactcgcccacagtgggatgaggtctggaaatcagagtggacacctcatggggcagcgagggctgcgaggcggagagtggcctgacttcccgggtcaggttggtgttgtgaagcgcctgcgtgctcttgtgcacttcatttttcggcgtggagctgccaggtgtctgtggctgcggggacggctgctgtggctgagtctgcggcggctgggactgctgtacctgctgctgcggctgctgttgcatgagtgacagctgggaggcggtgggggaggcatagtggaaagttcgagcggccagagggctctgtacaggagggctgcagaccgcggtggtgtaggagcagggtgacaggatggctgatggctggggggtctgtgtgctgggactgggggagtgcaggttgctgtgagacaggctggtcgctgtgtacaccggtggagattgtgtcctcatgcgggaggtcggggtcgtagtagacgatgtggaattcagggttgtcatttgaggataattgatgggagcgattgcctgcaccatctccctgtcatgtttcacaatctgcttgaggatttcgttctcctgattgttgaaaacaccagtgttcagatccttctggaacttttgcagaagaattgaatttttctttcctattcgatctagtcggtcaatggcaactgtctcaaaggctctcctcatcattggatattcctccaggacctcgttgaaattgtccacggaaagtgagtaaagacgacaatatgtatcagctcgaacactggcagtacgacgtcctttggtcagcaggcaaatctctccaaagtaagagccatctgtcagcttcatttctttactggattttgtaatgacaccagcaacaccgtgttgaatgaaatacatttttttacccacggctccttctcgtatgatataatctccaggttgaaacacctcaaatctcaacttgctcagcatggcagtcacaaaattaggatccgcattagcaaataaaggcattgtagccaccagtttccgacagttgaagttgactatctcctctctcagaggatcattgagttcattgagaatattttcctcatcaaagattttgccttggtatctgtgttcatagtaatcatgtatcttctgacgcatatcagctggtaacttatggaatgacatgtattgttccacttgcttatacttctcttgatactgccgcctcgaagaatccagagactggattaaagcggtggcatggccgacaaacatggcatagcaggtggccccgacgatcatgctcagcatggtaatccagaggtcagacatgctgactggggcttgggctccatacccaatgcacagcatgtgactcatagctttgaagagtgcgtatgaatactgctttccccaagaatcattaaccatttcatttaaagacacccagcaatctggtgggaagtcctgcagtagtggtactaagaactgaagacaaccatcccagtggcacaggagcagcatcatgccgatgagattaaaaattctcaccactgcactggcgagatcatatgtcatgtggaatatctcttcccattgatgtatgtatctaattaaccttgaaagtcgtaataaacgcaagagactgagaatttttgtaaacctcacaatgcgaagtgccctggctgtcttgtaaacttcagaatccattcctttttctacaataagaaagatataatccactgggatggatgagatgaagtcaaccacaaaccagctttttaaataattcatcttgatcactttggggtccaggatgatttcagaactgtcttcattgacagtcccagtcctaaaattcatgatcaggtccaataggaaaactgtatctgatgccacattgaaaataatccatggtgttgttgtttgctctgtaaagaatgtgattccaactggtatgatgactagatttccaaccatcattataagcattattaaatcccagtaaaacctgaaatcactgtaagggtggataatccagaagcctgcagttttaaccctttcctgctccttttccaccgccttctggctcccaaacatgcggagggagaatttgttgaccccgggctgcagcatggaggtgaactgcctctgcatgaagccgtactgccgccggggcccctcggcgtcttcgaagccccccgccggctcctcgccgccgccgccgccgccgccaccgccgccaccgccgtccaccttgaagcacacggagttgccgtgctccttcgcgccggccccgccgccccccggcggggtgcccaggcgcttctcggccgcggccggccccgcgcccgtcgcggacgccttggcggggaagacgctgttgccatcgtcccggctgttagacgaagagttgggcttgccgcctccttccatgcccggaggacgcggccggcgacggcgcgggctccagactcgccggccgcccggcgccggagacacgtagccgagagggtaggggcccgagccggctgccggcgagcccagctgcccgtcgcggcggcggcggcggcggcggcggctgctgcttcccgaccgcgccgctgctagctgcgcgcctggctcccgccgccgccgctgcccttagtggctgcggtccgggctccggtgcggctggtgctgaagctgaggctgccggagctaggcgaggctcagctcggctc

SEQ ID NO: 53 - DNA, 7911 bp, Mus musculus
  source 1..7911: mol_type = genomic DNA
aatgtcacgctgggcagaagtggcacaggcgagcggcggggcgcgcgcgggtagaggcggtctgcggccagcagggggcagccgaggggcggcgctggcgcgcgggtgccgagcggaggagcctcgccccgcgcccgcagcctcagcctcagcctcagtaccaggcgcggcggagcccggagcgcggcagagccggcagcgcagccactgagggcagcggcggcggcgggagccaggcgcgcagcggagcagcgggcgggcgggaagcagtagccgccgccgccgctgccgccgcgacgggcagccggctccggcccctgctccttggcttcgagcccccggcgagtctggagcccgcgccgtcgccggtcgcgtcctccgggcatggaaggcggcggcaaacccaactccgcgtccaacagccgcgacgatggcaacagcgtcttcccctccaaggcgcccgcgacggggccggtggcggccgacaagcgcctggggaccccgccggggggcggcgcggccgggaaggaacatggcaactccgtgtgcttcaaggtggacggcggcggaggagaggagccggcgggcagcttcgaggatgccgaggggccccggcggcagtatggtttcatgcagaggcagttcacctccatgctgcagcctggggtcaacaaattctccctccgcatgtttgggagccagaaggcggtggagaaggagcaggaaagggttaaaactgcaggcttctggattatccatccgtacagtgacttcaggttttattgggatttaatcatgcttataatgatggttggaaatttggtcatcataccagttggaatcacgttcttcacagagcagacgacaacaccgtggattattttcaacgtggcatccgatactgttttcctgttggacttaatcatgaattttaggactgggactgtcaatgaagacagctcggaaatcatcctggaccctaaagtgatcaagatgaattatttaaaaagctggtttgtggtggacttcatctcatcgatcccggtggattatatctttctcattgtagagaaagggatggactcagaagtttacaagacagccagagcacttcgtatcgtgaggtttacaaaaattctcagtctcttgcggttattacgcctttcaaggttaatcagatacatacaccagtgggaagagatattccacatgacctatgacctcgccagtgctgtggtgaggatcttcaacctcattggcatgatgctgcttctgtgccactgggatggctgtcttcagttcctggttcccctgctgcaggacttcccaccagattgctgggtttctctgaatgaaatggttaatgattcctggggaaaacaatattcctacgcactcttcaaagctatgagtcacatgctgtgcattggttatggcgcccaagcccctgtcagcatgtctgacctctggattaccatgctgagcatgattgtgggcgccacctgctacgcaatgtttgttggccatgccacagctttgatccagtctttggactcttcaaggaggcagtatcaagagaagtataagcaagtagagcaatacatgtcattccacaagttaccagctgacatgcgccagaagatacatgattactatgagcaccgataccaaggcaagatcttcgatgaagaaaatattctcagtgagcttaatgatcctctgagagaggaaatagtcaacttcaactgccggaaactggtggcaactatgcctctttttgctaacgccgatcccaatttcgtgacggccatgctgagcaagctgagatttgaggtgttccagcccggagactatatcattcgagaaggagctgtggggaagaaaatgtatttcatccagcacggtgttgctggcgttatcaccaagtccagtaaagaaatgaagctgacagatggctcttacttcggagagatatgcctgctgaccaagggccggcgcactgccagtgtccgagctgatacctactgtcgtctttactccctttcggtggacaatttcaatgaggtcttggaggaatatccaatgatgagaagagcctttgagacagttgctattgaccgactcgatcggataggcaagaaaaactctattctcctgcagaagttccagaaggatctaaacactggtgttttcaacaaccaggagaacgagatcctgaagcagatcgtgaagcatgaccgagagatggtacaagctatccctccaatcaactatcctcaaatgacagccctcaactgcacatcttcaaccaccaccccaacctcccgcatgaggacccaatctccgccagtctacaccgcaaccagcctgtctcacagcaatctgcactcacccagtcccagcacacagacgccccaaccctcagccatcctttcaccctgctcctataccacagcagtctgcagtcctcctatacagagccccctggccacacgaactttccattatgcctctcccactgcgtcccagctgtcactcatgcagcagcctcagcagcaactaccgcagtcccaggtacagcagactcagactcagactcagcagcagcagcagcaacagcagcagcagcagcagcagcaacagcaacaacagcagcagcagcagcagcagcagcagcagcagcagcagcagcagcagcagcagcagcagccacagacacctggtagctccacaccgaaaaatgaagtgcacaagagcacacaagcccttcataacaccaacctgaccaaagaagtcaggcccctttccgcctcgcagccttctctgccccatgaggtctccactttgatctccagacctcatcccactgtgggcgaatccctggcctctatccctcaacccgtggcagcagtccacagcactggccttcaggcagggagcaggagcacagtgccacaacgtgtcaccttgttccgacagatgtcctcgggagccatcccccccaaccgaggagtgcctccagcaccccctccaccagcagctgtgcagagagagtctccctcagtcctaaatacagacccagatgcagaaaaaccccgttttgcttcgaatttatgattcttgatgattgtcaaagcagaaaagaagtactctaataaacagaatattctcagatattattttattctatctcacgatagatccctatagcctactctgaaaaaaaaatattttagaagctgtggcctacatgcaaatgtaaaaacatatatacatatataattaaatatatatatatatatatatatctaaatgcccaagagaagttcaaaagacttgtataacattcagtgttacatgtcttcctctctttaaaaccattaaaggatttaacacattgttgtaaggtcattgatttctaaccttttacttgattcctttgatatatgtgtttctcccttttatgaagagttcttggagtcaatggaaacaaaactcttgattttaaaaaaggcaactccaattagatccagcatagcaccaatcaaagctttctttcattagctgtgcctctgcgtctaggttgttaattatgcgggattcaataaacaaatcccagtttatagctctcaattgtattttggtgctttaaattttgagttaggtgaaggaacacgctccatgctcagccaccgtaggagactaacattgccattaaggcttcctctaacctcaaacatgttcattgattttgtgagaaaagtgaggagatatttgtcttcatgtgtcactggacttttaccaagacgcagtcaatgttagctgtaaataactttcccagcccgaattaaagtaactattctgtgttgtagaaaggtaaaagtcagtgtttaagaatttagttttactgcttcacttcaaaagttagagttttaaatttcacaaaacactctaattgtgacagctgttcaaatgtaatgcaatggcttgagacctacaatatcatttttaacctgcgatactttaatgcaaaaattgtatgcttgaacctacaaattgcttgtatgacaccaaaaatcattacttttattccttcttgacataatcaagcacctgaacctggtcctggcatgctttcgggggcaaaaaaaaataaaataaaataacttaaaaaaaaaagtagattcaaatcaatcattgtaagaaaaggctgacagtatttctcacttctagatgagtataactattcattaattgcctctcttaaaattcttaaaaggctgacttggatctctgacttaaatctagaagtgaggttttcactttcatttgatattgttgctgttcttattgtttaagcaatcatttgcaaaccatagcttgttttggagttaaaggtgttatgtgtcttcatgttagttggtagtttattgtgatgttaatgtgaagaaataaatactatatatcaccacatctgtttggaaatacacattttgccctttgtatattgtaactaagcagttagtaaatcttaaggcatgtggtaacctacatagtccttagatagacaggaggtttgttctttcaaatgtgctgaaacttatatggactccgtgaggggaagcaggggggaattgagctgtctgaaagcattgtctgtttgttcacttgtttccttaattctttctgtgagcatcatggagcctaatctagggaagtcccttagcgatcttgcttcatgtgtgtttgctgcacctcacacaagtggtgggtgagtagaacacagtagcaggctctctagtgcctgacttctgtacgtaactcaagagagtgagctgatatggaggtctttgacattacaggcacaaatgatctatttaagaacataaagaccatacattctattgggacagggcctccaggtatccttgaggaccaagaacaaaagtagaagcaagaggtttaaagtggatctacattgccttttatgaaaccaaaatgagtcgttgcacttaattgctaacggatcctaccttgtgtgaaacaatcagcaatgctaggtaacgtgatgtcattcctgtaatgctagtgaccaatggtatcctgttaggaatgatgtaagagagagatcctgcagcctacgtaaaatctatgggaaagttgcaagacctatcacatatcagtacaaaactcctttattttattaaatttaaaaattagcttcttgttaagatcatgtactagtcctttaaattattaaaggtctacctttggcaggattaatgcatttcgtagtaaaatatttttatatatcaattttttgagcactattggagaacatccgcaaaattgaattgcatggttattcagtgcaaccaataaaatttttattcactttgtactcgaatggacaaagaacactaaggtttatatgttaaagtaacaaaaccatacagggtatattaaatacacatatgtatgaatgtgtgtgtttgtaaaggtacagtgctaggagaacatgaccttttttctctgtacatagttaagctcaagtacggagttttaatctgtacgggaagagctgtattggggtcttttactgctgagaaagtagaacaataacttatactttgcactgtatgaccagggaagagttagagtatttcttttgtctttgctcaaagccatacatatataaatatatattaagattattaataaattcaaaagaaaataaaccaaattatgaatattttattttgttgttgaaatctaatcaaatgtttaactcattgaggagtacagatttgcttgttgttctctctttgtataatctccaaaaagatttgtttttgaaaatcaccatacaattgttatagaaattctacagatatagaatgaatgtaatttaaatagaacatagatgtctcagtcacctgtttgttttcctttttttcatatggtaacatttggttatcttattctttaccccatgcctctttagtatgtggtgtttctccagttttaaaatgcagccatgtctttgttattggatatggggatggtttttaattttcgtacatgacctgttttctctgggcttttcaaaggcctcagatgagatttgtcacaatgaggataaatagcaaagcagtcctaaacacaaggaggataaagtgtgattcttcaattggttgtcctcctcaaacacacagcctgactccagatctccgtgacctctccataagtgaatggttaccaagtggatgccattctacttttaaaagatgcttactctatcatttacagacttaaatgaacatgttattttaaggacactgcaaagaaagcagtcgctagtctaataattcctacacatacgaacaatttaaacaatatgatgagtttcaacttttagatacattatactaaaatcagaattagttatgattcaacatataagtcaccttgactccttgacaagattattgtgtaaaatacctccatatatttttatgacttgttttttatttggtaagtttactataattgctatttgggatcttactttccttatttttataatattaaactagatgactaaaatttttctcatttttatcttctccatccttgtagagcttgtatcatgccatgcaagtgtaggatatgttgttgttgctgctacagctgctgctattgttgttaatattcactaaccctaacaaaaattttctatatgataggtatatctacctaaatatccataagtctgtgccataagaaaaaaactatactcaagtattaaactacactgaattctgaatagtcaaaaattgtcacgaaacatgcagttgaatatgtggaccaaattatgtgggaatttttttaactttattcaaaatagttcctgaaatattttcaaaatcatgttggaaattttctttcgaggattttttttttttatcaatttaagggtgatttgtagttgctgtgaccacttgaaaatagtgactttctaaagcagttttatttcattttaataaataacacgtttttattcttttctcatatatttattctgatacaattttcccaaccccctcttcccccagcctcttccctcccccatcaccactctcttccatatccccacccctctcctggggaaaaggatcgacatttttattgcatgtattgatatcttcacaaacaggtcattttggccttgatcacatttatagctttcaggtaaaaacaaaaaacaaaaaacaaaaccataagcttctccatatagcaaaaatattcaggttgaataataaatctgtcaccacaataaatcctctcattctagttcaaaggatacgtctgtgatatttgctctgttgcttaatgctttgtgcagctctctcgatgaaatgttattactatcttttcttcatatggaaatagtctctgtaacacaaggtgatgaggaatgaagataaatttccaaaaaaaaaaaaaatctggaatgagataaatggtatatttgttccatgtacaaatgttgatgtctcaaaacaagacaagtgatgttttataaaatcaaaataagtgtgatggccataacccaagtattccattttaaattaagacgggacccaaccccgcaatcacgtgaacatgcctctcttatctcaccatgcctctcttatctcaccataatcctaccccagtttccctaaccaagggcggtgcatagcgacaagtgaagactggaaagactttgttgaaagaagccttgccaagacttggttttggcctatcatgagacttgttaaagatgataataaagggaaatgtatggaagtctattaatttatgtctgagatacttgatgtagaaagaataaaatttgaagaaagcacc

SEQ ID NO: 54 - DNA, 7911 bp, Mus musculus
  source 1..7911: mol_type = genomic DNA
ggtgctttcttcaaattttattctttctacatcaagtatctcagacataaattaatagacttccatacatttccctttattatcatctttaacaagtctcatgataggccaaaaccaagtcttggcaaggcttctttcaacaaagtctttccagtcttcacttgtcgctatgcaccgcccttggttagggaaactggggtaggattatggtgagataagagaggcatggtgagataagagaggcatgttcacgtgattgcggggttgggtcccgtcttaatttaaaatggaatacttgggttatggccatcacacttattttgattttataaaacatcacttgtcttgttttgagacatcaacatttgtacatggaacaaatataccatttatctcattccagattttttttttttttggaaatttatcttcattcctcatcaccttgtgttacagagactatttccatatgaagaaaagatagtaataacatttcatcgagagagctgcacaaagcattaagcaacagagcaaatatcacagacgtatcctttgaactagaatgagaggatttattgtggtgacagatttattattcaacctgaatatttttgctatatggagaagcttatggttttgttttttgttttttgtttttacctgaaagctataaatgtgatcaaggccaaaatgacctgtttgtgaagatatcaatacatgcaataaaaatgtcgatccttttccccaggagaggggtggggatatggaagagagtggtgatgggggagggaagaggctgggggaagagggggttgggaaaattgtatcagaataaatatatgagaaaagaataaaaacgtgttatttattaaaatgaaataaaactgctttagaaagtcactattttcaagtggtcacagcaactacaaatcacccttaaattgataaaaaaaaaaaatcctcgaaagaaaatttccaacatgattttgaaaatatttcaggaactattttgaataaagttaaaaaaattcccacataatttggtccacatattcaactgcatgtttcgtgacaatttttgactattcagaattcagtgtagtttaatacttgagtatagtttttttcttatggcacagacttatggatatttaggtagatatacctatcatatagaaaatttttgttagggttagtgaatattaacaacaatagcagcagctgtagcagcaacaacaacatatcctacacttgcatggcatgatacaagctctacaaggatggagaagataaaaatgagaaaaattttagtcatctagtttaatattataaaaataaggaaagtaagatcccaaatagcaattatagtaaacttaccaaataaaaaacaagtcataaaaatatatggaggtattttacacaataatcttgtcaaggagtcaaggtgacttatatgttgaatcataactaattctgattttagtataatgtatctaaaagttgaaactcatcatattgtttaaattgttcgtatgtgtaggaattattagactagcgactgctttctttgcagtgtccttaaaataacatgttcatttaagtctgtaaatgatagagtaagcatcttttaaaagtagaatggcatccacttggtaaccattcacttatggagaggtcacggagatctggagtcaggctgtgtgtttgaggaggacaaccaattgaagaatcacactttatcctccttgtgtttaggactgctttgctatttatcctcattgtgacaaatctcatctgaggcctttgaaaagcccagagaaaacaggtcatgtacgaaaattaaaaaccatccccatatccaataacaaagacatggctgcattttaaaactggagaaacaccacatactaaagaggcatggggtaaagaataagataaccaaatgttaccatatgaaaaaaaggaaaacaaacaggtgactgagacatctatgttctatttaaattacattcattctatatctgtagaatttctataacaattgtatggtgattttcaaaaacaaatctttttggagattatacaaagagagaacaacaagcaaatctgtactcctcaatgagttaaacatttgattagatttcaacaacaaaataaaatattcataatttggtttattttcttttgaatttattaataatcttaatatatatttatatatgtatggctttgagcaaagacaaaagaaatactctaactcttccctggtcatacagtgcaaagtataagttattgttctactttctcagcagtaaaagaccccaatacagctcttcccgtacagattaaaactccgtacttgagcttaactatgtacagagaaaaaaggtcatgttctcctagcactgtacctttacaaacacacacattcatacatatgtgtatttaatataccctgtatggttttgttactttaacatataaaccttagtgttctttgtccattcgagtacaaagtgaataaaaattttattggttgcactgaataaccatgcaattcaattttgcggatgttctccaatagtgctcaaaaaattgatatataaaaatattttactacgaaatgcattaatcctgccaaaggtagacctttaataatttaaaggactagtacatgatcttaacaagaagctaatttttaaatttaataaaataaaggagttttgtactgatatgtgataggtcttgcaactttcccatagattttacgtaggctgcaggatctctctcttacatcattcctaacaggataccattggtcactagcattacaggaatgacatcacgttacctagcattgctgattgtttcacacaaggtaggatccgttagcaattaagtgcaacgactcattttggtttcataaaaggcaatgtagatccactttaaacctcttgcttctacttttgttcttggtcctcaaggatacctggaggccctgtcccaatagaatgtatggtctttatgttcttaaatagatcatttgtgcctgtaatgtcaaagacctccatatcagctcactctcttgagttacgtacagaagtcaggcactagagagcctgctactgtgttctactcacccaccacttgtgtgaggtgcagcaaacacacatgaagcaagatcgctaagggacttccctagattaggctccatgatgctcacagaaagaattaaggaaacaagtgaacaaacagacaatgctttcagacagctcaattcccccctgcttcccctcacggagtccatataagtttcagcacatttgaaagaacaaacctcctgtctatctaaggactatgtaggttaccacatgccttaagatttactaactgcttagttacaatatacaaagggcaaaatgtgtatttccaaacagatgtggtgatatatagtatttatttcttcacattaacatcacaataaactaccaactaacatgaagacacataacacctttaactccaaaacaagctatggtttgcaaatgattgcttaaacaataagaacagcaacaatatcaaatgaaagtgaaaacctcacttctagatttaagtcagagatccaagtcagccttttaagaattttaagagaggcaattaatgaatagttatactcatctagaagtgagaaatactgtcagccttttcttacaatgattgatttgaatctacttttttttttaagttattttattttatttttttttgcccccgaaagcatgccaggaccaggttcaggtgcttgattatgtcaagaaggaataaaagtaatgatttttggtgtcatacaagcaatttgtaggttcaagcatacaatttttgcattaaagtatcgcaggttaaaaatgatattgtaggtctcaagccattgcattacatttgaacagctgtcacaattagagtgttttgtgaaatttaaaactctaacttttgaagtgaagcagtaaaactaaattcttaaacactgacttttacctttctacaacacagaatagttactttaattcgggctgggaaagttatttacagctaacattgactgcgtcttggtaaaagtccagtgacacatgaagacaaatatctcctcacttttctcacaaaatcaatgaacatgtttgaggttagaggaagccttaatggcaatgttagtctcctacggtggctgagcatggagcgtgttccttcacctaactcaaaatttaaagcaccaaaatacaattgagagctataaactgggatttgtttattgaatcccgcataattaacaacctagacgcagaggcacagctaatgaaagaaagctttgattggtgctatgctggatctaattggagttgccttttttaaaatcaagagttttgtttccattgactccaagaactcttcataaaagggagaaacacatatatcaaaggaatcaagtaaaaggttagaaatcaatgaccttacaacaatgtgttaaatcctttaatggttttaaagagaggaagacatgtaacactgaatgttatacaagtcttttgaacttctcttgggcatttagatatatatatatatatatatatttaattatatatgtatatatgtttttacatttgcatgtaggccacagcttctaaaatatttttttttcagagtaggctatagggatctatcgtgagatagaataaaataatatctgagaatattctgtttattagagtacttcttttctgctttgacaatcatcaagaatcataaattcgaagcaaaacggggtttttctgcatctgggtctgtatttaggactgagggagactctctctgcacagctgctggtggagggggtgctggaggcactcctcggttgggggggatggctcccgaggacatctgtcggaacaaggtgacacgttgtggcactgtgctcctgctccctgcctgaaggccagtgctgtggactgctgccacgggttgagggatagaggccagggattcgcccacagtgggatgaggtctggagatcaaagtggagacctcatggggcagagaaggctgcgaggcggaaaggggcctgacttctttggtcaggttggtgttatgaagggcttgtgtgctcttgtgcacttcatttttcggtgtggagctaccaggtgtctgtggctgctgctgctgctgctgctgctgctgctgctgctgctgctgctgctgctgctgctgctgttgttgctgttgctgctgctgctgctgctgctgttgctgctgctgctgctgagtctgagtctgagtctgctgtacctgggactgcggtagttgctgctgaggctgctgcatgagtgacagctgggacgcagtgggagaggcataatggaaagttcgtgtggccagggggctctgtataggaggactgcagactgctgtggtataggagcagggtgaaaggatggctgagggttggggcgtctgtgtgctgggactgggtgagtgcagattgctgtgagacaggctggttgcggtgtagactggcggagattgggtcctcatgcgggaggttggggtggtggttgaagatgtgcagttgagggctgtcatttgaggatagttgattggagggatagcttgtaccatctctcggtcatgcttcacgatctgcttcaggatctcgttctcctggttgttgaaaacaccagtgtttagatccttctggaacttctgcaggagaatagagtttttcttgcctatccgatcgagtcggtcaatagcaactgtctcaaaggctcttctcatcattggatattcctccaagacctcattgaaattgtccaccgaaagggagtaaagacgacagtaggtatcagctcggacactggcagtgcgccggcccttggtcagcaggcatatctctccgaagtaagagccatctgtcagcttcatttctttactggacttggtgataacgccagcaacaccgtgctggatgaaatacattttcttccccacagctccttctcgaatgatatagtctccgggctggaacacctcaaatctcagcttgctcagcatggccgtcacgaaattgggatcggcgttagcaaaaagaggcatagttgccaccagtttccggcagttgaagttgactatttcctctctcagaggatcattaagctcactgagaatattttcttcatcgaagatcttgccttggtatcggtgctcatagtaatcatgtatcttctggcgcatgtcagctggtaacttgtggaatgacatgtattgctctacttgcttatacttctcttgatactgcctccttgaagagtccaaagactggatcaaagctgtggcatggccaacaaacattgcgtagcaggtggcgcccacaatcatgctcagcatggtaatccagaggtcagacatgctgacaggggcttgggcgccataaccaatgcacagcatgtgactcatagctttgaagagtgcgtaggaatattgttttccccaggaatcattaaccatttcattcagagaaacccagcaatctggtgggaagtcctgcagcaggggaaccaggaactgaagacagccatcccagtggcacagaagcagcatcatgccaatgaggttgaagatcctcaccacagcactggcgaggtcataggtcatgtggaatatctcttcccactggtgtatgtatctgattaaccttgaaaggcgtaataaccgcaagagactgagaatttttgtaaacctcacgatacgaagtgctctggctgtcttgtaaacttctgagtccatccctttctctacaatgagaaagatataatccaccgggatcgatgagatgaagtccaccacaaaccagctttttaaataattcatcttgatcactttagggtccaggatgatttccgagctgtcttcattgacagtcccagtcctaaaattcatgattaagtccaacaggaaaacagtatcggatgccacgttgaaaataatccacggtgttgtcgtctgctctgtgaagaacgtgattccaactggtatgatgaccaaatttccaaccatcattataagcatgattaaatcccaataaaacctgaagtcactgtacggatggataatccagaagcctgcagttttaaccctttcctgctccttctccaccgccttctggctcccaaacatgcggagggagaatttgttgaccccaggctgcagcatggaggtgaactgcctctgcatgaaaccatactgccgccggggcccctcggcatcctcgaagctgcccgccggctcctctcctccgccgccgtccaccttgaagcacacggagttgccatgttccttcccggccgcgccgccccccggcggggtccccaggcgcttgtcggccgccaccggccccgtcgcgggcgccttggaggggaagacgctgttgccatcgtcgcggctgttggacgcggagttgggtttgccgccgccttccatgcccggaggacgcgaccggcgacggcgcgggctccagactcgccgggggctcgaagccaaggagcaggggccggagccggctgcccgtcgcggcggcagcggcggcggcggctactgcttcccgcccgcccgctgctccgctgcgcgcctggctcccgccgccgccgctgccctcagtggctgcgctgccggctctgccgcgctccgggctccgccgcgcctggtactgaggctgaggctgaggctgcgggcgcggggcgaggctcctccgctcggcacccgcgcgccagcgccgcccctcggctgccccctgctggccgcagaccgcctctacccgcgcgcgccccgccgctcgcctgtgccacttctgcccagcgtgacatt

SEQ ID NO: 55 - DNA, 3064 bp, Rattus norvegicus
  source 1..3064: mol_type = genomic DNA
ccggcccctgccccttggcctcaagcccccggcgagtctggagccctcgccgtcgccggtcgcgtccttcgggcatggaaggcggcggcaagcccaactccgcttccaacagccgcgacgatggcaacagcgtttacccctccaaggcgcccgcgacggggccggcggcggccgacaagcgcctggggaccccgccggggggcggcgcggccgggaaggaacacggcaactccgtgtgcttcaaggtggacggcggcggaggagaggagccggcgggcagcttcgaggatgccgaggggccccggcgacagtacggtttcatgcagaggcagttcacctccatgctgcagcctggggtcaacaaattctccctccgcatgttcgggagccagaaggcggtggagaaggagcaggaaagggttaaaactgcaggcttctggattatccatccgtacagtgacttcaggttttattgggatttaataatgcttataatgatggttggaaatttggtcatcataccagttggaatcacattcttcacagagcaaacaacaacaccgtggattattttcaatgtggcatcagatacagttttcctgttggacctaatcatgaattttaggactgggactgtcaacgaagacagctctgaaatcatcctggaccctaaagtaatcaagatgaattatttaaaaagctggttcgtggtggacttcatctcctcgatcccggtggattatatctttcttattgtagagaaaggaatggattcggaagtttacaagaccgccagagcacttcggatcgtgaggtttacaaaaattctcagtctcttgcgtttattacgcctttcaaggttaattagatacatacaccagtgggaagagatattccacatgacatatgatctcgccagtgcagtggtgagaatcttcaacctcattggcatgatgctgctcctgtgtcactgggatggctgtcttcagtttctggtccccctgctgcaggacttcccaccggattgctgggtttctctaaatgaaatggttaatgattcatgggggaaacagtattcctacgcactcttcaaagctatgagtcacatgctgtgcattggttatggcgcccaggcccccgtcagcatgtctgacctctggattaccatgctgagcatgattgttggggccacctgctatgccatgtttgtcggccatgccacagctttgatccagtctctggattcttcaaggaggcagtatcaagagaagtacaagcaagtagagcaatacatgtcattccacaagttaccagctgacatgcgccagaagatacatgattactatgagcaccgataccaaggcaagatcttcgatgaggaaaatattctcagtgaacttaatgatcctctgagagaggaaatagtcaacttcaactgccggaaactggtggccaccatgcctctctttgctaacgcggatcccaatttcgtgacggccatgctgagcaagctgagatttgaggtgttccagcccggagactatatcattcgagaaggagctgtggggaagaaaatgtatttcatccagcatggtgtggctggtgtcatcaccaagtccagtaaagaaatgaagttgacagacggctcttactttggagaaatatgcctgctgaccaagggccggcgcactgccagtgttcgagctgatacatactgtcgcctttactccctttcggtggacaatttcaacgaggtcttggaggaatatccaatgatgagaagagcctttgagacagttgctattgaccgactagatcggataggcaagaaaaactctattctcctgcagaagttccagaaggatctgaacactggtgttttcaacaaccaggagaatgagatcctgaagcagattgtgaagcatgacagagagatggtacaagcgatccctccaatcaactatcctcaaatgacagccctgaattgcacatcttcaaccaccaccccaacgtcgcgcatgaggacccaatctccaccagtctacacagcgaccagcctctctcacagcaacctgcactcacccagccccagcacacagacgcctcaaccctcagccatcctttcaccctgctcctacaccacagcagtctgcagtcctcctatacagagccccctggccacgcgaactttccattatgcctctcccactgcatcccaattgtcactcatgcagcagcctcagccgcagctacagcaatcccaggtacagcagactcagccgcagccgcagccgcagccgcagcagccgcaacagcaacaacagcagcaacagcagcagcagcagcagcagcaacaacaacagcagcagcaacagccacagacacctggtagttccacaccgaaaaatgaagtgcacaagagcactcaagctcttcataacaccaacctgaccagagaagtcaggcccctctctgcctcgcagccttcgctgccccatgaggtctccactatgatctccagaccgcatcccactgtgggcgagtccctggcctccatccctcaacccatggcaacagtccacagcactggccttcaggcagggagcaggagcaccgtgccacagcgtgtcaccttgttcagacagatgtcctcgggagccattccccccaaccgaggagtgcctccagcacccccaccaccagcagctgtgcagagagagtctccctcagtcttaaataaagacccagatgcagaaaaaccacgttttgcttcgaatttatgattcttgctgattgtcaaagcagaaaagaaatactctaataaacagaatattctcagatattattttattctatctcatgatagagccctatagcctactctaaaaagatattttagaagctctggcgtacatgcaaatgtaaaaacatatatacatatattattaaatatatatatatatctaaatgcccaagagaagttcaaaagacttgtataactttcagtgttatgtcttcctttctttaaaaccattaaaggatttaacacattgttgtaagatca

SEQ ID NO: 56 - DNA, 3064 bp, Rattus norvegicus
  source 1..3064: mol_type = genomic DNA
tgatcttacaacaatgtgttaaatcctttaatggttttaaagaaaggaagacataacactgaaagttatacaagtcttttgaacttctcttgggcatttagatatatatatatatttaataatatatgtatatatgtttttacatttgcatgtacgccagagcttctaaaatatctttttagagtaggctatagggctctatcatgagatagaataaaataatatctgagaatattctgtttattagagtatttcttttctgctttgacaatcagcaagaatcataaattcgaagcaaaacgtggtttttctgcatctgggtctttatttaagactgagggagactctctctgcacagctgctggtggtgggggtgctggaggcactcctcggttggggggaatggctcccgaggacatctgtctgaacaaggtgacacgctgtggcacggtgctcctgctccctgcctgaaggccagtgctgtggactgttgccatgggttgagggatggaggccagggactcgcccacagtgggatgcggtctggagatcatagtggagacctcatggggcagcgaaggctgcgaggcagagaggggcctgacttctctggtcaggttggtgttatgaagagcttgagtgctcttgtgcacttcatttttcggtgtggaactaccaggtgtctgtggctgttgctgctgctgttgttgttgctgctgctgctgctgctgctgttgctgctgttgttgctgttgcggctgctgcggctgcggctgcggctgcggctgagtctgctgtacctgggattgctgtagctgcggctgaggctgctgcatgagtgacaattgggatgcagtgggagaggcataatggaaagttcgcgtggccagggggctctgtataggaggactgcagactgctgtggtgtaggagcagggtgaaaggatggctgagggttgaggcgtctgtgtgctggggctgggtgagtgcaggttgctgtgagagaggctggtcgctgtgtagactggtggagattgggtcctcatgcgcgacgttggggtggtggttgaagatgtgcaattcagggctgtcatttgaggatagttgattggagggatcgcttgtaccatctctctgtcatgcttcacaatctgcttcaggatctcattctcctggttgttgaaaacaccagtgttcagatccttctggaacttctgcaggagaatagagtttttcttgcctatccgatctagtcggtcaatagcaactgtctcaaaggctcttctcatcattggatattcctccaagacctcgttgaaattgtccaccgaaagggagtaaaggcgacagtatgtatcagctcgaacactggcagtgcgccggcccttggtcagcaggcatatttctccaaagtaagagccgtctgtcaacttcatttctttactggacttggtgatgacaccagccacaccatgctggatgaaatacattttcttccccacagctccttctcgaatgatatagtctccgggctggaacacctcaaatctcagcttgctcagcatggccgtcacgaaattgggatccgcgttagcaaagagaggcatggtggccaccagtttccggcagttgaagttgactatttcctctctcagaggatcattaagttcactgagaatattttcctcatcgaagatcttgccttggtatcggtgctcatagtaatcatgtatcttctggcgcatgtcagctggtaacttgtggaatgacatgtattgctctacttgcttgtacttctcttgatactgcctccttgaagaatccagagactggatcaaagctgtggcatggccgacaaacatggcatagcaggtggccccaacaatcatgctcagcatggtaatccagaggtcagacatgctgacgggggcctgggcgccataaccaatgcacagcatgtgactcatagctttgaagagtgcgtaggaatactgtttcccccatgaatcattaaccatttcatttagagaaacccagcaatccggtgggaagtcctgcagcagggggaccagaaactgaagacagccatcccagtgacacaggagcagcatcatgccaatgaggttgaagattctcaccactgcactggcgagatcatatgtcatgtggaatatctcttcccactggtgtatgtatctaattaaccttgaaaggcgtaataaacgcaagagactgagaatttttgtaaacctcacgatccgaagtgctctggcggtcttgtaaacttccgaatccattcctttctctacaataagaaagatataatccaccgggatcgaggagatgaagtccaccacgaaccagctttttaaataattcatcttgattactttagggtccaggatgatttcagagctgtcttcgttgacagtcccagtcctaaaattcatgattaggtccaacaggaaaactgtatctgatgccacattgaaaataatccacggtgttgttgtttgctctgtgaagaatgtgattccaactggtatgatgaccaaatttccaaccatcattataagcattattaaatcccaataaaacctgaagtcactgtacggatggataatccagaagcctgcagttttaaccctttcctgctccttctccaccgccttctggctcccgaacatgcggagggagaatttgttgaccccaggctgcagcatggaggtgaactgcctctgcatgaaaccgtactgtcgccggggcccctcggcatcctcgaagctgcccgccggctcctctcctccgccgccgtccaccttgaagcacacggagttgccgtgttccttcccggccgcgccgccccccggcggggtccccaggcgcttgtcggccgccgccggccccgtcgcgggcgccttggaggggtaaacgctgttgccatcgtcgcggctgttggaagcggagttgggcttgccgccgccttccatgcccgaaggacgcgaccggcgacggcgagggctccagactcgccgggggcttgaggccaaggggcaggggccgg

SEQ ID NO: 57 - DNA, 5518 bp, Macaca mulatta
  source 1..5518: mol_type = genomic DNA
ccggccgcgtcctccgggcatggaaggaggtggcaagcccaactcttcgtctaacagccgggacgatggcaacagcgtcttccccgccaaggcgtccgcgacgggcgcggggccggccgcggccgagaaacgcttgggcaccccgccggggggcggcggggccggcgcgaaggagcacggcaactccgtgtgcttcaaggtggacggcggcggcggaggaggcggcgaggagccggctgggggctttgaggacgccgaggggccccggcggcagtacggcttcatgcagaggcagttcacctccatgctgcaacccggagtcaacaaattctccctccgcatgtttgggagccagaaggcggtggaaaaggagcaggaaagggttaaaactgcaggcttctggattatccacccttacagtgatttcaggttttattgggatttaataatgcttataatgatggttggaaatctagtcatcataccagttggaatcacattctttacagagcaaacaacaacaccatggattattttcaatgtggcatcagatacagttttcctactggacctgatcatgaattttaggactggaactgtcaacgaagacagttctgaaatcatcctggaccccaaagtgatcaagatgaattatttaaaaagctggtttgtggttgacttcatctcatccatcccagtggattatatctttcttattgtagaaaaaggaatggattcagaagtttacaagacagccagggcacttcgcattgtgaggtttacaaaaattctcagtctcttgcgtttattacgactttcaaggttaattagatacatacatcagtgggaagagatattccacatgacgtatgatcttgccagtgcagtggtgagaatttttaatctcatcggcatgatgctgctcctgtgtcactgggatggttgtcttcagttcttagtaccactactgcaggacttcccaccagattgctgggtgtctttaaatgaaatggttaatgattcttggggaaagcagtattcatacgcactcttcaaagctatgagtcacatgctgtgcattgggtatggagcccaagccccagtcagcatgtctgacctctggattaccatgctgagcatgatcgtcggggccacctgctatgccatgtttgtcggccatgccactgctttaatccagtctctggattcttctaggcggcagtatcaagagaagtataagcaagtggaacaatacatgtcattccataagttaccagctgatatgcgtcagaagatacatgattactatgaacacagataccaaggcaaaatctttgatgaggaaaatattctcaatgaactcaatgatcctctgagagaggagatagtcaacttcaactgtcggaaactggtggctacaatgcctttatttgctaatgcggatcctaattttgtgactgccatgctgagcaagttgagatttgaggtgtttcaacctggagattatatcatacgagaaggagccgtgggtaaaaaaatgtatttcattcaacatggtgttgctggtgtcattacaaaatccagtaaagaaatgaagctgacagatggctcttactttggagagatttgcctgctgaccaaaggacgtcgtactgccagtgttcgagctgatacatattgtcgtctttactcactttctgtggacaatttcaacgaagtcctggaggaatatccaatgatgaggagagcctttgagacagttgccattgaccgactagatcgaataggaaagaaaaattcaattcttctgcaaaagttccagaaggatctgaacactggtgttttcaacaatcaggagaacgaaatcctcaagcagattgtgaaacatgacagggagatggtgcaggcaatcgctcccatcaattatcctcaaatgacaaccctgaattccacatcgtcaactacgaccccgacctcccgcatgaggacacaatctccaccagtgtacacagcgaccagcctatctcacagcaacctgcattcccccagtcccagcacacagaccccccagccatcagccatcctttcaccctgctcctacaccaccgccgtctgcagccctcctgtacagagccctctggccgctcgaactttccactacgcctcccccaccgcctcccagctgtcactcatgcaacagcagcctcagcagcaggtacagcagtcccagccgccgcagactcagccacagcagccgtctccgcagccacagacacctggcagctccacgccgaaaaacgaagtgcacaagagcacgcaggcgcttcacaacaccaacctgacccgggaagtcaggcccctctccgcctcgcagccctcgctgccccatgaggtgtccactctgatttccagacctcatcccactgtgggcgagtccctggcctccatccctcaacccgtgacggcggtccccggaacgggccttcaggcagggggcaggagcactgtcccgcagcgcgtcaccctcttccgacagatgtcgtcgggagccatcccccccaaccgaggagtccctccagcaccccctccaccagcagctgctcttccgagagagtcttcctcagtcttaaacacagacccagacgcagaaaagccacgatttgcttcaaatttatgatccctgctgattgtcaaagcagaaagaaatactctcataaactgagactatactcagatcttattttattctatctcctgatagatccctctagcctactatgaagagatattttagacagctctggcctacacgtgaaatgtaaaatatatatacatatactataaaatatatatctaaattctcaagagagggtcaaaagacctgtttagcattcagtgttatatgtcttcctttctttaaatcattagaggatttaaaatgttgttgtaagattatttatttctaacctacttttacttaagtcctttgatatgtatatttctctgttttatgaagagttcttggattcaatggaaacaaaactgattttaaaaaaggcaactcaaatgagctagcaaatagcaccaatcaaaactttctttcattagctgtgactgtgcatctaaattgttaatcattaatcatgaagaattaaataacaaatcccattttatagatctaaattgtatttcggtgctttcaatttcgaattaggttaaagactgcactacttgcttggccactgtaggagactagcattgccactgttaagaatatcactaacctcctacttcggaggctgaggcaggagaatggcttgaacccaggaggcggagcttgcagtgagcagagatagcgccactgcactcgagcctgggcgacagagcgagactccgtctcaaaaaaaaaaaaaaaaaaaaaagaaagaaagaaaaaagaaaagagtatcactaacctcaaacatgttcattgatctttcagaaagctgagggaaaattaatatttgtcttcatgtgttatcggacttttaccaagactcgatcaatgttagttgtaaataactttttcaacccaaataaaaatagctattctgtgttgtatgaagctaaaagtcattgtttaagagtttagttttatcgcttcacttcaaaacttagagttttaaatttcacaaaatctgattgtgagaattattcaattgtaatgcaatggcttgaaacctacaatattattttaacctgcaatgttttatgcaaaattgtatgctcgaatctacaacttgcttgtattacaccaaaaatcattatttttctttcttcttgccataatcaagcatctgaaaatagtccctgcatgcttctggggaaaaaaaaaaaaaataggttcaaatcagccattgtagggaaaggcttacagtatttctcgtttctagaaaagcataacaattcattaattgcctctcttataattcctataaggctgacttggatctctgacttaagtctagaagtgaggttttcacttttatttaatattattgctattattatttaaataattatttgtaaaccacagcttgatttggagttaagtattgtctatgtcttcactgtagctggtaatttactatggtgttaatttaaagaaataaattcaatacagcatcacgtctgtttgggaacacacattttgctctatgtatattgtaactaaatggttagtaaactttaaggcatgtggtgactaatgtagcccttagataggaggtttgtccttttttaatgtgttgaaaatagtacagacatggtggcagaaagcaggggtaaagttgaatgtctgtgagcattgtttgtctattttcttaactctttccatgatctgtgagcacctgcttcttctcaaagaactcccttagtaatcatttgtgcctaatgcatcccacacatgtggcgtatgactggaacacaattgaaagatacctaataactggcttctgtaaataacccaagttaacagcatgacgtaagtgtaggtcttcagtatctctggcattggcaatacatttaagaacatacagagattacacattatatggggcagggcctgcagatagacttgaggacagaaaacaaaaacaaaagcaaaaactctaaagtgaatccttgctgcctgttatgccttttgcggatataatacctataatacccaaatgagttgttatgtttaatttcaaacaaataccaatttgtgtggaagtaattaacaatgctagttaatgtaatgtaatcatcagtatgctggtgacatatgatggatgtcaggaatactgttgtaagaaagggattgttcagtctacctagaacctatgggaaagctgcaagaccatttacatatcagtataaaactcctttattttattaaaatatgagagttaacttcaatttattaagagtatgtattggtcctttaaattattaaaggtttacatttgataggattaatggatttggtagtgaaatatttttatatatataaatttttggttttttattttgagcactattgggaaaaataagcaaaattgaaatgcatggtctttcagtgcaaccatacaatttttattcactttgtaatagaatggacaaaaaaactaaggtttatatgttaaactaataaaatggtacagggtaaattatatacatatatgtatgaatgtatatatacttagattaagaaaaaaaaatgactcacattcctgtaatataaaggtccattgctagttgaaaagtgacctcttttctctgtacatagtgaagcctgtacgtatggagttttaatctgtacagaaagaaatgtattattgattggtctttctcctgctgggaagataatagaatagcttattcttacaacaattgtatgatcagggatgagttagagtatttcttttgtctttgctcaaagccatacatatataaatatatataaagattattaataaattcaacaaaaaataaa

SEQ ID NO: 58 - DNA, 5518 bp, Macaca mulatta
  source 1..5518: mol_type = genomic DNA
tttattttttgttgaatttattaataatctttatatatatttatatatgtatggctttgagcaaagacaaaagaaatactctaactcatccctgatcatacaattgttgtaagaataagctattctattatcttcccagcaggagaaagaccaatcaataatacatttctttctgtacagattaaaactccatacgtacaggcttcactatgtacagagaaaagaggtcacttttcaactagcaatggacctttatattacaggaatgtgagtcatttttttttcttaatctaagtatatatacattcatacatatatgtatataatttaccctgtaccattttattagtttaacatataaaccttagtttttttgtccattctattacaaagtgaataaaaattgtatggttgcactgaaagaccatgcatttcaattttgcttatttttcccaatagtgctcaaaataaaaaaccaaaaatttatatatataaaaatatttcactaccaaatccattaatcctatcaaatgtaaacctttaataatttaaaggaccaatacatactcttaataaattgaagttaactctcatattttaataaaataaaggagttttatactgatatgtaaatggtcttgcagctttcccataggttctaggtagactgaacaatccctttcttacaacagtattcctgacatccatcatatgtcaccagcatactgatgattacattacattaactagcattgttaattacttccacacaaattggtatttgtttgaaattaaacataacaactcatttgggtattataggtattatatccgcaaaaggcataacaggcagcaaggattcactttagagtttttgcttttgtttttgttttctgtcctcaagtctatctgcaggccctgccccatataatgtgtaatctctgtatgttcttaaatgtattgccaatgccagagatactgaagacctacacttacgtcatgctgttaacttgggttatttacagaagccagttattaggtatctttcaattgtgttccagtcatacgccacatgtgtgggatgcattaggcacaaatgattactaagggagttctttgagaagaagcaggtgctcacagatcatggaaagagttaagaaaatagacaaacaatgctcacagacattcaactttacccctgctttctgccaccatgtctgtactattttcaacacattaaaaaaggacaaacctcctatctaagggctacattagtcaccacatgccttaaagtttactaaccatttagttacaatatacatagagcaaaatgtgtgttcccaaacagacgtgatgctgtattgaatttatttctttaaattaacaccatagtaaattaccagctacagtgaagacatagacaatacttaactccaaatcaagctgtggtttacaaataattatttaaataataatagcaataatattaaataaaagtgaaaacctcacttctagacttaagtcagagatccaagtcagccttataggaattataagagaggcaattaatgaattgttatgcttttctagaaacgagaaatactgtaagcctttccctacaatggctgatttgaacctattttttttttttttccccagaagcatgcagggactattttcagatgcttgattatggcaagaagaaagaaaaataatgatttttggtgtaatacaagcaagttgtagattcgagcatacaattttgcataaaacattgcaggttaaaataatattgtaggtttcaagccattgcattacaattgaataattctcacaatcagattttgtgaaatttaaaactctaagttttgaagtgaagcgataaaactaaactcttaaacaatgacttttagcttcatacaacacagaatagctatttttatttgggttgaaaaagttatttacaactaacattgatcgagtcttggtaaaagtccgataacacatgaagacaaatattaattttccctcagctttctgaaagatcaatgaacatgtttgaggttagtgatactcttttcttttttctttctttcttttttttttttttttttttttgagacggagtctcgctctgtcgcccaggctcgagtgcagtggcgctatctctgctcactgcaagctccgcctcctgggttcaagccattctcctgcctcagcctccgaagtaggaggttagtgatattcttaacagtggcaatgctagtctcctacagtggccaagcaagtagtgcagtctttaacctaattcgaaattgaaagcaccgaaatacaatttagatctataaaatgggatttgttatttaattcttcatgattaatgattaacaatttagatgcacagtcacagctaatgaaagaaagttttgattggtgctatttgctagctcatttgagttgccttttttaaaatcagttttgtttccattgaatccaagaactcttcataaaacagagaaatatacatatcaaaggacttaagtaaaagtaggttagaaataaataatcttacaacaacattttaaatcctctaatgatttaaagaaaggaagacatataacactgaatgctaaacaggtcttttgaccctctcttgagaatttagatatatattttatagtatatgtatatatattttacatttcacgtgtaggccagagctgtctaaaatatctcttcatagtaggctagagggatctatcaggagatagaataaaataagatctgagtatagtctcagtttatgagagtatttctttctgctttgacaatcagcagggatcataaatttgaagcaaatcgtggcttttctgcgtctgggtctgtgtttaagactgaggaagactctctcggaagagcagctgctggtggagggggtgctggagggactcctcggttgggggggatggctcccgacgacatctgtcggaagagggtgacgcgctgcgggacagtgctcctgccccctgcctgaaggcccgttccggggaccgccgtcacgggttgagggatggaggccagggactcgcccacagtgggatgaggtctggaaatcagagtggacacctcatggggcagcgagggctgcgaggcggagaggggcctgacttcccgggtcaggttggtgttgtgaagcgcctgcgtgctcttgtgcacttcgtttttcggcgtggagctgccaggtgtctgtggctgcggagacggctgctgtggctgagtctgcggcggctgggactgctgtacctgctgctgaggctgctgttgcatgagtgacagctgggaggcggtgggggaggcgtagtggaaagttcgagcggccagagggctctgtacaggagggctgcagacggcggtggtgtaggagcagggtgaaaggatggctgatggctggggggtctgtgtgctgggactgggggaatgcaggttgctgtgagataggctggtcgctgtgtacactggtggagattgtgtcctcatgcgggaggtcggggtcgtagttgacgatgtggaattcagggttgtcatttgaggataattgatgggagcgattgcctgcaccatctccctgtcatgtttcacaatctgcttgaggatttcgttctcctgattgttgaaaacaccagtgttcagatccttctggaacttttgcagaagaattgaatttttctttcctattcgatctagtcggtcaatggcaactgtctcaaaggctctcctcatcattggatattcctccaggacttcgttgaaattgtccacagaaagtgagtaaagacgacaatatgtatcagctcgaacactggcagtacgacgtcctttggtcagcaggcaaatctctccaaagtaagagccatctgtcagcttcatttctttactggattttgtaatgacaccagcaacaccatgttgaatgaaatacatttttttacccacggctccttctcgtatgatataatctccaggttgaaacacctcaaatctcaacttgctcagcatggcagtcacaaaattaggatccgcattagcaaataaaggcattgtagccaccagtttccgacagttgaagttgactatctcctctctcagaggatcattgagttcattgagaatattttcctcatcaaagattttgccttggtatctgtgttcatagtaatcatgtatcttctgacgcatatcagctggtaacttatggaatgacatgtattgttccacttgcttatacttctcttgatactgccgcctagaagaatccagagactggattaaagcagtggcatggccgacaaacatggcatagcaggtggccccgacgatcatgctcagcatggtaatccagaggtcagacatgctgactggggcttgggctccatacccaatgcacagcatgtgactcatagctttgaagagtgcgtatgaatactgctttccccaagaatcattaaccatttcatttaaagacacccagcaatctggtgggaagtcctgcagtagtggtactaagaactgaagacaaccatcccagtgacacaggagcagcatcatgccgatgagattaaaaattctcaccactgcactggcaagatcatacgtcatgtggaatatctcttcccactgatgtatgtatctaattaaccttgaaagtcgtaataaacgcaagagactgagaatttttgtaaacctcacaatgcgaagtgccctggctgtcttgtaaacttctgaatccattcctttttctacaataagaaagatataatccactgggatggatgagatgaagtcaaccacaaaccagctttttaaataattcatcttgatcactttggggtccaggatgatttcagaactgtcttcgttgacagttccagtcctaaaattcatgatcaggtccagtaggaaaactgtatctgatgccacattgaaaataatccatggtgttgttgtttgctctgtaaagaatgtgattccaactggtatgatgactagatttccaaccatcattataagcattattaaatcccaataaaacctgaaatcactgtaagggtggataatccagaagcctgcagttttaaccctttcctgctccttttccaccgccttctggctcccaaacatgcggagggagaatttgttgactccgggttgcagcatggaggtgaactgcctctgcatgaagccgtactgccgccggggcccctcggcgtcctcaaagcccccagccggctcctcgccgcctcctccgccgccgccgtccaccttgaagcacacggagttgccgtgctccttcgcgccggccccgccgccccccggcggggtgcccaagcgtttctcggccgcggccggccccgcgcccgtcgcggacgccttggcggggaagacgctgttgccatcgtcccggctgttagacgaagagttgggcttgccacctccttccatgcccggaggacgcggccgg

SEQ ID NO: 59 - DNA, 8090 bp, Macaca fascicularis
  source 1..8090: mol_type = genomic DNA
taccctctcggctacgtgtccccggcgccgggctgccggcgagtctggagcccgcgccgtcgccggccgcgtcctccgggcatggaaggaggtggcaagcccaactcttcgtctaacagccgggacgatggcaacagcgtcttccccgccaaggcgtccgcgacgggcgcggggccggccgcggccgagaaacgcttgggcaccccgccggggggcggcggggccggcgcgaaggagcacggcaactccgtgtgcttcaaggtggacggcggcggcggaggcggcggcgaggagccggctgggggctttgaggacgccgaggggccccggcggcagtacggcttcatgcagaggcagttcacctccatgctgcaacccggagtcaacaaattctccctccgcatgtttgggagccagaaggcggtggaaaaggagcaggaaagggttaaaactgcaggcttctggattatccacccttacagtgatttcaggttttattgggatttaataatgcttataatgatggttggaaatctagtcatcataccagttggaatcacattctttacagagcaaacaacaacaccatggattattttcaatgtggcatcagatacagttttcctactggacctgatcatgaattttaggactggaactgtcaacgaagacagttctgaaatcatcctggaccccaaagtgatcaagatgaattatttaaaaagctggtttgtggttgacttcatctcatccatcccagtggattatatctttcttattgtagaaaaaggaatggattcagaagtttacaagacagccagggcacttcgcattgtgaggtttacaaaaattctcagtctcttgcgtttattacgactttcaaggttaattagatacatacatcagtgggaagagatattccacatgacgtatgatcttgccagtgcagtggtgagaatttttaatctcatcggcatgatgctgctcctgtgtcactgggatggttgtcttcagttcttagtaccactactgcaggacttcccaccagattgctgggtgtctttaaatgaaatggttaatgattcttggggaaagcagtattcatacgcactcttcaaagctatgagtcacatgctgtgcattgggtatggagcccaagccccagtcagcatgtctgacctctggattaccatgctgagcatgatcgtcggggccacctgctatgccatgtttgtcggccatgccactgctttaatccagtctctggattcttcgaggcggcagtatcaagagaagtataagcaagtggaacaatacatgtcattccataagttaccagctgatatgcgtcagaagatacatgattactatgaacacagataccaaggcaaaatctttgatgaggaaaatattctcaatgaactcaatgatcctctgagagaggagatagtcaacttcaactgtcggaaactggtggctacaatgcctttatttgctaatgcggatcctaattttgtgactgccatgctgagcaagttgagatttgaggtgtttcaacctggagattatatcatacgagaaggagccgtgggtaaaaaaatgtatttcattcaacatggtgttgctggtgtcattacaaaatccagtaaagaaatgaagctgacagatggctcttactttggagagatttgcctgctgaccaaaggacgtcgtactgccagtgttcgagctgatacatattgtcgtctttactcactttctgtggacaatttcaacgaggtcctggaggaatatccaatgatgaggagagcctttgagacagttgccattgaccgactagatcgaataggaaagaaaaattcaattcttctgcaaaagttccagaaggatctgaacactggtgttttcaacaatcaggagaacgaaatcctcaagcagattgtgaaacatgacagggagatggtgcaggcaatcgctcccatcaattatcctcaaatgacaaccctgaattccacatcgtcaactacgaccccgacctcccgcatgaggacacaatctccaccagtgtacacagcgaccagcctgtctcacagcaacctgcattcccccagtcccagcacacagaccccccagccatcagccatcctttcaccctgctcctacaccaccgccgtctgcagccctcctgtacagagccctctggccgctcgaactttccactatgcctcccccaccgcctctcagctgtcactcatgcaacagcagcctcagcagcaggtacagcagtcccagccgccgcagactcagccacagcagccgtctccgcagccacagacacctggcagctccacgccgaaaaacgaagtgcacaagagcacgcaggcgcttcacaacaccaacctgacccgggaagtcaggcccctctccgcctcgcagccctcgctgccccatgaggtgtccactctgatttccagacctcatcccactgtgggcgagtccctggcctccatccctcaacccgtgacggcggtccccggaacgggccttcaggcagggggcaggagcactgtcccgcagcgcgtcaccctcttccgacagatgtcgtcgggagccatcccccccaaccgaggagtccctccagcaccccctccaccagcagctgctcttccgagagagtcttcctcagtcttaaacacagacccagacgcagaaaagccacgatttgcttcaaatttatgatccctgctgattgtcaaagcagaaagaaatactctcataaactgagactatactcagatcttattttattctatctcctgatagatccctctagcctactatgaagagatattttagacagctctggcctacacgtgaaatgtaaaatatatatacatatactataaaatatatatctaaattctcaagagagggtcaaaagacctgtttagcattcagtgttatatgtcttcctttctttaaatcattagaggatttaaaatgttgttgtaagattatttatttctaacctacttttacttaagtcctttgatatgtatatttctctgttttatgaagagttcttggattcaatggaaacaaaactgattttaaaaaaggcaactcaaatgagctagcaaatagcaccaatcaaaactttctttcattagctgtgactgtgcatctaaattgttaatcattaatcatgaagaattaaataacaaatcccattttatagatctaaattgtatttcggtgctttcaatttcgaattaggttaaagactgcactacttgcttggccactgtaggagactagcattgccactgttaagaatatcactaacctcctacttcggaggctgaggcaggagaatggcttgaacccaggaggcggagcttgcagtgagcagagatagtgcactgcactcgagcctgggcgacagagcgagactccgtctcaaaaaaaaaaaaaaaaagaaagaaagaaagaaaaaagaaaagagtatcactaacctcaaacatgttcattgatctttcagaaagctgagggaaaattaatatttgtcttcatgtgttatcggacttttaccaagactcgatcaatgttagttgtaaataactttttcaacccaaataaaaatagctattctgtgttgtatgaagctaaaagtcattgtttaagagtttagttttatcgcttcacttcaaaacttagagttttaaatttcacaaaatctgattgtgagaattattcaattgtaatgcaatggcttgaaacctacaatattattttaacctgcaatgttttatgcaaaattgtatgctcgaatctacaacttgcttgtattacaccaaaaatcattatttttctttcttcttgccataatcaagcatctgaaaatagtccctgcatgctcctggggaaaaaaaaaaaaaaggttcaaatcagccattgtagggaaaggcttacagtatttctcgtttctagaaaagcataacaattcattaattgcctctcttataattcctataaggctgacttggatctctgacttaagtctagaagtgaggttttcacttttatttaatattattgctattattatttaaataattatttgtaaaccacagcttgatttggagttaagtattgtctatgtcttcactgtagctggtaatttactatggtgttaatttaaagaaataaattcaatacagcatcacgtctgtttgggaacacacattttgctctatgtatattgtaactaaatggttagtaaactttaaggcatgtggtgactaatgtagcccttagataggaggtttgtcattttttaatgtgttgaaaatagtacagacatggtggcagaaagcaggggtaaagttgaatgtctgtgagcattgtttgtctattttcttaactctttccatgatctgtgagcacctgcttcttctcaaagaactcccttagtaatcatttgtgcctaatgcatcccacacatgtggcgtatgactggaacacaattgaaagatacctaataactggcttctgtaaataacccaagttaacagcatgacgtaagtgtaggtcttcagtatctctggcattggcaatacatttaagaacatacagagattacacattatacggggcagggcctgcagatagacttgaggacagaaaacaaaaaaaaagcaaaaactctaaagtgaatccttgctgcctgttatgccttttgcggatataatacctataatacccaaatgagttgttatgtttaatttcaaacaaataccaatttgtgtggaagtaattaacaatgctagttaatgtaatgtaatcatcagtatgctggtgacatatgatggatgtcaggaatactgttgtaagaaagggattgttcagtctacctagaacctatgggaaagctgcaagaccatttacatatcagtataaaactcctttattttattaaaatatgagagttaacttcaatttattaagagtatgtattggtcctttaaattattaaaggtttacatttgataggattaatggatttggtagtgaaatatttttatatatataaatttttggttttttattttgagcactattgggaaaaataagcaaaattgaaatgcatggtctttcagtgcaaccatacaatttttattcactttgtaatagaatggacaaaaaaactaaggtttatatgttaaactaataaaatggtacagggtaaattatatacatatatgtatgaatgtatatatacttagattaagaaaaaaaaaatgactcacattcctgtaatataaaggtccattgctagttgaaaagtgacctcttttctctgtacatagtgaagcctgtacgtatggagttttaatctgtacagaaagaaatgtattattgattggtctttctcctgctgggaagataatagaatagcttattcttacaacaattgtatgatcagggatgagttagagtatttcttttgtctttgctcaaagccatacatatataaatatatataaagattattaataaattcaacaaaaactacaatcatgaatattttattttatcaatatatgctaatcaaatgttttattttattaacgagtacagctttgcctctatttttacatcacaaaatttccaagagcttatacttgataatcacataaaatcaattatattctataattctggaataagaggactttaaatggaacatggatttttcaaccacttctctgtttcaccctttacatatagtaaaatatgagcttattttctttttcactctgtgcctttttagaatgtggttgttctccaacttcaaaacacagccattttatgtaattattggatatacggatgagaaataattttcctgtaatagtaaataattgtcctgtaatatatttatacaaacctattttgttataatagttctataacataccaattttgttataatagttttatagcatacctattttgttataatagggccttgtgctctattataacaaaacaggtttatataaatatattcatatttatagccttaaacaaaataggtttgtatagtacgcccaaagccctattataacaaaataggtttgtataaatatattcatatttatagccttgggccctgcaaaggtatttggatagtgatagaacctccccatacaactgtgttttaaatgatacctaaaagcctgagatacagtttatcataatgagaataagtagtaaagcattcctgaaaacaaggatgataaatagtagcgatggcaatatattctattcaccaaaaaaaatagcttgtctccaagtctggttgacctcttcataagtgaatgattccctgatgaatgctgttccactttaaagagatggttattttgcgatttataaacttaaatgagtatactattttcaggatgctacaaagtacataggcaagttattaccgtcattcctataggacatggaatgatttaaacaatatggcatgtttacaattttaggagatttatttcaaatcctgaattatgtgtacttcaaattatgagcaatctctattatctttcaagactatttaaaaaatctccatacctcctctttcagcttaggtttttatatttgttgattttactatgtcactttgcttctatggccctcatttgcaccatttataatgttaagctgtttgaatgagatatctctccattatatctttatctttttagaacatgtgccataaaacccatgtggttattttgttcatatgtactacaactagcaaacttttattatatgttcacctaccttaaaaattacttatactgtaccatgggaaagaaacatggtccttatagaattgaatgctgagctattttgagtcctgaaaagaatggccaaaaatttaaggaactgtgattgctgcatgcaccaaattgtagcccatttctataactgtattcaatatggttattgtcaaggaaaactaggatagaaatttccttttaaagatttgctgttgtacttaggtaagtatatctgcttttaccactcaaaaacaattactttcttaagcaatttcaattttttcctttttaacaaccctgcacttgcacaaccctgcctctcttgcctcacactaatcctgaccctgctttcaattcaggctttgacagggaccaatggagattttaaggttttttaatgagagaagccttgctgacattccccccgtcccaccttgaaaattgcttaaagatgatcttaaaagaacctacagataatgctctgaatttgtttccaaggtccttgatgtggagagaatgagttatattaaatgctggagaaagacttatcatttagtgaaaaattaaacatgcttttctaaaatgtggatgtttaacagagcacagctgattgggaacacgggcagttcagtgcagctggagtgtctcacagggtgaagaggaacccagatcaagtggggaatagggatttcaaaaaccttctgaaggcttttaacatcagggcaaaagttttacagtgttatactttatattcttaatttaaacttatcagcgggaaggattcacaatgaaatgtctgttttgctcatgtaacaaggaataaaataatttattttattatttaaaataataagagcaaaaactggcggctatttgcaatctcaccctgccttgtgaggatgctgggtcttaaggaaggtcctaggattgctaaatagagtaatgggaataggaaactgaaagtttacttgctttgcataagagaaggaattatattgcagcagggaaggggcacaagaagataagagctagaagaacctgtgagaagggaaagaagtgacaaactaattttggctaaaataaagcaatttctcaggtcaggcgtggtggctcatgcctgtaatcccaacactttgggaggccaaagtgggaggaatgcttgaggccagtaattggagaccaaccagagcagtaggtcaagacctggtctctacaaaaaaaaaaaaaaaaaaaaaa

SEQ ID NO: 60 - DNA, 8090 bp, Macaca fascicularis
  source 1..8090: mol_type = genomic DNA
ttttttttttttttttttttttgtagagaccaggtcttgacctactgctctggttggtctccaattactggcctcaagcattcctcccactttggcctcccaaagtgttgggattacaggcatgagccaccacgcctgacctgagaaattgctttattttagccaaaattagtttgtcacttctttcccttctcacaggttcttctagctcttatcttcttgtgccccttccctgctgcaatataattccttctcttatgcaaagcaagtaaactttcagtttcctattcccattactctatttagcaatcctaggaccttccttaagacccagcatcctcacaaggcagggtgagattgcaaatagccgccagtttttgctcttattattttaaataataaaataaattattttattccttgttacatgagcaaaacagacatttcattgtgaatccttcccgctgataagtttaaattaagaatataaagtataacactgtaaaacttttgccctgatgttaaaagccttcagaaggtttttgaaatccctattccccacttgatctgggttcctcttcaccctgtgagacactccagctgcactgaactgcccgtgttcccaatcagctgtgctctgttaaacatccacattttagaaaagcatgtttaatttttcactaaatgataagtctttctccagcatttaatataactcattctctccacatcaaggaccttggaaacaaattcagagcattatctgtaggttcttttaagatcatctttaagcaattttcaaggtgggacggggggaatgtcagcaaggcttctctcattaaaaaaccttaaaatctccattggtccctgtcaaagcctgaattgaaagcagggtcaggattagtgtgaggcaagagaggcagggttgtgcaagtgcagggttgttaaaaaggaaaaaattgaaattgcttaagaaagtaattgtttttgagtggtaaaagcagatatacttacctaagtacaacagcaaatctttaaaaggaaatttctatcctagttttccttgacaataaccatattgaatacagttatagaaatgggctacaatttggtgcatgcagcaatcacagttccttaaatttttggccattcttttcaggactcaaaatagctcagcattcaattctataaggaccatgtttctttcccatggtacagtataagtaatttttaaggtaggtgaacatataataaaagtttgctagttgtagtacatatgaacaaaataaccacatgggttttatggcacatgttctaaaaagataaagatataatggagagatatctcattcaaacagcttaacattataaatggtgcaaatgagggccatagaagcaaagtgacatagtaaaatcaacaaatataaaaacctaagctgaaagaggaggtatggagattttttaaatagtcttgaaagataatagagattgctcataatttgaagtacacataattcaggatttgaaataaatctcctaaaattgtaaacatgccatattgtttaaatcattccatgtcctataggaatgacggtaataacttgcctatgtactttgtagcatcctgaaaatagtatactcatttaagtttataaatcgcaaaataaccatctctttaaagtggaacagcattcatcagggaatcattcacttatgaagaggtcaaccagacttggagacaagctattttttttggtgaatagaatatattgccatcgctactatttatcatccttgttttcaggaatgctttactacttattctcattatgataaactgtatctcaggcttttaggtatcatttaaaacacagttgtatggggaggttctatcactatccaaatacctttgcagggcccaaggctataaatatgaatatatttatacaaacctattttgttataatagggctttgggcgtactatacaaacctattttgtttaaggctataaatatgaatatatttatataaacctgttttgttataatagagcacaaggccctattataacaaaataggtatgctataaaactattataacaaaattggtatgttatagaactattataacaaaataggtttgtataaatatattacaggacaattatttactattacaggaaaattatttctcatccgtatatccaataattacataaaatggctgtgttttgaagttggagaacaaccacattctaaaaaggcacagagtgaaaaagaaaataagctcatattttactatatgtaaagggtgaaacagagaagtggttgaaaaatccatgttccatttaaagtcctcttattccagaattatagaatataattgattttatgtgattatcaagtataagctcttggaaattttgtgatgtaaaaatagaggcaaagctgtactcgttaataaaataaaacatttgattagcatatattgataaaataaaatattcatgattgtagtttttgttgaatttattaataatctttatatatatttatatatgtatggctttgagcaaagacaaaagaaatactctaactcatccctgatcatacaattgttgtaagaataagctattctattatcttcccagcaggagaaagaccaatcaataatacatttctttctgtacagattaaaactccatacgtacaggcttcactatgtacagagaaaagaggtcacttttcaactagcaatggacctttatattacaggaatgtgagtcattttttttttcttaatctaagtatatatacattcatacatatatgtatataatttaccctgtaccattttattagtttaacatataaaccttagtttttttgtccattctattacaaagtgaataaaaattgtatggttgcactgaaagaccatgcatttcaattttgcttatttttcccaatagtgctcaaaataaaaaaccaaaaatttatatatataaaaatatttcactaccaaatccattaatcctatcaaatgtaaacctttaataatttaaaggaccaatacatactcttaataaattgaagttaactctcatattttaataaaataaaggagttttatactgatatgtaaatggtcttgcagctttcccataggttctaggtagactgaacaatccctttcttacaacagtattcctgacatccatcatatgtcaccagcatactgatgattacattacattaactagcattgttaattacttccacacaaattggtatttgtttgaaattaaacataacaactcatttgggtattataggtattatatccgcaaaaggcataacaggcagcaaggattcactttagagtttttgctttttttttgttttctgtcctcaagtctatctgcaggccctgccccgtataatgtgtaatctctgtatgttcttaaatgtattgccaatgccagagatactgaagacctacacttacgtcatgctgttaacttgggttatttacagaagccagttattaggtatctttcaattgtgttccagtcatacgccacatgtgtgggatgcattaggcacaaatgattactaagggagttctttgagaagaagcaggtgctcacagatcatggaaagagttaagaaaatagacaaacaatgctcacagacattcaactttacccctgctttctgccaccatgtctgtactattttcaacacattaaaaaatgacaaacctcctatctaagggctacattagtcaccacatgccttaaagtttactaaccatttagttacaatatacatagagcaaaatgtgtgttcccaaacagacgtgatgctgtattgaatttatttctttaaattaacaccatagtaaattaccagctacagtgaagacatagacaatacttaactccaaatcaagctgtggtttacaaataattatttaaataataatagcaataatattaaataaaagtgaaaacctcacttctagacttaagtcagagatccaagtcagccttataggaattataagagaggcaattaatgaattgttatgcttttctagaaacgagaaatactgtaagcctttccctacaatggctgatttgaaccttttttttttttttccccaggagcatgcagggactattttcagatgcttgattatggcaagaagaaagaaaaataatgatttttggtgtaatacaagcaagttgtagattcgagcatacaattttgcataaaacattgcaggttaaaataatattgtaggtttcaagccattgcattacaattgaataattctcacaatcagattttgtgaaatttaaaactctaagttttgaagtgaagcgataaaactaaactcttaaacaatgacttttagcttcatacaacacagaatagctatttttatttgggttgaaaaagttatttacaactaacattgatcgagtcttggtaaaagtccgataacacatgaagacaaatattaattttccctcagctttctgaaagatcaatgaacatgtttgaggttagtgatactcttttcttttttctttctttctttctttttttttttttttttgagacggagtctcgctctgtcgcccaggctcgagtgcagtgcactatctctgctcactgcaagctccgcctcctgggttcaagccattctcctgcctcagcctccgaagtaggaggttagtgatattcttaacagtggcaatgctagtctcctacagtggccaagcaagtagtgcagtctttaacctaattcgaaattgaaagcaccgaaatacaatttagatctataaaatgggatttgttatttaattcttcatgattaatgattaacaatttagatgcacagtcacagctaatgaaagaaagttttgattggtgctatttgctagctcatttgagttgccttttttaaaatcagttttgtttccattgaatccaagaactcttcataaaacagagaaatatacatatcaaaggacttaagtaaaagtaggttagaaataaataatcttacaacaacattttaaatcctctaatgatttaaagaaaggaagacatataacactgaatgctaaacaggtcttttgaccctctcttgagaatttagatatatattttatagtatatgtatatatattttacatttcacgtgtaggccagagctgtctaaaatatctcttcatagtaggctagagggatctatcaggagatagaataaaataagatctgagtatagtctcagtttatgagagtatttctttctgctttgacaatcagcagggatcataaatttgaagcaaatcgtggcttttctgcgtctgggtctgtgtttaagactgaggaagactctctcggaagagcagctgctggtggagggggtgctggagggactcctcggttgggggggatggctcccgacgacatctgtcggaagagggtgacgcgctgcgggacagtgctcctgccccctgcctgaaggcccgttccggggaccgccgtcacgggttgagggatggaggccagggactcgcccacagtgggatgaggtctggaaatcagagtggacacctcatggggcagcgagggctgcgaggcggagaggggcctgacttcccgggtcaggttggtgttgtgaagcgcctgcgtgctcttgtgcacttcgtttttcggcgtggagctgccaggtgtctgtggctgcggagacggctgctgtggctgagtctgcggcggctgggactgctgtacctgctgctgaggctgctgttgcatgagtgacagctgagaggcggtgggggaggcatagtggaaagttcgagcggccagagggctctgtacaggagggctgcagacggcggtggtgtaggagcagggtgaaaggatggctgatggctggggggtctgtgtgctgggactgggggaatgcaggttgctgtgagacaggctggtcgctgtgtacactggtggagattgtgtcctcatgcgggaggtcggggtcgtagttgacgatgtggaattcagggttgtcatttgaggataattgatgggagcgattgcctgcaccatctccctgtcatgtttcacaatctgcttgaggatttcgttctcctgattgttgaaaacaccagtgttcagatccttctggaacttttgcagaagaattgaatttttctttcctattcgatctagtcggtcaatggcaactgtctcaaaggctctcctcatcattggatattcctccaggacctcgttgaaattgtccacagaaagtgagtaaagacgacaatatgtatcagctcgaacactggcagtacgacgtcctttggtcagcaggcaaatctctccaaagtaagagccatctgtcagcttcatttctttactggattttgtaatgacaccagcaacaccatgttgaatgaaatacatttttttacccacggctccttctcgtatgatataatctccaggttgaaacacctcaaatctcaacttgctcagcatggcagtcacaaaattaggatccgcattagcaaataaaggcattgtagccaccagtttccgacagttgaagttgactatctcctctctcagaggatcattgagttcattgagaatattttcctcatcaaagattttgccttggtatctgtgttcatagtaatcatgtatcttctgacgcatatcagctggtaacttatggaatgacatgtattgttccacttgcttatacttctcttgatactgccgcctcgaagaatccagagactggattaaagcagtggcatggccgacaaacatggcatagcaggtggccccgacgatcatgctcagcatggtaatccagaggtcagacatgctgactggggcttgggctccatacccaatgcacagcatgtgactcatagctttgaagagtgcgtatgaatactgctttccccaagaatcattaaccatttcatttaaagacacccagcaatctggtgggaagtcctgcagtagtggtactaagaactgaagacaaccatcccagtgacacaggagcagcatcatgccgatgagattaaaaattctcaccactgcactggcaagatcatacgtcatgtggaatatctcttcccactgatgtatgtatctaattaaccttgaaagtcgtaataaacgcaagagactgagaatttttgtaaacctcacaatgcgaagtgccctggctgtcttgtaaacttctgaatccattcctttttctacaataagaaagatataatccactgggatggatgagatgaagtcaaccacaaaccagctttttaaataattcatcttgatcactttggggtccaggatgatttcagaactgtcttcgttgacagttccagtcctaaaattcatgatcaggtccagtaggaaaactgtatctgatgccacattgaaaataatccatggtgttgttgtttgctctgtaaagaatgtgattccaactggtatgatgactagatttccaaccatcattataagcattattaaatcccaataaaacctgaaatcactgtaagggtggataatccagaagcctgcagttttaaccctttcctgctccttttccaccgccttctggctcccaaacatgcggagggagaatttgttgactccgggttgcagcatggaggtgaactgcctctgcatgaagccgtactgccgccggggcccctcggcgtcctcaaagcccccagccggctcctcgccgccgcctccgccgccgccgtccaccttgaagcacacggagttgccgtgctccttcgcgccggccccgccgccccccggcggggtgcccaagcgtttctcggccgcggccggccccgcgcccgtcgcggacgccttggcggggaagacgctgttgccatcgtcccggctgttagacgaagagttgggcttgccacctccttccatgcccggaggacgcggccggcgacggcgcgggctccagactcgccggcagcccggcgccggggacacgtagccgagagggta

SEQ ID NO: 61 - DNA, 6922 bp, Homo sapiens
  source 1..6922: mol_type = genomic DNA
gctggagccgctcctatggcaacccgcgagctgcggcggcttcatgaatattccggggcgcgggagcccgagcgctgccggagggcgcttcgggggaggcggccgctgatgtaagcccggcgggtcgctgggctccgctcggttgcggcgggagccccgggacgggccggacgggccggggcagaggaggcgaggcgagctcgcgggtggccagccacaaagcccgggcggcgagacagacggacagccagccctcccgcgggacgcacgcccgggacccgcgcgggccgtgcgctctgcactccggagcggttccctgagcgccgcggccgcagagcctctccggccggcgcccattgttccccgcgggggcggggcgcctggagccgggcggcgcgccgcgcccctgaacgccagagggagggagggaggcaagaagggagcgcggggtccccgcgcccagccgggcccgggaggaggtgtagcgcggcgagcccggggactcggagcgggactaggatcctccccgcggcgcgcagcctgcccaagcatgggcgcctgaggctgcccccacgccggcggcaaaggacgcgtccccacgggcggactgaccggcgggcggacctggagcccgtccgcggcgccgcgctcctgcccccggcccggtccgaccccggcccctggcgccatggacaagctgccgccgtccatgcgcaagcggctctacagcctcccgcagcaggtgggggccaaggcgtggatcatggacgaggaagaggacgccgaggaggagggggccgggggccgccaagaccccagccgcaggagcatccggctgcggccactgccctcgccctccccctcggcggccgcgggtggcacggagtcccggagctcggccctcggggcagcggacagcgaagggccggcccgcggcgcgggcaagtccagcacgaacggcgactgcaggcgcttccgcgggagcctggcctcgctgggcagccggggcggcggcagcggcggcacggggagcggcagcagtcacggacacctgcatgactccgcggaggagcggcggctcatcgccgagggcgacgcgtcccccggcgaggacaggacgcccccaggcctggcggccgagcccgagcgccccggcgcctcggcgcagcccgcagcctcgccgccgccgccccagcagccaccgcagccggcctccgcctcctgcgagcagccctcggtggacaccgctatcaaagtggagggaggcgcggctgccggcgaccagatcctcccggaggccgaggtgcgcctgggccaggccggcttcatgcagcgccagttcggggccatgctccaacccggggtcaacaaattctccctaaggatgttcggcagccagaaagccgtggagcgcgaacaggagagggtcaagtcggccggattttggattatccacccctacagtgacttcagattttactgggacctgaccatgctgctgctgatggtgggaaacctgattatcattcctgtgggcatcaccttcttcaaggatgagaacaccacaccctggattgtcttcaatgtggtgtcagacacattcttcctcatcgacttggtcctcaacttccgcacagggatcgtggtggaggacaacacagagatcatcctggacccgcagcggattaaaatgaagtacctgaaaagctggttcatggtagatttcatttcctccatccccgtggactacatcttcctcattgtggagacacgcatcgactcggaggtctacaagactgcccgggccctgcgcattgtccgcttcacgaagatcctcagcctcttacgcctgttacgcctctcccgcctcattcgatatattcaccagtgggaagagatcttccacatgacctacgacctggccagcgccgtggtgcgcatcgtgaacctcatcggcatgatgctcctgctctgccactgggacggctgcctgcagttcctggtacccatgctacaggacttccctgacgactgctgggtgtccatcaacaacatggtgaacaactcctgggggaagcagtactcctacgcgctcttcaaggccatgagccacatgctgtgcatcggctacgggcggcaggcgcccgtgggcatgtccgacgtctggctcaccatgctcagcatgatcgtgggtgccacctgctacgccatgttcattggccacgccactgccctcatccagtccctggactcctcccggcgccagtaccaggaaaagtacaagcaggtggagcagtacatgtcctttcacaagctcccgcccgacacccggcagcgcatccacgactactacgagcaccgctaccagggcaagatgttcgacgaggagagcatcctgggcgagctaagcgagcccctgcgggaggagatcatcaactttaactgtcggaagctggtggcctccatgccactgtttgccaatgcggaccccaacttcgtgacgtccatgctgaccaagctgcgtttcgaggtcttccagcctggggactacatcatccgggaaggcaccattggcaagaagatgtacttcatccagcatggcgtggtcagcgtgctcaccaagggcaacaaggagaccaagctggccgacggctcctactttggagagatctgcctgctgacccggggccggcgcacagccagcgtgagggccgacacctactgccgcctctactcgctgagcgtggacaacttcaatgaggtgctggaggagtaccccatgatgcgaagggccttcgagaccgtggcgctggaccgcctggaccgcattggcaagaagaactccatcctcctccacaaagtccagcacgacctcaactccggcgtcttcaactaccaggagaatgagatcatccagcagattgtgcagcatgaccgggagatggcccactgcgcgcaccgcgtccaggctgctgcctctgccaccccaacccccacgcccgtcatctggaccccgctgatccaggcaccactgcaggctgccgctgccaccacttctgtggccatagccctcacccaccaccctcgcctgcctgctgccatcttccgccctcccccaggatctgggctgggcaacctcggtgccgggcagacgccaaggcacctgaaacggctgcagtccctgatcccttctgcgctgggctccgcctcgcccgccagcagcccgtcccaggtggacacaccgtcttcatcctccttccacatccaacagctggctggattctctgcccccgctggactgagcccactcctgccctcatccagctcctccccaccccccggggcctgtggctccccctcggctcccacaccatcagctggcgtagccgccaccaccatagccgggtttggccacttccacaaggcgctgggtggctccctgtcctcctccgactctcccctgctcaccccgctgcagccaggcgcccgctccccgcaggctgcccagccatctcccgcgccacccggggcccggggaggcctgggactcccggagcacttcctgccacccccaccctcatccagatccccgtcatctagccccgggcagctgggccagcctcccggggagttgtccctaggtctggccactggcccactgagcacgccagagacacccccacggcagcctgagccgccgtcccttgtggcaggggcctctgggggggcttcccctgtaggctttactccccgaggaggtctcagcccccctggccacagcccaggccccccaagaaccttcccgagtgccccgccccgggcctctggctcccacggatccttgctcctgccacctgcatccagccccccaccaccccaggtcccccagcgccggggcacacccccgctcacccccggccgcctcacccaggacctcaagctcatctccgcgtctcagccagccctgcctcaggacggggcgcagactctccgcagagcctccccgcactcctcaggggagtccatggctgccttcccgctcttccccagggctgggggtggcagcgggggcagtgggagcagcgggggcctcggtccccctgggaggccctatggtgccatccccggccagcacgtcactctgcctcggaagacatcctcaggttctttgccaccccctctgtctttgtttggggcaagagccacctcttctggggggccccctctgactgctggaccccagagggaacctggggccaggcctgagccagtgcgctccaaactgccatccaatctatgagctgggcccttccttccctcttctttcttcttttctctcccttccttcttccttcaggtttaactgtgattaggagatataccaataacagtaataattatttaaaaaaccacacacaccagaaaaacaaaagacagcagaaaataaccaggtattcttagagctatagatttttggtcacttgcttttatagactattttaatactcagcactagagggagggagggggagggaggagggagcaggcaggtcccaaatgcaaaagccagagaaaggcagatggggtctccggggctgggcaggggtgggagtggccagtgttggcggttcttagagcagatgtgtcattgtgttcatttagagaaacagctgccatcagcccgttagctgtaacttggagctccactctgcccccagaaaggggctgccctggggtgtgccctggggagcctcagaagcctgcgaccttgggagaaaagggccagggccctgagggcctagcattttttctactgtaaacgtagcaagatctgtatatgaatatgtatatgtatatgtatgtaagatgtgtatatgtatagctatgtagcgctctgtagagccatgtagatagccactcacatgtgcgcacacgtgtgcggtctagtttaatcccatgttgacaggatgcccaggtcaccttacacccagcaacccgccttggcccacaggctgtgcactgcatggtctagggacgttctctctccagtcctcagggaagaggaccccaggacttcgcagcaggccccctctctccccatctctggtctcaaagccagtcccagcctgacctctcaccacacggaagtggaagactcccctttcctagggcctcaagcacacaccgccacctctggggccgtcagtttgcccatctgtacagtgggaggtgagcggaacttctgtttattgagtctgctctgtgccaagcactggtttcgcactttacacacattaactccttcagtttcacaaagaccatggggtgggtactttgattctccccatttagcagaggaagaaacagttttgggtaatttttccagaatcatgtaactaggagtggcagagtggggactgatttgaggttcgagtccacgcctccttgaggcccaagtctgtgttccttccatcagaaaactgtgttgaggggggctgaggtagatggtccccaagcatggtacagaaggaagacaccagattttggcagcagtcaggcctgggtttgaatcccagccctgccacttcttagctgtatgatcttgggcaagttatctgacctttctgtcacctcatttgtaaaatgggaataattatggtactgcctcacaaggacctatgaggaccagatgagaaaaatctatatgtgaaatgcccagcccagcgcctggcacataccatggtaggtgctcaataaaaaatcacatttcttctgcccctcatatgcccagcctattgctccagcaaactatgtgagagcccagggagctttggctgagggctccaagacttaaaatctcaggactcaggaggtggctgggcctccctaagggcccaaggaaggtgtgtggccagaggtgggtgggagccaggccttgagaagtgggaagacttcaacagggagagagggagggaatggtgggtgggatggagtgtatggtggggagattcctgaggtggatgtggagtggtggatcagggctttgggaggggatccccaggctgaggggtcagagggacggccttgggtgatagggtaagggattgtctgggcttagtcctggcaactaggagccataagcaggttccagattgcgggaacgagaaagcagctcagatgcctttggaggcaccatcctccctcctcccagatgggatcttgccagagccaaggtcaggggtctgcccctgcctatagggccagagcaggtatggctgcaatccccaagtaatgagaagggctggtcccacattatccatccagaaccttccatgctccaagccagaatgttggcaagatcgggttttgccttgagctatcctgggatgtgagacaaaccgatttctccatagatgggctgcagggagtgggaggcagtactccaggagagaagtgggtgaaggttcctgggatcttaggtaaagactagacgccgcctagtactggtctctactgtgctggctcaggagttctgagaactggaaggacttagcctcaacctgagttctgcacacaccccttccccttaaggaaggcagctctgagaggcagcaggacttgatccaaacccacagtcttgtcctggaggcagcaggggtgaaggtggagggtccagggccatgaggagcccccttgccatcagagcctggcctaaccaccctcttctctacttacacacacatgcattttataatagctctgacccaacctggccactctgcagagactgggacagacaggtgcaggcaatgggccctcccacacccagtcacctacaaggaattttcaaatccacttttaaaacagaaaccggtaaatgcgccgtattgtatattttatttaaataaaaaaaattccagca

SEQ ID NO: 62 - DNA, 6922 bp, Homo sapiens
  source 1..6922: mol_type = genomic DNA
tgctggaattttttttatttaaataaaatatacaatacggcgcatttaccggtttctgttttaaaagtggatttgaaaattccttgtaggtgactgggtgtgggagggcccattgcctgcacctgtctgtcccagtctctgcagagtggccaggttgggtcagagctattataaaatgcatgtgtgtgtaagtagagaagagggtggttaggccaggctctgatggcaagggggctcctcatggccctggaccctccaccttcacccctgctgcctccaggacaagactgtgggtttggatcaagtcctgctgcctctcagagctgccttccttaaggggaaggggtgtgtgcagaactcaggttgaggctaagtccttccagttctcagaactcctgagccagcacagtagagaccagtactaggcggcgtctagtctttacctaagatcccaggaaccttcacccacttctctcctggagtactgcctcccactccctgcagcccatctatggagaaatcggtttgtctcacatcccaggatagctcaaggcaaaacccgatcttgccaacattctggcttggagcatggaaggttctggatggataatgtgggaccagcccttctcattacttggggattgcagccatacctgctctggccctataggcaggggcagacccctgaccttggctctggcaagatcccatctgggaggagggaggatggtgcctccaaaggcatctgagctgctttctcgttcccgcaatctggaacctgcttatggctcctagttgccaggactaagcccagacaatcccttaccctatcacccaaggccgtccctctgacccctcagcctggggatcccctcccaaagccctgatccaccactccacatccacctcaggaatctccccaccatacactccatcccacccaccattccctccctctctccctgttgaagtcttcccacttctcaaggcctggctcccacccacctctggccacacaccttccttgggcccttagggaggcccagccacctcctgagtcctgagattttaagtcttggagccctcagccaaagctccctgggctctcacatagtttgctggagcaataggctgggcatatgaggggcagaagaaatgtgattttttattgagcacctaccatggtatgtgccaggcgctgggctgggcatttcacatatagatttttctcatctggtcctcataggtccttgtgaggcagtaccataattattcccattttacaaatgaggtgacagaaaggtcagataacttgcccaagatcatacagctaagaagtggcagggctgggattcaaacccaggcctgactgctgccaaaatctggtgtcttccttctgtaccatgcttggggaccatctacctcagcccccctcaacacagttttctgatggaaggaacacagacttgggcctcaaggaggcgtggactcgaacctcaaatcagtccccactctgccactcctagttacatgattctggaaaaattacccaaaactgtttcttcctctgctaaatggggagaatcaaagtacccaccccatggtctttgtgaaactgaaggagttaatgtgtgtaaagtgcgaaaccagtgcttggcacagagcagactcaataaacagaagttccgctcacctcccactgtacagatgggcaaactgacggccccagaggtggcggtgtgtgcttgaggccctaggaaaggggagtcttccacttccgtgtggtgagaggtcaggctgggactggctttgagaccagagatggggagagagggggcctgctgcgaagtcctggggtcctcttccctgaggactggagagagaacgtccctagaccatgcagtgcacagcctgtgggccaaggcgggttgctgggtgtaaggtgacctgggcatcctgtcaacatgggattaaactagaccgcacacgtgtgcgcacatgtgagtggctatctacatggctctacagagcgctacatagctatacatatacacatcttacatacatatacatatacatattcatatacagatcttgctacgtttacagtagaaaaaatgctaggccctcagggccctggcccttttctcccaaggtcgcaggcttctgaggctccccagggcacaccccagggcagcccctttctgggggcagagtggagctccaagttacagctaacgggctgatggcagctgtttctctaaatgaacacaatgacacatctgctctaagaaccgccaacactggccactcccacccctgcccagccccggagaccccatctgcctttctctggcttttgcatttgggacctgcctgctccctcctccctccccctccctccctctagtgctgagtattaaaatagtctataaaagcaagtgaccaaaaatctatagctctaagaatacctggttattttctgctgtcttttgtttttctggtgtgtgtggttttttaaataattattactgttattggtatatctcctaatcacagttaaacctgaaggaagaaggaagggagagaaaagaagaaagaagagggaaggaagggcccagctcatagattggatggcagtttggagcgcactggctcaggcctggccccaggttccctctggggtccagcagtcagagggggccccccagaagaggtggctcttgccccaaacaaagacagagggggtggcaaagaacctgaggatgtcttccgaggcagagtgacgtgctggccggggatggcaccatagggcctcccagggggaccgaggcccccgctgctcccactgcccccgctgccacccccagccctggggaagagcgggaaggcagccatggactcccctgaggagtgcggggaggctctgcggagagtctgcgccccgtcctgaggcagggctggctgagacgcggagatgagcttgaggtcctgggtgaggcggccgggggtgagcgggggtgtgccccggcgctgggggacctggggtggtggggggctggatgcaggtggcaggagcaaggatccgtgggagccagaggcccggggcggggcactcgggaaggttcttggggggcctgggctgtggccaggggggctgagacctcctcggggagtaaagcctacaggggaagcccccccagaggcccctgccacaagggacggcggctcaggctgccgtgggggtgtctctggcgtgctcagtgggccagtggccagacctagggacaactccccgggaggctggcccagctgcccggggctagatgacggggatctggatgagggtgggggtggcaggaagtgctccgggagtcccaggcctccccgggccccgggtggcgcgggagatggctgggcagcctgcggggagcgggcgcctggctgcagcggggtgagcaggggagagtcggaggaggacagggagccacccagcgccttgtggaagtggccaaacccggctatggtggtggcggctacgccagctgatggtgtgggagccgagggggagccacaggccccggggggtggggaggagctggatgagggcaggagtgggctcagtccagcgggggcagagaatccagccagctgttggatgtggaaggaggatgaagacggtgtgtccacctgggacgggctgctggcgggcgaggcggagcccagcgcagaagggatcagggactgcagccgtttcaggtgccttggcgtctgcccggcaccgaggttgcccagcccagatcctgggggagggcggaagatggcagcaggcaggcgagggtggtgggtgagggctatggccacagaagtggtggcagcggcagcctgcagtggtgcctggatcagcggggtccagatgacgggcgtgggggttggggtggcagaggcagcagcctggacgcggtgcgcgcagtgggccatctcccggtcatgctgcacaatctgctggatgatctcattctcctggtagttgaagacgccggagttgaggtcgtgctggactttgtggaggaggatggagttcttcttgccaatgcggtccaggcggtccagcgccacggtctcgaaggcccttcgcatcatggggtactcctccagcacctcattgaagttgtccacgctcagcgagtagaggcggcagtaggtgtcggccctcacgctggctgtgcgccggccccgggtcagcaggcagatctctccaaagtaggagccgtcggccagcttggtctccttgttgcccttggtgagcacgctgaccacgccatgctggatgaagtacatcttcttgccaatggtgccttcccggatgatgtagtccccaggctggaagacctcgaaacgcagcttggtcagcatggacgtcacgaagttggggtccgcattggcaaacagtggcatggaggccaccagcttccgacagttaaagttgatgatctcctcccgcaggggctcgcttagctcgcccaggatgctctcctcgtcgaacatcttgccctggtagcggtgctcgtagtagtcgtggatgcgctgccgggtgtcgggcgggagcttgtgaaaggacatgtactgctccacctgcttgtacttttcctggtactggcgccgggaggagtccagggactggatgagggcagtggcgtggccaatgaacatggcgtagcaggtggcacccacgatcatgctgagcatggtgagccagacgtcggacatgcccacgggcgcctgccgcccgtagccgatgcacagcatgtggctcatggccttgaagagcgcgtaggagtactgcttcccccaggagttgttcaccatgttgttgatggacacccagcagtcgtcagggaagtcctgtagcatgggtaccaggaactgcaggcagccgtcccagtggcagagcaggagcatcatgccgatgaggttcacgatgcgcaccacggcgctggccaggtcgtaggtcatgtggaagatctcttcccactggtgaatatatcgaatgaggcgggagaggcgtaacaggcgtaagaggctgaggatcttcgtgaagcggacaatgcgcagggcccgggcagtcttgtagacctccgagtcgatgcgtgtctccacaatgaggaagatgtagtccacggggatggaggaaatgaaatctaccatgaaccagcttttcaggtacttcattttaatccgctgcgggtccaggatgatctctgtgttgtcctccaccacgatccctgtgcggaagttgaggaccaagtcgatgaggaagaatgtgtctgacaccacattgaagacaatccagggtgtggtgttctcatccttgaagaaggtgatgcccacaggaatgataatcaggtttcccaccatcagcagcagcatggtcaggtcccagtaaaatctgaagtcactgtaggggtggataatccaaaatccggccgacttgaccctctcctgttcgcgctccacggctttctggctgccgaacatccttagggagaatttgttgaccccgggttggagcatggccccgaactggcgctgcatgaagccggcctggcccaggcgcacctcggcctccgggaggatctggtcgccggcagccgcgcctccctccactttgatagcggtgtccaccgagggctgctcgcaggaggcggaggccggctgcggtggctgctggggcggcggcggcgaggctgcgggctgcgccgaggcgccggggcgctcgggctcggccgccaggcctgggggcgtcctgtcctcgccgggggacgcgtcgccctcggcgatgagccgccgctcctccgcggagtcatgcaggtgtccgtgactgctgccgctccccgtgccgccgctgccgccgccccggctgcccagcgaggccaggctcccgcggaagcgcctgcagtcgccgttcgtgctggacttgcccgcgccgcgggccggcccttcgctgtccgctgccccgagggccgagctccgggactccgtgccacccgcggccgccgagggggagggcgagggcagtggccgcagccggatgctcctgcggctggggtcttggcggcccccggccccctcctcctcggcgtcctcttcctcgtccatgatccacgccttggcccccacctgctgcgggaggctgtagagccgcttgcgcatggacggcggcagcttgtccatggcgccaggggccggggtcggaccgggccgggggcaggagcgcggcgccgcggacgggctccaggtccgcccgccggtcagtccgcccgtggggacgcgtcctttgccgccggcgtgggggcagcctcaggcgcccatgcttgggcaggctgcgcgccgcggggaggatcctagtcccgctccgagtccccgggctcgccgcgctacacctcctcccgggcccggctgggcgcggggaccccgcgctcccttcttgcctccctccctccctctggcgttcaggggcgcggcgcgccgcccggctccaggcgccccgcccccgcggggaacaatgggcgccggccggagaggctctgcggccgcggcgctcagggaaccgctccggagtgcagagcgcacggcccgcgcgggtcccgggcgtgcgtcccgcgggagggctggctgtccgtctgtctcgccgcccgggctttgtggctggccacccgcgagctcgcctcgcctcctctgccccggcccgtccggcccgtcccggggctcccgccgcaaccgagcggagcccagcgacccgccgggcttacatcagcggccgcctcccccgaagcgccctccggcagcgctcgggctcccgcgccccggaatattcatgaagccgccgcagctcgcgggttgccataggagcggctccagc

SEQ ID NO: 63 - DNA, 6581 bp, Mus musculus
  source 1..6581: mol_type = genomic DNA
agaggcggaggctgatgtaagcccggcgggccgctgggctccgctccgctgcggcgggagtccccaggactcggccggctgggctcagctagaggaggcaaagcgagaacccgggtgaccagctgcaaagcccgggcggtcacacgcgctgacagccccagacacccgccggacgcactcccgggaaccgcgcgggcagtgcgctctgcgctcgggagcggttcccggagcgcggtggccgcagcgccgccgctgcccgcgcccattgttccccgcgggggcggggcgcctggagccgggccgcgcgccgcgcccctgatcgcaggagggagggaaaagagggagggagcgtggggtccccgcgcccaagccgggcccgggaggaggtgcagcgcggcgaacccggggacctgcagccggactaggagcctcccctcggcgcgcagcccgcgcgatcatgggctcgtgaggcagcgaaggacgcgtcctcactggcaggcgcacctggagcgggtcccccgtgccgcacccgcaccgctgcccccggcccaatccctggcaccatggacaagctgccgccgtccatgcgcaagcggctctacagccttccgcagcaggtgggggccaaggcgtggatcatggacgaggaagaggatggtgaggaagaaggggccgggggccgccaggaccccagccgaaggagcatccggctgcggccgctgccctcgccctctccctcggtggctgcgggctgctcggagtcccggggtgcggccctcggggcgacagagagcgaggggccgggccgcagcgccggcaagtccagcaccaacggtgactgcaggcgcttccgcgggagtctggcctcgctgggcagccggggcggcggcagtggtggagcagggggcggcagcagtctcgggcacctgcatgactccgcggaggaacggcggctcatcgccgctgagggcgatgcgtcccccggcgaggacaggacgcccccgggcctggcgaccgaacccgagcgcccggccaccgcggcacaacccgcagcctcgccgccgccccagcagccgccgcagccggcctctgcctcctgcgagcagccctcggcggacaccgctatcaaagtggagggaggcgcggccgccagcgaccagatcctccccgaggccgaggtgcgcctgggccagagcggcttcatgcagcgccagttcggtgccatgctgcaacctggggtcaacaaattctccctaaggatgttcggcagccagaaagcggtggagcgcgagcaggagagggttaagtcagcagggttttggattatccacccctacagtgacttcagattttactgggacctgacgatgctgttgctgatggtggggaatctgatcatcatacccgtgggcatcaccttcttcaaggatgagaacaccacaccctggatcgtcttcaatgtggtgtcagacacattcttcctcattgacttggtcctcaacttccgcacggggatcgtggtggaggacaacacagaaatcatccttgacccgcagaggatcaagatgaagtacctgaaaagctggtttgtggtagatttcatctcctccatccctgtcgactacatcttccttatagtggagactcgcattgactcggaggtctacaaaaccgctagggctctgcgcattgtccgtttcactaagatcctcagcctcctgcgcctcttgaggctttcccgcctcattcgatacattcatcagtgggaagagatcttccacatgacctatgacctggccagcgccgtggtacgcatcgtgaacctcattggcatgatgcttctgctgtgtcactgggatggctgcctgcagttcctagtgcccatgctgcaggacttcccccatgactgctgggtgtccatcaatggcatggtgaataactcctgggggaagcagtattcctacgccctcttcaaggccatgagccacatgctgtgcattgggtatggacggcaggcacccgtaggcatgtctgacgtctggctcaccatgctcagcatgatcgtgggggccacctgctatgccatgttcatcggccacgccactgccctcatccagtcgctagactcctcccggcgccagtaccaggagaagtataaacaggtggagcagtacatgtccttccacaagctcccgcctgacacccgacagcgcatccatgactactatgaacaccgctaccaaggcaagatgtttgatgaggaaagcatcctgggtgagctgagtgagccacttcgagaggagatcatcaactttaactgccgaaagctggtggcatccatgccactgtttgccaacgcagatcccaactttgtgacatccatgctgaccaagttgcgtttcgaggtcttccagcctggggattacatcatccgcgaaggcaccatcggcaagaagatgtactttatccagcacggcgtggtcagcgtgctcactaagggcaacaaagagaccaagctggctgatggctcctattttggagagatctgcttgctgacccggggtcggcgcacagccagcgtcagagcggatacttattgccgcctctactcactgagcgtggacaacttcaatgaggtgctggaggagtatcccatgatgcggagggccttcgagacggttgcgctggaccgcctggaccgcataggcaagaagaactccatcctcctccacaaggtgcagcacgacctcaactcaggcgtcttcaactaccaagagaacgagatcatccagcagatcgtgcggcatgaccgtgagatggcccactgtgctcaccgcgtccaggctgccgcctcagccaccccaacccccacgcctgttatatggaccccgctgatccaggcgccactgcaggctgctgctgctactacttcggtggccatagccctcacacaccacccccgcctgcccgccgccatcttccggccccctcccggacctgggctgggcaaccttggggctggacagacaccgaggcacccaaggaggctgcagtccttgatcccttcagctctgggctctgcttcacccgccagcagcccctcacaggtggacacaccgtcttcatcctccttccacatccaacagctggctggattctctgcacctcctggattgagccctctcctgccctcctctagctcttccccacctccaggagcctgcggttccccaccagcccccacaccctccacctccactgccgccgccgcctccaccactgggttcggccactttcacaaggcgctgggtggctccctgtcatcctctgactccccgctgctcaccccactgcaaccaggcgctcgctctccacaggctgcccagccaccacccccactgcctggggcccgaggaggtctgggactcctggagcacttcttgccgcccccaccctcctccaggtcaccatcatccagccctgggcagctgggccagcctcctggagagttgtccctaggtctggcagctggtccatcaagtacaccagagacacccccacggcctgagcgaccatccttcatggcaggggcctctggaggggcttctcctgtagcctttaccccccgaggaggcctcagtcctccgggccacagcccggggcccccaagaactttcccgagtgccccaccccgggcctctggctcccatggttccctgctcctgccacctgcatccagccctccacctccccaggtcccacagcgcaggggcacaccacccctcacccctggccgcctcacacaggacctgaagctcatctcagcctctcagccagccctcccccaggatggggcacagactctccgcagggcctcgcctcactcctcaggggagtcggtggctgccttctcactctaccccagagctgggggtggcagtgggagtagtgggggccttgggcctcctggaaggccatatggtgccatcccaggccaacatgtcactttgcctcggaagacatcctcaggttctttgccacccccactttctttgtttggggcaagagccgcctcttctggagggccccctctgactactgctgcaccccagagggaacctggcgctaggtctgagccagtacgctccaaactgccgtctaatttatgagctgggccctccctccctcttctttttcttgctcctttcttccttcaggtttaactgtgattaggagatataccaacaacaataataaccataaaaaaacataccccagaaaaacaaaaagacagcagaaaataaccaggtattcttagagctatagatttttggtcacttgcttttatagactattttaatactcagcactagagggagagagggagggagggagggaggggggagcagacaaggcccaaaggcaacagccaaaggaagacaggcggggtctctggggacagggcaggggtggggtgacccgtgtttgggtcctagcatagacctgtcattgtattgttctgtagagcaagagctacctaccatcaatcagttccttggctgtgaacttggagcccactctgctgggggctgccctggagtgtgttcccaggagcctcctgcgcccaagttccttgggacacacagggcccttgagggccttgctttttttttttctactgtaaacgtagcaagatatgtatatgaatatgtatatgtatgtaagatgtgtctatgtatagctatgtagtgctctgtagagccgtgtagatatcagcttccatgtgtgcacattcgtgtgcagtctagtttaatcccatgttgccaggacacccaggtcaccttacatccagcaatctgctgtggcccgcaggctgggcactgcaggctctgggggaagttctctctcccagccctcagggaaggggacccctggaaccttgcagcagaccctctttccccatctctgggctgcaacccagttctagcccaacctctagtcccatggaaggggaagactccaggccgagcctttcacctcccagggcttcaagcacacctgtcacctctgtggcccgaagtttctccagctgtacaacgggaggggaggggaacgtctatttattgagtctgttctgtgccaagcactggttatacatactcacagactggggggtgaggattatggtttctcccatttcacaggtgaggaaactgagggttgattagaatcacataaccaggagtggcagagctggtctggtctgagctgcaaatcaacctccctaaggttaaagcctgtattcctcccatcagaaaactgtgtttggtacagccctagcttttggtccctaggcaaagtacaggaggaagagatgggagcttggtagcagtcagacttcagttcaaatcccagttctgccacttcttagctgtgtggccttgggcaagttatctgacctttctgttccctcattagtaaaataagaactatggaactgcctcacaatgaccagtgagaaccagataagaaaaagatgtgaaacgcccagcccagtgcctggcacacagcatagtaggtgctcaataaatcatgtttcttcaccacccccccccctcataaacttagcccattgctccagtgaactatgatgagagcccaggggattttagctgagggctccaagacttaaaactctcaggactcaggaggtggctgggcctccatcatggctggaggaaggtgcgtggccagtggtgggcttgagtcaggccttgggatatgggaagtgtgggtaaagaaaggaattagaggagagagtgcataggagaggttactgcagtgatgttgagatgtggggcagggcctctgggggagacatagaggatggggacctcggatgagaggctaagctgatctgtggctttggccctgaattagaagcagatgtcaggaccctggaggaggcacagccaacagcttccctatccatgggtcggagcaggtaggactgatgcccgtgcagtgagggggctggttctaccatgcctgtcatccccatgcagcagccagaagggtggcatgagcaggtttggccctggggtgccacagggaatcctttgtgggtggcttgcagggaaagagagggtgaagtccctggtgccctagaaaatctgcaggagccctaggttatacagggctgggagaagcctcccagactgagagtcttcggacctgtgttctgtcccccaaggaagggagcttagggagccagctggacgccacagaacctgcagtccacccttgaggaataggagaggagctggggtctgggataaggagtgaggggtctcttgtcaacaggcctggcctagccacccttctctactgatacatgcattttataaacaccgacacactggcaaactccttggtgactatggagaggccaggtccagtccataggaccttctaccccacaacctctacaagcaattttcaaatcttccacttttaaaacagaaaaacggtcaaacacaccgtcttgtatattttatttaaataaaaaaaattacagcaaa

SEQ ID NO: 64 - DNA, 6581 bp, Mus musculus
  source 1..6581: mol_type = genomic DNA
tttgctgtaattttttttatttaaataaaatatacaagacggtgtgtttgaccgtttttctgttttaaaagtggaagatttgaaaattgcttgtagaggttgtggggtagaaggtcctatggactggacctggcctctccatagtcaccaaggagtttgccagtgtgtcggtgtttataaaatgcatgtatcagtagagaagggtggctaggccaggcctgttgacaagagacccctcactccttatcccagaccccagctcctctcctattcctcaagggtggactgcaggttctgtggcgtccagctggctccctaagctcccttccttgggggacagaacacaggtccgaagactctcagtctgggaggcttctcccagccctgtataacctagggctcctgcagattttctagggcaccagggacttcaccctctctttccctgcaagccacccacaaaggattccctgtggcaccccagggccaaacctgctcatgccacccttctggctgctgcatggggatgacaggcatggtagaaccagccccctcactgcacgggcatcagtcctacctgctccgacccatggatagggaagctgttggctgtgcctcctccagggtcctgacatctgcttctaattcagggccaaagccacagatcagcttagcctctcatccgaggtccccatcctctatgtctcccccagaggccctgccccacatctcaacatcactgcagtaacctctcctatgcactctctcctctaattcctttctttacccacacttcccatatcccaaggcctgactcaagcccaccactggccacgcaccttcctccagccatgatggaggcccagccacctcctgagtcctgagagttttaagtcttggagccctcagctaaaatcccctgggctctcatcatagttcactggagcaatgggctaagtttatgaggggggggggtggtgaagaaacatgatttattgagcacctactatgctgtgtgccaggcactgggctgggcgtttcacatctttttcttatctggttctcactggtcattgtgaggcagttccatagttcttattttactaatgagggaacagaaaggtcagataacttgcccaaggccacacagctaagaagtggcagaactgggatttgaactgaagtctgactgctaccaagctcccatctcttcctcctgtactttgcctagggaccaaaagctagggctgtaccaaacacagttttctgatgggaggaatacaggctttaaccttagggaggttgatttgcagctcagaccagaccagctctgccactcctggttatgtgattctaatcaaccctcagtttcctcacctgtgaaatgggagaaaccataatcctcaccccccagtctgtgagtatgtataaccagtgcttggcacagaacagactcaataaatagacgttcccctcccctcccgttgtacagctggagaaacttcgggccacagaggtgacaggtgtgcttgaagccctgggaggtgaaaggctcggcctggagtcttccccttccatgggactagaggttgggctagaactgggttgcagcccagagatggggaaagagggtctgctgcaaggttccaggggtccccttccctgagggctgggagagagaacttcccccagagcctgcagtgcccagcctgcgggccacagcagattgctggatgtaaggtgacctgggtgtcctggcaacatgggattaaactagactgcacacgaatgtgcacacatggaagctgatatctacacggctctacagagcactacatagctatacatagacacatcttacatacatatacatattcatatacatatcttgctacgtttacagtagaaaaaaaaaaagcaaggccctcaagggccctgtgtgtcccaaggaacttgggcgcaggaggctcctgggaacacactccagggcagcccccagcagagtgggctccaagttcacagccaaggaactgattgatggtaggtagctcttgctctacagaacaatacaatgacaggtctatgctaggacccaaacacgggtcaccccacccctgccctgtccccagagaccccgcctgtcttcctttggctgttgcctttgggccttgtctgctcccccctccctccctccctccctctctccctctagtgctgagtattaaaatagtctataaaagcaagtgaccaaaaatctatagctctaagaatacctggttattttctgctgtctttttgtttttctggggtatgtttttttatggttattattgttgttggtatatctcctaatcacagttaaacctgaaggaagaaaggagcaagaaaaagaagagggagggagggcccagctcataaattagacggcagtttggagcgtactggctcagacctagcgccaggttccctctggggtgcagcagtagtcagagggggccctccagaagaggcggctcttgccccaaacaaagaaagtgggggtggcaaagaacctgaggatgtcttccgaggcaaagtgacatgttggcctgggatggcaccatatggccttccaggaggcccaaggcccccactactcccactgccacccccagctctggggtagagtgagaaggcagccaccgactcccctgaggagtgaggcgaggccctgcggagagtctgtgccccatcctgggggagggctggctgagaggctgagatgagcttcaggtcctgtgtgaggcggccaggggtgaggggtggtgtgcccctgcgctgtgggacctggggaggtggagggctggatgcaggtggcaggagcagggaaccatgggagccagaggcccggggtggggcactcgggaaagttcttgggggccccgggctgtggcccggaggactgaggcctcctcggggggtaaaggctacaggagaagcccctccagaggcccctgccatgaaggatggtcgctcaggccgtgggggtgtctctggtgtacttgatggaccagctgccagacctagggacaactctccaggaggctggcccagctgcccagggctggatgatggtgacctggaggagggtgggggcggcaagaagtgctccaggagtcccagacctcctcgggccccaggcagtgggggtggtggctgggcagcctgtggagagcgagcgcctggttgcagtggggtgagcagcggggagtcagaggatgacagggagccacccagcgccttgtgaaagtggccgaacccagtggtggaggcggcggcggcagtggaggtggagggtgtgggggctggtggggaaccgcaggctcctggaggtggggaagagctagaggagggcaggagagggctcaatccaggaggtgcagagaatccagccagctgttggatgtggaaggaggatgaagacggtgtgtccacctgtgaggggctgctggcgggtgaagcagagcccagagctgaagggatcaaggactgcagcctccttgggtgcctcggtgtctgtccagccccaaggttgcccagcccaggtccgggagggggccggaagatggcggcgggcaggcgggggtggtgtgtgagggctatggccaccgaagtagtagcagcagcagcctgcagtggcgcctggatcagcggggtccatataacaggcgtgggggttggggtggctgaggcggcagcctggacgcggtgagcacagtgggccatctcacggtcatgccgcacgatctgctggatgatctcgttctcttggtagttgaagacgcctgagttgaggtcgtgctgcaccttgtggaggaggatggagttcttcttgcctatgcggtccaggcggtccagcgcaaccgtctcgaaggccctccgcatcatgggatactcctccagcacctcattgaagttgtccacgctcagtgagtagaggcggcaataagtatccgctctgacgctggctgtgcgccgaccccgggtcagcaagcagatctctccaaaataggagccatcagccagcttggtctctttgttgcccttagtgagcacgctgaccacgccgtgctggataaagtacatcttcttgccgatggtgccttcgcggatgatgtaatccccaggctggaagacctcgaaacgcaacttggtcagcatggatgtcacaaagttgggatctgcgttggcaaacagtggcatggatgccaccagctttcggcagttaaagttgatgatctcctctcgaagtggctcactcagctcacccaggatgctttcctcatcaaacatcttgccttggtagcggtgttcatagtagtcatggatgcgctgtcgggtgtcaggcgggagcttgtggaaggacatgtactgctccacctgtttatacttctcctggtactggcgccgggaggagtctagcgactggatgagggcagtggcgtggccgatgaacatggcatagcaggtggcccccacgatcatgctgagcatggtgagccagacgtcagacatgcctacgggtgcctgccgtccatacccaatgcacagcatgtggctcatggccttgaagagggcgtaggaatactgcttcccccaggagttattcaccatgccattgatggacacccagcagtcatgggggaagtcctgcagcatgggcactaggaactgcaggcagccatcccagtgacacagcagaagcatcatgccaatgaggttcacgatgcgtaccacggcgctggccaggtcataggtcatgtggaagatctcttcccactgatgaatgtatcgaatgaggcgggaaagcctcaagaggcgcaggaggctgaggatcttagtgaaacggacaatgcgcagagccctagcggttttgtagacctccgagtcaatgcgagtctccactataaggaagatgtagtcgacagggatggaggagatgaaatctaccacaaaccagcttttcaggtacttcatcttgatcctctgcgggtcaaggatgatttctgtgttgtcctccaccacgatccccgtgcggaagttgaggaccaagtcaatgaggaagaatgtgtctgacaccacattgaagacgatccagggtgtggtgttctcatccttgaagaaggtgatgcccacgggtatgatgatcagattccccaccatcagcaacagcatcgtcaggtcccagtaaaatctgaagtcactgtaggggtggataatccaaaaccctgctgacttaaccctctcctgctcgcgctccaccgctttctggctgccgaacatccttagggagaatttgttgaccccaggttgcagcatggcaccgaactggcgctgcatgaagccgctctggcccaggcgcacctcggcctcggggaggatctggtcgctggcggccgcgcctccctccactttgatagcggtgtccgccgagggctgctcgcaggaggcagaggccggctgcggcggctgctggggcggcggcgaggctgcgggttgtgccgcggtggccgggcgctcgggttcggtcgccaggcccgggggcgtcctgtcctcgccgggggacgcatcgccctcagcggcgatgagccgccgttcctccgcggagtcatgcaggtgcccgagactgctgccgccccctgctccaccactgccgccgccccggctgcccagcgaggccagactcccgcggaagcgcctgcagtcaccgttggtgctggacttgccggcgctgcggcccggcccctcgctctctgtcgccccgagggccgcaccccgggactccgagcagcccgcagccaccgagggagagggcgagggcagcggccgcagccggatgctccttcggctggggtcctggcggcccccggccccttcttcctcaccatcctcttcctcgtccatgatccacgccttggcccccacctgctgcggaaggctgtagagccgcttgcgcatggacggcggcagcttgtccatggtgccagggattgggccgggggcagcggtgcgggtgcggcacgggggacccgctccaggtgcgcctgccagtgaggacgcgtccttcgctgcctcacgagcccatgatcgcgcgggctgcgcgccgaggggaggctcctagtccggctgcaggtccccgggttcgccgcgctgcacctcctcccgggcccggcttgggcgcggggaccccacgctccctccctcttttccctccctcctgcgatcaggggcgcggcgcgcggcccggctccaggcgccccgcccccgcggggaacaatgggcgcgggcagcggcggcgctgcggccaccgcgctccgggaaccgctcccgagcgcagagcgcactgcccgcgcggttcccgggagtgcgtccggcgggtgtctggggctgtcagcgcgtgtgaccgcccgggctttgcagctggtcacccgggttctcgctttgcctcctctagctgagcccagccggccgagtcctggggactcccgccgcagcggagcggagcccagcggcccgccgggcttacatcagcctccgcctct

SEQ ID NO: 65 - DNA, 3947 bp, Rattus norvegicus
  source 1..3947: mol_type = genomic DNA
gagggagggaacgtggggtccccgcgcccaagcccggcccgggaggaggtgcagcgcggcgaacccggggacccgcagccggactaggagcctcccctcggcgcgcagccggcgagatcatgggctcgtgaggcagcgaaggacgagtcctccctggcaggcgcacctggagcgggtcccccgtgccgcacccgcaccgctgcccccggcccagtccctggcaccatggacaagctgccgccgtccatgcgcaagcggctctacagccttccgcagcaggtgggggccaaggcgtggatcatggacgaggaagaggatggtgaggaagagggggccgggggcctccaggacccaagccgaaggagcattcggctgcggccgctgccctcgccctcgccctcggtggccgccggctgctccgagtcccggggtgcggccctcggggcggcagacagcgaggggccgggccgcagcgccggcaagtccagcaccaacggtgactgcaggcgcttccgcgggagtctggcctcgctgggcagccggggcggcggcagtggtggagcagggggcggcagcagtctcgggcacctgcatgactccgcggaggagcggcggctcatcgccgctgagggcgatgcgtcccccggcgaggacaggacgcccccgggcctggcgaccgagcccgagcgcccgggcgccgcggcacaacccgcagcctcgccgccgccccaacagccgccgcagccggcctccgcctcctgcgagcagccctcggcggacacagctatcaaagtggaaggaggcgcggccgccagcgaccagatcctccctgaggccgaggtgcgcctgggccagagcggcttcatgcagcgccagttcggtgccatgctgcaacctggggtcaacaaattctcgctaaggatgttcggcagccagaaagcagtggagcgtgagcaggagagggttaagtcagctgggttttggattatccacccctacagcgacttcagattttactgggacctgacgatgctgttgctgatggtggggaatctgatcatcatccctgtgggcatcaccttcttcaaggatgagaacaccaccccctggatcgtcttcaacgtggtgtcagacacattcttcctcattgacttggtcctcaacttccgcacggggatcgtggtggaggacaacacagaaatcatccttgacccacagcggatcaagatgaagtacctgaaaagctggtttgtggtggacttcatctcctccatccccgtggactacatcttccttatagtggagactcgcattgactcggaggtctacaaaaccgccagggctctgcgcattgtccgcttcacgaagatcctcagcctcctgcgcctcctgcggctttcccgcctcattcggtacattcaccagtgggaagagatcttccacatgacctacgacctggccagtgccgtggtacgcatcgtgaacctcattggcatgatgcttctgctttgccactgggatggctgcctgcagttcctggtgcccatgctgcaggacttcccccatgactgctgggtgtccatcaacggcatggtgaataactcctgggggaagcagtactcctatgccctcttcaaggccatgagccacatgctgtgtattgggtacggacggcaggcacccgtaggcatgtctgacgtctggctcaccatgctcagcatgatcgtgggcgccacctgctatgccatgttcatcgggcacgccactgccctcatccagtcgctggactcctcccggcgccagtaccaggagaagtacaagcaggtggagcagtacatgtccttccacaagctcccgcctgacaccaggcagcgcatccacgactactacgaacaccgctaccagggcaagatgtttgacgaggaaagcatcctgggtgagctgagtgagccgcttcgagaggagatcatcaactttaactgccggaagctggtggcatccatgccactgttcgccaatgcagaccccaactttgtgacgtctatgctgaccaagttgcgttttgaggtctttcagcctggggactacatcatccgtgaaggcaccatcggcaagaagatgtactttatccagcacggcgtggtcagtgtgctcactaagggcaacaaggagaccaagctggctgatggctcctattttggagagatctgcttgctgacccgaggccgtcgcacagcgagcgtgagggcggatacttactgccgcctctactcactgagcgtggacaacttcaacgaggtgctggaggagtatcccatgatgcgcagggctttcgagacggttgcgctggaccgtctggaccgcataggcaagaagaactccatcctcctccacaaggtgcagcacgacctcaactcaggcgtcttcaactaccaagagaacgagatcatccagcagatcgtgcggcatgaccgtgagatggcccactgtgctcaccgcgtccaggctgctgcctcagccaccccaaccccaacgcctgtcatatggaccccactgatccaggcaccactgcaggctgctgctgctactacttcggtggccatagccctcacacaccacccccgcctgccagccgctatcttccggccccctcccggacctgggctgggtaacctgggggctggacagacaccgaggcacccaaggaggttgcagtccttgatcccttcagcgctaggctctgcttcaccagccagcagcccctcacaggtggacacaccgtcttcatcttccttccacatccaacagctggctggattctctgcacctcctggattgagtcctctcttgccctcctctagctcttccccacctccaggagcctgcagttctcccccagcccccactccatccacctccactgctgccaccaccaccgggttcggccactttcataaggcgctaggtggctccctgtcttcctctgattccccgctgctcaccccactgcaaccgggcgctcgctctccacaggctgcccagccgccacccccactgcctggggcccgaggaggcctgggactcctggagcacttcttgccgcccccaccttcgtcccggtcaccatcatctagccctgggcagctgggccagcctcctggagagttgtccccaggtctggcagctggtccaccaagtacaccagagacacccccgcggcccgaacggccatcctttatggcaggggcctctgggggggcttctcctgtagcctttaccccccgaggaggcctcagccctccgggccacagcccaggacccccaagaactttcccgagtgccccaccccgggcctctggctcccatggttccctgctcctgccacctgcatccagccctccgcctccccaggtcccacagcgcaggggcacaccacccctcacccccggccgcctcacacaggacctgaagctcatctcagcctctcagccagccctcccccaggatggggcacagactctacgcagggcctctcctcactcctcaggggagtcgatggctgccttctcactctaccccagagctgggggtggcagtgggagcagtgggggccttgggcctcctggaaggccatatggtgccatcccaggccagcatgtcactttgcctcggaagacatcctcaggttctttgccacccccactttctttgtttggggcaagagccgcctcttctggagggccccctctgactgctgcaccccagagggaacctggcgctaggtccgagccagtacgctccaaactgccgtctaatttatgagctgggccctccctccttccctcttctttttcttgctcccttcttccttcaggtttaactgtgattaggagatataccaataacaataataaccataaaaaacataccccagaaaaacaaaaaga

SEQ ID NO: 66 - DNA, 3947 bp, Rattus norvegicus
  source 1..3947: mol_type = genomic DNA
tctttttgtttttctggggtatgttttttatggttattattgttattggtatatctcctaatcacagttaaacctgaaggaagaagggagcaagaaaaagaagagggaaggagggagggcccagctcataaattagacggcagtttggagcgtactggctcggacctagcgccaggttccctctggggtgcagcagtcagagggggccctccagaagaggcggctcttgccccaaacaaagaaagtgggggtggcaaagaacctgaggatgtcttccgaggcaaagtgacatgctggcctgggatggcaccatatggccttccaggaggcccaaggcccccactgctcccactgccacccccagctctggggtagagtgagaaggcagccatcgactcccctgaggagtgaggagaggccctgcgtagagtctgtgccccatcctgggggagggctggctgagaggctgagatgagcttcaggtcctgtgtgaggcggccgggggtgaggggtggtgtgcccctgcgctgtgggacctggggaggcggagggctggatgcaggtggcaggagcagggaaccatgggagccagaggcccggggtggggcactcgggaaagttcttgggggtcctgggctgtggcccggagggctgaggcctcctcggggggtaaaggctacaggagaagcccccccagaggcccctgccataaaggatggccgttcgggccgcgggggtgtctctggtgtacttggtggaccagctgccagacctggggacaactctccaggaggctggcccagctgcccagggctagatgatggtgaccgggacgaaggtgggggcggcaagaagtgctccaggagtcccaggcctcctcgggccccaggcagtgggggtggcggctgggcagcctgtggagagcgagcgcccggttgcagtggggtgagcagcggggaatcagaggaagacagggagccacctagcgccttatgaaagtggccgaacccggtggtggtggcagcagtggaggtggatggagtgggggctgggggagaactgcaggctcctggaggtggggaagagctagaggagggcaagagaggactcaatccaggaggtgcagagaatccagccagctgttggatgtggaaggaagatgaagacggtgtgtccacctgtgaggggctgctggctggtgaagcagagcctagcgctgaagggatcaaggactgcaacctccttgggtgcctcggtgtctgtccagcccccaggttacccagcccaggtccgggagggggccggaagatagcggctggcaggcgggggtggtgtgtgagggctatggccaccgaagtagtagcagcagcagcctgcagtggtgcctggatcagtggggtccatatgacaggcgttggggttggggtggctgaggcagcagcctggacgcggtgagcacagtgggccatctcacggtcatgccgcacgatctgctggatgatctcgttctcttggtagttgaagacgcctgagttgaggtcgtgctgcaccttgtggaggaggatggagttcttcttgcctatgcggtccagacggtccagcgcaaccgtctcgaaagccctgcgcatcatgggatactcctccagcacctcgttgaagttgtccacgctcagtgagtagaggcggcagtaagtatccgccctcacgctcgctgtgcgacggcctcgggtcagcaagcagatctctccaaaataggagccatcagccagcttggtctccttgttgcccttagtgagcacactgaccacgccgtgctggataaagtacatcttcttgccgatggtgccttcacggatgatgtagtccccaggctgaaagacctcaaaacgcaacttggtcagcatagacgtcacaaagttggggtctgcattggcgaacagtggcatggatgccaccagcttccggcagttaaagttgatgatctcctctcgaagcggctcactcagctcacccaggatgctttcctcgtcaaacatcttgccctggtagcggtgttcgtagtagtcgtggatgcgctgcctggtgtcaggcgggagcttgtggaaggacatgtactgctccacctgcttgtacttctcctggtactggcgccgggaggagtccagcgactggatgagggcagtggcgtgcccgatgaacatggcatagcaggtggcgcccacgatcatgctgagcatggtgagccagacgtcagacatgcctacgggtgcctgccgtccgtacccaatacacagcatgtggctcatggccttgaagagggcataggagtactgcttcccccaggagttattcaccatgccgttgatggacacccagcagtcatgggggaagtcctgcagcatgggcaccaggaactgcaggcagccatcccagtggcaaagcagaagcatcatgccaatgaggttcacgatgcgtaccacggcactggccaggtcgtaggtcatgtggaagatctcttcccactggtgaatgtaccgaatgaggcgggaaagccgcaggaggcgcaggaggctgaggatcttcgtgaagcggacaatgcgcagagccctggcggttttgtagacctccgagtcaatgcgagtctccactataaggaagatgtagtccacggggatggaggagatgaagtccaccacaaaccagcttttcaggtacttcatcttgatccgctgtgggtcaaggatgatttctgtgttgtcctccaccacgatccccgtgcggaagttgaggaccaagtcaatgaggaagaatgtgtctgacaccacgttgaagacgatccagggggtggtgttctcatccttgaagaaggtgatgcccacagggatgatgatcagattccccaccatcagcaacagcatcgtcaggtcccagtaaaatctgaagtcgctgtaggggtggataatccaaaacccagctgacttaaccctctcctgctcacgctccactgctttctggctgccgaacatccttagcgagaatttgttgaccccaggttgcagcatggcaccgaactggcgctgcatgaagccgctctggcccaggcgcacctcggcctcagggaggatctggtcgctggcggccgcgcctccttccactttgatagctgtgtccgccgagggctgctcgcaggaggcggaggccggctgcggcggctgttggggcggcggcgaggctgcgggttgtgccgcggcgcccgggcgctcgggctcggtcgccaggcccgggggcgtcctgtcctcgccgggggacgcatcgccctcagcggcgatgagccgccgctcctccgcggagtcatgcaggtgcccgagactgctgccgccccctgctccaccactgccgccgccccggctgcccagcgaggccagactcccgcggaagcgcctgcagtcaccgttggtgctggacttgccggcgctgcggcccggcccctcgctgtctgccgccccgagggccgcaccccgggactcggagcagccggcggccaccgagggcgagggcgagggcagcggccgcagccgaatgctccttcggcttgggtcctggaggcccccggccccctcttcctcaccatcctcttcctcgtccatgatccacgccttggcccccacctgctgcggaaggctgtagagccgcttgcgcatggacggcggcagcttgtccatggtgccagggactgggccgggggcagcggtgcgggtgcggcacgggggacccgctccaggtgcgcctgccagggaggactcgtccttcgctgcctcacgagcccatgatctcgccggctgcgcgccgaggggaggctcctagtccggctgcgggtccccgggttcgccgcgctgcacctcctcccgggccgggcttgggcgcggggaccccacgttccctccctc

SEQ ID NO: 67 - DNA, 7196 bp, Macaca mulatta
  source 1..7196: mol_type = genomic DNA
ctgtggggcaaacatgccagggaaaggcgagcccagagcttggtgatggagaatttgggaagctaccccgcccccttcaatcttgggatggggaattcgcaactgaagccggagctctagacttggggcgcgcttccagcttggcccaagaaagagatttaagggcgcagcagtatggacacctctcaccccggctccgaaggtctagcgagggtctaaccccggcccctcgccaggcccgccccccgccccctcccagcccctggcccgtgcgccgctgcccctttaagaagcccaggtaggcaggcctggctgctggagccgctcctatggcaacccgcgtgctgcggcggcttcatgaatattccggggcgcgggagcccaagcgcggccggagggcgctccgggggaggcggccgctgatgtaagcccggcgggtcgctgggctccgcttggctgcggcgggagccccgggacgggccagaggggccgggccagaggaggcgagacgaggtcgcggggggccagccacaaagtccgggcggcgagacagacggacagccagccctcccgcgggacgcacgctcgggacccgcgcgggccgtgagctctgcgctccggagcggttccccgagcgcagcggccgcagagcctctccagccggcgcccattgttccccgcgggggcggggcgcctggagccgggccgcgcgccgcgcccctgaacgccagagggagggagggaggcaaggaggtagcgcggggtccgagcgcccagcccggcccgggaggaggcgcagcgcggcgagcccggggactcggagcgcaactgggagcctcccagcggcgcgcagcctgcccgagtatgggcgcctgaggcggccccacgcgggcggcgaaggacgagtccccacgggcggactgaccggcgggcggacctggagcccgtccgcggcgccgcgcccctacccccggctcggtccggcccctggcgccatggacaagctgccaccgtccatgcgcaagcggctctacagcctcccgcagcaggtgggggccaaggcgtggatcatggacgaggaagaggacgccgaggaggagggggccgggggccgccaagaccccagccgcaggagcatccggctgcggccactgccctcgccctcgccctcggcggccgcgggtggcacggagtcccggagctcggccctcggggcagcggacagcgaagggtcggcccgcggcgcgggcaagtccagcacgaacggcgactgcaggcgcttccgcgggagcctggcctcgctgggcagccggggcggcggcggcggcggcacggggagcggcagcagtcacggacacctgcatgactccgcggaggagcggcggctcatcgccgagggcgacgcgtcccccggcgaggacaggacgcccccaggcctggcggccgagcccgagcgccccggcgcctcggcgcagcccgcagcctcgccgccgccgccccagcagccaccgcagccggcctcctcctcctgcgagcagccctcggcggacaccgctatcaaagtggagggaggcgcggccaccggcgaccagatccttccggaggccgaggtgcgcttgggccagtccggcttcatgcagcgccagttcggggccatgctccaacccggggtcaacaaattctccctaaggatgttcggcagccagaaagccgtggaacgcgagcaggagagggtcaagtcggccggattttggattatccacccctacagtgacttcagattttactgggacctgaccatgctgctgctgatggtgggaaacctgatcatcattcctgtgggcatcaccttcttcaaggatgagaacaccacaccctggattgtcttcaacgtggtgtcagacacattcttcctcatcgacttggtcctcaacttccgcacagggatcgtggtggaggacaacacagagatcatcctggacccacagcggattaaaatgaagtacctgaaaagctggttcatggtagatttcatttcctccatccccgtggactacatcttcctcattgtggagacacgcatcgactcggaggtctacaagactgcccgggccctgcgcatcgtccgcttcacgaagatcctcagcctcttacgcttgttacgcctctcccgcctcattcggtatattcaccagtgggaagagatcttccacatgacctacgacctggccagtgccgtggtgcgcatcgtgaacctcatcggcatgatgctcctgctctgccactgggatggctgcctgcagttcctggtacccatgctgcaggactttcctgatgactgctgggtgtccatcaacaacatggtgaacaactcctgggggaagcagtactcctacgcgctcttcaaggccatgagccacatgctgtgcatcggctacggacggcaggcgcccgtgggcatgtccgacgtctggctcaccatgctcagcatgatcgtgggcgccacctgctacgccatgttcattggccacgccactgccctcatccagtccctggactcctcccggcgccagtaccaggaaaagtataagcaggtggagcagtacatgtccttccacaagctcccgcccgacacccggcagcgcatccacgactactacgagcaccgctaccagggcaagatgttcgacgaggagagcattctgggcgagctgagcgagcccctgcgggaggagatcatcaactttaactgccggaagctggtggcctccatgccactgtttgccaacgcggaccccaacttcgtgacgtccatgctgaccaagctgcgtttcgaggtcttccagcccggggactacatcatccgggaaggcaccatcggcaagaagatgtacttcatccagcacggcgtggtcagcgtgctcaccaagggcaacaaggagaccaagctggccgacggctcctactttggagagatctgcctgctgacacggggccggcgcacagctagcgtgagggccgacacctactgccgcctctactcgctgagcgtggacaacttcaatgaggtgctggaggagtaccccatgatgcgaagggcctttgagactgtggcgctggaccgcctggaccgcatcggcaagaagaactccatcctcctccacaaagtccagcacgacctcaactcgggcgtcttcaactaccaggagaacgagatcatccagcagattgtgcagcatgaccgggagatggcacactgcgcacaccgcgtccaggccgccgcctctgccaccccaacccccacgcctgtcatctggaccccgctgatccaggcaccactgcaggctgccgcggccaccacttctgtggccatagccctcacccaccaccctcgcctgcctgctgccatcttccgccctcccccaggatctgggctgggcaacctcggtgccgggcagacgccaaggcacctgaaacggctgcagtccctgatcccttctgcgctgggctccgcctcgcccgccagcagcccatcccaggtagacacgccgtcttcatcctccttccacatccaacagctggctggattctctgcccccgccggactgagcccactcctgccctcatccagctcctccccaccccccggggcctgcggctccccctcggctcccataccatcagctggcacagccgccaccaccacagccgggtttggccacttccacaaggcactgggcggctccctgtcctcctccgactctcccctgctcaccccgctgcagccaggcgcccgctccccgcaggctgcccagccacctccggcaccacccggggcccggggaggcctgggactcccggagcacttcttgccacccccaccctcatccagatccccatcatctagccctgggcagctgggccagcctcccggggagttgtccctaggtctggctgctggcccaccgagcacgccagagacacccccacggcagcctgagccgccatcccttgtggcaggggcctctgggggggcttcccctgtaggctttactccccgaggaggtctcagcccccccggccacagcccaggccccccaagaaccttcccaagtgccccaccccgggcctctggctcccacggatccttgcttctgccacctgcatccagccccccaccaccccaggtcccccagcgccggggcacgccccccctcacccccggccgcctcacccaggacctcaagctcatctctgcatctcagccagccctgcctcaggacggggcacagactctccgcagagcctccccgcactcctcaggggagtccatggctgccttcccgctcttccccagggctgggggtggcagcgggggcagtgggagcagcgggggccttggtccccctgggaggccctatggtgccatccccggccagcacgtcactctgcctcggaagacatcctcaggttctttgccaccccctctgtctttgtttggggcaagagccacctcttctggggggccccctctgactgctggaccccagagggaacctggggccaggcctgagccagtgcgctccaaactgccgtccaatctatgagctgggcccttccctcttctttcttcttttctctccgttccttcttccttcaggtttaactgtgattaggagatataccaataacagtaataattatttaaaaaaccacacacaccagaaaatcaaaagacagcagaaaataaccaggtattcttagagctatagatttttggtcacttgcttttatagactattttaatactcagcactagagggagggagggggagggaggagggagcaggcaggtcccaaatgcaaaagccagagaaaggcagatggggtctcggggctgggcaggggtcggggtggccagtgttgggggttcttagagcagatgtgtcattgtgttcatttagagaaacagctgccatcagccccttagctgtaagttggagctccactctgcccccaggaaggggctgccccggggcgtgccctggggggcctcagatgcctgcgaccttgggagaaaagggccagggccctgagggcctagcatttttttctactgtaaacgtagcaagatctgtatatgaatatatgtatatgtatgtaagatgtgtatatgtatagctatgtagcgctctgtagagccatgtagatagccactcgtgcgcacacgtgtgtggtctagtttattcccatgttgccaggatgcccaggtcaccttacacccagcaacccaccttggcccgcaggccgtgcactgcatggtctagggatgttctctctccagtcctcagggaagaggaccccaggacttcgcagcaggccccctctctcgtctcagatccagtcccagcctgacctctcaccacacggaagtggaagactcctttcctagggcctcaggcacaccccgccacccctggagtcatcagtttgcccatctgtacagcgggaggtgaggggaacttctgtgtattgagtctgctctgtggcaagcactgctttcgcactttacacacgttcactccctcagtttcacaaagaccatggggtggccactttcattctccccatttagcagatgaagaaacagttctgggtaatttctccaccatcatgtaactcggaatggcagagtggggactgatttgaggttcaaattcacgcctgcttgaggcccaagtctgtgttccttccatcagaaaactgttgaggggggctgaggtagatggtccccaagcgtggtgcagaaggaagacaccagattttggcagcagtcaggcctgggtttgaatcccagccctgccacttcttacctgtatgatcttgggcaagttctctgacttttctgtcacctcatttgtaaaatgggaatcattatggtaccgcctcacaaggacctatgaggaccagatgcgaaaaatctatatgtgaaatgcccagcccagcgcctggcacataccatggtaggtgctcaataaatcacatttcttctggccctcatatgcccagcctattgctccagcaagctatgtgagagcccagggagctttggctgagggctccaagacttaaaatctcaggactcaggaggtggctgggcctccctaagggcccaaggaaggtgtgtggccagaggtgggggggagccaggccttgagatgtgggaagacttcaacagggagagagggagggaatggtgggtgggatggagtatatagcggggagattcctgaggtggagtggtggattagggctttgggagggaatccgcaggctgaggggtcagagggatggccttgggtgataggctaagggcttgactgggcttggtcctggcaactaggagccataagcaagttccagattgcaggaacgagaaagcagctcagatgcctttggaggcaccatcctccctcctcccagatgggatctgccagaggcaaagccaggggtctgcccctgcctatagggccagagcaggtatagctgcaatccccaaataatgagatgggctggccccacattatccatccagaacattccatgcttcaagccagaatgttggcaagatcgggttttgtcttgagctatcctgggatgtgggaaaaaccgatttctccatagatgggctgcagggagtgggaggcagtattccaggagagaagtgggtgaaggttcctgggatcttaggtaaagactagatgccgcctggtactggtctgtactgtgctggctcaggagttctgagaactggaaggacttagcctcaacctgagttctgcacgcaccccttccccttaaggaaggcagctctgagaggcagcaggacttgatccaaacccacagtcttgtcctggaggtagcaggggtgaaggtggagggtccagggccgtgaggaggctgcttgccatcagagcctggcctgaccaccctcttctctacttacacacacatgtattttataacagccctgacccaacctggccactctgcagagactgggacagccaggtgcaggcagggggccctcccaaacccagtcacctacaaggaattttcaaatcttccacttttaaaacagaaaccggtaaatgcgccgtattgtatattttatttaaataaaaaaaattccagca

SEQ ID NO: 68 - DNA, 7196 bp, Macaca mulatta
  source 1..7196: mol_type = genomic DNA
tgctggaattttttttatttaaataaaatatacaatacggcgcatttaccggtttctgttttaaaagtggaagatttgaaaattccttgtaggtgactgggtttgggagggccccctgcctgcacctggctgtcccagtctctgcagagtggccaggttgggtcagggctgttataaaatacatgtgtgtgtaagtagagaagagggtggtcaggccaggctctgatggcaagcagcctcctcacggccctggaccctccaccttcacccctgctacctccaggacaagactgtgggtttggatcaagtcctgctgcctctcagagctgccttccttaaggggaaggggtgcgtgcagaactcaggttgaggctaagtccttccagttctcagaactcctgagccagcacagtacagaccagtaccaggcggcatctagtctttacctaagatcccaggaaccttcacccacttctctcctggaatactgcctcccactccctgcagcccatctatggagaaatcggtttttcccacatcccaggatagctcaagacaaaacccgatcttgccaacattctggcttgaagcatggaatgttctggatggataatgtggggccagcccatctcattatttggggattgcagctatacctgctctggccctataggcaggggcagacccctggctttgcctctggcagatcccatctgggaggagggaggatggtgcctccaaaggcatctgagctgctttctcgttcctgcaatctggaacttgcttatggctcctagttgccaggaccaagcccagtcaagcccttagcctatcacccaaggccatccctctgacccctcagcctgcggattccctcccaaagccctaatccaccactccacctcaggaatctccccgctatatactccatcccacccaccattccctccctctctccctgttgaagtcttcccacatctcaaggcctggctcccccccacctctggccacacaccttccttgggcccttagggaggcccagccacctcctgagtcctgagattttaagtcttggagccctcagccaaagctccctgggctctcacatagcttgctggagcaataggctgggcatatgagggccagaagaaatgtgatttattgagcacctaccatggtatgtgccaggcgctgggctgggcatttcacatatagatttttcgcatctggtcctcataggtccttgtgaggcggtaccataatgattcccattttacaaatgaggtgacagaaaagtcagagaacttgcccaagatcatacaggtaagaagtggcagggctgggattcaaacccaggcctgactgctgccaaaatctggtgtcttccttctgcaccacgcttggggaccatctacctcagcccccctcaacagttttctgatggaaggaacacagacttgggcctcaagcaggcgtgaatttgaacctcaaatcagtccccactctgccattccgagttacatgatggtggagaaattacccagaactgtttcttcatctgctaaatggggagaatgaaagtggccaccccatggtctttgtgaaactgagggagtgaacgtgtgtaaagtgcgaaagcagtgcttgccacagagcagactcaatacacagaagttcccctcacctcccgctgtacagatgggcaaactgatgactccaggggtggcggggtgtgcctgaggccctaggaaaggagtcttccacttccgtgtggtgagaggtcaggctgggactggatctgagacgagagagggggcctgctgcgaagtcctggggtcctcttccctgaggactggagagagaacatccctagaccatgcagtgcacggcctgcgggccaaggtgggttgctgggtgtaaggtgacctgggcatcctggcaacatgggaataaactagaccacacacgtgtgcgcacgagtggctatctacatggctctacagagcgctacatagctatacatatacacatcttacatacatatacatatattcatatacagatcttgctacgtttacagtagaaaaaaatgctaggccctcagggccctggcccttttctcccaaggtcgcaggcatctgaggccccccagggcacgccccggggcagccccttcctgggggcagagtggagctccaacttacagctaaggggctgatggcagctgtttctctaaatgaacacaatgacacatctgctctaagaacccccaacactggccaccccgacccctgcccagccccgagaccccatctgcctttctctggcttttgcatttgggacctgcctgctccctcctccctccccctccctccctctagtgctgagtattaaaatagtctataaaagcaagtgaccaaaaatctatagctctaagaatacctggttattttctgctgtcttttgattttctggtgtgtgtggttttttaaataattattactgttattggtatatctcctaatcacagttaaacctgaaggaagaaggaacggagagaaaagaagaaagaagagggaagggcccagctcatagattggacggcagtttggagcgcactggctcaggcctggccccaggttccctctggggtccagcagtcagagggggccccccagaagaggtggctcttgccccaaacaaagacagagggggtggcaaagaacctgaggatgtcttccgaggcagagtgacgtgctggccggggatggcaccatagggcctcccagggggaccaaggcccccgctgctcccactgcccccgctgccacccccagccctggggaagagcgggaaggcagccatggactcccctgaggagtgcggggaggctctgcggagagtctgtgccccgtcctgaggcagggctggctgagatgcagagatgagcttgaggtcctgggtgaggcggccgggggtgagggggggcgtgccccggcgctgggggacctggggtggtggggggctggatgcaggtggcagaagcaaggatccgtgggagccagaggcccggggtggggcacttgggaaggttcttggggggcctgggctgtggccgggggggctgagacctcctcggggagtaaagcctacaggggaagcccccccagaggcccctgccacaagggatggcggctcaggctgccgtgggggtgtctctggcgtgctcggtgggccagcagccagacctagggacaactccccgggaggctggcccagctgcccagggctagatgatggggatctggatgagggtgggggtggcaagaagtgctccgggagtcccaggcctccccgggccccgggtggtgccggaggtggctgggcagcctgcggggagcgggcgcctggctgcagcggggtgagcaggggagagtcggaggaggacagggagccgcccagtgccttgtggaagtggccaaacccggctgtggtggtggcggctgtgccagctgatggtatgggagccgagggggagccgcaggccccggggggtggggaggagctggatgagggcaggagtgggctcagtccggcgggggcagagaatccagccagctgttggatgtggaaggaggatgaagacggcgtgtctacctgggatgggctgctggcgggcgaggcggagcccagcgcagaagggatcagggactgcagccgtttcaggtgccttggcgtctgcccggcaccgaggttgcccagcccagatcctgggggagggcggaagatggcagcaggcaggcgagggtggtgggtgagggctatggccacagaagtggtggccgcggcagcctgcagtggtgcctggatcagcggggtccagatgacaggcgtgggggttggggtggcagaggcggcggcctggacgcggtgtgcgcagtgtgccatctcccggtcatgctgcacaatctgctggatgatctcgttctcctggtagttgaagacgcccgagttgaggtcgtgctggactttgtggaggaggatggagttcttcttgccgatgcggtccaggcggtccagcgccacagtctcaaaggcccttcgcatcatggggtactcctccagcacctcattgaagttgtccacgctcagcgagtagaggcggcagtaggtgtcggccctcacgctagctgtgcgccggccccgtgtcagcaggcagatctctccaaagtaggagccgtcggccagcttggtctccttgttgcccttggtgagcacgctgaccacgccgtgctggatgaagtacatcttcttgccgatggtgccttcccggatgatgtagtccccgggctggaagacctcgaaacgcagcttggtcagcatggacgtcacgaagttggggtccgcgttggcaaacagtggcatggaggccaccagcttccggcagttaaagttgatgatctcctcccgcaggggctcgctcagctcgcccagaatgctctcctcgtcgaacatcttgccctggtagcggtgctcgtagtagtcgtggatgcgctgccgggtgtcgggcgggagcttgtggaaggacatgtactgctccacctgcttatacttttcctggtactggcgccgggaggagtccagggactggatgagggcagtggcgtggccaatgaacatggcgtagcaggtggcgcccacgatcatgctgagcatggtgagccagacgtcggacatgcccacgggcgcctgccgtccgtagccgatgcacagcatgtggctcatggccttgaagagcgcgtaggagtactgcttcccccaggagttgttcaccatgttgttgatggacacccagcagtcatcaggaaagtcctgcagcatgggtaccaggaactgcaggcagccatcccagtggcagagcaggagcatcatgccgatgaggttcacgatgcgcaccacggcactggccaggtcgtaggtcatgtggaagatctcttcccactggtgaatataccgaatgaggcgggagaggcgtaacaagcgtaagaggctgaggatcttcgtgaagcggacgatgcgcagggcccgggcagtcttgtagacctccgagtcgatgcgtgtctccacaatgaggaagatgtagtccacggggatggaggaaatgaaatctaccatgaaccagcttttcaggtacttcattttaatccgctgtgggtccaggatgatctctgtgttgtcctccaccacgatccctgtgcggaagttgaggaccaagtcgatgaggaagaatgtgtctgacaccacgttgaagacaatccagggtgtggtgttctcatccttgaagaaggtgatgcccacaggaatgatgatcaggtttcccaccatcagcagcagcatggtcaggtcccagtaaaatctgaagtcactgtaggggtggataatccaaaatccggccgacttgaccctctcctgctcgcgttccacggctttctggctgccgaacatccttagggagaatttgttgaccccgggttggagcatggccccgaactggcgctgcatgaagccggactggcccaagcgcacctcggcctccggaaggatctggtcgccggtggccgcgcctccctccactttgatagcggtgtccgccgagggctgctcgcaggaggaggaggccggctgcggtggctgctggggcggcggcggcgaggctgcgggctgcgccgaggcgccggggcgctcgggctcggccgccaggcctgggggcgtcctgtcctcgccgggggacgcgtcgccctcggcgatgagccgccgctcctccgcggagtcatgcaggtgtccgtgactgctgccgctccccgtgccgccgccgccgccgccccggctgcccagcgaggccaggctcccgcggaagcgcctgcagtcgccgttcgtgctggacttgcccgcgccgcgggccgacccttcgctgtccgctgccccgagggccgagctccgggactccgtgccacccgcggccgccgagggcgagggcgagggcagtggccgcagccggatgctcctgcggctggggtcttggcggcccccggccccctcctcctcggcgtcctcttcctcgtccatgatccacgccttggcccccacctgctgcgggaggctgtagagccgcttgcgcatggacggtggcagcttgtccatggcgccaggggccggaccgagccgggggtaggggcgcggcgccgcggacgggctccaggtccgcccgccggtcagtccgcccgtggggactcgtccttcgccgcccgcgtggggccgcctcaggcgcccatactcgggcaggctgcgcgccgctgggaggctcccagttgcgctccgagtccccgggctcgccgcgctgcgcctcctcccgggccgggctgggcgctcggaccccgcgctacctccttgcctccctccctccctctggcgttcaggggcgcggcgcgcggcccggctccaggcgccccgcccccgcggggaacaatgggcgccggctggagaggctctgcggccgctgcgctcggggaaccgctccggagcgcagagctcacggcccgcgcgggtcccgagcgtgcgtcccgcgggagggctggctgtccgtctgtctcgccgcccggactttgtggctggccccccgcgacctcgtctcgcctcctctggcccggcccctctggcccgtcccggggctcccgccgcagccaagcggagcccagcgacccgccgggcttacatcagcggccgcctcccccggagcgccctccggccgcgcttgggctcccgcgccccggaatattcatgaagccgccgcagcacgcgggttgccataggagcggctccagcagccaggcctgcctacctgggcttcttaaaggggcagcggcgcacgggccaggggctgggagggggcggggggcgggcctggcgaggggccggggttagaccctcgctagaccttcggagccggggtgagaggtgtccatactgctgcgcccttaaatctctttcttgggccaagctggaagcgcgccccaagtctagagctccggcttcagttgcgaattccccatcccaagattgaagggggcggggtagcttcccaaattctccatcaccaagctctgggctcgcctttccctggcatgtttgccccacag

SEQ ID NO: 69 - DNA, 6881 bp, Macaca fascicularis
  misc_feature 1003..1016: note = n is a, c, g, or t
  source 1..6881: mol_type = genomic DNA
tggagccgctcctatggcaacccgcgtgctgcggcggcttcatgaatattccggggcgcgggagcccgagcgcggccggagggcgctccgggggaggcggccgctgatgtaagcccggcgggtcgctgggctccgcttggctgcggcgggagccccgggacgggccagaggggccgggccagaggaggcgagacgaggtcgcggggggccagccacaaagtccgggcggcgagacagacggacagccagccctcccgcgggacgcacgcccgggacccgcgcgggccgtgcgctctgcgctccggagcggttccccgagcgccgcggccgcagagcctctccagccggcgcccattgttccccgcgggggcggggcgcctggagccgggccgcgcgccgcgcccctgaacgccagagggagggagggaggcaaggaggtagcgcggggtccgagcgcccagcccggcccgggaggaggcgcagcgcggcgagcccggggactcggagcgcaactgggagcctcccagcggcgcgcagcctgcccgagtatgggcgcctgaggcggccccacgccggcggcgaaggacgagtccccacgggcggactgaccggcgggcggacctggagcccgtccgcggcgccgcgcccctacccccggctcggtccggcccctggcgccatggacaagctgccaccgtccatgcgcaagcggctctacagcctcccgcagcaggtgggggccaaggcgtggatcatggacgaggaagaggacgccgaggaggagggggccgggggccgccaagaccccagccgcaggagcatccggctgcggccactgccctcgccctcgccctcggcggccgcgggtggcacggagtcccggagctcggccctcggggcagcggacagcgaagggtcggcccgcggggcgggcaagtccagcacgaacggcgactgcaggcgcttccgcgggagcctggcctcgctgggcagccggggcggnnnnnnnnnnnnnncggggagcggcagcagtcacggacacctgcatgactccgcggaggagcggcggctcatcgccgagggcgacgcgtcccccggcgaggacaggacgcccccaggcctggcggccgagcccgagcgccccggcgcctcggcgcagcccgcagcctcgccgccgccgccccagcagccaccgcagccggcctcctcctcctgcgagcagccctcggcggacaccgctatcaaagtggagggaggcgcggccaccggcgaccagatccttccggaggccgaggtgcgcttgggccagtccggcttcatgcagcgccagttcggggccatgctccaacccggggtcaacaaattctccctaaggatgttcggcagccagaaagccgtggaacgcgagcaggagagggtcaagtcggccggattttggattatccacccctacagtgacttcagattttactgggacctgaccatgctgctgctgatggtgggaaacctgatcatcattcctgtgggcatcaccttcttcaaggatgagaacaccacaccctggattgtcttcaatgtggtgtcagacacattcttcctcatcgacttggtcctcaacttccgcacagggatcgtggtggaggacaacacagagatcatcctggacccacagcggattaaaatgaagtacctgaaaagctggttcatggtagatttcatttcctccatccctgtggactacatcttcctcattgtggagacacgcatcgactcggaggtctacaagactgcccgggccctgcgcatcgtccgcttcacgaagatcctcagcctcttacgcttgttacgcctctcccgcctcattcggtatattcaccagtgggaagagatcttccacatgacctacgacctggccagtgccgtggtgcgcatcgtgaacctcatcggcatgatgctcctgctctgccactgggatggctgcctgcagttcctggtacccatgctgcaggactttcctgatgactgctgggtgtccatcaacaacatggtgaacaactcctgggggaagcagtactcctacgcgctcttcaaggccatgagccacatgctgtgcatcggctacggacggcaggcgcccgtgggcatgtccgacgtctggctcaccatgctcagcatgatcgtgggcgccacctgctacgccatgttcattggccacgccactgccctcatccagtccctggactcctcccggcgccagtaccaggaaaagtataagcaggtggagcagtacatgtccttccacaagctcccgcccgacacccggcagcgcatccacgactactacgagcaccgctaccagggcaagatgttcgacgaggagagcattctgggcgagctgagcgagcccctgcgggaggagatcatcaactttaactgccggaagctggtggcctccatgccactgtttgccaacgcggaccccaacttcgtgacgtccatgctgaccaagctgcgtttcgaggtcttccagcccggggactacatcatccgggaaggcaccatcggcaagaagatgtacttcatccagcacggcgtggtcagcgtgctcaccaagggcaacaaggagaccaagctggccgacggctcctactttggagagatctgcctgctgacacggggccggcgcacagctagcgtgagggccgacacctactgccgcctctactcgctgagcgtggacaacttcaatgaggtgctggaggagtaccccatgatgcgaagggcctttgagactgtggcgctggaccgcctggaccgcatcggcaagaagaactccatcctcctccacaaagtccagcacgacctcaactcgggcgtcttcaactaccaggagaacgagatcatccagcagattgtgcagcatgaccgggagatggcacactgcgcacaccgcgtccaggccgccgcctctgccaccccaacccccacgcctgtcatctggaccccgctgatccaggcaccactgcaggctgccgcggccaccacttctgtggccatagccctcacccaccaccctcgcctgcctgctgccatcttccgccctcccccaggatctgggctgggcaacctcggcgccgggcagacgccaaggcacctgaaacggctgcagtccctgatcccttctgcgctgggctccgcctcgcccgccagcagcccatcccaggtagacacgccgtcttcatcctccttccacatccaacagctggctggattctctgcccccgccggactgagcccactcctgccctcatccagctcctccccaccccccggggcctgcggctccccctcggctcccataccatcagctggcacagccgccaccaccacagccgggtttggccacttccacaaggcactgggcggctccctgtcctcctccgactctcccctgctcaccccgctgcagccaggcgcccgctccccgcaggctgcccagccacctccggcaccacccggggcccggggaggcctgggactcccggagcacttcttgccacccccaccctcatccagatccccatcatctagccctgggcagctgggccagcctcctggggagttgtccctaggtctggctgctggcccacccagcacgccagagacacccccacggcagcctgagccgccatcccttgtggcaggggcctctgggggggcttcccctgtaggctttactccccgaggaggtctcagcccccccggccacagcccaggccccccaagaaccttcccaagtgccccaccccgggcctctggctcccacggatccttgcttctgccacctgcatccagccccccaccaccccaggtcccccagcgccggggcacgccccccctcacccccggccgcctcacccaggacctcaagctcatctctgcatctcagccagccctgcctcaggacggggcacagactctccgcagagcctccccgcactcctcaggggagtccatggctgccttcccgctcttccccagggctgggggtggcagcgggggcagtgggagcagcgggggccttggtccccctgggaggccctatggtgccatccccggccagcacgtcactttgcctcggaagacatcctcaggttctttgccaccccctctgtctttgtttggggcaagagccacctcttctggggggccccctctgactgctggaccccagagggaacctggggccaggcctgagccagtgcgctccaaactgccgtccaatctatgagctgggcccttccctcttctttcttcttttctctccgttccttcttccttcaggtttaactgtgattaggagatataccaataacagtaataattatttaaaaaaccacacacaccagaaaatcaaaagacagcagaaaataaccaggtattcttagagctatagatttttggtcacttgcttttatagactattttaatactcagcactagagggagggagggggagggaggagggagcaggcaggtcccaaatgcaaaagccagagaaaggcagatggggtctcggggctgggcaggggtcggggtggccagtgttgggggttcttagagcagatgtgtcattgtgttcatttagagaaacagctgccatcagccccttagctgtaagttggagctccactctgcccccaggaaggggctgccccggggcgtgccctggggggcctcagatgcctgcgaccttgggagaaaagggccagggccctgagggcctagcatttttttctactgtaaacgtagcaagatctgtatatgaatatatgtatatgtatgtaagatgtgtatatgtatagctatgtagcgctctgtagagccatgtagatagccactcgtgcgcacacgtgtgtggtctagtttattcccatgttgccaggatgcccaggtcaccttacacccagcaacccaccttggcccgcaggccgtgcactgcatggtctagggatgttctctctccagtcctcagggaagaggaccccaggacttcgcagcaggccccctctctcatctcagatccagtcccagcctgacctctcaccacacggaagtggaagactcctttcctagggcctcaggcacaccccgccacccctggagtcatcagtttgcccatctgtacagcgggaggtgaggggaacttctgtgtattgagtctgctctgtggcaagcactgctttcgcactttacacacgttcactccctcagtttcacaaagaccatggggtggccactttcattctccccatttagcagatgaagaaacagttctgggtaatttctccaccatcatgtaactcggaatggcagagtggggactgatttgaggttcaaattcacgcctgcttgaggcccaagtctgtgttccttccatcagaaaactgttgaggggggctgaggtagatggtccccaagcgtggtgtagaaggaagacaccagattttggcagcagtcaggcctgggtttgaatcccagccctgccacttcttacctgtatgatcttgggcaagttctctgacttttctgtcacctcatttgtaaaatgggaatcattatggtaccgcctcacaaggacctatgaggaccagatgagaaaaatctatatgtgaaatgcccagcccagcgcctggcacataccatggtaggtgctcaataaatcacatttcttctgcccctcatatgcccagcctattgctccagcaaactatgtgagagcccagggagctttggctgagggctccaagacttaaaatctcaggactcaggaggtggctgggcctccctaagggcccaaggaaggtgtgtggccagaggtgggtgggagccaggccttgagatgtgggaagacttcaacagggagagagggagggaatggtgggtgggatggagtatatagcggggagattcctgaggtggagtggtggattagggctttgggagggaatccgcaggctgaggggtcagagggatggccttgggtgataggctaagggcttgactgggcttggtcctggcaactaggagccataagcaagttccagattgcaggaacgagaaagcagctcagatgcctttggaggcaccatcctccctcctcccagatgggatcctgccagaggcaaagccaggggtctgcccctgcctatagggccagagcaggtatagctgcaatccccaaataatgagatgggctggccccacattatccatccagaacattccatgcttcaagccagaatgttggcaagatcgggttttgccttgagctatcctgggatgtgggaaaaaccgatttctccatagatgggctgcagggagtgggaggcagtattccaggagagaagtgggtgaaggttcctgggatcttaggtaaagactagatgccgcctggtactggtctgtactgtgctggctcaggagttctgagaactggaaggacttagcctcaacctgagttctgcacgcaccccttccccttaaggaaggcagctctgagaggcagcaggacttgatccaaacccacagtcttgtcctggaggtagcaggggtgaaggtggagggtccagggccgtgaggaggctgcttgccatcagagcctggcctgaccaccctcttctctacttacacacacatgtattttataacagccctgacccaacctggccactctgcagagactgggacagccaggtgcaggcagggggccctcccaaacccagtcacctacaaggaattttcaaatcttccacttttaaaacagaaaccggtaaatgcgccgtattgtatattttatttaaataaaaaaaattccagca

SEQ ID NO: 70 - DNA, 6881 bp, Macaca fascicularis
  misc_feature 5866..5879: note = n is a, c, g, or t
  source 1..6881: mol_type = genomic DNA
tgctggaattttttttatttaaataaaatatacaatacggcgcatttaccggtttctgttttaaaagtggaagatttgaaaattccttgtaggtgactgggtttgggagggccccctgcctgcacctggctgtcccagtctctgcagagtggccaggttgggtcagggctgttataaaatacatgtgtgtgtaagtagagaagagggtggtcaggccaggctctgatggcaagcagcctcctcacggccctggaccctccaccttcacccctgctacctccaggacaagactgtgggtttggatcaagtcctgctgcctctcagagctgccttccttaaggggaaggggtgcgtgcagaactcaggttgaggctaagtccttccagttctcagaactcctgagccagcacagtacagaccagtaccaggcggcatctagtctttacctaagatcccaggaaccttcacccacttctctcctggaatactgcctcccactccctgcagcccatctatggagaaatcggtttttcccacatcccaggatagctcaaggcaaaacccgatcttgccaacattctggcttgaagcatggaatgttctggatggataatgtggggccagcccatctcattatttggggattgcagctatacctgctctggccctataggcaggggcagacccctggctttgcctctggcaggatcccatctgggaggagggaggatggtgcctccaaaggcatctgagctgctttctcgttcctgcaatctggaacttgcttatggctcctagttgccaggaccaagcccagtcaagcccttagcctatcacccaaggccatccctctgacccctcagcctgcggattccctcccaaagccctaatccaccactccacctcaggaatctccccgctatatactccatcccacccaccattccctccctctctccctgttgaagtcttcccacatctcaaggcctggctcccacccacctctggccacacaccttccttgggcccttagggaggcccagccacctcctgagtcctgagattttaagtcttggagccctcagccaaagctccctgggctctcacatagtttgctggagcaataggctgggcatatgaggggcagaagaaatgtgatttattgagcacctaccatggtatgtgccaggcgctgggctgggcatttcacatatagatttttctcatctggtcctcataggtccttgtgaggcggtaccataatgattcccattttacaaatgaggtgacagaaaagtcagagaacttgcccaagatcatacaggtaagaagtggcagggctgggattcaaacccaggcctgactgctgccaaaatctggtgtcttccttctacaccacgcttggggaccatctacctcagcccccctcaacagttttctgatggaaggaacacagacttgggcctcaagcaggcgtgaatttgaacctcaaatcagtccccactctgccattccgagttacatgatggtggagaaattacccagaactgtttcttcatctgctaaatggggagaatgaaagtggccaccccatggtctttgtgaaactgagggagtgaacgtgtgtaaagtgcgaaagcagtgcttgccacagagcagactcaatacacagaagttcccctcacctcccgctgtacagatgggcaaactgatgactccaggggtggcggggtgtgcctgaggccctaggaaaggagtcttccacttccgtgtggtgagaggtcaggctgggactggatctgagatgagagagggggcctgctgcgaagtcctggggtcctcttccctgaggactggagagagaacatccctagaccatgcagtgcacggcctgcgggccaaggtgggttgctgggtgtaaggtgacctgggcatcctggcaacatgggaataaactagaccacacacgtgtgcgcacgagtggctatctacatggctctacagagcgctacatagctatacatatacacatcttacatacatatacatatattcatatacagatcttgctacgtttacagtagaaaaaaatgctaggccctcagggccctggcccttttctcccaaggtcgcaggcatctgaggccccccagggcacgccccggggcagccccttcctgggggcagagtggagctccaacttacagctaaggggctgatggcagctgtttctctaaatgaacacaatgacacatctgctctaagaacccccaacactggccaccccgacccctgcccagccccgagaccccatctgcctttctctggcttttgcatttgggacctgcctgctccctcctccctccccctccctccctctagtgctgagtattaaaatagtctataaaagcaagtgaccaaaaatctatagctctaagaatacctggttattttctgctgtcttttgattttctggtgtgtgtggttttttaaataattattactgttattggtatatctcctaatcacagttaaacctgaaggaagaaggaacggagagaaaagaagaaagaagagggaagggcccagctcatagattggacggcagtttggagcgcactggctcaggcctggccccaggttccctctggggtccagcagtcagagggggccccccagaagaggtggctcttgccccaaacaaagacagagggggtggcaaagaacctgaggatgtcttccgaggcaaagtgacgtgctggccggggatggcaccatagggcctcccagggggaccaaggcccccgctgctcccactgcccccgctgccacccccagccctggggaagagcgggaaggcagccatggactcccctgaggagtgcggggaggctctgcggagagtctgtgccccgtcctgaggcagggctggctgagatgcagagatgagcttgaggtcctgggtgaggcggccgggggtgagggggggcgtgccccggcgctgggggacctggggtggtggggggctggatgcaggtggcagaagcaaggatccgtgggagccagaggcccggggtggggcacttgggaaggttcttggggggcctgggctgtggccgggggggctgagacctcctcggggagtaaagcctacaggggaagcccccccagaggcccctgccacaagggatggcggctcaggctgccgtgggggtgtctctggcgtgctgggtgggccagcagccagacctagggacaactccccaggaggctggcccagctgcccagggctagatgatggggatctggatgagggtgggggtggcaagaagtgctccgggagtcccaggcctccccgggccccgggtggtgccggaggtggctgggcagcctgcggggagcgggcgcctggctgcagcggggtgagcaggggagagtcggaggaggacagggagccgcccagtgccttgtggaagtggccaaacccggctgtggtggtggcggctgtgccagctgatggtatgggagccgagggggagccgcaggccccggggggtggggaggagctggatgagggcaggagtgggctcagtccggcgggggcagagaatccagccagctgttggatgtggaaggaggatgaagacggcgtgtctacctgggatgggctgctggcgggcgaggcggagcccagcgcagaagggatcagggactgcagccgtttcaggtgccttggcgtctgcccggcgccgaggttgcccagcccagatcctgggggagggcggaagatggcagcaggcaggcgagggtggtgggtgagggctatggccacagaagtggtggccgcggcagcctgcagtggtgcctggatcagcggggtccagatgacaggcgtgggggttggggtggcagaggcggcggcctggacgcggtgtgcgcagtgtgccatctcccggtcatgctgcacaatctgctggatgatctcgttctcctggtagttgaagacgcccgagttgaggtcgtgctggactttgtggaggaggatggagttcttcttgccgatgcggtccaggcggtccagcgccacagtctcaaaggcccttcgcatcatggggtactcctccagcacctcattgaagttgtccacgctcagcgagtagaggcggcagtaggtgtcggccctcacgctagctgtgcgccggccccgtgtcagcaggcagatctctccaaagtaggagccgtcggccagcttggtctccttgttgcccttggtgagcacgctgaccacgccgtgctggatgaagtacatcttcttgccgatggtgccttcccggatgatgtagtccccgggctggaagacctcgaaacgcagcttggtcagcatggacgtcacgaagttggggtccgcgttggcaaacagtggcatggaggccaccagcttccggcagttaaagttgatgatctcctcccgcaggggctcgctcagctcgcccagaatgctctcctcgtcgaacatcttgccctggtagcggtgctcgtagtagtcgtggatgcgctgccgggtgtcgggcgggagcttgtggaaggacatgtactgctccacctgcttatacttttcctggtactggcgccgggaggagtccagggactggatgagggcagtggcgtggccaatgaacatggcgtagcaggtggcgcccacgatcatgctgagcatggtgagccagacgtcggacatgcccacgggcgcctgccgtccgtagccgatgcacagcatgtggctcatggccttgaagagcgcgtaggagtactgcttcccccaggagttgttcaccatgttgttgatggacacccagcagtcatcaggaaagtcctgcagcatgggtaccaggaactgcaggcagccatcccagtggcagagcaggagcatcatgccgatgaggttcacgatgcgcaccacggcactggccaggtcgtaggtcatgtggaagatctcttcccactggtgaatataccgaatgaggcgggagaggcgtaacaagcgtaagaggctgaggatcttcgtgaagcggacgatgcgcagggcccgggcagtcttgtagacctccgagtcgatgcgtgtctccacaatgaggaagatgtagtccacagggatggaggaaatgaaatctaccatgaaccagcttttcaggtacttcattttaatccgctgtgggtccaggatgatctctgtgttgtcctccaccacgatccctgtgcggaagttgaggaccaagtcgatgaggaagaatgtgtctgacaccacattgaagacaatccagggtgtggtgttctcatccttgaagaaggtgatgcccacaggaatgatgatcaggtttcccaccatcagcagcagcatggtcaggtcccagtaaaatctgaagtcactgtaggggtggataatccaaaatccggccgacttgaccctctcctgctcgcgttccacggctttctggctgccgaacatccttagggagaatttgttgaccccgggttggagcatggccccgaactggcgctgcatgaagccggactggcccaagcgcacctcggcctccggaaggatctggtcgccggtggccgcgcctccctccactttgatagcggtgtccgccgagggctgctcgcaggaggaggaggccggctgcggtggctgctggggcggcggcggcgaggctgcgggctgcgccgaggcgccggggcgctcgggctcggccgccaggcctgggggcgtcctgtcctcgccgggggacgcgtcgccctcggcgatgagccgccgctcctccgcggagtcatgcaggtgtccgtgactgctgccgctccccgnnnnnnnnnnnnnnccgccccggctgcccagcgaggccaggctcccgcggaagcgcctgcagtcgccgttcgtgctggacttgcccgccccgcgggccgacccttcgctgtccgctgccccgagggccgagctccgggactccgtgccacccgcggccgccgagggcgagggcgagggcagtggccgcagccggatgctcctgcggctggggtcttggcggcccccggccccctcctcctcggcgtcctcttcctcgtccatgatccacgccttggcccccacctgctgcgggaggctgtagagccgcttgcgcatggacggtggcagcttgtccatggcgccaggggccggaccgagccgggggtaggggcgcggcgccgcggacgggctccaggtccgcccgccggtcagtccgcccgtggggactcgtccttcgccgccggcgtggggccgcctcaggcgcccatactcgggcaggctgcgcgccgctgggaggctcccagttgcgctccgagtccccgggctcgccgcgctgcgcctcctcccgggccgggctgggcgctcggaccccgcgctacctccttgcctccctccctccctctggcgttcaggggcgcggcgcgcggcccggctccaggcgccccgcccccgcggggaacaatgggcgccggctggagaggctctgcggccgcggcgctcggggaaccgctccggagcgcagagcgcacggcccgcgcgggtcccgggcgtgcgtcccgcgggagggctggctgtccgtctgtctcgccgcccggactttgtggctggccccccgcgacctcgtctcgcctcctctggcccggcccctctggcccgtcccggggctcccgccgcagccaagcggagcccagcgacccgccgggcttacatcagcggccgcctcccccggagcgccctccggccgcgctcgggctcccgcgccccggaatattcatgaagccgccgcagcacgcgggttgccataggagcggctcca

SEQ ID NO: 71 - DNA, 3838 bp, Homo sapiens
  source 1..3838: mol_type = genomic DNA
gattccgagcctacgacgcctccgctagagcccgcggggctgcgccgactcctgctctggaggggttgcgggtacctgatggccacagagggctctaggaggccgagcgtgtaagcggggtgggcgccatggaggcagagcagcggccggcggcgggggccagcgaaggggcgacccctggactggaggcggtgcctcccgttgctcccccgcctgcgaccgcggcctcaggtccgatccccaaatctgggcctgagcctaagaggaggcaccttgggacgctgctccagcctacggtcaacaagttctcccttcgggtgttcggcagccacaaagcagtggaaatcgagcaggagcgggtgaagtcagcgggggcctggatcatccacccctacagcgacttccggttttactgggacctgatcatgctgctgctgatggtggggaacctcatcgtcctgcctgtgggcatcaccttcttcaaggaggagaactccccgccttggatcgtcttcaacgtattgtctgatactttcttcctactggatctggtgctcaacttccgaacgggcatcgtggtggaggagggtgctgagatcctgctggcaccgcgggccatccgcacgcgctacctgcgcacctggttcctggttgacctcatctcttctatccctgtggattacatcttcctagtggtggagctggagccacggttggacgctgaggtctacaaaacggcacgggccctacgcatcgttcgcttcaccaagatcctaagcctgctgaggctgctccgcctctcccgcctcatccgctacatacaccagtgggaggagatctttcacatgacctatgacctggccagtgctgtggttcgcatcttcaacctcattgggatgatgctgctgctatgtcactgggatggctgtctgcagttcctggtgcccatgctgcaggacttccctcccgactgctgggtctccatcaaccacatggtgaaccactcgtggggccgccagtattcccatgccctgttcaaggccatgagccacatgctgtgcattggctatgggcagcaggcacctgtaggcatgcccgacgtctggctcaccatgctcagcatgatcgtaggtgccacatgctacgccatgttcatcggccatgccacggcactcatccagtccctggactcttcccggcgtcagtaccaggagaagtacaagcaggtggagcagtacatgtccttccacaagctgccagcagacacgcggcagcgcatccacgagtactatgagcaccgctaccagggcaagatgttcgatgaggaaagcatcctgggcgagctgagcgagccgcttcgcgaggagatcattaacttcacctgtcggggcctggtggcccacatgccgctgtttgcccatgccgaccccagcttcgtcactgcagttctcaccaagctgcgctttgaggtcttccagccgggggatctcgtggtgcgtgagggctccgtggggaggaagatgtacttcatccagcatgggctgctcagtgtgctggcccgcggcgcccgggacacacgcctcaccgatggatcctactttggggagatctgcctgctaactaggggccggcgcacagccagtgttcgggctgacacctactgccgcctttactcactcagcgtggaccatttcaatgctgtgcttgaggagttccccatgatgcgccgggcctttgagactgtggccatggatcggctgctccgcatcggcaagaagaattccatactgcagcggaagcgctccgagccaagtccaggcagcagtggtggcatcatggagcagcacttggtgcaacatgacagagacatggctcggggtgttcggggtcgggccccgagcacaggagctcagcttagtggaaagccagtactgtgggagccactggtacatgcgccccttcaggcagctgctgtgacctccaatgtggccattgccctgactcatcagcggggccctctgcccctctcccctgactctccagccaccctccttgctcgctctgcttggcgctcagcaggctctccagcttccccgctggtgcccgtccgagctggcccatgggcatccacctcccgcctgcccgccccacctgcccgaaccctgcacgccagcctatcccgggcagggcgctcccaggtctccctgctgggtccccctccaggaggaggtggacggcggctaggacctcggggccgcccactctcagcctcccaaccctctctgcctcagcgggcaacaggcgatggctctcctgggcgtaagggatcaggaagtgagcggctgcctccctcagggctcctggccaaacctccaaggacagcccagccccccaggccaccagtgcctgagccagccacaccccggggtctccagctttctgccaacatgtaaaacctttgagtacatccagccttagttcttggggtgcagtagtatgtacccaagggcagatgcctcttggggaaggccatggggacctgaaacattgccccatggaaatgtcgaccctgtgcggacattccgcatactgccatgaagacggtctctgtgtcctcagctcaagaatcctgtagcttgtcccatcataatccattcacccgttcatcatgtgtactgagcagctaccatgttcaaggtaatatgccaggcgctgtatgtctccactgccaagtagaagtgactcaaaaccctctgacaaggatattcccttggctatggtcctgccaggtgcaggcccaggcccatgaccccacctttactaagcacaagtacttgccactgccatcactgccaagtaactagatgtctctgtttccctgccaatgatcctgcaggttctgcccggtctggttatcttcctgttcctgtagcatagccaggcactgccagtcacctgtgcccccattgctgtcagcagatgtcttgggtcctgagtgtgggtatccacttttacccgctcactgccacctgtggacactctgtgtctaccctctgagtgggaacatacttctaagttccctgcagtctctgtcctgtggtagaccatctttttgtaaactgcgagcttcctcttccctgtaccctctgccccagtcgtgaccccctaaaagttaaggggtagttggcacctccttattaatatgccagcctagatcccccccggtggaggggcaaatggctgaatccttgtgtgatatttttttcttcgcttgtttatttattcatttatttaattgtatttattcatttactaactttatgtgttaccaattaattttgtttacccattcctttatccatccctcccctccttttcaggtaaggagacaggaggagtaggaggaggcagggcctctccatgccagcctctgtggtccttgcccaaacccatcagcgcaatacttgaaccttctcccaggtaggggcaggaggagccacatgagagagggagaaggaccgcgtttacctttagagttttgttttgttttttccttctgagtttgctgttggtgcaggaataagggaaaggcccaaggtatccaagcctggggaagggcaggccagccagcacctctgccttctcagggacaagagtagtcctttaccaccctcactctgcctgtcccctctcctactctacagcattaaagactgtgggaccaggaccctaagtctcctttccttctgggtggggagttctggggttcttggtgtgtgggagaagttttataattgcttccaaacagctgggtttaaatataaaatagacacactca

SEQ ID NO: 72 - DNA, 3838 bp, Homo sapiens
  source 1..3838: mol_type = genomic DNA
tgagtgtgtctattttatatttaaacccagctgtttggaagcaattataaaacttctcccacacaccaagaaccccagaactccccacccagaaggaaaggagacttagggtcctggtcccacagtctttaatgctgtagagtaggagaggggacaggcagagtgagggtggtaaaggactactcttgtccctgagaaggcagaggtgctggctggcctgcccttccccaggcttggataccttgggcctttcccttattcctgcaccaacagcaaactcagaaggaaaaaacaaaacaaaactctaaaggtaaacgcggtccttctccctctctcatgtggctcctcctgcccctacctgggagaaggttcaagtattgcgctgatgggtttgggcaaggaccacagaggctggcatggagaggccctgcctcctcctactcctcctgtctccttacctgaaaaggaggggagggatggataaaggaatgggtaaacaaaattaattggtaacacataaagttagtaaatgaataaatacaattaaataaatgaataaataaacaagcgaagaaaaaaatatcacacaaggattcagccatttgcccctccaccgggggggatctaggctggcatattaataaggaggtgccaactaccccttaacttttagggggtcacgactggggcagagggtacagggaagaggaagctcgcagtttacaaaaagatggtctaccacaggacagagactgcagggaacttagaagtatgttcccactcagagggtagacacagagtgtccacaggtggcagtgagcgggtaaaagtggatacccacactcaggacccaagacatctgctgacagcaatgggggcacaggtgactggcagtgcctggctatgctacaggaacaggaagataaccagaccgggcagaacctgcaggatcattggcagggaaacagagacatctagttacttggcagtgatggcagtggcaagtacttgtgcttagtaaaggtggggtcatgggcctgggcctgcacctggcaggaccatagccaagggaatatccttgtcagagggttttgagtcacttctacttggcagtggagacatacagcgcctggcatattaccttgaacatggtagctgctcagtacacatgatgaacgggtgaatggattatgatgggacaagctacaggattcttgagctgaggacacagagaccgtcttcatggcagtatgcggaatgtccgcacagggtcgacatttccatggggcaatgtttcaggtccccatggccttccccaagaggcatctgcccttgggtacatactactgcaccccaagaactaaggctggatgtactcaaaggttttacatgttggcagaaagctggagaccccggggtgtggctggctcaggcactggtggcctggggggctgggctgtccttggaggtttggccaggagccctgagggaggcagccgctcacttcctgatcccttacgcccaggagagccatcgcctgttgcccgctgaggcagagagggttgggaggctgagagtgggcggccccgaggtcctagccgccgtccacctcctcctggagggggacccagcagggagacctgggagcgccctgcccgggataggctggcgtgcagggttcgggcaggtggggcgggcaggcgggaggtggatgcccatgggccagctcggacgggcaccagcggggaagctggagagcctgctgagcgccaagcagagcgagcaaggagggtggctggagagtcaggggagaggggcagagggccccgctgatgagtcagggcaatggccacattggaggtcacagcagctgcctgaaggggcgcatgtaccagtggctcccacagtactggctttccactaagctgagctcctgtgctcggggcccgaccccgaacaccccgagccatgtctctgtcatgttgcaccaagtgctgctccatgatgccaccactgctgcctggacttggctcggagcgcttccgctgcagtatggaattcttcttgccgatgcggagcagccgatccatggccacagtctcaaaggcccggcgcatcatggggaactcctcaagcacagcattgaaatggtccacgctgagtgagtaaaggcggcagtaggtgtcagcccgaacactggctgtgcgccggcccctagttagcaggcagatctccccaaagtaggatccatcggtgaggcgtgtgtcccgggcgccgcgggccagcacactgagcagcccatgctggatgaagtacatcttcctccccacggagccctcacgcaccacgagatcccccggctggaagacctcaaagcgcagcttggtgagaactgcagtgacgaagctggggtcggcatgggcaaacagcggcatgtgggccaccaggccccgacaggtgaagttaatgatctcctcgcgaagcggctcgctcagctcgcccaggatgctttcctcatcgaacatcttgccctggtagcggtgctcatagtactcgtggatgcgctgccgcgtgtctgctggcagcttgtggaaggacatgtactgctccacctgcttgtacttctcctggtactgacgccgggaagagtccagggactggatgagtgccgtggcatggccgatgaacatggcgtagcatgtggcacctacgatcatgctgagcatggtgagccagacgtcgggcatgcctacaggtgcctgctgcccatagccaatgcacagcatgtggctcatggccttgaacagggcatgggaatactggcggccccacgagtggttcaccatgtggttgatggagacccagcagtcgggagggaagtcctgcagcatgggcaccaggaactgcagacagccatcccagtgacatagcagcagcatcatcccaatgaggttgaagatgcgaaccacagcactggccaggtcataggtcatgtgaaagatctcctcccactggtgtatgtagcggatgaggcgggagaggcggagcagcctcagcaggcttaggatcttggtgaagcgaacgatgcgtagggcccgtgccgttttgtagacctcagcgtccaaccgtggctccagctccaccactaggaagatgtaatccacagggatagaagagatgaggtcaaccaggaaccaggtgcgcaggtagcgcgtgcggatggcccgcggtgccagcaggatctcagcaccctcctccaccacgatgcccgttcggaagttgagcaccagatccagtaggaagaaagtatcagacaatacgttgaagacgatccaaggcggggagttctcctccttgaagaaggtgatgcccacaggcaggacgatgaggttccccaccatcagcagcagcatgatcaggtcccagtaaaaccggaagtcgctgtaggggtggatgatccaggcccccgctgacttcacccgctcctgctcgatttccactgctttgtggctgccgaacacccgaagggagaacttgttgaccgtaggctggagcagcgtcccaaggtgcctcctcttaggctcaggcccagatttggggatcggacctgaggccgcggtcgcaggcgggggagcaacgggaggcaccgcctccagtccaggggtcgccccttcgctggcccccgccgccggccgctgctctgcctccatggcgcccaccccgcttacacgctcggcctcctagagccctctgtggccatcaggtacccgcaacccctccagagcaggagtcggcgcagccccgcgggctctagcggaggcgtcgtaggctcggaatc

SEQ ID NO: 73 - DNA, 3268 bp, Mus musculus
  source 1..3268: mol_type = genomic DNA
gcgggtcggagctcccctgcctgggctgctctcccagagacttgcgcgcccgccatggccctggaccggttggggaggccctacgagtgagggcaatcatggaggaggaggcgcggccggcggcgggggccggcgaagcggcgacccctgcacgcgagacgcctcctgcggctccggcccaggcccgcgcggcctcaggtggggtgccggagtctgcgcccgagccgaagaggcggcagctcgggacgctgctgcagccgacggtcaacaagttctctctccgggtcttcggcagccacaaagcagtagaaatcgagcaggagagggtgaagtccgccggggcctggatcatccacccctacagcgacttccggttttactgggatctcatcatgctgctgctgatggtggggaacctcatagttctgcctgtgggtatcactttcttcaaggaggagaactctccaccctggatcgtcttcaatgtcctctctgacactttcttcctgctggatctggtgctcaacttccgaactggcatcgtggtggaggaaggtgccgagatcctgctggcgccaagggccatccgaacgcgttacctgcgcacctggttcctggttgatctgatctcctccatccctgtggattatatcttcctagtggtggagctggagccacgactagatgctgaggtctacaaaacggcacgggccctgcgcatcgttagattcaccaagatccttagcctgctgcggctgctccgcctctcccgcctcatccgctacatacaccagtgggaggagatctttcacatgacctacgacctggccagtgcagtggttcgcatcttcaacctcattggaatgatgttgctgctgtgtcactgggacggctgtctgcagtttctggtccctatgctgcaggacttcccgtccgactgctgggtctccatgaaccgcatggtgaaccactcgtggggccgccagtattcccacgccctgttcaaggccatgagtcacatgctatgcattggctatgggcagcaggcaccggtaggcatgcctgacgtctggctcaccatgctcagtatgattgtgggcgccacgtgttatgccatgttcatcggtcacgccaccgccctcatccagtccctggactcttcccggcgacagtaccaggagaagtacaagcaggtggagcagtacatgtccttccacaagctgcccgctgacacccggcagcgcatccacgagtactacgagcatcgctaccagggcaagatgtttgatgaagagagcatcctgggggagctgagcgagccacttcgggaggagattattaacttcacctgccggggcctggtggcccacatgccgctgtttgctcatgctgaccccagcttcgtcaccgcagtgctcaccaagctccgttttgaggtcttccaaccaggggacctggtggtgcgtgagggctccgtgggcaggaagatgtacttcatccagcacgggctgctgagtgtgctggcacgtggcgcccgcgacacccgcctcactgatggatcctactttggggagatctgcctgctgactcgaggtcggagaacagccagtgtaagggctgacacctattgtcgcctctactcgctcagcgtggaccacttcaatgcggtgcttgaggagttcccaatgatgcgcagggcttttgagacggtggccatggaccggcttcggcgcatcggcaaaaagaattcgatactgcagcggaaacgctctgagccgagtccaggcagcagcggtggcgtcatggagcagcatttggtacaacacgacagagacatggctcgtggtgttcggggcctggctcctggtacaggagctcgactcagtggaaagccagtgctgtgggaaccactggtgcacgcccctctgcaggcagctgctgtgacctccaacgtggccatagccttgactcaccagcgaggccctctgcccctctcccctgattctccagccaccctcctagctcgatctgctagacgctcagcaggctccccagcctccccactggtgcctgtccgagcaggtcctctgctggcccggggaccctgggcgtccacttctcgcctgcctgctccacctgcccgaaccctccatgccagcctatcccggacagggcgttcccaggtatctctgttgggccctcccccaggaggaggtgctcggaggctaggacctcggggccgcccactttctgcctcgcaaccctctctgcctcagcgagcaacaggggatggctctcctaggcgtaaaggctctggaagtgagcgcctgcccccctctgggctcttggccaaacctccagggacagtccagccacccaggtcatcagtgcctgagccagttacccccagaggtccccaaatttctgccaacatgtgaaatcctaggttacactggccttagctattggcacgcaataacgtgtgcccgagggtagacgccccttgggggaaggctgtgggggacctaacatactgccctttatcaccacaaagctattctctgtgtcctcagctcaaagcagctgcagcctgctaatcctaatcacatacccatttgtcattggtaccccatgcctaccatgttcaaggcactgtgctaggtactgtgtatccactgccaagtagaaataactcgaagccctttaacaagggtgtccccaggccacggtcctgccaggcgcaggcctgggcccacagccctgcctttattaagcacaagtacttgctgcctccatcactgccgagtaactagacggctgtctccctgtcagtgaccctgcaggtggtgccagtgcgtcctctcttcccatctcctttgtcgtagctgggtaccgtcaattatctagtacagccaacagatgtctagagccctgggtgtgaacatcgaccctctgactggcacctgtgggccctccttgtccacaccaagtgagaatccacgtctgcccactgtagtctgccctccgcagctcctgtgtggacgcactacctttatgagctagaagctgctcttcactgtgccccctgcctcagtggtgttgcccctaaagctaaggggcacgcggcacctccttacctactgtgccagcctagttccccccaggtagggggccaggggctgaatcctcatgtgaccttttatctttccctctttgtcttatttatttggtcgtttattaattttatttattcatttgctaaaaaaaa

SEQ ID NO: 74 - DNA, 3268 bp, Mus musculus
  source 1..3268: mol_type = genomic DNA
ttttttttagcaaatgaataaataaaattaataaacgaccaaataaataagacaaagagggaaagataaaaggtcacatgaggattcagcccctggccccctacctggggggaactaggctggcacagtaggtaaggaggtgccgcgtgccccttagctttaggggcaacaccactgaggcagggggcacagtgaagagcagcttctagctcataaaggtagtgcgtccacacaggagctgcggagggcagactacagtgggcagacgtggattctcacttggtgtggacaaggagggcccacaggtgccagtcagagggtcgatgttcacacccagggctctagacatctgttggctgtactagataattgacggtacccagctacgacaaaggagatgggaagagaggacgcactggcaccacctgcagggtcactgacagggagacagccgtctagttactcggcagtgatggaggcagcaagtacttgtgcttaataaaggcagggctgtgggcccaggcctgcgcctggcaggaccgtggcctggggacacccttgttaaagggcttcgagttatttctacttggcagtggatacacagtacctagcacagtgccttgaacatggtaggcatggggtaccaatgacaaatgggtatgtgattaggattagcaggctgcagctgctttgagctgaggacacagagaatagctttgtggtgataaagggcagtatgttaggtcccccacagccttcccccaaggggcgtctaccctcgggcacacgttattgcgtgccaatagctaaggccagtgtaacctaggatttcacatgttggcagaaatttggggacctctgggggtaactggctcaggcactgatgacctgggtggctggactgtccctggaggtttggccaagagcccagaggggggcaggcgctcacttccagagcctttacgcctaggagagccatcccctgttgctcgctgaggcagagagggttgcgaggcagaaagtgggcggccccgaggtcctagcctccgagcacctcctcctgggggagggcccaacagagatacctgggaacgccctgtccgggataggctggcatggagggttcgggcaggtggagcaggcaggcgagaagtggacgcccagggtccccgggccagcagaggacctgctcggacaggcaccagtggggaggctggggagcctgctgagcgtctagcagatcgagctaggagggtggctggagaatcaggggagaggggcagagggcctcgctggtgagtcaaggctatggccacgttggaggtcacagcagctgcctgcagaggggcgtgcaccagtggttcccacagcactggctttccactgagtcgagctcctgtaccaggagccaggccccgaacaccacgagccatgtctctgtcgtgttgtaccaaatgctgctccatgacgccaccgctgctgcctggactcggctcagagcgtttccgctgcagtatcgaattctttttgccgatgcgccgaagccggtccatggccaccgtctcaaaagccctgcgcatcattgggaactcctcaagcaccgcattgaagtggtccacgctgagcgagtagaggcgacaataggtgtcagcccttacactggctgttctccgacctcgagtcagcaggcagatctccccaaagtaggatccatcagtgaggcgggtgtcgcgggcgccacgtgccagcacactcagcagcccgtgctggatgaagtacatcttcctgcccacggagccctcacgcaccaccaggtcccctggttggaagacctcaaaacggagcttggtgagcactgcggtgacgaagctggggtcagcatgagcaaacagcggcatgtgggccaccaggccccggcaggtgaagttaataatctcctcccgaagtggctcgctcagctcccccaggatgctctcttcatcaaacatcttgccctggtagcgatgctcgtagtactcgtggatgcgctgccgggtgtcagcgggcagcttgtggaaggacatgtactgctccacctgcttgtacttctcctggtactgtcgccgggaagagtccagggactggatgagggcggtggcgtgaccgatgaacatggcataacacgtggcgcccacaatcatactgagcatggtgagccagacgtcaggcatgcctaccggtgcctgctgcccatagccaatgcatagcatgtgactcatggccttgaacagggcgtgggaatactggcggccccacgagtggttcaccatgcggttcatggagacccagcagtcggacgggaagtcctgcagcatagggaccagaaactgcagacagccgtcccagtgacacagcagcaacatcattccaatgaggttgaagatgcgaaccactgcactggccaggtcgtaggtcatgtgaaagatctcctcccactggtgtatgtagcggatgaggcgggagaggcggagcagccgcagcaggctaaggatcttggtgaatctaacgatgcgcagggcccgtgccgttttgtagacctcagcatctagtcgtggctccagctccaccactaggaagatataatccacagggatggaggagatcagatcaaccaggaaccaggtgcgcaggtaacgcgttcggatggcccttggcgccagcaggatctcggcaccttcctccaccacgatgccagttcggaagttgagcaccagatccagcaggaagaaagtgtcagagaggacattgaagacgatccagggtggagagttctcctccttgaagaaagtgatacccacaggcagaactatgaggttccccaccatcagcagcagcatgatgagatcccagtaaaaccggaagtcgctgtaggggtggatgatccaggccccggcggacttcaccctctcctgctcgatttctactgctttgtggctgccgaagacccggagagagaacttgttgaccgtcggctgcagcagcgtcccgagctgccgcctcttcggctcgggcgcagactccggcaccccacctgaggccgcgcgggcctgggccggagccgcaggaggcgtctcgcgtgcaggggtcgccgcttcgccggcccccgccgccggccgcgcctcctcctccatgattgccctcactcgtagggcctccccaaccggtccagggccatggcgggcgcgcaagtctctgggagagcagcccaggcaggggagctccgacccgc

SEQ ID NO: 75 - DNA, 2343 bp, Rattus norvegicus
  source 1..2343: mol_type = genomic DNA
atggaggaggaggcgcggccggcggtgggggacggggaagcggcgactcctgcacgcgagacgcctcctgcggctcccgcccaggcccgcgcggcctcaggtggggtgccagagtctgcgcccgagccgaagaggcggcagctcgggacgctgctgcagccgaccgtcaacaagttctctctccgggtcttcggcagccacaaagcggtggaaatcgagcaggagagggtgaagtccgccggggcctggatcatccacccctacagcgacttccggttttactgggacctgatcatgctgctgctgatggtggggaacctcatagtactgcccgtgggcatcactttcttcaaggaggagaactccccaccctggatcgtcttcaatgtcctctcggacactttcttcctgctggatctggtgctcaacttccgaactggcatcgtggtggaggaaggtgcggagatcctgttggcgcccagggctatccgcacgcgttacctgcgcacctggttcctggtggacctgatttcctccatccctgtggattacatcttcctagtggtagagctggagccacgactagacgctgaggtctacaaaacggcacgggccctgcgcatcgttagattcaccaagatccttagcctgctgcggctgctccgcctctcccgcctcatccgatacatgcaccagtgggaggagatctttcacatgacctacgacctggccagtgcagtggttcgcatcttcaacctcattggaatgatgttgctgctgtgtcactgggatggctgtctgcagttcctggtccctatgctgcaggacttcccttccgactgctgggtctccatgaaccgcatggtgaaccactcgtggggccgccagtactcccacgccctgttcaaggccatgagtcacatgctgtgcattggctacgggcagcaggcaccagtaggcatgcctgacgtctggctcaccatgctcagcatgattgtgggcgccacctgctatgccatgttcatcggccacgccaccgccctcatccagtccctggactcgtcccggcgccagtaccaggagaagtacaagcaggtggagcagtacatgtccttccacaagctgccagccgacacacggcagcgcatccacgagtactacgagcatcggtaccagggcaagatgttcgatgaagagagcatcctgggggagctgagcgagccgcttcgggaggagattattaacttcacctgccggggcctggtggcccacatgccgctgtttgctcatgctgaccccagtttcgtcaccgcagtactcaccaagctccgttttgaggtcttccaacctggggatctggtggtgcgtgagggctccgtgggcaggaagatgtacttcatccagcatgggctgctcagtgtgttggcacggggcgcccgggacactcgcctcactgacggatcctactttggggagatctgcctgctgactcgaggtcggagaacagccagtgtaagggctgacacctactgtcgcctctactcactcagcgtggaccacttcaatgcagtgcttgaggagttcccgatgatgcgcagggcttttgagactgtggccatggaccggcttcggcgcatcggcaaaaagaattcgatattgcagcggaaacgctctgagccgagtccaggcagcagcagtggtggcgtcatggagcagcatttggtacaacacgacagagacatggctcgtggtattcggggtctggctccgggcacaggagctcgcctcagtggaaagccagtgctgtgggaaccactggtacacgcacctctgcaggcagctgctgtgacctccaacgtggccatagccttgactcatcagcgaggccctctgcccctctcccctgattctccagccaccctcctggctcgatctgctagacgctcagcaggctccccagcctccccactggtgcctgtccgagcaggtcctctgctggcccggggaccctgggcgtccacttctcgcctgcctgctccacctgcccgaaccctccatgccagcctatcccggacagggcgttcccaggtgtctctgttgggccctcccccaggaggaggtggtcggaggctaggacctcggggccgcccactctctgcctctcaaccctctctgcctcagcgagccacgggggatggctctcctaggcgcaaaggctctggaagtgagcgtctgcccccctcggggctcctggccaagcctccagggactgtccagccatccaggtcatcagtgcctgagccagttacccccagaggtccccaaatttctgccaacatgtga

SEQ ID NO: 76 - DNA, 2343 bp, Rattus norvegicus
  source 1..2343: mol_type = genomic DNA
tcacatgttggcagaaatttggggacctctgggggtaactggctcaggcactgatgacctggatggctggacagtccctggaggcttggccaggagccccgaggggggcagacgctcacttccagagcctttgcgcctaggagagccatcccccgtggctcgctgaggcagagagggttgagaggcagagagtgggcggccccgaggtcctagcctccgaccacctcctcctgggggagggcccaacagagacacctgggaacgccctgtccgggataggctggcatggagggttcgggcaggtggagcaggcaggcgagaagtggacgcccagggtccccgggccagcagaggacctgctcggacaggcaccagtggggaggctggggagcctgctgagcgtctagcagatcgagccaggagggtggctggagaatcaggggagaggggcagagggcctcgctgatgagtcaaggctatggccacgttggaggtcacagcagctgcctgcagaggtgcgtgtaccagtggttcccacagcactggctttccactgaggcgagctcctgtgcccggagccagaccccgaataccacgagccatgtctctgtcgtgttgtaccaaatgctgctccatgacgccaccactgctgctgcctggactcggctcagagcgtttccgctgcaatatcgaattctttttgccgatgcgccgaagccggtccatggccacagtctcaaaagccctgcgcatcatcgggaactcctcaagcactgcattgaagtggtccacgctgagtgagtagaggcgacagtaggtgtcagcccttacactggctgttctccgacctcgagtcagcaggcagatctccccaaagtaggatccgtcagtgaggcgagtgtcccgggcgccccgtgccaacacactgagcagcccatgctggatgaagtacatcttcctgcccacggagccctcacgcaccaccagatccccaggttggaagacctcaaaacggagcttggtgagtactgcggtgacgaaactggggtcagcatgagcaaacagcggcatgtgggccaccaggccccggcaggtgaagttaataatctcctcccgaagcggctcgctcagctcccccaggatgctctcttcatcgaacatcttgccctggtaccgatgctcgtagtactcgtggatgcgctgccgtgtgtcggctggcagcttgtggaaggacatgtactgctccacctgcttgtacttctcctggtactggcgccgggacgagtccagggactggatgagggcggtggcgtggccgatgaacatggcatagcaggtggcgcccacaatcatgctgagcatggtgagccagacgtcaggcatgcctactggtgcctgctgcccgtagccaatgcacagcatgtgactcatggccttgaacagggcgtgggagtactggcggccccacgagtggttcaccatgcggttcatggagacccagcagtcggaagggaagtcctgcagcatagggaccaggaactgcagacagccatcccagtgacacagcagcaacatcattccaatgaggttgaagatgcgaaccactgcactggccaggtcgtaggtcatgtgaaagatctcctcccactggtgcatgtatcggatgaggcgggagaggcggagcagccgcagcaggctaaggatcttggtgaatctaacgatgcgcagggcccgtgccgttttgtagacctcagcgtctagtcgtggctccagctctaccactaggaagatgtaatccacagggatggaggaaatcaggtccaccaggaaccaggtgcgcaggtaacgcgtgcggatagccctgggcgccaacaggatctccgcaccttcctccaccacgatgccagttcggaagttgagcaccagatccagcaggaagaaagtgtccgagaggacattgaagacgatccagggtggggagttctcctccttgaagaaagtgatgcccacgggcagtactatgaggttccccaccatcagcagcagcatgatcaggtcccagtaaaaccggaagtcgctgtaggggtggatgatccaggccccggcggacttcaccctctcctgctcgatttccaccgctttgtggctgccgaagacccggagagagaacttgttgacggtcggctgcagcagcgtcccgagctgccgcctcttcggctcgggcgcagactctggcaccccacctgaggccgcgcgggcctgggcgggagccgcaggaggcgtctcgcgtgcaggagtcgccgcttccccgtcccccaccgccggccgcgcctcctcctccat

SEQ ID NO: 77 - DNA, 3844 bp, Macaca mulatta
  source 1..3844: mol_type = genomic DNA
ttccgagcctacgacgcctccgctggaacccgcggggctgcgccgactcccactctggaggggttgggggtacctgatggccacatagggctctaggaggccgagcgtgtaagcggggtgggcgccatggaggcggagcaggggccggttgcgggggccagcgaaggggcgacccctgggctggaggcccccaaggtgcctcccgttgctccccggcctgcgaccgcggcctcaggtccgatccccggatctgagtctgagcctaagagaaggcaccttgggacgctgctccaacctacggtcaacaagttctcccttcgggtgttcggcagccacaaagcagtggaaatcgagcaggagagagtgaagtcagcgggggcctggatcatccacccttacagcgacttccggttttactgggacctgatcatgctgctgctgatggtggggaacctcatcgtcctgcctgtgggtatcaccttcttcaaggaggagaactccccgccttggatcgtcttcaacgtattgtctgatactttcttcctactggatctggtgctgaacttccgaacgggcattgtggtggaggagggtgctgagatcctgctagcaccgcgggccatccgcacgcgctacctgcgcacctggttcctggttgacctcatctcttctatccctgtggattacatcttcctggtggtggagctggagccacagttggacgccgaggtctacaaaacggcacgggccctacgcatcgttcgcttcaccaagatcctaagcctgctgcggctgctccgcctctcccgcctcatccgctatatacaccagtgggaggagatctttcacatgacctatgacctggccagtgctgtggttcgcatcttcaacctcattgggatgatgctgctgctatgtcactgggatggctgtctgcagttcctggtgcccatgctgcaggacttccctcccgactgctgggtctccatcaaccacatggtgaaccactcgtggggccgccaatattcccatgccctgttcaaggccatgagccacatgctgtgcattggctatgggcagcaggcacctgtaggcatgcccgacgtctggctcaccatgctcagcatgatcgtgggtgccacatgctacgccatgttcatcggccacgccacggcactcatccagtccctggactcttcccggcgtcagtaccaggagaagtataagcaggtggagcagtacatgtccttccacaagctgccagcagacacgcggcagcgcatccacgagtactatgagcaccgctaccagggcaagatgttcgacgaggaaagcatcctgggcgagctgagcgagccgcttcgggaggagatcattaacttcacctgtcggggcctggtggcccacatgccgctgtttgcccacgccgaccccagcttcgtcactgcagtcctcaccaagctgcgctttgaggtcttccagccgggggacctcgtggtgcgtgagggctccatggggaggaagatgtacttcatccagcatgggttgctcagtgtgctggcccgcggcgcccgggacacacgcctcaccgatggatcctactttggggagatctgcctgctaactaggggccggcgcacagccagtgttcgggctgacacctactgccgcctctactcactcagtgtggaccatttcaacgctgtgctcgaggagttccccatgatgcgccgggcctttgagaccgtggccatggatcggctgcgccgcattggcaagaagaattccatactgcagcggaagcgctctgagccaagtccaggcagcagtggtggtggcatcatggagcagcacttggtgcaacatgacagagacatggctcgtggtgttcggggtctggccccgagcacaggagctcggctcagtggaaagccagtactgtgggagccactggtacatgcgccccttcaggcagctgctgttacctccaatgtggccattgccctgactcaccagcggggccctctgcccctctcccctgactctccagccaccctccttgctcgctctgctcggcgctcagcagggtctccagcttccccgctggtgcccgtccgagctggcccgtgggcatccacctcccgcctgcccgccccacctgcccgaaccctgcatgccagcctatcccgggcagggtgctcccaggtctccctgctgggtccccccccaggaggaggtggacggcggctaggacctcgaggccgcccactgtcagcctcccaaccctctctgcctcagcgggcatcaggcgatggctctcctgggcgtaagggatcaggaaatgagcggctgcctccctcagggctcctggccaagcctccaaggacagcccagccccccaggccaccagtgcctgagccagccaccccccggggtctccagctttctgccaacatgtaaaacccttgagtatatccagccttagttcttggggtgcagtagtatgtactctaaggcagatgcctcttggggaaggccgtggggacctgaaacattgccccatggaaatgtcgaccctgtgcggacattccccatactgccatgaagacggtctctgctcaagaatcctgtagcttgtcccatcataatccattcacccattcatcatgtgtactgagcagctaccatgttcaaggtaatatgccaggcgctgtatgtctccactgccaagtagaagtgactcaaaaccctctgacaagaatattcccctggctatggtcctgccaggtgcaggcccaggcccatgaccccacctttactaagcacaagtacttgccaccgccatcactgccaagtagctagatgtctctgtttccctgccgatgatcctgcaggttctgcctggcctggttatcttcctgttcctgtagcatagccaggcactgccaatcacctgcgcccccattactgccagcagatgtcttgagtcctgagtgtaggtatccacctttacccactcactgccacctgtggacactccgtgtctaccccctgagtgggagcacacttctaagttccctgcagtctctgtcctgtggtagaccatctttttgtaaaccgggaggtgcctctcccctgtaccctctgccccagtcatgcccccctaaaggttaaggagtagttggcacctccttattaatatgccagcctagatccccgctggtggaggggcaaatggctgaatccttgtgagagatttttttctttgcttgtttatttatttattcatttatttaattgtatttattcatttactaattttatgtgttaccaattcattttgtttacccattcctttatccatccctcccctccttttcagataaggagacaggaggagtaggaggaggcagggcctctccatgccagcctctgtggtcctttcccaaacccatcagcgcaatacttgaaccttctcccaggtaggggcaggaggagccacatgagagaggagaaaggactgtgtttacctttagagttttgttttgtttttttccttctgagtttgctgttggtgcaggagtaagggaaaggcccaaggtatccaagcctgggaagggcaggccagccagcacctctgccttctcagggacaagagcagtcctttaccacactcactcactctgtctgtcccctctgctactctacagcattagagactgtggggccaggaccccaagtctcctttccttctgggtggggagttctggggttgttggtgtgtgggagaagttttataattgcttccaaacagctgggtttaaatataaaatagacacactca

SEQ ID NO: 78 - DNA, 3844 bp, Macaca mulatta
  source 1..3844: mol_type = genomic DNA
tgagtgtgtctattttatatttaaacccagctgtttggaagcaattataaaacttctcccacacaccaacaaccccagaactccccacccagaaggaaaggagacttggggtcctggccccacagtctctaatgctgtagagtagcagaggggacagacagagtgagtgagtgtggtaaaggactgctcttgtccctgagaaggcagaggtgctggctggcctgcccttcccaggcttggataccttgggcctttcccttactcctgcaccaacagcaaactcagaaggaaaaaaacaaaacaaaactctaaaggtaaacacagtcctttctcctctctcatgtggctcctcctgcccctacctgggagaaggttcaagtattgcgctgatgggtttgggaaaggaccacagaggctggcatggagaggccctgcctcctcctactcctcctgtctccttatctgaaaaggaggggagggatggataaaggaatgggtaaacaaaatgaattggtaacacataaaattagtaaatgaataaatacaattaaataaatgaataaataaataaacaagcaaagaaaaaaatctctcacaaggattcagccatttgcccctccaccagcggggatctaggctggcatattaataaggaggtgccaactactccttaacctttaggggggcatgactggggcagagggtacaggggagaggcacctcccggtttacaaaaagatggtctaccacaggacagagactgcagggaacttagaagtgtgctcccactcagggggtagacacggagtgtccacaggtggcagtgagtgggtaaaggtggatacctacactcaggactcaagacatctgctggcagtaatgggggcgcaggtgattggcagtgcctggctatgctacaggaacaggaagataaccaggccaggcagaacctgcaggatcatcggcagggaaacagagacatctagctacttggcagtgatggcggtggcaagtacttgtgcttagtaaaggtggggtcatgggcctgggcctgcacctggcaggaccatagccaggggaatattcttgtcagagggttttgagtcacttctacttggcagtggagacatacagcgcctggcatattaccttgaacatggtagctgctcagtacacatgatgaatgggtgaatggattatgatgggacaagctacaggattcttgagcagagaccgtcttcatggcagtatggggaatgtccgcacagggtcgacatttccatggggcaatgtttcaggtccccacggccttccccaagaggcatctgccttagagtacatactactgcaccccaagaactaaggctggatatactcaagggttttacatgttggcagaaagctggagaccccggggggtggctggctcaggcactggtggcctggggggctgggctgtccttggaggcttggccaggagccctgagggaggcagccgctcatttcctgatcccttacgcccaggagagccatcgcctgatgcccgctgaggcagagagggttgggaggctgacagtgggcggcctcgaggtcctagccgccgtccacctcctcctggggggggacccagcagggagacctgggagcaccctgcccgggataggctggcatgcagggttcgggcaggtggggcgggcaggcgggaggtggatgcccacgggccagctcggacgggcaccagcggggaagctggagaccctgctgagcgccgagcagagcgagcaaggagggtggctggagagtcaggggagaggggcagagggccccgctggtgagtcagggcaatggccacattggaggtaacagcagctgcctgaaggggcgcatgtaccagtggctcccacagtactggctttccactgagccgagctcctgtgctcggggccagaccccgaacaccacgagccatgtctctgtcatgttgcaccaagtgctgctccatgatgccaccaccactgctgcctggacttggctcagagcgcttccgctgcagtatggaattcttcttgccaatgcggcgcagccgatccatggccacggtctcaaaggcccggcgcatcatggggaactcctcgagcacagcgttgaaatggtccacactgagtgagtagaggcggcagtaggtgtcagcccgaacactggctgtgcgccggcccctagttagcaggcagatctccccaaagtaggatccatcggtgaggcgtgtgtcccgggcgccgcgggccagcacactgagcaacccatgctggatgaagtacatcttcctccccatggagccctcacgcaccacgaggtcccccggctggaagacctcaaagcgcagcttggtgaggactgcagtgacgaagctggggtcggcgtgggcaaacagcggcatgtgggccaccaggccccgacaggtgaagttaatgatctcctcccgaagcggctcgctcagctcgcccaggatgctttcctcgtcgaacatcttgccctggtagcggtgctcatagtactcgtggatgcgctgccgcgtgtctgctggcagcttgtggaaggacatgtactgctccacctgcttatacttctcctggtactgacgccgggaagagtccagggactggatgagtgccgtggcgtggccgatgaacatggcgtagcatgtggcacccacgatcatgctgagcatggtgagccagacgtcgggcatgcctacaggtgcctgctgcccatagccaatgcacagcatgtggctcatggccttgaacagggcatgggaatattggcggccccacgagtggttcaccatgtggttgatggagacccagcagtcgggagggaagtcctgcagcatgggcaccaggaactgcagacagccatcccagtgacatagcagcagcatcatcccaatgaggttgaagatgcgaaccacagcactggccaggtcataggtcatgtgaaagatctcctcccactggtgtatatagcggatgaggcgggagaggcggagcagccgcagcaggcttaggatcttggtgaagcgaacgatgcgtagggcccgtgccgttttgtagacctcggcgtccaactgtggctccagctccaccaccaggaagatgtaatccacagggatagaagagatgaggtcaaccaggaaccaggtgcgcaggtagcgcgtgcggatggcccgcggtgctagcaggatctcagcaccctcctccaccacaatgcccgttcggaagttcagcaccagatccagtaggaagaaagtatcagacaatacgttgaagacgatccaaggcggggagttctcctccttgaagaaggtgatacccacaggcaggacgatgaggttccccaccatcagcagcagcatgatcaggtcccagtaaaaccggaagtcgctgtaagggtggatgatccaggcccccgctgacttcactctctcctgctcgatttccactgctttgtggctgccgaacacccgaagggagaacttgttgaccgtaggttggagcagcgtcccaaggtgccttctcttaggctcagactcagatccggggatcggacctgaggccgcggtcgcaggccggggagcaacgggaggcaccttgggggcctccagcccaggggtcgccccttcgctggcccccgcaaccggcccctgctccgcctccatggcgcccaccccgcttacacgctcggcctcctagagccctatgtggccatcaggtacccccaacccctccagagtgggagtcggcgcagccccgcgggttccagcggaggcgtcgtaggctcggaa

SEQ ID NO: 79 - DNA, 3882 bp, Macaca fascicularis
  source 1..3882: mol_type = genomic DNA
agtctagcgcacaccccctccgccccgcgcgccggcggttccgagcctacgacgcctccgctggaacccgcggggctgcgccgactcccactctggaggggttgggggtacctgatggccacatagggctctaggaggcggagcgtgtaagcggggtgggcgccatggaggcggagcaggggccggttgcgggggccagcgaaggggcgacccctgggctggaggcccccaaggtgcctcccgttgctccccggcctgcgaccgcggcctcaggtccgatccccggatctgagtctgagcctaagagaaggcaccttgggacgctgctccaacctacggtcaacaagttctcccttcgggtgttcggcagccacaaagcagtggaaatcgagcaggagagagtgaagtcagcgggggcctggatcatccacccttacagcgacttccggttttactgggacctgatcatgctgctgctgatggtggggaacctcatcgtcctgcctgtgggtatcaccttcttcaaggaggagaactccccgccttggatcgtcttcaacgtattgtctgatactttcttcctactggatctggtgctcaacttccgaacgggcattgtggtggaggagggtgctgagatcctgctagcaccgcgggccatccgcacgcgctacctgcgcacctggttcctggttgacctcatctcttctatccctgtggattacatcttcctggtggtggagctggagccacagttggacgctgaggtctacaaaacggcacgggccctacgcatcgttcgcttcaccaagatcctaagcctgctgcggctgctccgcctctcccgcctcatccgctatatacaccagtgggaggagatctttcacatgacctatgacctggccagtgctgtggttcgcatcttcaacctcattgggatgatgctgctgctatgtcactgggatggctgtctgcagttcctggtgcccatgctgcaggacttccctcccgactgctgggtctccatcaaccacatggtgaaccactcgtggggccgccaatattcccatgccctgttcaaggccatgagccacatgctgtgcattggctatgggcagcaggcacctgtaggcatgcccgacgtctggctcaccatgctcagcatgatcgtgggtgccacatgctacgccatgttcatcggccacgccacggcactcatccagtccctggactcttcccggcgtcagtaccaggagaagtataagcaggtggagcagtacatgtccttccacaagctgccagcagacacgcggcagcgcatccacgagtactatgagcaccgctaccagggcaagatgttcgacgaggaaagcatcctgggcgagctgagcgagccgcttcgggaggagatcattaacttcacctgtcggggcctggtggcccacatgccgctgtttgcccacgccgaccccagcttcgtcactgcagtcctcaccaagctgcgctttgaggtcttccagccgggggacctcgtggtgcgtgagggctccatggggaggaagatgtacttcatccagcatgggttgctcagtgtgctggcccgcggcgcccgggacacacgcctcaccgatggatcctactttggggagatctgcctgctaactaggggccggcgcacagccagtgttcgggctgacacctactgccgcctctactcactcagtgtggaccatttcaacgctgtgctcgaggagttccccatgatgcgccgggcctttgagaccgtggccatggatcggctgcgccgcatcggcaagaagaattccatactgcagcggaagcgctctgagccaagtccaggcagcagtggtggtggcatcatggagcagcacttggtgcaacatgacagagacatggctcgtggtgttcggggtctggccccgagcacaggagctcggctcagtggaaagccagtactgtgggagccactggtacatgcaccccttcaggcagctgctgttacctccaatgtggccattgccctgactcaccagcggggccctctgcccctctcccctgactctccggccaccctccttgctcgctctgctcggcgctcagcagggtctccagcttccccgctggtgcccgtccgagctggcccgtgggcatccacctcccgcctgcccgccccacctgcccgaaccctgcatgccagcctatcccgggcagggtgctcccaggtctccctgctgtgtccccccccaggaggaggtggacggcggctaggacctcgaggccgcccactgtcagcctcccaaccctctctgcctcagcgggcatcaggcgatggctctcctgggcgtaagggatcaggaaatgagcggctgcctccctcagggctcctggccaagcctccaaggacagcccagccccccaggccaccagtgcctgagccagccaccccccggggtctccagctttctgccaacatgtaaaacccttgagtacatccagccttagttcttggggtgcagtagtatgtaccctaaggcagatgcctcttggggaaggccgtggggacctgaaacattgccccatggaaatgtcgaccctgtgcggacattccccatactgccatgaagacggtctcagctcaagaatcctgtagcttgtcccatcataatccattcacccattcatcatgtgtactgagcagctaccatgttcaaggtaatatgccaggcgctgtatgtctccactgccaagtagaagtgactcaaaaccctctgacaagaatattcccctggctatggtcctgccaggtgcaggcccaggcccatgaccccacctttactaagcacaagtacttgccaccgccatcactgccaagtagctagatgtctctgtttccctgccgatgatcctgcaggttctgcctggcctggttatcttcctgttcctgtagcatagccaggcactgccagtcacctgcgcccccattactgccagcagatgtcttgagtcctgagtgtaggtatccacctttacccactcactgccacctgtggacactccgtgcctaccccctgagtgggagcacacttctaagttccctgcagtctctgtcctgtggtagaccatctttttgtaaaccgggaggtgcctctcccctgtaccctctgccccagtcatgcccccctaaaggttaaggagtagttggcacctccttattaatatgccggcctagatccccgctggtggaggggcaaatggctgaatccttgtgagagatttttttctttgcttgtttatttatttattcatttatttaattgtatttattcgtttactaattttatgtgttaccaattcattttgtttacccattcctttatccatccctcccctccttttcagataaggagacaggaggagtaggaggaggcagggcctctccatgccagcctctgtggtcctttcccaaacccatcagcgcaatacttgaaccttctcccaggtaggggcaggaggagccacatgagagagggagaaggactgtgtttacctttagagttttgttttgtttttttccttctgagtttgctgttggtgcaggagtaagggaaaggcccaaggtatccaagcctgggaagggcaggccagccagcacctctgccttctcagggacaagagcagtcctttaccacactcactcactctgtctgtcccctctgctactctacagcattagagactgtggggccaggaccccaagtctcctttccttctgggtggggagttctggggttgttggtgtgtgggagaagttttataattgcttccaaacagctggctttaaatataaaatagacacactca

SEQ ID NO: 80 - DNA, 3882 bp, Macaca fascicularis
  source 1..3882: mol_type = genomic DNA
tgagtgtgtctattttatatttaaagccagctgtttggaagcaattataaaacttctcccacacaccaacaaccccagaactccccacccagaaggaaaggagacttggggtcctggccccacagtctctaatgctgtagagtagcagaggggacagacagagtgagtgagtgtggtaaaggactgctcttgtccctgagaaggcagaggtgctggctggcctgcccttcccaggcttggataccttgggcctttcccttactcctgcaccaacagcaaactcagaaggaaaaaaacaaaacaaaactctaaaggtaaacacagtccttctccctctctcatgtggctcctcctgcccctacctgggagaaggttcaagtattgcgctgatgggtttgggaaaggaccacagaggctggcatggagaggccctgcctcctcctactcctcctgtctccttatctgaaaaggaggggagggatggataaaggaatgggtaaacaaaatgaattggtaacacataaaattagtaaacgaataaatacaattaaataaatgaataaataaataaacaagcaaagaaaaaaatctctcacaaggattcagccatttgcccctccaccagcggggatctaggccggcatattaataaggaggtgccaactactccttaacctttaggggggcatgactggggcagagggtacaggggagaggcacctcccggtttacaaaaagatggtctaccacaggacagagactgcagggaacttagaagtgtgctcccactcagggggtaggcacggagtgtccacaggtggcagtgagtgggtaaaggtggatacctacactcaggactcaagacatctgctggcagtaatgggggcgcaggtgactggcagtgcctggctatgctacaggaacaggaagataaccaggccaggcagaacctgcaggatcatcggcagggaaacagagacatctagctacttggcagtgatggcggtggcaagtacttgtgcttagtaaaggtggggtcatgggcctgggcctgcacctggcaggaccatagccaggggaatattcttgtcagagggttttgagtcacttctacttggcagtggagacatacagcgcctggcatattaccttgaacatggtagctgctcagtacacatgatgaatgggtgaatggattatgatgggacaagctacaggattcttgagctgagaccgtcttcatggcagtatggggaatgtccgcacagggtcgacatttccatggggcaatgtttcaggtccccacggccttccccaagaggcatctgccttagggtacatactactgcaccccaagaactaaggctggatgtactcaagggttttacatgttggcagaaagctggagaccccggggggtggctggctcaggcactggtggcctggggggctgggctgtccttggaggcttggccaggagccctgagggaggcagccgctcatttcctgatcccttacgcccaggagagccatcgcctgatgcccgctgaggcagagagggttgggaggctgacagtgggcggcctcgaggtcctagccgccgtccacctcctcctggggggggacacagcagggagacctgggagcaccctgcccgggataggctggcatgcagggttcgggcaggtggggcgggcaggcgggaggtggatgcccacgggccagctcggacgggcaccagcggggaagctggagaccctgctgagcgccgagcagagcgagcaaggagggtggccggagagtcaggggagaggggcagagggccccgctggtgagtcagggcaatggccacattggaggtaacagcagctgcctgaaggggtgcatgtaccagtggctcccacagtactggctttccactgagccgagctcctgtgctcggggccagaccccgaacaccacgagccatgtctctgtcatgttgcaccaagtgctgctccatgatgccaccaccactgctgcctggacttggctcagagcgcttccgctgcagtatggaattcttcttgccgatgcggcgcagccgatccatggccacggtctcaaaggcccggcgcatcatggggaactcctcgagcacagcgttgaaatggtccacactgagtgagtagaggcggcagtaggtgtcagcccgaacactggctgtgcgccggcccctagttagcaggcagatctccccaaagtaggatccatcggtgaggcgtgtgtcccgggcgccgcgggccagcacactgagcaacccatgctggatgaagtacatcttcctccccatggagccctcacgcaccacgaggtcccccggctggaagacctcaaagcgcagcttggtgaggactgcagtgacgaagctggggtcggcgtgggcaaacagcggcatgtgggccaccaggccccgacaggtgaagttaatgatctcctcccgaagcggctcgctcagctcgcccaggatgctttcctcgtcgaacatcttgccctggtagcggtgctcatagtactcgtggatgcgctgccgcgtgtctgctggcagcttgtggaaggacatgtactgctccacctgcttatacttctcctggtactgacgccgggaagagtccagggactggatgagtgccgtggcgtggccgatgaacatggcgtagcatgtggcacccacgatcatgctgagcatggtgagccagacgtcgggcatgcctacaggtgcctgctgcccatagccaatgcacagcatgtggctcatggccttgaacagggcatgggaatattggcggccccacgagtggttcaccatgtggttgatggagacccagcagtcgggagggaagtcctgcagcatgggcaccaggaactgcagacagccatcccagtgacatagcagcagcatcatcccaatgaggttgaagatgcgaaccacagcactggccaggtcataggtcatgtgaaagatctcctcccactggtgtatatagcggatgaggcgggagaggcggagcagccgcagcaggcttaggatcttggtgaagcgaacgatgcgtagggcccgtgccgttttgtagacctcagcgtccaactgtggctccagctccaccaccaggaagatgtaatccacagggatagaagagatgaggtcaaccaggaaccaggtgcgcaggtagcgcgtgcggatggcccgcggtgctagcaggatctcagcaccctcctccaccacaatgcccgttcggaagttgagcaccagatccagtaggaagaaagtatcagacaatacgttgaagacgatccaaggcggggagttctcctccttgaagaaggtgatacccacaggcaggacgatgaggttccccaccatcagcagcagcatgatcaggtcccagtaaaaccggaagtcgctgtaagggtggatgatccaggcccccgctgacttcactctctcctgctcgatttccactgctttgtggctgccgaacacccgaagggagaacttgttgaccgtaggttggagcagcgtcccaaggtgccttctcttaggctcagactcagatccggggatcggacctgaggccgcggtcgcaggccggggagcaacgggaggcaccttgggggcctccagcccaggggtcgccccttcgctggcccccgcaaccggcccctgctccgcctccatggcgcccaccccgcttacacgctccgcctcctagagccctatgtggccatcaggtacccccaacccctccagagtgggagtcggcgcagccccgcgggttccagcggaggcgtcgtaggctcggaaccgccggcgcgcggggcggagggggtgtgcgctagact

SEQ ID NO: 81 - DNA, 2910 bp, Homo sapiens
  source 1..2910: mol_type = genomic DNA
agagaggggcggctgaaggttgcatctgctggaaggaggcttttcggctgcttggtaacgggctgccagaagagagagaggcagagagcagggcagcggcttcttgacgtcagggccaagcgaggggatcgcgccagcaaccccagctctccccagagaggggccggccgaccgctggagcggagcctgacgccaggcgcccgcggagcgtgagtagggggcgcgggagccggtcagctggggcgcagcatgccctctgctcccgcgccatggagatcgccctggtgcccctggagaacggcggtgccatgaccgtcagaggaggcgatgaggcccgggcaggctgcggccaggccacagggggagagctccagtgtcccccgacggctgggctcagcgatgggcccaaggagccggcgccaaaggggcgcggcgcgcagagagacgcggactcgggagtgcggcccttgcctccgctgccggacccgggagtgcggcccttgcctccgctgccagaggagctgccacggcctcgacggccgcctcccgaggacgaggaggaagaaggcgatcccggcctgggcacggtggaggaccaggctctgggcacggcgtccctgcaccaccagcgcgtccacatcaacatctccgggctgcgctttgagacgcagctgggcaccctggcgcagttccccaacacactcctgggggaccccgccaagcgcctgcgctacttcgaccccctgaggaacgagtacttcttcgaccgcaaccggcccagcttcgacggtatcctctactactaccagtccgggggccgcctgcggaggccggtcaacgtctccctggacgtgttcgcggacgagatacgcttctaccagctgggggacgaggccatggagcgcttccgcgaggatgagggcttcattaaagaagaggagaagcccctgccccgcaacgagttccagcgccaggtgtggcttatcttcgagtatccggagagctctgggtccgcgcgggccatcgccatcgtctcggtcttggttatcctcatctccatcatcaccttctgcttggagaccctgcctgagttcagggatgaacgtgagctgctccgccaccctccggcgccccaccagcctcccgcgcccgcccctggggccaacggcagcggggtcatggccccgccctctggccctacggtggcaccgctcctgcccaggaccctggccgaccccttcttcatcgtggagaccacgtgcgtcatctggttcaccttcgagctgctcgtgcgcttcttcgcctgccccagcaaggcagggttctcccggaacatcatgaacatcatcgatgtggtggccatcttcccctacttcatcaccctgggcaccgaactggcagagcagcagccagggggtggaggaggcggccagaatgggcagcaggccatgtccctggccatcctccgagtcatccgcctggtccgggtgttccgcatcttcaagctctcccgccactccaaggggctgcagatcctgggcaagaccttgcaggcctccatgagggagctggggctgctcatcttcttcctcttcatcggggtcatcctcttctccagtgccgtctacttcgcagaggctgacaaccagggaacccatttctctagcatccctgacgccttctggtgggcagtggtcaccatgaccactgtgggctacggggacatgaggcccatcactgttgggggcaagatcgtgggctcgctgtgtgccatcgccggggtcctcaccattgccctgcctgtgcccgtcatcgtctccaacttcaactacttctaccaccgggaaacggatcacgaggagccggcagtccttaaggaagagcagggcactcagagccaggggccggggctggacagaggagtccagcggaaggtcagcgggagcaggggatccttctgcaaggctggggggaccctggagaatgcagacagtgcccgaaggggcagctgccccctagagaagtgtaacgtcaaggccaagagcaacgtggacttgcggaggtccctttatgccctctgcctggacaccagccgggaaacagatttgtgaaaggagattcaggcagactggtggcagtggagtagggaatgggaggcttgctgaacatggatatctacattataccgcagagtatttgaagtcacactgtaacctcagtctacccctctcctttcactcctttcctccctccctcgatccccccattttctctattctttccatgacacccaagggtcgcctatttttaaaaagtaccacattccatgacgcaggagctgtggaaatggtgagcgctgtgagatggatgtatttgtagccagtctcctatacccagcagagggataacccaaacaaaaatgactctaaatagcccagatcccaagagattatgtaactcctccatccatgtgttccaaatttgctttacatatgattgtatttgtgtataggggaaaatattatttttatgcctggtaagtggctttttgtactgtagttcagatagagatattttgggtatattttcaagatacatgttgtatttatggaagaaagagttgtcctgatgtttttctgtgttacttatattagagtcagagatcttggtatgggctgttctgtttcctgtgtctccaagcctctgtcttttctgggatgtggtattggtgctttgtgtctagggcagagtatgttcttgaagaaaggcaaatctgactttttctgtgcgccttaaacaattcttgtaactttcttcaaaaagcattttaatgatattggaggaatacttctgataatttattgtctttatttttatcccaggaaataaaaggttaccttgttgaggcaa

SEQ ID NO: 82 - DNA, 2910 bp, Homo sapiens
  source 1..2910: mol_type = genomic DNA
ttgcctcaacaaggtaaccttttatttcctgggataaaaataaagacaataaattatcagaagtattcctccaatatcattaaaatgctttttgaagaaagttacaagaattgtttaaggcgcacagaaaaagtcagatttgcctttcttcaagaacatactctgccctagacacaaagcaccaataccacatcccagaaaagacagaggcttggagacacaggaaacagaacagcccataccaagatctctgactctaatataagtaacacagaaaaacatcaggacaactctttcttccataaatacaacatgtatcttgaaaatatacccaaaatatctctatctgaactacagtacaaaaagccacttaccaggcataaaaataatattttcccctatacacaaatacaatcatatgtaaagcaaatttggaacacatggatggaggagttacataatctcttgggatctgggctatttagagtcatttttgtttgggttatccctctgctgggtataggagactggctacaaatacatccatctcacagcgctcaccatttccacagctcctgcgtcatggaatgtggtactttttaaaaataggcgacccttgggtgtcatggaaagaatagagaaaatggggggatcgagggagggaggaaaggagtgaaaggagaggggtagactgaggttacagtgtgacttcaaatactctgcggtataatgtagatatccatgttcagcaagcctcccattccctactccactgccaccagtctgcctgaatctcctttcacaaatctgtttcccggctggtgtccaggcagagggcataaagggacctccgcaagtccacgttgctcttggccttgacgttacacttctctagggggcagctgccccttcgggcactgtctgcattctccagggtccccccagccttgcagaaggatcccctgctcccgctgaccttccgctggactcctctgtccagccccggcccctggctctgagtgccctgctcttccttaaggactgccggctcctcgtgatccgtttcccggtggtagaagtagttgaagttggagacgatgacgggcacaggcagggcaatggtgaggaccccggcgatggcacacagcgagcccacgatcttgcccccaacagtgatgggcctcatgtccccgtagcccacagtggtcatggtgaccactgcccaccagaaggcgtcagggatgctagagaaatgggttccctggttgtcagcctctgcgaagtagacggcactggagaagaggatgaccccgatgaagaggaagaagatgagcagccccagctccctcatggaggcctgcaaggtcttgcccaggatctgcagccccttggagtggcgggagagcttgaagatgcggaacacccggaccaggcggatgactcggaggatggccagggacatggcctgctgcccattctggccgcctcctccaccccctggctgctgctctgccagttcggtgcccagggtgatgaagtaggggaagatggccaccacatcgatgatgttcatgatgttccgggagaaccctgccttgctggggcaggcgaagaagcgcacgagcagctcgaaggtgaaccagatgacgcacgtggtctccacgatgaagaaggggtcggccagggtcctgggcaggagcggtgccaccgtagggccagagggcggggccatgaccccgctgccgttggccccaggggcgggcgcgggaggctggtggggcgccggagggtggcggagcagctcacgttcatccctgaactcaggcagggtctccaagcagaaggtgatgatggagatgaggataaccaagaccgagacgatggcgatggcccgcgcggacccagagctctccggatactcgaagataagccacacctggcgctggaactcgttgcggggcaggggcttctcctcttctttaatgaagccctcatcctcgcggaagcgctccatggcctcgtcccccagctggtagaagcgtatctcgtccgcgaacacgtccagggagacgttgaccggcctccgcaggcggcccccggactggtagtagtagaggataccgtcgaagctgggccggttgcggtcgaagaagtactcgttcctcagggggtcgaagtagcgcaggcgcttggcggggtcccccaggagtgtgttggggaactgcgccagggtgcccagctgcgtctcaaagcgcagcccggagatgttgatgtggacgcgctggtggtgcagggacgccgtgcccagagcctggtcctccaccgtgcccaggccgggatcgccttcttcctcctcgtcctcgggaggcggccgtcgaggccgtggcagctcctctggcagcggaggcaagggccgcactcccgggtccggcagcggaggcaagggccgcactcccgagtccgcgtctctctgcgcgccgcgcccctttggcgccggctccttgggcccatcgctgagcccagccgtcgggggacactggagctctccccctgtggcctggccgcagcctgcccgggcctcatcgcctcctctgacggtcatggcaccgccgttctccaggggcaccagggcgatctccatggcgcgggagcagagggcatgctgcgccccagctgaccggctcccgcgccccctactcacgctccgcgggcgcctggcgtcaggctccgctccagcggtcggccggcccctctctggggagagctggggttgctggcgcgatcccctcgcttggccctgacgtcaagaagccgctgccctgctctctgcctctctctcttctggcagcccgttaccaagcagccgaaaagcctccttccagcagatgcaaccttcagccgcccctctct

SEQ ID NO: 83 - DNA, 3032 bp, Mus musculus
  source 1..3032: mol_type = genomic DNA
tggggccccagctgaaccctccagagagacactctctgactccgtccccagaggagaaacaggagggggaggaggagaggagggagccacagagggcggaggccggggagctcagccagagaggggctgctggaggttgcatctgctggaaggaggtttttctgctgcctggtaaccagctgccagaacactgagagggagagagagaggcagggagcaggggcagcagcttcttgacgtcaggaccagccaaggggatccagccagctaccccagccagcctagagccagcgggggccctcggctgaagaggaaaccgcgaggcgcggagcgtgagttggggtgtgggaaccggttgtctgggggcgcagcatgccccttgcccccgggccatggagatctccctggtgcccatggagaacggcagtgccatgaccctcagaggaggaggggaggcaggggcaagctgtgtgcagagccccaggggagagtgtgggtgccctccgacggctggactcaataatcagtccaaagaaacatcaccgaggaggcgcgccacacacgaggatgcgggccagggtgggaggcctttgccccctatgcctcaggagctgccacagcctagaaggccatctgctgaggatgaggagggagaaggcgaccctggcctgggcacagtggaggaggaccaggctcctcaggactcaggatcactccatcaccagcgggtcctcataaacatctcgggtttgcgctttgagacgcagctgggcaccctggcgcagtttcccaacaccctcctgggggacccagtcaaacgcctgcgctacttcgatcccttgagaaatgagtacttcttcgaccgcaaccggcctagcttcgatggcattttgtactactaccagtctgggggccgcctgcgcaggccggtcaatgtctccctggatgtgtttgcagatgagatccgcttttaccagctgggggacgaggccatggagcgcttccgggaggatgaaggcttcatcaaggaagaggagaagcccctgccccgcaatgagttccagcgccaggtgtggcttatcttcgaatacccagaaagctctgggtcagcaagagccattgccatcgtgtcggtcttggtcattctcatctctatcatcaccttctgcttggagactctgcctgagttcagggatgaacgggagctgttacgccaccccccagtgccgccgcagcccccagcccctgccccaggggcaaatggcagtggctctggtgtcctttcctctggccccacagtggctccgctcctgcctaggacactggctgacccattcttcatcgtggagaccacatgtgtgatctggttcacttttgagctgcttgtgcgtttctttgcttgccccagcaaggcagaattctctcggaatattatgaacatcattgatattgtggccatcttcccctactttatcaccctgggcaccgagctggcagagcaacaaccagggggtggtggtcagaatgggcagcaggccatgtccctagccatcctcagggtgatccgcctggtccgggtgttccgaatcttcaagctctcccgccactccaagggactgcagatcctgggtaagaccttacaggcgtccatgcgggagctcgggctgctcatcttcttcctcttcatcggagtcatcctcttctccagcgctgtctacttcgcagaggcagacaatcaggggtcgcacttctccagtatcccggatgcattctggtgggcagtagtcactatgaccactgtaggctacggggacatgaggcccatcactgtagggggcaagattgtgggctcactgtgcgccatagctggggtcctcaccattgctctgcctgtgcccgtcatcgtctccaattttaattacttctatcatcgggagacagaccacgaggagcaggctgccctgaaggaagagcaaggcatccagaggcgggagtctgggctggacacaggaggtcaacggaaggtcagctgcagcaaggcctccttctgcaagactgggggacccctggagagtactgacagtatcagaaggggtagctgtcctctagaaaagtgtcacctaaaggccaagagcaacgtggacctgcgaaggtctctgtatgccctctgtctggacactagccgggaaacagatttgtaaagagagatcaaggcagacttgcaacagcagagctgggaaccggttcctcttgagcttgcttatctgctttacaccatagagtatttaagcccacctggtcacccatcaaagtccggatcctgtctttccccgtttacccttcccaccctcctgccctctaacttccccatccccccccctttccataacaccaagggtcacctatttttaaaaagtatcgcattccatgacgcaggagccgttgaagtggtgagcattcactgtaagatggatgtattcatagccagttttctatacccagcagagggataactcaaacaaaattgactttaaatagctcagatcccaagagagtccatagccctctctattcctgtgttccaaatttactttacacgtgattatatttgtatatggcaaatattattcttatggctgacgagtgcattttgtacagcagtgcacatgaagaatatttgggtgtgttcttaagatgtactttgaattatgaagtcttggggggggtcatcatttcctgggacaacccaggggcagagacactaaagaagttgttcaagtttgtgttcccaagcctcccattattctgggatgtactattggtgctttgtgtctaaggtagagaatgttctagaagagcagcaaacctgcttttttttttattccccttaaacatatcctgtgactttcttcacagaagcattttaaggatgttggaagaaggcttttgagaattcattcttttcattttgatagcaggaaataaaatgtgactctgtcgggcaaaaaaaaaaaaaaaaaaaaaaaaaaaaa

SEQ ID NO: 84 - DNA, 3032 bp, Mus musculus
  source 1..3032: mol_type = genomic DNA
tttttttttttttttttttttttttttttgcccgacagagtcacattttatttcctgctatcaaaatgaaaagaatgaattctcaaaagccttcttccaacatccttaaaatgcttctgtgaagaaagtcacaggatatgtttaaggggaataaaaaaaaaagcaggtttgctgctcttctagaacattctctaccttagacacaaagcaccaatagtacatcccagaataatgggaggcttgggaacacaaacttgaacaacttctttagtgtctctgcccctgggttgtcccaggaaatgatgaccccccccaagacttcataattcaaagtacatcttaagaacacacccaaatattcttcatgtgcactgctgtacaaaatgcactcgtcagccataagaataatatttgccatatacaaatataatcacgtgtaaagtaaatttggaacacaggaatagagagggctatggactctcttgggatctgagctatttaaagtcaattttgtttgagttatccctctgctgggtatagaaaactggctatgaatacatccatcttacagtgaatgctcaccacttcaacggctcctgcgtcatggaatgcgatactttttaaaaataggtgacccttggtgttatggaaagggggggggatggggaagttagagggcaggagggtgggaagggtaaacggggaaagacaggatccggactttgatgggtgaccaggtgggcttaaatactctatggtgtaaagcagataagcaagctcaagaggaaccggttcccagctctgctgttgcaagtctgccttgatctctctttacaaatctgtttcccggctagtgtccagacagagggcatacagagaccttcgcaggtccacgttgctcttggcctttaggtgacacttttctagaggacagctaccccttctgatactgtcagtactctccaggggtcccccagtcttgcagaaggaggccttgctgcagctgaccttccgttgacctcctgtgtccagcccagactcccgcctctggatgccttgctcttccttcagggcagcctgctcctcgtggtctgtctcccgatgatagaagtaattaaaattggagacgatgacgggcacaggcagagcaatggtgaggaccccagctatggcgcacagtgagcccacaatcttgccccctacagtgatgggcctcatgtccccgtagcctacagtggtcatagtgactactgcccaccagaatgcatccgggatactggagaagtgcgacccctgattgtctgcctctgcgaagtagacagcgctggagaagaggatgactccgatgaagaggaagaagatgagcagcccgagctcccgcatggacgcctgtaaggtcttacccaggatctgcagtcccttggagtggcgggagagcttgaagattcggaacacccggaccaggcggatcaccctgaggatggctagggacatggcctgctgcccattctgaccaccaccccctggttgttgctctgccagctcggtgcccagggtgataaagtaggggaagatggccacaatatcaatgatgttcataatattccgagagaattctgccttgctggggcaagcaaagaaacgcacaagcagctcaaaagtgaaccagatcacacatgtggtctccacgatgaagaatgggtcagccagtgtcctaggcaggagcggagccactgtggggccagaggaaaggacaccagagccactgccatttgcccctggggcaggggctgggggctgcggcggcactggggggtggcgtaacagctcccgttcatccctgaactcaggcagagtctccaagcagaaggtgatgatagagatgagaatgaccaagaccgacacgatggcaatggctcttgctgacccagagctttctgggtattcgaagataagccacacctggcgctggaactcattgcggggcaggggcttctcctcttccttgatgaagccttcatcctcccggaagcgctccatggcctcgtcccccagctggtaaaagcggatctcatctgcaaacacatccagggagacattgaccggcctgcgcaggcggcccccagactggtagtagtacaaaatgccatcgaagctaggccggttgcggtcgaagaagtactcatttctcaagggatcgaagtagcgcaggcgtttgactgggtcccccaggagggtgttgggaaactgcgccagggtgcccagctgcgtctcaaagcgcaaacccgagatgtttatgaggacccgctggtgatggagtgatcctgagtcctgaggagcctggtcctcctccactgtgcccaggccagggtcgccttctccctcctcatcctcagcagatggccttctaggctgtggcagctcctgaggcatagggggcaaaggcctcccaccctggcccgcatcctcgtgtgtggcgcgcctcctcggtgatgtttctttggactgattattgagtccagccgtcggagggcacccacactctcccctggggctctgcacacagcttgcccctgcctcccctcctcctctgagggtcatggcactgccgttctccatgggcaccagggagatctccatggcccgggggcaaggggcatgctgcgcccccagacaaccggttcccacaccccaactcacgctccgcgcctcgcggtttcctcttcagccgagggcccccgctggctctaggctggctggggtagctggctggatccccttggctggtcctgacgtcaagaagctgctgcccctgctccctgcctctctctctccctctcagtgttctggcagctggttaccaggcagcagaaaaacctccttccagcagatgcaacctccagcagcccctctctggctgagctccccggcctccgccctctgtggctccctcctctcctcctccccctcctgtttctcctctggggacggagtcagagagtgtctctctggagggttcagctggggcccca

SEQ ID NO: 85 - DNA, 1809 bp, Rattus norvegicus
  source 1..1809: mol_type = genomic DNA
atggagatctccctggtgcccctggagaatggcagtgccatgaccctcagaggaggaggggaggcaggggcaagctgtgtgcagacccccaggggagagtgtgggtgccctccgacgtctggactcaataatcagtccaaagaaacactgttgagggggcgcacaacgctcgaggatgcgaaccagggtggacggcctttgccccctatggctcaggagctgccacaacctagaaggctatctgctgaggatgaggagggagaaggcgaccctggcctgggcacagtggaggaggaccaggctcctcaggatgcagggtcactccatcaccagcgagtcctcataaacatctccgggttgcgtttcgagacgcagctgggcaccctggcacagtttcccaacaccctcctgggggacccagccaagcgcctgcactacttcgaccccttgagaaatgaatacttcttcgaccgcaaccggcccagcttcgatggcattttgtactactaccagtctgggggccgcctgcgcaggcccgtcaatgtctccctggatgtgtttgcagatgagatccgcttttaccagctgggggacgaggccatggagcgcttccgggaggatgagggcttcatcaaggaagaggagaagcccctgccccgcaacgagttccagcgccaggtatggcttatcttcgaatacccagaaagctctgggtccgcaagagccatcgccatagtgtcggtcctggtcattctcatctctatcatcaccttctgcctggagactctgcctgagttcagggatgagcgggagctgctacgccatcccccagtgccgccccagcccccagcccctgcccctgggatcaatggcagcgtctctggagcactttcctctggccctacggtggctccactcttgcctaggacactggccgatccattcttcatcgtggagaccacatgtgtgatctggttcacttttgagttgctcgtgcgcttctttgcctgccccagcaaggcagaattctctcggaatatcatgaacatcatcgatgtcgtggccatcttcccctactttatcaccctgggcaccgagctggcagagcaacaaccagggggagggggtcagaatgggcagcaggccatgtccctagccatcctcagggtgatccgcctggtgcgggtgtttcggatcttcaagctctcccgccactccaagggactgcagatcctgggtaagaccttgcaagcatccatgcgggaactcgggctactcatcttcttcctcttcattggagtcatcctcttctccagcgctgtctacttcgcagaggcagacaatcacgggtcccatttctctagtatcccagatgccttctggtgggcagtagtcactatgaccactgtaggctatggagacatgagacccatcactgtagggggcaagatcgtgggttcactgtgcgccatagctggggtcctcaccattgccctgcctgtccccgtcatcgtctccaactttaattacttctatcatcgggagacagaccacgaggagcaggctgccctgaaggaagaacaaggcaaccagaggcgggagtctgggctggacacagggggtcaacggaaggtcagctgcagcaaggcctccttttgcaagactgggggttccctggagagttctgacagtatcagaaggggtagctgtcctctagaaaagtgtcacctcaaggccaagagcaacgtggacttgcggaggtccctgtatgccctctgtctggacactagccgtgaaacagatttgtaa

SEQ ID NO: 86 - DNA, 1809 bp, Rattus norvegicus
  source 1..1809: mol_type = genomic DNA
ttacaaatctgtttcacggctagtgtccagacagagggcatacagggacctccgcaagtccacgttgctcttggccttgaggtgacacttttctagaggacagctaccccttctgatactgtcagaactctccagggaacccccagtcttgcaaaaggaggccttgctgcagctgaccttccgttgaccccctgtgtccagcccagactcccgcctctggttgccttgttcttccttcagggcagcctgctcctcgtggtctgtctcccgatgatagaagtaattaaagttggagacgatgacggggacaggcagggcaatggtgaggaccccagctatggcgcacagtgaacccacgatcttgccccctacagtgatgggtctcatgtctccatagcctacagtggtcatagtgactactgcccaccagaaggcatctgggatactagagaaatgggacccgtgattgtctgcctctgcgaagtagacagcgctggagaagaggatgactccaatgaagaggaagaagatgagtagcccgagttcccgcatggatgcttgcaaggtcttacccaggatctgcagtcccttggagtggcgggagagcttgaagatccgaaacacccgcaccaggcggatcaccctgaggatggctagggacatggcctgctgcccattctgaccccctccccctggttgttgctctgccagctcggtgcccagggtgataaagtaggggaagatggccacgacatcgatgatgttcatgatattccgagagaattctgccttgctggggcaggcaaagaagcgcacgagcaactcaaaagtgaaccagatcacacatgtggtctccacgatgaagaatggatcggccagtgtcctaggcaagagtggagccaccgtagggccagaggaaagtgctccagagacgctgccattgatcccaggggcaggggctgggggctggggcggcactgggggatggcgtagcagctcccgctcatccctgaactcaggcagagtctccaggcagaaggtgatgatagagatgagaatgaccaggaccgacactatggcgatggctcttgcggacccagagctttctgggtattcgaagataagccatacctggcgctggaactcgttgcggggcaggggcttctcctcttccttgatgaagccctcatcctcccggaagcgctccatggcctcgtcccccagctggtaaaagcggatctcatctgcaaacacatccagggagacattgacgggcctgcgcaggcggcccccagactggtagtagtacaaaatgccatcgaagctgggccggttgcggtcgaagaagtattcatttctcaaggggtcgaagtagtgcaggcgcttggctgggtcccccaggagggtgttgggaaactgtgccagggtgcccagctgcgtctcgaaacgcaacccggagatgtttatgaggactcgctggtgatggagtgaccctgcatcctgaggagcctggtcctcctccactgtgcccaggccagggtcgccttctccctcctcatcctcagcagatagccttctaggttgtggcagctcctgagccatagggggcaaaggccgtccaccctggttcgcatcctcgagcgttgtgcgccccctcaacagtgtttctttggactgattattgagtccagacgtcggagggcacccacactctcccctgggggtctgcacacagcttgcccctgcctcccctcctcctctgagggtcatggcactgccattctccaggggcaccagggagatctccat

SEQ ID NO: 87 - DNA, 3032 bp, Macaca mulatta
  source 1..3032: mol_type = genomic DNA
accagctgcgcccttcggggagacactggctgccacaagacccgggaggcgaagcgggaggagggggaggggaagcaggaggagggggaagggagaggggaaggcgggggaggcgccgagggtggaggccaagcgcagcgcagccagagagggacggctgaaggttgcatctgctggaaggaggcttttcggctgcttggtaacgggctgccagaagagagagaggcagagagcagggcagcggcttcttgacgtcagggccaagcgaggggatcgcgccagcaaccccagctcgccccagagaggggccggccgaccgcgggagcggagcctgacgggaggtgcccggggagcgtgagtagggggcgcgggagcaggtcagctggggcgcagcatgcccgctgctcccgcgccatggagatcgccctggtgcccctggagaacggcggtgccatgaccgtcagaggaggcgatgaggcccgggcaggctgcggccaggccacagggggagagctccagtgtcccccgacggctgggctcagcgatgggcccaaggagccggcgccaaaggggcgcggcgcgcagagagacgcggacccgggagtgcggcccttgcctccgctgcccaaggagctgccacagcctcgacggccgcctcccgaggacgaggaggaagaaggcgaccccggcctgggcacggtggaggaccaggctctgggcacgtcgtccctgcaccaccagcgcgtccacatcaacatctccgggctgcgcttcgagacgcagctgggcaccctggcgcagttccccaacaccctcctgggcgaccccgccaagcgcctgcgctacttcgaccccctgaggaacgagtacttcttcgaccgcaaccggcccagcttcgacggtatcctctactactaccagtcggggggccgcctgcggaggccggtcaacgtctccctggacgtgttcgcggacgagatccgcttctaccagctgggggacgaggccatggagcgcttccgcgaggatgagggtttcattaaagaagaggagaagcccctgccccgcaacgagttccagcgccaggtgtggcttatcttcgagtatccggagagctctgggtccgcgcgggccatcgccatcgtctcggtcttggtcatcctcatctccatcatcaccttctgcttggagaccctgcccgagttcagggatgaacgcgagctgctccgccaccccccagcgccccaccagcctcccgcgcccgcccctgggaccaacggcagcggggtcatggccccgccctctggccctacggtggcaccgctcctgcccaggaccctggccgaccccttcttcatcgtggagaccacgtgcgtcatctggttcaccttcgagctgctcgtgcgcttcttcgcctgccccagcaaggcagggttctcccggaacatcatgaacatcatcgatgtggtggccatcttcccttacttcatcaccctgggcaccgagctggcagagcaacagccagggggcggaggaggcagccagaatgggcagcaggccatgtccctggccatcctcagagtcatccgcctggtccgggtgttccgcatcttcaagctctcccgccactccaaggggctgcagatcctgggcaagaccttgcaggcctccatgagggagctggggttgctcatcttcttcctgttcatcggggtcatcctcttctccagtgccgtctacttcgcagaggctgacaaccaggggacccatttctctagcatccctgatgccttctggtgggcagtggtcaccatgaccactgtgggctacggggacatgaggcccatcaccgtggggggcaagatcgtgggctcgctgtgtgccatcgccggggtcctcaccattgccctgcctgtgcccgtcattgtctccaacttcaactacttctaccaccgggagacggaccacgaggagccggcagtccttaaggaagagcagggccctcagagccaggggccggggctggacagaggagtccagcggaaggtccaggagtccagcgggagcaggggatccttctgcaaggccggggggaccctggagaatgcagacagtgcccgaaggagcagctgccccctagagaagtgtaacgtcaaggccaagagcaacgtggacttgcggaggtccctttatgccctctgcctggacaccagccgggaaacagatttgtaaaaggagattcaggcagactggtggcagtggggtagggaatggaaggcttgctgaacatggatatttacattataccgcagagtatttgaagtcacactgtaacctcagtctacccctctcctttcactcctttcctccctccctcaatccccccattttctctcttctttccatgacacccaagggtcacctatttttaaaaagtaccacattccatgacgcaggagctgttgaaatggtaagcgctgtgagatggatgtatttgtagccagtctcctataccccgcagagggataacccaaacaaaaatgactctaaatagcccagatcccaagagattacgtaactcctccatccatgtgttccaaatttgctttacatatgattacatttgtgtataggggaaaatattatttttatgcctggtaagtggctttttgtactgtagtttagatagagatattttggatatattttcaagatacatgttgtatttatggaagaaagagttgtcctgatgtttttctgtgatacttatattagagccagagatcttggtatgggctgttctggttcctgtgtctccaagcctctgtcttttcccggatgtggtattggtgctttgtgtctagggcagagaatgttcttgaagaaaggcaaatctgactttttctgtgcgccttaaacaattcttgtaactttcttcaaaaagcatttgaatgatattggaggaatacttctgataatttattctctttatttttaatcccaggaaataaaaggttaccttgttgaggcaa

SEQ ID NO: 88 - DNA, 3032 bp, Macaca mulatta
  source 1..3032: mol_type = genomic DNA
ttgcctcaacaaggtaaccttttatttcctgggattaaaaataaagagaataaattatcagaagtattcctccaatatcattcaaatgctttttgaagaaagttacaagaattgtttaaggcgcacagaaaaagtcagatttgcctttcttcaagaacattctctgccctagacacaaagcaccaataccacatccgggaaaagacagaggcttggagacacaggaaccagaacagcccataccaagatctctggctctaatataagtatcacagaaaaacatcaggacaactctttcttccataaatacaacatgtatcttgaaaatatatccaaaatatctctatctaaactacagtacaaaaagccacttaccaggcataaaaataatattttcccctatacacaaatgtaatcatatgtaaagcaaatttggaacacatggatggaggagttacgtaatctcttgggatctgggctatttagagtcatttttgtttgggttatccctctgcggggtataggagactggctacaaatacatccatctcacagcgcttaccatttcaacagctcctgcgtcatggaatgtggtactttttaaaaataggtgacccttgggtgtcatggaaagaagagagaaaatggggggattgagggagggaggaaaggagtgaaaggagaggggtagactgaggttacagtgtgacttcaaatactctgcggtataatgtaaatatccatgttcagcaagccttccattccctaccccactgccaccagtctgcctgaatctccttttacaaatctgtttcccggctggtgtccaggcagagggcataaagggacctccgcaagtccacgttgctcttggccttgacgttacacttctctagggggcagctgctccttcgggcactgtctgcattctccagggtccccccggccttgcagaaggatcccctgctcccgctggactcctggaccttccgctggactcctctgtccagccccggcccctggctctgagggccctgctcttccttaaggactgccggctcctcgtggtccgtctcccggtggtagaagtagttgaagttggagacaatgacgggcacaggcagggcaatggtgaggaccccggcgatggcacacagcgagcccacgatcttgccccccacggtgatgggcctcatgtccccgtagcccacagtggtcatggtgaccactgcccaccagaaggcatcagggatgctagagaaatgggtcccctggttgtcagcctctgcgaagtagacggcactggagaagaggatgaccccgatgaacaggaagaagatgagcaaccccagctccctcatggaggcctgcaaggtcttgcccaggatctgcagccccttggagtggcgggagagcttgaagatgcggaacacccggaccaggcggatgactctgaggatggccagggacatggcctgctgcccattctggctgcctcctccgccccctggctgttgctctgccagctcggtgcccagggtgatgaagtaagggaagatggccaccacatcgatgatgttcatgatgttccgggagaaccctgccttgctggggcaggcgaagaagcgcacgagcagctcgaaggtgaaccagatgacgcacgtggtctccacgatgaagaaggggtcggccagggtcctgggcaggagcggtgccaccgtagggccagagggcggggccatgaccccgctgccgttggtcccaggggcgggcgcgggaggctggtggggcgctggggggtggcggagcagctcgcgttcatccctgaactcgggcagggtctccaagcagaaggtgatgatggagatgaggatgaccaagaccgagacgatggcgatggcccgcgcggacccagagctctccggatactcgaagataagccacacctggcgctggaactcgttgcggggcaggggcttctcctcttctttaatgaaaccctcatcctcgcggaagcgctccatggcctcgtcccccagctggtagaagcggatctcgtccgcgaacacgtccagggagacgttgaccggcctccgcaggcggccccccgactggtagtagtagaggataccgtcgaagctgggccggttgcggtcgaagaagtactcgttcctcagggggtcgaagtagcgcaggcgcttggcggggtcgcccaggagggtgttggggaactgcgccagggtgcccagctgcgtctcgaagcgcagcccggagatgttgatgtggacgcgctggtggtgcagggacgacgtgcccagagcctggtcctccaccgtgcccaggccggggtcgccttcttcctcctcgtcctcgggaggcggccgtcgaggctgtggcagctccttgggcagcggaggcaagggccgcactcccgggtccgcgtctctctgcgcgccgcgcccctttggcgccggctccttgggcccatcgctgagcccagccgtcgggggacactggagctctccccctgtggcctggccgcagcctgcccgggcctcatcgcctcctctgacggtcatggcaccgccgttctccaggggcaccagggcgatctccatggcgcgggagcagcgggcatgctgcgccccagctgacctgctcccgcgccccctactcacgctccccgggcacctcccgtcaggctccgctcccgcggtcggccggcccctctctggggcgagctggggttgctggcgcgatcccctcgcttggccctgacgtcaagaagccgctgccctgctctctgcctctctctcttctggcagcccgttaccaagcagccgaaaagcctccttccagcagatgcaaccttcagccgtccctctctggctgcgctgcgcttggcctccaccctcggcgcctcccccgccttcccctctcccttccccctcctcctgcttcccctccccctcctcccgcttcgcctcccgggtcttgtggcagccagtgtctccccgaagggcgcagctggt

SEQ ID NO: 89 - DNA, 2913 bp, Macaca fascicularis
  source 1..2913: mol_type = genomic DNA
gggtggaggccaagcgcagcgcagccagagagggacggctgaaggttgcatctgctggaaggaggcttttcggctgcttggtaacgggctgccagaagagagagaggcagagagcagggcagcggcttcttgacgtcagggccaagcgaggggatcgcgccagcaaccccagctcgccccagagaggggccggccgaccgcgggagcggagcctgacgggaggtgcccggggagcgtgagtagggggcgcgggagcaggtcagctggggcgcagcatgcccgctgctcccgcgccatggagatcgccctggtgcccctggagaacggcggtgccatgaccgtcagaggaggcgatgaggcccgggcaggctgcggccaggccacggggggagagctccagtgtcccccgacggctgggctcagcgatgggcccaaggagccggcgccaaaggggcgcggcgcgcagagagacgcggacccgggagtgcggcccttgcctccgctgcccaaggagctgccacagcctcgacggccgcctcccgaggacgaggaggaagaaggcgaccccggcctgggcacggtggaggaccaggctctgggcacggcgtccctgcaccaccagcgcgtccacatcaacatctccgggctgcgcttcgagacgcagctgggcaccctggcgcagttccccaacaccctcctgggcgaccccgccaagcgcctgcgctacttcgaccccctgaggaacgagtacttcttcgaccgcaaccggcccagcttcgacggtatcctctactactaccagtcggggggccgcctgcggaggccggtcaacgtctccctggacgtgttcgcggacgagatccgcttctaccagctgggggacgaggccatggagcgcttccgcgaggatgagggtttcattaaagaagaggagaagcccctgccccgcaacgagttccagcgccaggtgtggcttatcttcgagtatccggagagctctgggtccgcgcgggccatcgccatcgtctcggtcttggtcatcctcatctccatcatcaccttctgcttggagaccctgcccgagttcagggatgaacgcgagctgctccgccaccccccagcgccccaccagcctcccgcgcccgcccctgggaccaacggcagcggggtcatggccccgccctctggccctacggtggcaccgctcctgcccaggaccctggccgaccccttcttcatcgtggagaccacgtgcgtcatctggttcaccttcgagctgctcgtgcgcttcttcgcctgccccagcaaggcagggttctcccggaacatcatgaacatcatcgatgtggtggccatcttcccttacttcatcaccctgggcaccgagctggcagagcaacagccagggggcggaggaggcagccagaatgggcagcaggccatgtccctggccatcctcagagtcatccgcctggtccgggtgttccgcatcttcaagctctcccgccactccaaggggctgcagatcctgggcaagaccttgcaggcctccatgagggagctggggttgctcatcttcttcctgttcatcggggtcatcctcttctccagtgccgtctacttcgcagaggctgacaaccaggggacccatttctctagcatccctgatgccttctggtgggcagtggtcaccatgaccactgtgggctacggggacatgaggcccgtcaccgtggggggcaagatcgtgggctcgctgtgtgccatcgccggggtcctcaccattgccctgcctgtgcccgtcattgtctccaacttcaactacttctaccaccgggagacggaccacgaggagccggcagtccttaaggaagagcagggccctcagagccaggggccggggctggacagaggagtccagcggaaggtccaggagtccagcgggagcaggggatccttctgcaaggccggggggaccctggagaatgcagacagtgcccgaaggagcagctgccccctagagaagtgtaacgtcaaggccaagagcaacgtggacttgcggaggtccctttatgccctctgcctggacaccagccgggaaacagatttgtaaaaggagattcaggcagactggtggcagtggggtagggaatggaaggcttgctgaacatggatatttacattataccgcagagtatttgaagtcacactgtaacctcagtctacccctctcctttcactcctttcctccctccctcaatccccccattttctctcttctttccatgacacccaagggtcacctatttttaaaaagtaccacattccatgacgcaggagctgttgaaatggtaagcgctgtgagatggatgtatttgtagccagtctcctataccccgcagagggataacccaaacaaaaatgactctaaatagcccagatcccaagagattacgtaactcctccatccatgtgttccaaatttgctttacatatgattacatttgtgtataggggaaaatattatttttatgcctggtaagtggctttttgtactgtagtttagatagagatattttggatatattttcaagatacatgttgtatttatggaagaaagagttgccctgatgtttttctgtgatacttatattagagccagagatcttggtatgggctgttctggttcctgtgtctccaagcctctgtcttttccgggatgtggtattggtgctttgtgtctagggcagagaatgttcttgaagaaaggcaaatctgactttttctgtgcgccttaaacaattcttgtaactttcttcaaaaagcatttgaatggtattggaggaatacttctgataatttattctctttatttttaatcccaggaaataaaaggttaccttgttgaggcaa

SEQ ID NO: 90 - DNA, 2913 bp, Macaca fascicularis
  source 1..2913: mol_type = genomic DNA
ttgcctcaacaaggtaaccttttatttcctgggattaaaaataaagagaataaattatcagaagtattcctccaataccattcaaatgctttttgaagaaagttacaagaattgtttaaggcgcacagaaaaagtcagatttgcctttcttcaagaacattctctgccctagacacaaagcaccaataccacatcccggaaaagacagaggcttggagacacaggaaccagaacagcccataccaagatctctggctctaatataagtatcacagaaaaacatcagggcaactctttcttccataaatacaacatgtatcttgaaaatatatccaaaatatctctatctaaactacagtacaaaaagccacttaccaggcataaaaataatattttcccctatacacaaatgtaatcatatgtaaagcaaatttggaacacatggatggaggagttacgtaatctcttgggatctgggctatttagagtcatttttgtttgggttatccctctgcggggtataggagactggctacaaatacatccatctcacagcgcttaccatttcaacagctcctgcgtcatggaatgtggtactttttaaaaataggtgacccttgggtgtcatggaaagaagagagaaaatggggggattgagggagggaggaaaggagtgaaaggagaggggtagactgaggttacagtgtgacttcaaatactctgcggtataatgtaaatatccatgttcagcaagccttccattccctaccccactgccaccagtctgcctgaatctccttttacaaatctgtttcccggctggtgtccaggcagagggcataaagggacctccgcaagtccacgttgctcttggccttgacgttacacttctctagggggcagctgctccttcgggcactgtctgcattctccagggtccccccggccttgcagaaggatcccctgctcccgctggactcctggaccttccgctggactcctctgtccagccccggcccctggctctgagggccctgctcttccttaaggactgccggctcctcgtggtccgtctcccggtggtagaagtagttgaagttggagacaatgacgggcacaggcagggcaatggtgaggaccccggcgatggcacacagcgagcccacgatcttgccccccacggtgacgggcctcatgtccccgtagcccacagtggtcatggtgaccactgcccaccagaaggcatcagggatgctagagaaatgggtcccctggttgtcagcctctgcgaagtagacggcactggagaagaggatgaccccgatgaacaggaagaagatgagcaaccccagctccctcatggaggcctgcaaggtcttgcccaggatctgcagccccttggagtggcgggagagcttgaagatgcggaacacccggaccaggcggatgactctgaggatggccagggacatggcctgctgcccattctggctgcctcctccgccccctggctgttgctctgccagctcggtgcccagggtgatgaagtaagggaagatggccaccacatcgatgatgttcatgatgttccgggagaaccctgccttgctggggcaggcgaagaagcgcacgagcagctcgaaggtgaaccagatgacgcacgtggtctccacgatgaagaaggggtcggccagggtcctgggcaggagcggtgccaccgtagggccagagggcggggccatgaccccgctgccgttggtcccaggggcgggcgcgggaggctggtggggcgctggggggtggcggagcagctcgcgttcatccctgaactcgggcagggtctccaagcagaaggtgatgatggagatgaggatgaccaagaccgagacgatggcgatggcccgcgcggacccagagctctccggatactcgaagataagccacacctggcgctggaactcgttgcggggcaggggcttctcctcttctttaatgaaaccctcatcctcgcggaagcgctccatggcctcgtcccccagctggtagaagcggatctcgtccgcgaacacgtccagggagacgttgaccggcctccgcaggcggccccccgactggtagtagtagaggataccgtcgaagctgggccggttgcggtcgaagaagtactcgttcctcagggggtcgaagtagcgcaggcgcttggcggggtcgcccaggagggtgttggggaactgcgccagggtgcccagctgcgtctcgaagcgcagcccggagatgttgatgtggacgcgctggtggtgcagggacgccgtgcccagagcctggtcctccaccgtgcccaggccggggtcgccttcttcctcctcgtcctcgggaggcggccgtcgaggctgtggcagctccttgggcagcggaggcaagggccgcactcccgggtccgcgtctctctgcgcgccgcgcccctttggcgccggctccttgggcccatcgctgagcccagccgtcgggggacactggagctctccccccgtggcctggccgcagcctgcccgggcctcatcgcctcctctgacggtcatggcaccgccgttctccaggggcaccagggcgatctccatggcgcgggagcagcgggcatgctgcgccccagctgacctgctcccgcgccccctactcacgctccccgggcacctcccgtcaggctccgctcccgcggtcggccggcccctctctggggcgagctggggttgctggcgcgatcccctcgcttggccctgacgtcaagaagccgctgccctgctctctgcctctctctcttctggcagcccgttaccaagcagccgaaaagcctccttccagcagatgcaaccttcagccgtccctctctggctgcgctgcgcttggcctccaccc

SEQ ID NO: 91 - DNA, 4628 bp, Homo sapiens
  source 1..4628: mol_type = genomic DNA
acctccttattggtgctagtttgcagcgcccagctcctgcgccttcgcttcgcgtttgaatctggctcgccccttcgtattatgtctgcactccgaaggaaatttggggacgattatcaggtagtgaccacatcgtccagcggctcgggcttgcagccccaggggccaggccaggaccctcagcagcagcttgtgcccaagaagaagcggcagcggttcgtggacaagaacggccggtgcaatgtacagcacggcaacctgggcagcgagacaagccgctacctctcggacctcttcaccacgctggtggacctcaagtggcgctggaacctcttcatcttcattctcacctacaccgtggcctggcttttcatggcgtccatgtggtgggtgatcgcctacactcggggcgacctgaacaaagcccacgtcggtaactacacgccttgcgtggccaatgtctataacttcccttctgccttcctcttcttcatcgagacggaggccaccatcggctatggctaccgatacatcacagacaagtgccccgagggcatcatcctcttcctcttccagtccatcctgggctccatcgtggacgccttcctcatcggctgcatgttcatcaagatgtcccagcccaagaagcgcgccgagaccctcatgttcagcgagcacgcggtgatctccatgagggacggaaaactcacgcttatgttccgggtgggcaacctgcgcaacagccacatggtctccgcgcagattcgctgcaagctgctcaaatctcggcagacacctgagggtgagttccttccccttgaccaacttgaactggatgtaggttttagtacaggggcagatcaactttttcttgtgtcccccctcacaatttgccacgtgatcgatgccaaaagccccttttatgacctatcccagcgaagcatgcaaactgaacagttcgagattgtcgtcatcctagaaggcattgtggaaacaactgggatgacttgtcaagctcgaacatcatatactgaagatgaagttctttggggtcatcgtttttttcctgtaatttccttagaagagggattctttaaagttgattactcccagttccatgcaacatttgaagtccccaccccaccttacagtgtgaaagagcaggaggaaatgcttctcatgtcgtcccctttaatagcaccagccataactaacagcaaagaaagacataattctgtggaatgcttagatggactagatgatattactacaaaactaccatctaagctgcagaaaattactggaagagaagactttcccaaaaaactcttgaggatgagttctacaacttcagaaaaagcctacagcttgggagacttgcccatgaaacttcaacgaataagttcagttccgggcaactcagaagaaaaactggtatctaaaaccaccaagatgttatctgatcccatgagccagtctgtggctgatttgccaccaaagcttcaaaagatggctggaggagcagctaggatggaagggaaccttccagccaaattaagaaaaatgaactctgatcgcttcacataacaaagcactcccttaggcattatttaatgtttgatttagtaatagtccaatatttggcgatgaggtaattctccctaaggaatctgaaagtatattttcctcccagttctacaagcatatttgagaacccttcctttcccaagtattgcgaatgtgcagaaagcaacagttacggagggaggacatcataaggaagttattaacgggcatgtattatcacatcaagcatgcaataatgtgcaaattttgcatttagttttatggcatgatttatatatggcatatttatattgtatattctggaaaaaaaatatatatatatatttaaaggggagatactctccctgacatttctaacatatgtattaagccaaacatgagtgaatagctttcagggcgataaaactaaatatatgtctgtgtgtgtgtgtgtatgtatacacacatatacatatatatatacacatacatacacatacatacatacatacatatatatctgataaaattgtgatgttttgttcaaagttgtagttcttgtgcatgtttactttattagagtaggaaggctactggcattaattattaataccaaatattttagccttaaatttttgtcattttaaaatctgatttaatgttttctgctgtttaaggtcttgggaggctttcaattgtattttatatgagagaatcacacaagtttgtgctatctatggccctgcaaaaatataaccattacatgtttaaattgtaaattttagagcataccagtactcagtatagcattgaacatttcttatgatttttaaaagttgctagtactggggagaaataattgttgattaatttgagaattattcctttcctagactaattaaaatctggaaatctgttttgtatatgatctaatacaaagatgagctctgaacaaacactgaatcatgttaatagacagtagccaagttatattgaatatatcagaatctgtgtgaagttacacaattaattgtccctgtttcaaactgagtaaattggaaacattttctttctttttctggaaattttgtccattttaaaaaccaatcattttaagaagacatgacaatgcaatgaaacagatgataaatatttatgcttaaaatatgtatgtctaattgagtctcttttttattctgttttcttgtttatggcatttgttgtaacaggatagactttttcctcacctaggaaacctatcccatgcctgtcacttatagttcaggaggaagtttttgcacagaccagagagaaattaaaattagatgataaattgaagatatcttacacacagttttttggtgaacactgattttattggtgtcttagatccctagtctacccaaataattttaacagtactgttttttctaatcctgaagtctgatatttatgactcattagcaggaatcaaaactagtgatcagtagaacactttcaaaataaaaatttggaatgcagacttttatgaaaatttaaaagtgctccttaacagaatatcatgggttttcctataaaacttctttaagtattgtaattccagtctgccccaactttaaaaaaaattcttattaatatgtcagtcattaattgctagtttgggctctcattatttcctgttttttaacaattttgtgataattttattattggcaaattaatacatcaacacttaaatcattgactataataataccttctggctacctctgtatcaaccaaattctgtaggtgcaaacatataccagggaattcttactggcaaaatgatcaatctggagtgtgcatccactgtgaatggagcaaattgccctatacccattgataacctagctttcttagtttgtagatgtaggaaacaaaatagtgacagagagagaagggggtccacagggcatggtatatttatcagcagtggaaaaaaagtgcatagatcatttagtccaagaacttaaaactaaatagagccataatttactttggagagtcattttaatttgtctttggtaccaaggagaagacggaaccaaaaacaaactctccaagtatattcacacattcaacaaaatttttgcatgccttctatgtcgtaggcatttttagttcctggggatttggacatggctaagtcagagaaggccattgctcaccatgaacactgtataccagaaggagagtggggaggagacaaaaaacaaataagaccacttcagacaatcaaagtatcagttaagagaatgaaaacaggcctgactcagtggctcacgcctgtaatcccagtactttgggaggcggaggttgggggatcacctgaggtcaggagatcgagaccagcctggacaacatggtgaaaacccgtctctactaaaaatacaaaaattaactgggcatggtggcaggcacctgtaatcccagctactggggaagctgaggcaggagaatcgtttgaacctgggaggcggaggttgcagtgagccaagattctgccactgcactccagcctgggtgacagtgcgagactccatctcaacatcaaaaaaaaaaaaaaaaaaaaaaaaaaaaaaaaaaaaaaaaagaataaaaacagggtaacataatgcaaagtaactgtgtggaataaaaattgattattttagaaaatgtgactggcttaggacggggataatatgtgaacagaaatctatctcatgagaaagtgctactgttgtcaaaattaccttatctgagtgaatggtattttttttatcttttccacacatgcgtgggaaaggtatgatttctgcatgtaattgcagtttaacccttatttctaggttgatcataggtcccagtttacccaggaaaattccagtttatacctgttgtacctgtgtaattattggtagcactccctttcactcttacaatgtcttggtttggatgatatatggtgaagtttttgttgaaactaaattatgaagtctgatatatttggataaaaataaagaattgcttttcttctc

SEQ ID NO: 92 - DNA, 4628 bp, Homo sapiens
  source 1..4628: mol_type = genomic DNA
gagaagaaaagcaattctttatttttatccaaatatatcagacttcataatttagtttcaacaaaaacttcaccatatatcatccaaaccaagacattgtaagagtgaaagggagtgctaccaataattacacaggtacaacaggtataaactggaattttcctgggtaaactgggacctatgatcaacctagaaataagggttaaactgcaattacatgcagaaatcatacctttcccacgcatgtgtggaaaagataaaaaaaataccattcactcagataaggtaattttgacaacagtagcactttctcatgagatagatttctgttcacatattatccccgtcctaagccagtcacattttctaaaataatcaatttttattccacacagttactttgcattatgttaccctgtttttattctttttttttttttttttttttttttttttttttttttttttgatgttgagatggagtctcgcactgtcacccaggctggagtgcagtggcagaatcttggctcactgcaacctccgcctcccaggttcaaacgattctcctgcctcagcttccccagtagctgggattacaggtgcctgccaccatgcccagttaatttttgtatttttagtagagacgggttttcaccatgttgtccaggctggtctcgatctcctgacctcaggtgatcccccaacctccgcctcccaaagtactgggattacaggcgtgagccactgagtcaggcctgttttcattctcttaactgatactttgattgtctgaagtggtcttatttgttttttgtctcctccccactctccttctggtatacagtgttcatggtgagcaatggccttctctgacttagccatgtccaaatccccaggaactaaaaatgcctacgacatagaaggcatgcaaaaattttgttgaatgtgtgaatatacttggagagtttgtttttggttccgtcttctccttggtaccaaagacaaattaaaatgactctccaaagtaaattatggctctatttagttttaagttcttggactaaatgatctatgcactttttttccactgctgataaatataccatgccctgtggacccccttctctctctgtcactattttgtttcctacatctacaaactaagaaagctaggttatcaatgggtatagggcaatttgctccattcacagtggatgcacactccagattgatcattttgccagtaagaattccctggtatatgtttgcacctacagaatttggttgatacagaggtagccagaaggtattattatagtcaatgatttaagtgttgatgtattaatttgccaataataaaattatcacaaaattgttaaaaaacaggaaataatgagagcccaaactagcaattaatgactgacatattaataagaattttttttaaagttggggcagactggaattacaatacttaaagaagttttataggaaaacccatgatattctgttaaggagcacttttaaattttcataaaagtctgcattccaaatttttattttgaaagtgttctactgatcactagttttgattcctgctaatgagtcataaatatcagacttcaggattagaaaaaacagtactgttaaaattatttgggtagactagggatctaagacaccaataaaatcagtgttcaccaaaaaactgtgtgtaagatatcttcaatttatcatctaattttaatttctctctggtctgtgcaaaaacttcctcctgaactataagtgacaggcatgggataggtttcctaggtgaggaaaaagtctatcctgttacaacaaatgccataaacaagaaaacagaataaaaaagagactcaattagacatacatattttaagcataaatatttatcatctgtttcattgcattgtcatgtcttcttaaaatgattggtttttaaaatggacaaaatttccagaaaaagaaagaaaatgtttccaatttactcagtttgaaacagggacaattaattgtgtaacttcacacagattctgatatattcaatataacttggctactgtctattaacatgattcagtgtttgttcagagctcatctttgtattagatcatatacaaaacagatttccagattttaattagtctaggaaaggaataattctcaaattaatcaacaattatttctccccagtactagcaacttttaaaaatcataagaaatgttcaatgctatactgagtactggtatgctctaaaatttacaatttaaacatgtaatggttatatttttgcagggccatagatagcacaaacttgtgtgattctctcatataaaatacaattgaaagcctcccaagaccttaaacagcagaaaacattaaatcagattttaaaatgacaaaaatttaaggctaaaatatttggtattaataattaatgccagtagccttcctactctaataaagtaaacatgcacaagaactacaactttgaacaaaacatcacaattttatcagatatatatgtatgtatgtatgtatgtgtatgtatgtgtatatatatatgtatatgtgtgtatacatacacacacacacacagacatatatttagttttatcgccctgaaagctattcactcatgtttggcttaatacatatgttagaaatgtcagggagagtatctcccctttaaatatatatatatattttttttccagaatatacaatataaatatgccatatataaatcatgccataaaactaaatgcaaaatttgcacattattgcatgcttgatgtgataatacatgcccgttaataacttccttatgatgtcctccctccgtaactgttgctttctgcacattcgcaatacttgggaaaggaagggttctcaaatatgcttgtagaactgggaggaaaatatactttcagattccttagggagaattacctcatcgccaaatattggactattactaaatcaaacattaaataatgcctaagggagtgctttgttatgtgaagcgatcagagttcatttttcttaatttggctggaaggttcccttccatcctagctgctcctccagccatcttttgaagctttggtggcaaatcagccacagactggctcatgggatcagataacatcttggtggttttagataccagtttttcttctgagttgcccggaactgaacttattcgttgaagtttcatgggcaagtctcccaagctgtaggctttttctgaagttgtagaactcatcctcaagagttttttgggaaagtcttctcttccagtaattttctgcagcttagatggtagttttgtagtaatatcatctagtccatctaagcattccacagaattatgtctttctttgctgttagttatggctggtgctattaaaggggacgacatgagaagcatttcctcctgctctttcacactgtaaggtggggtggggacttcaaatgttgcatggaactgggagtaatcaactttaaagaatccctcttctaaggaaattacaggaaaaaaacgatgaccccaaagaacttcatcttcagtatatgatgttcgagcttgacaagtcatcccagttgtttccacaatgccttctaggatgacgacaatctcgaactgttcagtttgcatgcttcgctgggataggtcataaaaggggcttttggcatcgatcacgtggcaaattgtgaggggggacacaagaaaaagttgatctgcccctgtactaaaacctacatccagttcaagttggtcaaggggaaggaactcaccctcaggtgtctgccgagatttgagcagcttgcagcgaatctgcgcggagaccatgtggctgttgcgcaggttgcccacccggaacataagcgtgagttttccgtccctcatggagatcaccgcgtgctcgctgaacatgagggtctcggcgcgcttcttgggctgggacatcttgatgaacatgcagccgatgaggaaggcgtccacgatggagcccaggatggactggaagaggaagaggatgatgccctcggggcacttgtctgtgatgtatcggtagccatagccgatggtggcctccgtctcgatgaagaagaggaaggcagaagggaagttatagacattggccacgcaaggcgtgtagttaccgacgtgggctttgttcaggtcgccccgagtgtaggcgatcacccaccacatggacgccatgaaaagccaggccacggtgtaggtgagaatgaagatgaagaggttccagcgccacttgaggtccaccagcgtggtgaagaggtccgagaggtagcggcttgtctcgctgcccaggttgccgtgctgtacattgcaccggccgttcttgtccacgaaccgctgccgcttcttcttgggcacaagctgctgctgagggtcctggcctggcccctggggctgcaagcccgagccgctggacgatgtggtcactacctgataatcgtccccaaatttccttcggagtgcagacataatacgaaggggcgagccagattcaaacgcgaagcgaaggcgcaggagctgggcgctgcaaactagcaccaataaggaggt

SEQ ID NO: 93 - DNA, 5232 bp, Mus musculus
  source 1..5232: mol_type = genomic DNA
ctccatccatccgggacaagcaaagggcggacatggaataggagatcgaaggaaggaagactcaaatgtttctattgagaggcatgggaaaagctggagcaaaagccggtgtttaacctgaaagtctgacctccgttcagcagtcgcactgtcgcctggaaagagggcatcgcacgctaaggaacccgggagtcaggcgtccgagtcagtctctgcttggagcatcaggggtttctggcagaggctgtgtagtgtccccagggaggcacggagcctgacacacctgcattggttctcatcttggaacaccaagaaaagtagaaaggggtcaggcaccctaagcgcagggtgcttggccagactgcctgtgctgcttgcagagcctccgcctgttctctgtcactgggtgagtgcccaggcttccagagctccctggagcgcaggggtagcttgacgtccgctcaccccctccggagagtccacccaaaggcccaggtggagcgcgtgaaaactcggccgccggcgcacctcaggagtacagcaaccagttcatgggtgctgcaggacagtcgagggtggggtgccgtggaaaggtaagaggtggcccgggatggtgatggtggggggaaaaagagaagcctcaaagagctcagaggcaaattttcacttgggttcttgccccttgcattccccttgccttgagtgtgggagaacacttctgttttagccctgctcctggaaagaaagcctctgtcccaggggaggagaggcatccggacggggcaaagactgctgctacctgcagggtgctccccacccccacccccaacccaggcgcctgctttcgtcccctcccctcctgctttcatcccctgcccccacctccttattggtgctggtttgcagcgcttggctcctgcgcctccgcttcgtgtttgaatctggctcgcccctccgtattatgtctgcactccgaaggaaatttggggacgattaccaggtagtgaccacttcgtcgagcggttcgggcttacagcctcaggggccaggacagggcccgcagcagcagctggtgcccaagaagaaacggcagcggttcgtggacaagaacggccggtgcaatgtgcagcatggtaacctgggcagcgagaccagtcgctacctttcggacctcttcactaccctggtggatctcaagtggcgttggaacctctttatcttcatcctcacctacaccgtggcctggctcttcatggcgtccatgtggtgggtgatcgcttatacccggggcgacctgaacaaagcccatgtcggcaactacactccctgtgtggccaatgtctataacttcccctctgccttcctcttcttcatcgagaccgaggccaccatcggctatggctaccgctacatcacagataagtgccccgagggcatcatcctcttcctcttccagtccatccttggctccatcgtggacgctttcctcatcggctgcatgttcatcaagatgtcccagcccaaaaagcgcgccgagaccctcatgtttagcgagcatgcggttatctccatgagggacggaaaactcactctcatgttccgggtgggcaacctgcgcaacagccacatggtctccgcgcagatccgctgcaagctgctcaaatctcggcagacacctgagggtgagttccttccccttgaccaacttgaactggatgtaggttttagtacaggggccgatcaactttttcttgtgtcccctctcacaatttgccacgtgatcgatgccaaaagccccttctatgacctatcccagcgaagcatgcaaactgaacagttcgaggttgtcgtcatcctggaaggcattgtggaaaccacaggaatgacttgtcaagctcgaacatcatacacagaggacgaagtgctttggggtcatcgttttttccctgtaatttctttagaagaaggattctttaaagtcgattactcccagttccatgcaacctttgaagttccaacccctccttacagcgtgaaagagcaggaggaaatgcttctcatgtcctcccctttaatagcaccagccataaccaacagcaaagaaagacacaattctgtggagtgtttagatggactagatgacattagcacaaaacttccatcgaagctgcagaaaattacggggagagaagactttcccaaaaaacttctgagaatgagttctacaacctcagaaaaagcctatagtttgggtgatttgcccatgaaactccaacgaataagttcagttcctggcaactcggaagaaaaactggtttctaaaaccaccaagatgttatctgatcccatgagccagtctgtggccgatttgccaccaaagcttcaaaagatggctggaggacctaccaggatggaaggaaatcttccagccaaactaagaaaaatgaactctgaccgtttcacatagcaaaacacccctttaggcattatttaatgttttgatttagtattagtccaatatttggctgataagataatcctccctatgaaatctgagaggtctatcctagcctggcaaatagatcagagaactcttcattgaagtgttattattgtgctgaacataagttatgaagggaggacatcataaggaagctactagtcggcatgtattatcacatcaagcatgcaataatgtgcaaattttgcatttagttttatggcatgatttatatatggcatatttatattgaatattctggaaaaatatataaatatatatttgaagtggagatattctccccataatttctaatatatgtattaagccaaacatgagtgaatagctttcagggcactaaaattacatacatacatacatacatacatacatacatacatgcatatgcacagacacatacacacaaatactcatatatataaaacatacccataaaaacatatatatctaataaaaattgtgatgttttgttcaaatttgtatttcttgtgcatgtttactttattagactagaaaggctgctggcattgattatgaataccaaatattttagccttaaattatttgttacttaaaaatctgatttaatgttttctgctgttgccgtcatggaatctttcaactgtactttaccatgaaaagatagcagagattggtggtgtcaaatgacaccacagagacatcattattatgcatttaatttgtaaattttagagtgtgctggtacatagcacacatcactgaacttttcttatgatttttagaagtcactagaacttgggtgggggaggggttagtaaaagttagttaactcatcgattctgaagctaactaatatctggaatttggttttgtactctaataaaactacgggctctgaacaaatgcggaatcattggaagagtcagtagcttattgtgactatgtcagagtctatgtgaaactgacagggtaaacagtgcctgtggccaaatgagttggttgccaatgttttcttcttttttccggatcttttgtcatccataaagacttgtagatatttcaggagacatgacagcacaatgaaacagatgataaattcttttgctggaaatgcatatgcctaacagagactccctttacactgttctcctgtttctggcatttgttgtgaaaggagagactatttactggtctggaaacctattccaggtctgtcactcagagtttagcacagacctgagagaaattaatatcaaatgatctgacaatgtttgtacactcaggattttttggttttgtcttggtgttgaacaattcttttattgttgccttgaatccctggcctcagaataattttagtgttactagctttcaacccccaacatctgactggtatcaaacttggtcagaagtataccttgaacacaaagctttagaataaaaaagttttttgaaactgcagaagtacttctttgcatactaatgtagattttcctacacaatttatgagggatttgtaataatccaacttggcccagaattgatttaacttttcattaatatataaatcactgatggttggtttgagcacacagcattccttattgtttagtgatcctgcgataattttattagaggcaaattattacatctacagtatatcatccactatatcttctggctacctctgtatcaaccaaattctgtaggtgcaaacacataacagggaattactactggagaaatgatcaacattagcatccatccactgtgaatagagcagttgccctaccccttgatcaccaaatgttcttatttgctacatggaggtgatgaaatattagcagacagaaaaaggggaccagtgggtatcgtatatttagcagtggaggaagctgcatagatcatttagtccaacaccttaaaactatacagagccataatattcttcagagagtcattttaatttgtttttggtattgcaaagaaccaaaaacatgctctctgaatttattcatttaacaaaatttttgcatgccttctttgacctaggcattgtttttgtttctgttttttttttttgtttttagtttagttcctggggatttagacatgtacatggtatcagcaagagaaagagagagagacagagagatacagagagagacacaagagagacacagagagagacacaaagagaaacagaaacggagagagacagagacacagagacagcaagagacacggagacagagagagacacagagagaatattcagtagtcaacatttcaattagaaaaatgaaaacaaggtagtaatggaaatgggtataggatgatatgtattcagaatatgatatttagggagttgattaacattaggagtgaaaaacctgacgagaaagagccagtgttgccaaaactcaatccaagtgatcagtacactttgaccttttccgcatacgtgtgggaacagtatgatttctgcatgtacttgcagtttaatccctattcctaggttgatcataggatccagtctgcccaggaaaatcgaggtttatacttgttgtacttgtgtaattataagtagccctctctttaaatcctattatgtcctggtttggatgatatatggtaaagttttgttgacactaacaaaattattgagtctaatatatttggaaaaataaagaattgctttcttctccttttaaaaaaaaaaaaaaaaa

SEQ ID NO: 94 - DNA, 5232 bp, Mus musculus
  source 1..5232: mol_type = genomic DNA
tttttttttttttttttaaaaggagaagaaagcaattctttatttttccaaatatattagactcaataattttgttagtgtcaacaaaactttaccatatatcatccaaaccaggacataataggatttaaagagagggctacttataattacacaagtacaacaagtataaacctcgattttcctgggcagactggatcctatgatcaacctaggaatagggattaaactgcaagtacatgcagaaatcatactgttcccacacgtatgcggaaaaggtcaaagtgtactgatcacttggattgagttttggcaacactggctctttctcgtcaggtttttcactcctaatgttaatcaactccctaaatatcatattctgaatacatatcatcctatacccatttccattactaccttgttttcatttttctaattgaaatgttgactactgaatattctctctgtgtctctctctgtctccgtgtctcttgctgtctctgtgtctctgtctctctccgtttctgtttctctttgtgtctctctctgtgtctctcttgtgtctctctctgtatctctctgtctctctctctttctcttgctgataccatgtacatgtctaaatccccaggaactaaactaaaaacaaaaaaaaaaaacagaaacaaaaacaatgcctaggtcaaagaaggcatgcaaaaattttgttaaatgaataaattcagagagcatgtttttggttctttgcaataccaaaaacaaattaaaatgactctctgaagaatattatggctctgtatagttttaaggtgttggactaaatgatctatgcagcttcctccactgctaaatatacgatacccactggtcccctttttctgtctgctaatatttcatcacctccatgtagcaaataagaacatttggtgatcaaggggtagggcaactgctctattcacagtggatggatgctaatgttgatcatttctccagtagtaattccctgttatgtgtttgcacctacagaatttggttgatacagaggtagccagaagatatagtggatgatatactgtagatgtaataatttgcctctaataaaattatcgcaggatcactaaacaataaggaatgctgtgtgctcaaaccaaccatcagtgatttatatattaatgaaaagttaaatcaattctgggccaagttggattattacaaatccctcataaattgtgtaggaaaatctacattagtatgcaaagaagtacttctgcagtttcaaaaaacttttttattctaaagctttgtgttcaaggtatacttctgaccaagtttgataccagtcagatgttgggggttgaaagctagtaacactaaaattattctgaggccagggattcaaggcaacaataaaagaattgttcaacaccaagacaaaaccaaaaaatcctgagtgtacaaacattgtcagatcatttgatattaatttctctcaggtctgtgctaaactctgagtgacagacctggaataggtttccagaccagtaaatagtctctcctttcacaacaaatgccagaaacaggagaacagtgtaaagggagtctctgttaggcatatgcatttccagcaaaagaatttatcatctgtttcattgtgctgtcatgtctcctgaaatatctacaagtctttatggatgacaaaagatccggaaaaaagaagaaaacattggcaaccaactcatttggccacaggcactgtttaccctgtcagtttcacatagactctgacatagtcacaataagctactgactcttccaatgattccgcatttgttcagagcccgtagttttattagagtacaaaaccaaattccagatattagttagcttcagaatcgatgagttaactaacttttactaacccctcccccacccaagttctagtgacttctaaaaatcataagaaaagttcagtgatgtgtgctatgtaccagcacactctaaaatttacaaattaaatgcataataatgatgtctctgtggtgtcatttgacaccaccaatctctgctatcttttcatggtaaagtacagttgaaagattccatgacggcaacagcagaaaacattaaatcagatttttaagtaacaaataatttaaggctaaaatatttggtattcataatcaatgccagcagcctttctagtctaataaagtaaacatgcacaagaaatacaaatttgaacaaaacatcacaatttttattagatatatatgtttttatgggtatgttttatatatatgagtatttgtgtgtatgtgtctgtgcatatgcatgtatgtatgtatgtatgtatgtatgtatgtatgtaattttagtgccctgaaagctattcactcatgtttggcttaatacatatattagaaattatggggagaatatctccacttcaaatatatatttatatatttttccagaatattcaatataaatatgccatatataaatcatgccataaaactaaatgcaaaatttgcacattattgcatgcttgatgtgataatacatgccgactagtagcttccttatgatgtcctcccttcataacttatgttcagcacaataataacacttcaatgaagagttctctgatctatttgccaggctaggatagacctctcagatttcatagggaggattatcttatcagccaaatattggactaatactaaatcaaaacattaaataatgcctaaaggggtgttttgctatgtgaaacggtcagagttcatttttcttagtttggctggaagatttccttccatcctggtaggtcctccagccatcttttgaagctttggtggcaaatcggccacagactggctcatgggatcagataacatcttggtggttttagaaaccagtttttcttccgagttgccaggaactgaacttattcgttggagtttcatgggcaaatcacccaaactataggctttttctgaggttgtagaactcattctcagaagttttttgggaaagtcttctctccccgtaattttctgcagcttcgatggaagttttgtgctaatgtcatctagtccatctaaacactccacagaattgtgtctttctttgctgttggttatggctggtgctattaaaggggaggacatgagaagcatttcctcctgctctttcacgctgtaaggaggggttggaacttcaaaggttgcatggaactgggagtaatcgactttaaagaatccttcttctaaagaaattacagggaaaaaacgatgaccccaaagcacttcgtcctctgtgtatgatgttcgagcttgacaagtcattcctgtggtttccacaatgccttccaggatgacgacaacctcgaactgttcagtttgcatgcttcgctgggataggtcatagaaggggcttttggcatcgatcacgtggcaaattgtgagaggggacacaagaaaaagttgatcggcccctgtactaaaacctacatccagttcaagttggtcaaggggaaggaactcaccctcaggtgtctgccgagatttgagcagcttgcagcggatctgcgcggagaccatgtggctgttgcgcaggttgcccacccggaacatgagagtgagttttccgtccctcatggagataaccgcatgctcgctaaacatgagggtctcggcgcgctttttgggctgggacatcttgatgaacatgcagccgatgaggaaagcgtccacgatggagccaaggatggactggaagaggaagaggatgatgccctcggggcacttatctgtgatgtagcggtagccatagccgatggtggcctcggtctcgatgaagaagaggaaggcagaggggaagttatagacattggccacacagggagtgtagttgccgacatgggctttgttcaggtcgccccgggtataagcgatcacccaccacatggacgccatgaagagccaggccacggtgtaggtgaggatgaagataaagaggttccaacgccacttgagatccaccagggtagtgaagaggtccgaaaggtagcgactggtctcgctgcccaggttaccatgctgcacattgcaccggccgttcttgtccacgaaccgctgccgtttcttcttgggcaccagctgctgctgcgggccctgtcctggcccctgaggctgtaagcccgaaccgctcgacgaagtggtcactacctggtaatcgtccccaaatttccttcggagtgcagacataatacggaggggcgagccagattcaaacacgaagcggaggcgcaggagccaagcgctgcaaaccagcaccaataaggaggtgggggcaggggatgaaagcaggaggggaggggacgaaagcaggcgcctgggttgggggtgggggtggggagcaccctgcaggtagcagcagtctttgccccgtccggatgcctctcctcccctgggacagaggctttctttccaggagcagggctaaaacagaagtgttctcccacactcaaggcaaggggaatgcaaggggcaagaacccaagtgaaaatttgcctctgagctctttgaggcttctctttttccccccaccatcaccatcccgggccacctcttacctttccacggcaccccaccctcgactgtcctgcagcacccatgaactggttgctgtactcctgaggtgcgccggcggccgagttttcacgcgctccacctgggcctttgggtggactctccggagggggtgagcggacgtcaagctacccctgcgctccagggagctctggaagcctgggcactcacccagtgacagagaacaggcggaggctctgcaagcagcacaggcagtctggccaagcaccctgcgcttagggtgcctgacccctttctacttttcttggtgttccaagatgagaaccaatgcaggtgtgtcaggctccgtgcctccctggggacactacacagcctctgccagaaacccctgatgctccaagcagagactgactcggacgcctgactcccgggttccttagcgtgcgatgccctctttccaggcgacagtgcgactgctgaacggaggtcagactttcaggttaaacaccggcttttgctccagcttttcccatgcctctcaatagaaacatttgagtcttccttccttcgatctcctattccatgtccgccctttgcttgtcccggatggatggag

SEQ ID NO: 95 - DNA, 1827 bp, Rattus norvegicus
  source 1..1827: mol_type = genomic DNA
cagcgcttggctcctgcgcctccgcttcgtgtttgaatctggatctcccctccgtattatgtctgcactccgaaggaaatttggggacgattaccaggtagtgaccacttcgtccagcggttcgggcttgcagccccaggggccaggacagggcccacagcagcagcttgtacccaagaagaaacggcagcggttcgtggacaagaacggtcggtgcaatgtgcagcacggcaacctgggcagcgagaccagtcgctacctttccgacctcttcactaccctggtggatctcaagtggcgttggaacctctttatcttcatcctcacctacaccgtggcctggctcttcatggcgtccatgtggtgggtgatcgcttatacccggggcgacctgaacaaagcccatgtcggcaactacactccctgtgtggccaatgtctataacttcccctctgccttccttttcttcatcgagaccgaggccaccatcggctatggctaccgctacatcaccgacaagtgccccgagggcatcatccttttccttttccagtccatccttggctccatcgtggacgctttcctcatcggctgcatgttcatcaagatgtcccagcccaaaaagcgcgccgagaccctcatgtttagcgagcatgcggttatttccatgagggacggaaaactcactctcatgttccgggtgggcaacctgcgcaacagccacatggtctccgcgcagatccgctgcaagctgctcaaatctcggcagacacctgagggtgagtttctaccccttgaccaacttgaactggatgtaggttttagtacaggggcagatcaactttttcttgtgtcccctctcaccatttgccacgtgattgatgccaaaagccccttttatgacctatcccagcgaagcatgcaaactgaacagttcgaggtggtcgtcatcctggaaggcatcgtggaaaccacagggatgacttgtcaagctcgaacatcatacaccgaagatgaagttctttggggtcatcgttttttccctgtaatttctttagaagaaggattctttaaagtcgattactcccagttccatgcaacctttgaagtccccacccctccgtacagtgtgaaagagcaggaagaaatgcttctcatgtcttcccctttaatagcaccagccataaccaacagcaaagaaagacacaattctgtggagtgcttagatggactagatgacattagcacaaaacttccatcgaagctgcagaaaattacggggagagaagactttcccaaaaaactcctgaggatgagttctacaacttcagaaaaagcctatagtttgggtgatttgcccatgaaactccaacgaataagttcggttcctggcaactctgaagaaaaactggtatctaaaaccaccaagatgttatcagatcccatgagccagtctgtggccgatttgccaccgaagcttcaaaagatggctggaggacctaccaggatggaagggaatcttccagccaaactaagaaaaatgaactctgaccgcttcacatagcaaaacaccccattaggcattatttcatgttttgatttagttttagtccaatatttggctgataagataatcctccccgggaaatctgagaggtctatcccagtctggcaaattcatcagaggactcttcattgaagtgttgttactgtgttgaacatgagttacaaagggaggacatcataagaaagctaatagttggcatgtattatcacatcaagcatgcaataatgtgcaaattttgcatttagttttctggcatgatt

SEQ ID NO: 96 - DNA, 1827 bp, Rattus norvegicus
  source 1..1827: mol_type = genomic DNA
aatcatgccagaaaactaaatgcaaaatttgcacattattgcatgcttgatgtgataatacatgccaactattagctttcttatgatgtcctccctttgtaactcatgttcaacacagtaacaacacttcaatgaagagtcctctgatgaatttgccagactgggatagacctctcagatttcccggggaggattatcttatcagccaaatattggactaaaactaaatcaaaacatgaaataatgcctaatggggtgttttgctatgtgaagcggtcagagttcatttttcttagtttggctggaagattcccttccatcctggtaggtcctccagccatcttttgaagcttcggtggcaaatcggccacagactggctcatgggatctgataacatcttggtggttttagataccagtttttcttcagagttgccaggaaccgaacttattcgttggagtttcatgggcaaatcacccaaactataggctttttctgaagttgtagaactcatcctcaggagttttttgggaaagtcttctctccccgtaattttctgcagcttcgatggaagttttgtgctaatgtcatctagtccatctaagcactccacagaattgtgtctttctttgctgttggttatggctggtgctattaaaggggaagacatgagaagcatttcttcctgctctttcacactgtacggaggggtggggacttcaaaggttgcatggaactgggagtaatcgactttaaagaatccttcttctaaagaaattacagggaaaaaacgatgaccccaaagaacttcatcttcggtgtatgatgttcgagcttgacaagtcatccctgtggtttccacgatgccttccaggatgacgaccacctcgaactgttcagtttgcatgcttcgctgggataggtcataaaaggggcttttggcatcaatcacgtggcaaatggtgagaggggacacaagaaaaagttgatctgcccctgtactaaaacctacatccagttcaagttggtcaaggggtagaaactcaccctcaggtgtctgccgagatttgagcagcttgcagcggatctgcgcggagaccatgtggctgttgcgcaggttgcccacccggaacatgagagtgagttttccgtccctcatggaaataaccgcatgctcgctaaacatgagggtctcggcgcgctttttgggctgggacatcttgatgaacatgcagccgatgaggaaagcgtccacgatggagccaaggatggactggaaaaggaaaaggatgatgccctcggggcacttgtcggtgatgtagcggtagccatagccgatggtggcctcggtctcgatgaagaaaaggaaggcagaggggaagttatagacattggccacacagggagtgtagttgccgacatgggctttgttcaggtcgccccgggtataagcgatcacccaccacatggacgccatgaagagccaggccacggtgtaggtgaggatgaagataaagaggttccaacgccacttgagatccaccagggtagtgaagaggtcggaaaggtagcgactggtctcgctgcccaggttgccgtgctgcacattgcaccgaccgttcttgtccacgaaccgctgccgtttcttcttgggtacaagctgctgctgtgggccctgtcctggcccctggggctgcaagcccgaaccgctggacgaagtggtcactacctggtaatcgtccccaaatttccttcggagtgcagacataatacggaggggagatccagattcaaacacgaagcggaggcgcaggagccaagcgctg

SEQ ID NO: 97 - DNA, 1965 bp, Macaca mulatta
  source 1..1965: mol_type = genomic DNA
agagaccgcagctacctgccgggtgcgccccccacccaggagcgctcgcttcgccccctttcctcccccgcccccacctctttattggtgctagtttgcagcgcccagctcctgcgccttcgctttgcgtttgaatctggctcgccccttcgtattatgtctgcactccgaaggaaatttggggacgattaccaggtagtgaccacatcgtccagcggctcgggcttgcagccccagggtccaggccaggaccctcagcagcagcttgtgcccaagaagaagcggcagcggttcgtggacaagaacggccggtgcaatgtacagcacggcaacctgggcagcgagacgagccgctacctctcggacctcttcaccacgctggtggacctcaagtggcgctggaacctcttcatcttcattctcacctacaccgtggcctggctcttcatggcatccatgtggtgggtgatcgcctacactcggggcgacctgaacaaagcccacgtcggtaactacacgccttgcgtggccaatgtctataacttcccttctgccttcctcttcttcattgagaccgaggccaccatcggctatggctaccgatacatcacagacaagtgccccgagggcatcatcctcttcctcttccagtccatcctgggctccatcgtggacgccttcctcatcggctgcatgttcatcaagatgtcccagcctaagaagcgcgccgagaccctcatgttcagcgagcacgcggtgatctccatgagggacggaaaactcacgcttatgttccgggtgggcaacctgcgcaacagccacatggtctccgcgcagatccgctgcaagctgctcaaatctcggcagacacctgagggtgagttccttccccttgaccaacttgaactggatgtaggttttagtacaggggcagatcaactttttcttgtgtcccccctcacaatttgccacgtgatcgatgccaaaagccccttttatgacctatcccagcgaagcatgcaaactgaacagttcgagattgtcgtcatcctagaaggcattgtggaaacaactgggatgacttgtcaagctcgaacatcatatactgaagatgaagttctttggggtcaccgtttttttcctgtaatttccttagaagagggattctttaaagttgattactcccagttccatgcaacatttgaagtccccaccccaccttacagtgtgaaagagcaggaggaaatgcttctcatgtcatcccctttaatagcaccagccataactaacagcaaagaaagacataattctgtggaatgcttagatggactagatgatattactacaaaactaccatctaagctacagaaaattactggaagagaagactttcccaaaaaactcttgaggatgagttctacaacttcagaaaaagcctacagcttgggagacttgcccatgaaacttcaacgaataagttcagttccgggcaactcagaagaaaaactggtatctaaaaccaccaagatgttatctgatcccatgagccagtctgtggctgatttgccaccaaagcttcaaaagatggctggaggagcagctaggatggaagggaaccttccagccaaattaagaaaaatgaactctgatcgcttcacataacaaagcactcccttaggcattatttaatgtttgatttagtaatagtccaatatttggcgatgaggtaattctccctaaggaatctgaaagtatattttcctcccagttctacaagcatatttgagaacccttcctttcccaagtattgctaatgtgcagaaagcaacagttacggagggaggacatcataaggaagttattaacgggcatgtattatcacatcaagcatgcaataatgtgcaaattttgcatttagttttatggcatgatttatatatggcatatttatattgtatattctgg

SEQ ID NO: 98 - DNA, 1965 bp, Macaca mulatta
  source 1..1965: mol_type = genomic DNA
ccagaatatacaatataaatatgccatatataaatcatgccataaaactaaatgcaaaatttgcacattattgcatgcttgatgtgataatacatgcccgttaataacttccttatgatgtcctccctccgtaactgttgctttctgcacattagcaatacttgggaaaggaagggttctcaaatatgcttgtagaactgggaggaaaatatactttcagattccttagggagaattacctcatcgccaaatattggactattactaaatcaaacattaaataatgcctaagggagtgctttgttatgtgaagcgatcagagttcatttttcttaatttggctggaaggttcccttccatcctagctgctcctccagccatcttttgaagctttggtggcaaatcagccacagactggctcatgggatcagataacatcttggtggttttagataccagtttttcttctgagttgcccggaactgaacttattcgttgaagtttcatgggcaagtctcccaagctgtaggctttttctgaagttgtagaactcatcctcaagagttttttgggaaagtcttctcttccagtaattttctgtagcttagatggtagttttgtagtaatatcatctagtccatctaagcattccacagaattatgtctttctttgctgttagttatggctggtgctattaaaggggatgacatgagaagcatttcctcctgctctttcacactgtaaggtggggtggggacttcaaatgttgcatggaactgggagtaatcaactttaaagaatccctcttctaaggaaattacaggaaaaaaacggtgaccccaaagaacttcatcttcagtatatgatgttcgagcttgacaagtcatcccagttgtttccacaatgccttctaggatgacgacaatctcgaactgttcagtttgcatgcttcgctgggataggtcataaaaggggcttttggcatcgatcacgtggcaaattgtgaggggggacacaagaaaaagttgatctgcccctgtactaaaacctacatccagttcaagttggtcaaggggaaggaactcaccctcaggtgtctgccgagatttgagcagcttgcagcggatctgcgcggagaccatgtggctgttgcgcaggttgcccacccggaacataagcgtgagttttccgtccctcatggagatcaccgcgtgctcgctgaacatgagggtctcggcgcgcttcttaggctgggacatcttgatgaacatgcagccgatgaggaaggcgtccacgatggagcccaggatggactggaagaggaagaggatgatgccctcggggcacttgtctgtgatgtatcggtagccatagccgatggtggcctcggtctcaatgaagaagaggaaggcagaagggaagttatagacattggccacgcaaggcgtgtagttaccgacgtgggctttgttcaggtcgccccgagtgtaggcgatcacccaccacatggatgccatgaagagccaggccacggtgtaggtgagaatgaagatgaagaggttccagcgccacttgaggtccaccagcgtggtgaagaggtccgagaggtagcggctcgtctcgctgcccaggttgccgtgctgtacattgcaccggccgttcttgtccacgaaccgctgccgcttcttcttgggcacaagctgctgctgagggtcctggcctggaccctggggctgcaagcccgagccgctggacgatgtggtcactacctggtaatcgtccccaaatttccttcggagtgcagacataatacgaaggggcgagccagattcaaacgcaaagcgaaggcgcaggagctgggcgctgcaaactagcaccaataaagaggtgggggcgggggaggaaagggggcgaagcgagcgctcctgggtggggggcgcacccggcaggtagctgcggtctct

SEQ ID NO: 99 - DNA, 4988 bp, Macaca fascicularis
  source 1..4988: mol_type = genomic DNA
aggtaaaggcagcttcttagtcagccagcgagttggcaggtgggttggggctcgctggtcaactcatttattttaagcagccagtttgggggtactgcaggataatcaggagggccgtggggagtcaagaggtgacccgggatgccggtggtggagaaagaaaagaggagcctcgggaagcttggaggcacaattgcgcttgggttcctggtccttgcatccctcctgccttgagtgcgggagaacacttttttaagactcaccttggcaagaaaacctccgtcctaggggagaaggagaggcgtcttctgcagggggcagagaccgcagctacctgccgggtgcgccccccacccaggagcgctcgcttcgccccctttcctcccccgcccccacctctttattggtgctagtttgcagcgcccagctcctgcgccttcgctttgcgtttgaatctggctcgccccttcgtattatgtctgcactccgaaggaaatttggggacgattaccaggtagtgaccacatcgtccagcggctcgggcttgcagccccagggtccaggccaggaccctcagcagcagcttgtgcccaagaagaagcggcagcggttcgtggacaagaacggccggtgcaatgtacagcacggcaacctgggcagcgagacgagccgctacctctcggacctcttcaccacgctggtggacctcaagtggcgctggaacctcttcatcttcattctcacctacaccgtggcctggctcttcatggcatccatgtggtgggtgatcgcctacactcggggcgacctgaacaaagcccacgtcggtaactacacgccttgcgtggccaatgtctataacttcccttctgccttcctcttcttcattgagaccgaggccaccatcggctatggctaccgatacatcacagacaagtgccccgagggcatcatcctcttcctcttccagtccatcctgggctccatcgtggacgccttcctcatcggctgcatgttcatcaagatgtcccagcctaagaagcgcgccgagaccctcatgttcagcgagcacgcggtgatctccatgagggacggaaaactcacgcttatgttccgggtgggcaacctgcgcaacagccacatggtctccgcgcagatccgctgcaagctgctcaaatctcggcagacacctgagggtgagttccttccccttgaccaacttgaactggatgtaggttttagtacaggggcagatcaactttttcttgtgtcccccctcacaatttgccacgtgatcgatgccaaaagccccttttatgacctatcccagcgaagcatgcaaactgaacagttcgagattgtcgtcatcctagaaggcattgtggaaacaactgggatgacttgtcaagctcgaacatcatatactgaagatgaagttctttggggtcaccgtttttttcctgtaatttccttagaagagggattctttaaagttgattactcccagttccatgcaacatttgaagtccccaccccaccttacagtgtgaaagagcaggaggaaatgcttctcatgtcatcccctttaatagcaccagccataactaacagcaaagaaagacataattctgtggaatgcttagatggactagatgatattactacaaaactaccatctaagctgcagaaaattactggaagagaagactttcccaaaaaactcttgaggatgagttctacaacttcagaaaaagcctacagcttgggagacttgcccatgaaacttcaacgaataagttcagttccgggcaactcagaagaaaaactggtatctaaaacgaccaagatgttatctgatcccatgagccagtctgtggctgatttgccaccaaagcttcaaaagatggctggaggagcagctaggatggaagggaaccttccagccaaattaagaaaaatgaactctgatcgcttcacataacaaagcactcccttaggcattatttaatgtttgatttagtaatagtccaatatttggcgatgaggtaattctccctaaggaatctgaaagtatattttcctcccagttctacaagcatatttgagaacccttcctttcccaagtattgctaatgtgcagaaagcaacagttacggagggaggacatcataaggaagttattaacgggcatgtattatcacatcaagcatgcaataatgtgcaaattttgcatttagttttatggcatgatttatatatggcatatttatattgtatattctggaaaaatatatatatatatatatatatttaaaggggaaatactctccccgacatttctaacatatatattaagccaaacatgagtgaatagttttcagggcgataaaactaaatatatgtctgtgtgtgtgtgtatgtatacacacatatacatatatatatatacatacatacacatacatacatacatacatatatatctgataaaattgtgatgttttgttcaaagttgtagttcttgtgcatgtttactttattagagtaggaaggctactggcattaattattaataccaaatattttagccttaaatttttgtcattttaaaatctgatttaatgttttctgctgtttaaggtcctgggaggctttcaattgtattttatatgagagaatcacacaagtttgtgctatctatggccctgcaaaaatataaccattacatgtttaaattgtaaactttagagcataccagtactcagtatagcaccgaacatttcttatgatttttaaaagttgctagtactggggagaaataattattgattaatttgagaatcattcctttcctagactaattaaaatctggaaatctattttgtatatgatctaatacaaagatgagctctgaacaaacactgaatcatgttattagacagtagccaggttatattgaatatatcagaatctgtgtgaagttatacaattaatggtccctgttttcaaactgagtaaattggaaacattttcattccttttctggaaattttgtccattttaaagaccaatcattttaagaagacatgacaatgcaatgaaacagatgataaatatttatgcttaaaatatgtatgtctatttgagtctctttttaactctgttttcttgtttatggcatttgttgtaacaggatagactttttcctcacctggggaacctatcccatgcttgtcacttatagttcaggaggaagtttttgcacagaccagagagaaattaaaattagataaattgaagatatcttacacacagttttttggtgaacactgattttattggtgtcttggatccctggtctacccaaataattttaacagtactgttttttctaatcctgaagtctgatatttatgacttataagcaggaatcaaaactagtgatcagtagaacattttcaaaataaaaatttggaatgcagagacttttatgaaaatgtaaaagtgctccttaacagaatatcatgggttttcctataaaacttaagtatttataatttaagtctgccccaaattttaaaaagttctcattaatatgtaagtcattaattgctagtttgggctctcattatttcctattttttaacaattttgtgataattttattattggcaaattaatacatcacttaaatcactgactataataataccttctggctacctctgtatcaaccaaattctgtaggtgcaaacatataccagggaattcttactggcaaaatgatctatcttgagtgtgcatccactgtgaatggagcgaactgccctatacccattgataaccaagctttcttattttgtggatgtaggaaacaaaatagtgagagagagagaaaggggtacacagggcatggtatattgatcagcagtgggaaaaaagtgcatagatcatttagtccaagaacttaaaactaaatagagccataatttactttggagagtcatttgaatttgtctttggtaccaacgagaagacagagccaaaaacaaactctccaagtgtattcacactttcaacaaaatttttgcatgccttctatgtcgtaggcatttttagttcctggggatttggacatagctaagtcagaggaggctgttgctcaccatgaacactgtataccagaaggagagtggggaggagacaaacaacaaataagaccacttcagacaaagtatcagttaagagaagaaaacaggcctgacgcagtggttcacgcctgtaatcccagtactttgggaggccgaggttggggcatcacctgaggtcaggagttcaagaccagcctggacaacatggtgaaatcccatctgtactaaaaatgcaaaaattaactgggcatggtggcaggcacctgtaatcccagttactggggaagctgaggcaagagaatcgcttgaacctgggaggcagaggttgcagtgagccgagattctgccactgtactccagcctgggtgacagagcaagactccatctcaacatctaaaaaaaaaaaagaataaaaacagggtaacataatgcaaagtaactgtgtggggtaaaaattgattattttagaaaaatgtcactggcttaggacagggataatatgtgaacagaaatctatctgatgagaaagagctactgttgttgaaattaccttatctgagtgaatggtgttttttttttatcttttccacacatgcgtgggaaaggtatgatttctgcatgtaattgcagtttaacccttatttctaggttgatcgtaggtcccagtttacccaggaagattccagtttatacctgttgtacctgtgtaattattggtagcactccctttcactcttacaatgtcttggtttggatgatatatggtgaagtttttgttgaaactaaattatgaagtctgatatatttggataaaaataaagaattgcttttcttctc

SEQ ID NO: 100 - DNA, 4988 bp, Macaca fascicularis
  source 1..4988: mol_type = genomic DNA
gagaagaaaagcaattctttatttttatccaaatatatcagacttcataatttagtttcaacaaaaacttcaccatatatcatccaaaccaagacattgtaagagtgaaagggagtgctaccaataattacacaggtacaacaggtataaactggaatcttcctgggtaaactgggacctacgatcaacctagaaataagggttaaactgcaattacatgcagaaatcatacctttcccacgcatgtgtggaaaagataaaaaaaaaacaccattcactcagataaggtaatttcaacaacagtagctctttctcatcagatagatttctgttcacatattatccctgtcctaagccagtgacatttttctaaaataatcaatttttaccccacacagttactttgcattatgttaccctgtttttattcttttttttttttagatgttgagatggagtcttgctctgtcacccaggctggagtacagtggcagaatctcggctcactgcaacctctgcctcccaggttcaagcgattctcttgcctcagcttccccagtaactgggattacaggtgcctgccaccatgcccagttaatttttgcatttttagtacagatgggatttcaccatgttgtccaggctggtcttgaactcctgacctcaggtgatgccccaacctcggcctcccaaagtactgggattacaggcgtgaaccactgcgtcaggcctgttttcttctcttaactgatactttgtctgaagtggtcttatttgttgtttgtctcctccccactctccttctggtatacagtgttcatggtgagcaacagcctcctctgacttagctatgtccaaatccccaggaactaaaaatgcctacgacatagaaggcatgcaaaaattttgttgaaagtgtgaatacacttggagagtttgtttttggctctgtcttctcgttggtaccaaagacaaattcaaatgactctccaaagtaaattatggctctatttagttttaagttcttggactaaatgatctatgcacttttttcccactgctgatcaatataccatgccctgtgtacccctttctctctctctcactattttgtttcctacatccacaaaataagaaagcttggttatcaatgggtatagggcagttcgctccattcacagtggatgcacactcaagatagatcattttgccagtaagaattccctggtatatgtttgcacctacagaatttggttgatacagaggtagccagaaggtattattatagtcagtgatttaagtgatgtattaatttgccaataataaaattatcacaaaattgttaaaaaataggaaataatgagagcccaaactagcaattaatgacttacatattaatgagaactttttaaaatttggggcagacttaaattataaatacttaagttttataggaaaacccatgatattctgttaaggagcacttttacattttcataaaagtctctgcattccaaatttttattttgaaaatgttctactgatcactagttttgattcctgcttataagtcataaatatcagacttcaggattagaaaaaacagtactgttaaaattatttgggtagaccagggatccaagacaccaataaaatcagtgttcaccaaaaaactgtgtgtaagatatcttcaatttatctaattttaatttctctctggtctgtgcaaaaacttcctcctgaactataagtgacaagcatgggataggttccccaggtgaggaaaaagtctatcctgttacaacaaatgccataaacaagaaaacagagttaaaaagagactcaaatagacatacatattttaagcataaatatttatcatctgtttcattgcattgtcatgtcttcttaaaatgattggtctttaaaatggacaaaatttccagaaaaggaatgaaaatgtttccaatttactcagtttgaaaacagggaccattaattgtataacttcacacagattctgatatattcaatataacctggctactgtctaataacatgattcagtgtttgttcagagctcatctttgtattagatcatatacaaaatagatttccagattttaattagtctaggaaaggaatgattctcaaattaatcaataattatttctccccagtactagcaacttttaaaaatcataagaaatgttcggtgctatactgagtactggtatgctctaaagtttacaatttaaacatgtaatggttatatttttgcagggccatagatagcacaaacttgtgtgattctctcatataaaatacaattgaaagcctcccaggaccttaaacagcagaaaacattaaatcagattttaaaatgacaaaaatttaaggctaaaatatttggtattaataattaatgccagtagccttcctactctaataaagtaaacatgcacaagaactacaactttgaacaaaacatcacaattttatcagatatatatgtatgtatgtatgtatgtgtatgtatgtatatatatatatgtatatgtgtgtatacatacacacacacacagacatatatttagttttatcgccctgaaaactattcactcatgtttggcttaatatatatgttagaaatgtcggggagagtatttcccctttaaatatatatatatatatatatatttttccagaatatacaatataaatatgccatatataaatcatgccataaaactaaatgcaaaatttgcacattattgcatgcttgatgtgataatacatgcccgttaataacttccttatgatgtcctccctccgtaactgttgctttctgcacattagcaatacttgggaaaggaagggttctcaaatatgcttgtagaactgggaggaaaatatactttcagattccttagggagaattacctcatcgccaaatattggactattactaaatcaaacattaaataatgcctaagggagtgctttgttatgtgaagcgatcagagttcatttttcttaatttggctggaaggttcccttccatcctagctgctcctccagccatcttttgaagctttggtggcaaatcagccacagactggctcatgggatcagataacatcttggtcgttttagataccagtttttcttctgagttgcccggaactgaacttattcgttgaagtttcatgggcaagtctcccaagctgtaggctttttctgaagttgtagaactcatcctcaagagttttttgggaaagtcttctcttccagtaattttctgcagcttagatggtagttttgtagtaatatcatctagtccatctaagcattccacagaattatgtctttctttgctgttagttatggctggtgctattaaaggggatgacatgagaagcatttcctcctgctctttcacactgtaaggtggggtggggacttcaaatgttgcatggaactgggagtaatcaactttaaagaatccctcttctaaggaaattacaggaaaaaaacggtgaccccaaagaacttcatcttcagtatatgatgttcgagcttgacaagtcatcccagttgtttccacaatgccttctaggatgacgacaatctcgaactgttcagtttgcatgcttcgctgggataggtcataaaaggggcttttggcatcgatcacgtggcaaattgtgaggggggacacaagaaaaagttgatctgcccctgtactaaaacctacatccagttcaagttggtcaaggggaaggaactcaccctcaggtgtctgccgagatttgagcagcttgcagcggatctgcgcggagaccatgtggctgttgcgcaggttgcccacccggaacataagcgtgagttttccgtccctcatggagatcaccgcgtgctcgctgaacatgagggtctcggcgcgcttcttaggctgggacatcttgatgaacatgcagccgatgaggaaggcgtccacgatggagcccaggatggactggaagaggaagaggatgatgccctcggggcacttgtctgtgatgtatcggtagccatagccgatggtggcctcggtctcaatgaagaagaggaaggcagaagggaagttatagacattggccacgcaaggcgtgtagttaccgacgtgggctttgttcaggtcgccccgagtgtaggcgatcacccaccacatggatgccatgaagagccaggccacggtgtaggtgagaatgaagatgaagaggttccagcgccacttgaggtccaccagcgtggtgaagaggtccgagaggtagcggctcgtctcgctgcccaggttgccgtgctgtacattgcaccggccgttcttgtccacgaaccgctgccgcttcttcttgggcacaagctgctgctgagggtcctggcctggaccctggggctgcaagcccgagccgctggacgatgtggtcactacctggtaatcgtccccaaatttccttcggagtgcagacataatacgaaggggcgagccagattcaaacgcaaagcgaaggcgcaggagctgggcgctgcaaactagcaccaataaagaggtgggggcgggggaggaaagggggcgaagcgagcgctcctgggtggggggcgcacccggcaggtagctgcggtctctgccccctgcagaagacgcctctccttctcccctaggacggaggttttcttgccaaggtgagtcttaaaaaagtgttctcccgcactcaaggcaggagggatgcaaggaccaggaacccaagcgcaattgtgcctccaagcttcccgaggctcctcttttctttctccaccaccggcatcccgggtcacctcttgactccccacggccctcctgattatcctgcagtacccccaaactggctgcttaaaataaatgagttgaccagcgagccccaacccacctgccaactcgctggctgactaagaagctgcctttacct

SEQ ID NO: 101 - DNA, 2065 bp, Homo sapiens
  source 1..2065: mol_type = genomic DNA
gggagcggcgcgggacggccgggacgcgcggagaccccaagacccacgcgcagaccgagcggcagccggggaggggagcgcgggccggccggccgagttcgcgggcagggggcgccgggactcccctttccgcgcccgggacgccgcccgccggatcgcgccttgggatgtagcgcccgctcgccgcctcccggactctcgtcggaccctccgcccagcggccctgcgtcttcccaggtgaccacgccggcttcaggacatgcacggacacagccgcaacggccaggcccacgtgccccggcggaagcgccgcaaccgcttcgtcaagaagaacggccaatgcaacgtgtacttcgccaacctgagcaacaagtcgcagcgctacatggcggacatcttcaccacctgcgtggacacgcgctggcgctacatgctcatgatcttctccgcggccttccttgtctcctggctctttttcggcctcctcttctggtgtatcgccttcttccacggtgacctggaggccagcccaggggtgcctgcggcggggggcccggcggcgggtggtggcggagcagccccggtggcccccaagccctgcatcatgcacgtgaacggcttcctgggtgccttcctgttctcggtggagacgcagacgaccatcggctatgggttccggtgcgtgacagaggagtgcccgctggcagtcatcgctgtggtggtccagtccatcgtgggctgcgtcatcgactccttcatgattggcaccatcatggccaagatggcgcggcccaagaagcgggcgcagacgttgctgttcagccaccacgcggtcatttcggtgcgcgacggcaagctctgcctcatgtggcgcgtgggcaacctgcgcaagagccacattgtggaggcccacgtgcgggcccagctcatcaagccctacatgacccaggagggcgagtacctgcccctggaccagcgggacctcaacgtgggctatgacatcggcctggaccgcatcttcctggtgtcgcccatcatcattgtccacgagatcgacgaggacagcccgctttatggcatgggcaaggaggagctggagtcggaggactttgagatcgtggtcatcctggagggcatggtggaggccacggccatgaccacccaggcccgcagctcctacctggccagcgagatcctgtggggccaccgctttgagcctgtggtcttcgaggagaagagccactacaaggtggactactcacgttttcacaagacctacgaggtggccggcacgccctgctgctcggcccgggagctgcaggagagtaagatcaccgtgctgcccgccccaccgccccctcccagtgccttctgctacgagaacgagctggcccttatgagccaggaggaagaggagatggaggaggaggcagctgcggcggccgcggtggccgcaggcctgggcctggaggcgggttccaaggaggaggcgggcatcatccggatgctggagttcggcagccacctggacctggagcgcatgcaggcttccctcccgctggacaacatctcctaccgcagggagtctgccatctgacctccaggcccggccctcaccactgcccacaagagcctctgccgggggtgggatgccaggacaccccctcccacactcaggacagagccaaccctggctccgtggaccttctggaggaaggtgggggtttcaaagactgggggaccccttcctcctgactccagcacccaggcctgggaagagctcggccccgatcagcctgagttccgccagcgcctacttctggtggctctaggtccccggatccaccacccttcccccactgactcttcaaggacgtgccctctttgctctcagaaccttggggaaggtggctggactgctgggcgggggacatctcggggtttcagggtgggcagggggttagtttggggaggggggggtgcgtttcttttgcatgactgtggcctgttgctcatgactttcttttgtaaatatctataaatggagacagatggagacaccaaa

SEQ ID NO: 102 - DNA, 2065 bp, Homo sapiens
  source 1..2065: mol_type = genomic DNA
tttggtgtctccatctgtctccatttatagatatttacaaaagaaagtcatgagcaacaggccacagtcatgcaaaagaaacgcacccccccctccccaaactaaccccctgcccaccctgaaaccccgagatgtcccccgcccagcagtccagccaccttccccaaggttctgagagcaaagagggcacgtccttgaagagtcagtgggggaagggtggtggatccggggacctagagccaccagaagtaggcgctggcggaactcaggctgatcggggccgagctcttcccaggcctgggtgctggagtcaggaggaaggggtcccccagtctttgaaacccccaccttcctccagaaggtccacggagccagggttggctctgtcctgagtgtgggagggggtgtcctggcatcccacccccggcagaggctcttgtgggcagtggtgagggccgggcctggaggtcagatggcagactccctgcggtaggagatgttgtccagcgggagggaagcctgcatgcgctccaggtccaggtggctgccgaactccagcatccggatgatgcccgcctcctccttggaacccgcctccaggcccaggcctgcggccaccgcggccgccgcagctgcctcctcctccatctcctcttcctcctggctcataagggccagctcgttctcgtagcagaaggcactgggagggggcggtggggcgggcagcacggtgatcttactctcctgcagctcccgggccgagcagcagggcgtgccggccacctcgtaggtcttgtgaaaacgtgagtagtccaccttgtagtggctcttctcctcgaagaccacaggctcaaagcggtggccccacaggatctcgctggccaggtaggagctgcgggcctgggtggtcatggccgtggcctccaccatgccctccaggatgaccacgatctcaaagtcctccgactccagctcctccttgcccatgccataaagcgggctgtcctcgtcgatctcgtggacaatgatgatgggcgacaccaggaagatgcggtccaggccgatgtcatagcccacgttgaggtcccgctggtccaggggcaggtactcgccctcctgggtcatgtagggcttgatgagctgggcccgcacgtgggcctccacaatgtggctcttgcgcaggttgcccacgcgccacatgaggcagagcttgccgtcgcgcaccgaaatgaccgcgtggtggctgaacagcaacgtctgcgcccgcttcttgggccgcgccatcttggccatgatggtgccaatcatgaaggagtcgatgacgcagcccacgatggactggaccaccacagcgatgactgccagcgggcactcctctgtcacgcaccggaacccatagccgatggtcgtctgcgtctccaccgagaacaggaaggcacccaggaagccgttcacgtgcatgatgcagggcttgggggccaccggggctgctccgccaccacccgccgccgggccccccgccgcaggcacccctgggctggcctccaggtcaccgtggaagaaggcgatacaccagaagaggaggccgaaaaagagccaggagacaaggaaggccgcggagaagatcatgagcatgtagcgccagcgcgtgtccacgcaggtggtgaagatgtccgccatgtagcgctgcgacttgttgctcaggttggcgaagtacacgttgcattggccgttcttcttgacgaagcggttgcggcgcttccgccggggcacgtgggcctggccgttgcggctgtgtccgtgcatgtcctgaagccggcgtggtcacctgggaagacgcagggccgctgggcggagggtccgacgagagtccgggaggcggcgagcgggcgctacatcccaaggcgcgatccggcgggcggcgtcccgggcgcggaaaggggagtcccggcgccccctgcccgcgaactcggccggccggcccgcgctcccctccccggctgccgctcggtctgcgcgtgggtcttggggtctccgcgcgtcccggccgtcccgcgccgctccc

SEQ ID NO: 103 - DNA, 7039 bp, Mus musculus
  source 1..7039: mol_type = genomic DNA
tacaagatttctttgggtgcccagtggggaaggagggactggtcacaacactgtaagacccagcgggtagcataagaaatcttgtttgaggaagttgcatgcaggattgtaattaaggaaaagtgtcaaggcaagtgagttttgagtagtaggagtttgcctccagagccaagagccggagtaaggaaaggcctacgaacaaggagggaggcgatggcgcactgtcccagagcctctgcgcggctctgagttggaacagatgatcttcaggttaggcagaggagtttagagtctcagcagccgaactgagaagctgctccgtttaaaccactgtttctctcccgtccatagtctgtgtgtatatttttactgggatagtcacagggccaaagttaagcaaagcgtttcgaaggaacacgtaaagaatcacttgtcagctgtttgatccccttcgcaggaacccgagacccaaggagggcttgcaaaaacagaccccgtgcagcctccgagggcggattccggttcagtagcgccttcctggcgcggtagaattcagccgctagaagtgctcgggattgactgtgcggggtgggggtgggggggtgacgcgggtttccgcacatcaccgcgctgtgcttctgaggtgtgtgctcgctactcttggagagttactctaaggacaggtgtcgttttcccgaaaccctaaacgctgtggtccgcgcgctgctctagtctggtggctgagtcgtgagccgggcctggcccgggcgaggttcccacggcaaccgcaagccgctccgggcgtctccggagtgacgaggcgcgaaccaagacccggagccgggatttctggagccgagccacggagcgaggcaggagagagatcgcggctggccaaatgaggaggggagccacgccgcggcctttcgtccttgcgcgggcatccagcaaactcctcttccactcatcccagcctcagtgtggccatcagctgcggctagataccctcctggggattccttccctgctatcaaggtggggagacggagagctaggcagcatcccagtatcactgggtgaagtgggcaaagccaggctctgtcccaggtggctgatattccggacagagaactgtgcagacaagtggaagacaggccacacgcacctcctctggttcgaggactagcccagttagtaacctgctgtgtggtcttgaagtccccactcctctccaggtctaggagatggaacattaccaccaatgtctcagagtagctcttaccaagtgtgtgaaatagtcaccaagtttaaaagaagctgtcaaactgcaaagtgccttgcacatgccaagggccatctccgtctctgttctggtcctgtccctcactccagccccagaagcttggtctcagaaccttccatgcctagaggtttcaagcctgcaggccctgcatctccccaggtgaccacgacgacgtcctcaggtcatgcacggacacaaccgaaacgggcaggcccacgtgcccaggcggaaacgccgcaaccgctttgtcaagaagaacggccagtgtaacgtctacttcgccaacctgagcaacaagtcccagcgctacatggcagacatcttcaccacctgcgtggacacgcgctggcgctatatgctcatgatcttctccgcggccttcctcgtttcctggctcttcttcggcctcctcttctggtgcattgccttcttccatggtgacctggaggccagtccctctgtgcccgcggcaggaggcccggggggcaatggcggggcaagcccgaatgcccccaaaccctgtatcatgcacgtaaacggctttttgggggccttcctcttctcagtggagacccagacgaccattggctacgggttccggtgtgtgacagaggagtgcccgttggcggtcattgcggtggttgtccagtccattgtgggctgtgtcattgactccttcatgattggcacgatcatggccaagatggcacggcccaagaagcgggcacagaccctgctgttcagccaccatgctgtcatctccgttcgagacggcaagctctgcctgatgtggcgcgtgggtaacctgcgcaagagtcacattgtggaggcccacgtccgggcccagctcatcaaaccctacatgacacaggagggtgagtacctgccactggaccagcgggacctcaacgtgggctatgacatcggcctggaccgcatcttcttggtgtcacccatcatcatagtgcatgaaatcgacgaggacagcccactctacggcatgggcaaggaggagctggagtcagaggactttgagattgtggtcatcctggagggtatggtggaggccacggctatgaccactcaggcccgcagctcctatctggccagtgagatcctgtggggtcaccggtttgagcctgtggtcttcgaggaaaagagtcactacaaggtggactactcacgattccacaagacctatgaggtggctggcacgccttgctgctccgcccgtgagctgcaggagagcaagatcacggtgctgcccgccccaccgccccctcccagtgccttctgctatgagaatgagctggcccttatgagccaggaggaagaggagatggaagaggaggctgcggccgcagcagccgtggctgcaggcctgggcctggaggcaggttccaaagaggaggcaggcattatccggatgcttgagtttggcagccacctggatctggagcgcatgcaagccgccacccttccactggacaatatttcctatcgcagggaatctgccatctgacctccaggccctgccctcctctattcccgcaagagcctctgccaggggtgggacgccaggacaagccttccactcttaggacagagttgaacgtggctctgtggacctagaggaaggtgggggcttcaaagactgggagatcccttcctgttgactacagggcccaggactggaaaggacccaggtactccgccctgatggcccagggccccctggcatctccccacggtggctctgggcccccagatcttccacccttttcccactgacccttcaaggatgtaccccttctgctctcaggacctcggggaaggcggctggactgctggggggcgggcatcatggggttctgggtgggcagggtgggtctgggggagggggaagggtgtgtttcttttgcatgactgtggtctgtgctcttgattctcttttgtaaatatctataaatggaagagatggagacacaagtccacctctgcccatttctacctgtgagacagagagaggctgccaacccctctctgtgcactcccccgtccagcctcagcccgacccagctggctggtcccttgagacctttgaagccggctctgtatggtgttgggtttgggtacagaggggactcagaggtaggatgagtacccctccctccttgcagtccctccagtttccagattgatgacggcgtttgtaactatttttaataaagcatatggtccactagaagtaggctggtagagagaggagagagagagagagagagagagagagcgcaagcaagcatgtgagtatctgtatgtggccccttttctttaaaactagcgtgtgtgtgtgtgtgtgtgtgtgtgtgtgtgtgtgtgcgcgcgcgcgcgcgcaggtgcacatgtgtgtccttatggaagccaaaggacaacctcagatgttgtccttcgggggccatctacccttttttttaaaatttattttcattttcatgggcattccttccccccctccccctatgtatgtgtgtgcaactgatgcctgcagaggccaaaagatagcatggaatcctcagggcagggagttactgagggttgtgagccaccatgtggttctgggaatctaatctgggtcctctgcaaaagcaacaagtgcccttaaccgctgagccgcctctccagccccacccaccttattatttttttttttttttgaaacagggtctctcactggcctggagcacatgattagggtagctgaccagagagcccccggatctcctgtcgagggccagcttttttttttttcattaaaacacaggtgctggggatggaatctaggtcatgtgtgtctttcatcccttaggccttctcaggggtacatacccttccggagatacacagggacctctgccccctggtagtcaatggaaggaccctgggtgagtatcatagaagctaggtctgaatcaaatcttggtacctcagaggaagtaggaagcgcccactggattgacccacacgcagacgtacacacactcgtgtctctacacactgctcagggagcctgcaggacaccctggtgggaggggccccagaaacctactgagaacccggtttctgccttgccatgggacctctggtaagtccttctctctgagctccatagtttgtgttatgtgaagagccaacctgcatcaggtaaccgttacctgtccttcaaagtctgtgagtagccgagggctcccaggcatcaggagcccactctctgaggcaaaggggggggggaaccagacccgatctctgcggagtgtagcaagttagtgtcgagggctgcccgggagaaaagtgctggatggtctagccccatcccttcagccactctgttctacatgccaaccgtgtgcctagcattcaggctgtggaaaagcagaaagtaccctgtgtggtctcaggaacctctctgccaatataccagcttacctactgcgaaggaaggtgggtctatgacgatcacagaacaccagccatggccgcaagcaaccatttagataaatacagcacacccagcatgctttaaccatttgacaagggaatctgagagttctttcctggaaagaggctagcttgggatctaagacatcctccccccgccccccataggtagcttactgcagtcagtcaagggctgagttcacatcacatttgatggactaataagacatacagacctggagaactaaggactggacttcactatatacggctctgaggcctgcttctcctctcccatcctctgaggccagagatggacggaggggatgctgcctgccgtgtttccccaccctgggattccaagggtgccagtaaccattagcagcctccaagggctgaagcagaagatgagaggtagcattcagcaaaagaaaaggctcaatcaatggcctagccacccaggctcgccccaaacccaggaagcttctcagggatgccctaccttccagccccaggaggacacggggaggccctcctctcctgattgtcccaggtgatgggaaggaactgcctctgctccggtctcccactgggcccagaatgtggaacaggtatccacattcttcttgctgtccactccagcaagaggccaagtttagagggccacccagggacaagcctttcagcaccccgccccccaaacattgttaccagttagcctcttgcactgactgttgggggcaaccgtgtctttcagacaaccccattcttttctcaggccacaccaccaccacagctgccaccacgccagatccagggtgcaagagagctcaactgcaccgctccaggcaggctgcaagctgggctcagctctgctgactcacctctctcccacctgctcccctttcgcagccctcccacccgcttcccagctccgtgtgcagctcctctgatctctctctctctccttccctgctctcctggtggctgcatctgggggcggcgagcagcttcgataccttggtgctcagtcatgcaaactggttagcagctgcggggacttttggaggtgccaccacgcccttttctgctcagcccggggaagatgggccagccttgtctagcctagagcctgctcttcagtctggaagagagatcacgaaggacttgaagggagcacaggtgtaggaggggagggaagggcaggagggtgtggtctcactgaagctccgcccccgcacctgccggctgcctggaaaaactaccattcaagagtaatcttggctcgccatggcttcctccgagatggcttctggagttttccttaggaacttaaaacagcttagagagaactagagaggagcccaggtggcattcagctacgaattgtcactataaggcctttcttggatcatgcaggcttcttcctgcatgtagcttctctcatcttttctggatatgggctgttctgggcagtattgtatgttttgttagttttgtttgtttgttttaaagactaggtctcatgtagcccaggctggcctcaaactcagtgtgtagctaaagatgattgtgaactctggaccctcccgcttttgcctcccaagggctaatgttaaaggtgtgggtaccatcactcccaggcaaatcttccatttttggagtttgacaggagcagatggatctctgtgagttccaggctagcctggtctacctggcaagttccaggacagccacatacgaagactttatctcaaaaagcaaacaaaccccaaagatgaaagactggagcattcacatcctcccatgaaaataagctacaccttttaaggatgggaaggttttaacaccccagcttccctcctggtgtgaggaggaaggacagcgatcaagggacaatgaagtcaagacccttggcaccccatgtcccccaactgggagggaagactgagaggcagaggctcctaggttggaattttgcccttgggacttggcagctgtgtgaccttgggcaggtaaatttgtccgtgtgtgtgtgtgtgtgtgtgtgtgtgtgtgtgtgtgtgtgatattcatatatctatcttcattttgtatgaactaaatgagagcctgtgtgtgactgggcatggcaggtatgggggtctggtgttaaatgatctaaatcatctaaataaatgtgagtggcctttggaaacagtttgatcaacttaacaataaatgacacaattagtgtga

SEQ ID NO: 104 - DNA, 7039 bp, Mus musculus
  source 1..7039: mol_type = genomic DNA
tcacactaattgtgtcatttattgttaagttgatcaaactgtttccaaaggccactcacatttatttagatgatttagatcatttaacaccagacccccatacctgccatgcccagtcacacacaggctctcatttagttcatacaaaatgaagatagatatatgaatatcacacacacacacacacacacacacacacacacacacacacggacaaatttacctgcccaaggtcacacagctgccaagtcccaagggcaaaattccaacctaggagcctctgcctctcagtcttccctcccagttgggggacatggggtgccaagggtcttgacttcattgtcccttgatcgctgtccttcctcctcacaccaggagggaagctggggtgttaaaaccttcccatccttaaaaggtgtagcttattttcatgggaggatgtgaatgctccagtctttcatctttggggtttgtttgctttttgagataaagtcttcgtatgtggctgtcctggaacttgccaggtagaccaggctagcctggaactcacagagatccatctgctcctgtcaaactccaaaaatggaagatttgcctgggagtgatggtacccacacctttaacattagcccttgggaggcaaaagcgggagggtccagagttcacaatcatctttagctacacactgagtttgaggccagcctgggctacatgagacctagtctttaaaacaaacaaacaaaactaacaaaacatacaatactgcccagaacagcccatatccagaaaagatgagagaagctacatgcaggaagaagcctgcatgatccaagaaaggccttatagtgacaattcgtagctgaatgccacctgggctcctctctagttctctctaagctgttttaagttcctaaggaaaactccagaagccatctcggaggaagccatggcgagccaagattactcttgaatggtagtttttccaggcagccggcaggtgcgggggcggagcttcagtgagaccacaccctcctgcccttccctcccctcctacacctgtgctcccttcaagtccttcgtgatctctcttccagactgaagagcaggctctaggctagacaaggctggcccatcttccccgggctgagcagaaaagggcgtggtggcacctccaaaagtccccgcagctgctaaccagtttgcatgactgagcaccaaggtatcgaagctgctcgccgcccccagatgcagccaccaggagagcagggaaggagagagagagagatcagaggagctgcacacggagctgggaagcgggtgggagggctgcgaaaggggagcaggtgggagagaggtgagtcagcagagctgagcccagcttgcagcctgcctggagcggtgcagttgagctctcttgcaccctggatctggcgtggtggcagctgtggtggtggtgtggcctgagaaaagaatggggttgtctgaaagacacggttgcccccaacagtcagtgcaagaggctaactggtaacaatgtttggggggcggggtgctgaaaggcttgtccctgggtggccctctaaacttggcctcttgctggagtggacagcaagaagaatgtggatacctgttccacattctgggcccagtgggagaccggagcagaggcagttccttcccatcacctgggacaatcaggagaggagggcctccccgtgtcctcctggggctggaaggtagggcatccctgagaagcttcctgggtttggggcgagcctgggtggctaggccattgattgagccttttcttttgctgaatgctacctctcatcttctgcttcagcccttggaggctgctaatggttactggcacccttggaatcccagggtggggaaacacggcaggcagcatcccctccgtccatctctggcctcagaggatgggagaggagaagcaggcctcagagccgtatatagtgaagtccagtccttagttctccaggtctgtatgtcttattagtccatcaaatgtgatgtgaactcagcccttgactgactgcagtaagctacctatggggggcggggggaggatgtcttagatcccaagctagcctctttccaggaaagaactctcagattcccttgtcaaatggttaaagcatgctgggtgtgctgtatttatctaaatggttgcttgcggccatggctggtgttctgtgatcgtcatagacccaccttccttcgcagtaggtaagctggtatattggcagagaggttcctgagaccacacagggtactttctgcttttccacagcctgaatgctaggcacacggttggcatgtagaacagagtggctgaagggatggggctagaccatccagcacttttctcccgggcagccctcgacactaacttgctacactccgcagagatcgggtctggttcccccccccctttgcctcagagagtgggctcctgatgcctgggagccctcggctactcacagactttgaaggacaggtaacggttacctgatgcaggttggctcttcacataacacaaactatggagctcagagagaaggacttaccagaggtcccatggcaaggcagaaaccgggttctcagtaggtttctggggcccctcccaccagggtgtcctgcaggctccctgagcagtgtgtagagacacgagtgtgtgtacgtctgcgtgtgggtcaatccagtgggcgcttcctacttcctctgaggtaccaagatttgattcagacctagcttctatgatactcacccagggtccttccattgactaccagggggcagaggtccctgtgtatctccggaagggtatgtacccctgagaaggcctaagggatgaaagacacacatgacctagattccatccccagcacctgtgttttaatgaaaaaaaaaaaagctggccctcgacaggagatccgggggctctctggtcagctaccctaatcatgtgctccaggccagtgagagaccctgtttcaaaaaaaaaaaaaaataataaggtgggtggggctggagaggcggctcagcggttaagggcacttgttgcttttgcagaggacccagattagattcccagaaccacatggtggctcacaaccctcagtaactccctgccctgaggattccatgctatcttttggcctctgcaggcatcagttgcacacacatacatagggggagggggggaaggaatgcccatgaaaatgaaaataaattttaaaaaaaagggtagatggcccccgaaggacaacatctgaggttgtcctttggcttccataaggacacacatgtgcacctgcgcgcgcgcgcgcgcacacacacacacacacacacacacacacacacacacgctagttttaaagaaaaggggccacatacagatactcacatgcttgcttgcgctctctctctctctctctctctctctcctctctctaccagcctacttctagtggaccatatgctttattaaaaatagttacaaacgccgtcatcaatctggaaactggagggactgcaaggagggaggggtactcatcctacctctgagtcccctctgtacccaaacccaacaccatacagagccggcttcaaaggtctcaagggaccagccagctgggtcgggctgaggctggacgggggagtgcacagagaggggttggcagcctctctctgtctcacaggtagaaatgggcagaggtggacttgtgtctccatctcttccatttatagatatttacaaaagagaatcaagagcacagaccacagtcatgcaaaagaaacacacccttccccctcccccagacccaccctgcccacccagaaccccatgatgcccgccccccagcagtccagccgccttccccgaggtcctgagagcagaaggggtacatccttgaagggtcagtgggaaaagggtggaagatctgggggcccagagccaccgtggggagatgccagggggccctgggccatcagggcggagtacctgggtcctttccagtcctgggccctgtagtcaacaggaagggatctcccagtctttgaagcccccaccttcctctaggtccacagagccacgttcaactctgtcctaagagtggaaggcttgtcctggcgtcccacccctggcagaggctcttgcgggaatagaggagggcagggcctggaggtcagatggcagattccctgcgataggaaatattgtccagtggaagggtggcggcttgcatgcgctccagatccaggtggctgccaaactcaagcatccggataatgcctgcctcctctttggaacctgcctccaggcccaggcctgcagccacggctgctgcggccgcagcctcctcttccatctcctcttcctcctggctcataagggccagctcattctcatagcagaaggcactgggagggggcggtggggcgggcagcaccgtgatcttgctctcctgcagctcacgggcggagcagcaaggcgtgccagccacctcataggtcttgtggaatcgtgagtagtccaccttgtagtgactcttttcctcgaagaccacaggctcaaaccggtgaccccacaggatctcactggccagataggagctgcgggcctgagtggtcatagccgtggcctccaccataccctccaggatgaccacaatctcaaagtcctctgactccagctcctccttgcccatgccgtagagtgggctgtcctcgtcgatttcatgcactatgatgatgggtgacaccaagaagatgcggtccaggccgatgtcatagcccacgttgaggtcccgctggtccagtggcaggtactcaccctcctgtgtcatgtagggtttgatgagctgggcccggacgtgggcctccacaatgtgactcttgcgcaggttacccacgcgccacatcaggcagagcttgccgtctcgaacggagatgacagcatggtggctgaacagcagggtctgtgcccgcttcttgggccgtgccatcttggccatgatcgtgccaatcatgaaggagtcaatgacacagcccacaatggactggacaaccaccgcaatgaccgccaacgggcactcctctgtcacacaccggaacccgtagccaatggtcgtctgggtctccactgagaagaggaaggcccccaaaaagccgtttacgtgcatgatacagggtttgggggcattcgggcttgccccgccattgccccccgggcctcctgccgcgggcacagagggactggcctccaggtcaccatggaagaaggcaatgcaccagaagaggaggccgaagaagagccaggaaacgaggaaggccgcggagaagatcatgagcatatagcgccagcgcgtgtccacgcaggtggtgaagatgtctgccatgtagcgctgggacttgttgctcaggttggcgaagtagacgttacactggccgttcttcttgacaaagcggttgcggcgtttccgcctgggcacgtgggcctgcccgtttcggttgtgtccgtgcatgacctgaggacgtcgtcgtggtcacctggggagatgcagggcctgcaggcttgaaacctctaggcatggaaggttctgagaccaagcttctggggctggagtgagggacaggaccagaacagagacggagatggcccttggcatgtgcaaggcactttgcagtttgacagcttcttttaaacttggtgactatttcacacacttggtaagagctactctgagacattggtggtaatgttccatctcctagacctggagaggagtggggacttcaagaccacacagcaggttactaactgggctagtcctcgaaccagaggaggtgcgtgtggcctgtcttccacttgtctgcacagttctctgtccggaatatcagccacctgggacagagcctggctttgcccacttcacccagtgatactgggatgctgcctagctctccgtctccccaccttgatagcagggaaggaatccccaggagggtatctagccgcagctgatggccacactgaggctgggatgagtggaagaggagtttgctggatgcccgcgcaaggacgaaaggccgcggcgtggctcccctcctcatttggccagccgcgatctctctcctgcctcgctccgtggctcggctccagaaatcccggctccgggtcttggttcgcgcctcgtcactccggagacgcccggagcggcttgcggttgccgtgggaacctcgcccgggccaggcccggctcacgactcagccaccagactagagcagcgcgcggaccacagcgtttagggtttcgggaaaacgacacctgtccttagagtaactctccaagagtagcgagcacacacctcagaagcacagcgcggtgatgtgcggaaacccgcgtcacccccccacccccaccccgcacagtcaatcccgagcacttctagcggctgaattctaccgcgccaggaaggcgctactgaaccggaatccgccctcggaggctgcacggggtctgtttttgcaagccctccttgggtctcgggttcctgcgaaggggatcaaacagctgacaagtgattctttacgtgttccttcgaaacgctttgcttaactttggccctgtgactatcccagtaaaaatatacacacagactatggacgggagagaaacagtggtttaaacggagcagcttctcagttcggctgctgagactctaaactcctctgcctaacctgaagatcatctgttccaactcagagccgcgcagaggctctgggacagtgcgccatcgcctccctccttgttcgtaggcctttccttactccggctcttggctctggaggcaaactcctactactcaaaactcacttgccttgacacttttccttaattacaatcctgcatgcaacttcctcaaacaagatttcttatgctacccgctgggtcttacagtgttgtgaccagtccctccttccccactgggcacccaaagaaatcttgta

SEQ ID NO: 105 - DNA, 2656 bp, Rattus norvegicus
  source 1..2656: mol_type = genomic DNA
aggagagagatcgtggctggccaagtgaggggagccacgcggccttccgtcctttgtgcgggcatccgacaaactccactcccactcatcccagcctcagtgtggccatcagctgcggctggataccttcctgggcataccttctctggtttcaaggtggggagatggagggctaggcagtgtcccagtaccactgggtgaagtgggcaaagccaggccctgacttcggtggctgacattctgacagagaactgtgcagacaagtggaagacaggccacaggcaccttctctgaagtccccactcttttccaagtctgggaaatgggacagtaccaccaatgtctcagagtagctttcaccaagtgtgtgaagtagtcaccaactttaaaagaagctgccaaactacaaagtgccttgcacatgccaagggccatacccatctctgttctggtcctatccctcactccagccccaagggcagcctttgtgacagccagctgcaccgggaagcttggtctcagaaccttccatgcctagaggtttcaaccctgcaggccctgcatctccccaggtgaccacgacgacggcctcaggtcatgcacggacacagccgcaacgggcaggcccacgtgcccaggcggaaacgccgcaaccgcttcgtcaagaagaacggccagtgcaacgtgtacttcgccaacctgagcaacaagtcccagcgctacatggcggacatcttcacgacgtgcgtggacacgcgctggcgctacatgctcatgatcttctccgcggccttcctcgtttcctggctctttttcggcctccttttctggtgcattgcctttttccacggtgacctggagcctagtccctccgggcccacggcgggaggcccggggggcaatggcggcggggcagccccgacagcggccaaaccgtgtatcatgcatgtaaacggctttttgggagccttcctcttctcggtggagacacagacgaccatcggttatgggttccggtgtgtgacagaggagtgcccgttggcggtcatcgcagtggttgtccagtccattgtgggctgtgtcatcgactccttcatgattggtactatcatggccaagatggcacggcccaagaagcgggcgcagaccctgctgttcagccaccacgctgtcatctccgtgcgggacggcaagctctgcctgatgtggcgcgtgggcaacctgcgcaagagccacatcgtggaggcccacgtccgggcccagctcatcaagccctacatgacacaggagggtgagtacctgccactggaccagcgggacctcaacgtgggctatgacattggcctggaccgcatcttcttggtgtcacccatcatcatagtgcatgagattgatgaggacagtccactctacggcatgggcaaggaggaactggagtcggaggactttgagattgtggtcatcctggagggcatggtagaggccacggctatgaccacacaggcccgcagctcctacctggccagtgagatcctgtggggccaccggttcgagcctgtggtcttcgaggagaagagtcactacaaggtggactactcacggttccacaagacctacgaggtggctggcaccccttgctgctctgcccgtgagcttcaagagagcaagatcacggtgctgcccgccccaccgccccctcccagtgccttctgctatgagaacgagttggccctcatgagccaggaggaagaagaaatggaagaggaggctgctgccgcagcagccgtggctgccggcctgggcctggaggctggctccaaagaggagacaggcattatccggatgcttgagtttggcagccacctggatctggagcgcatgcaagccgctacccttcctctggacaacatttcttaccgcagggagtctgccatctgacctccaggccctgccctcctctatccctgcaagagcctctgccaggggtgggacatcaggacaagccttccactcttaggacagagttgttcatggctctgtggacctggaggaatgtgggggcttcaaagactgggagatcccctcctgttgactgcagggcccaggactgggaaggacccaggtactcagtcctgatggcctgggccccctggcatctccccacggtggctctgggcccccagatcttccacccttttcccactgacccttcaaggatgtaccccttctactctcaggaccttggggaaggcggctggactgctggggggtgggcatcatggggttctgggtgggcagggtgggtctgggggagggggaagggtgtgtttcttttgcatgactgtggtctgtgctcttgactctcttttgtaaatatctataaatggaagagatggagacacaagtccacctctgcccatttctacctgtgagacagagagaggccgccacccctctctgtgcacccccgtccagcctcagccctacccacctacccagctggctgggcctctgagacctttgaagccagctgtgtatggtgttggtttgggtagagaggggactcagacgtgggatgagtaccccctccctccttgcagtccccagattgatgatggcgtttgtaactatttttaataaagcatatggtccacta

SEQ ID NO: 106 - DNA, 2656 bp, Rattus norvegicus
  source 1..2656: mol_type = genomic DNA
tagtggaccatatgctttattaaaaatagttacaaacgccatcatcaatctggggactgcaaggagggagggggtactcatcccacgtctgagtcccctctctacccaaaccaacaccatacacagctggcttcaaaggtctcagaggcccagccagctgggtaggtgggtagggctgaggctggacgggggtgcacagagaggggtggcggcctctctctgtctcacaggtagaaatgggcagaggtggacttgtgtctccatctcttccatttatagatatttacaaaagagagtcaagagcacagaccacagtcatgcaaaagaaacacacccttccccctcccccagacccaccctgcccacccagaaccccatgatgcccaccccccagcagtccagccgccttccccaaggtcctgagagtagaaggggtacatccttgaagggtcagtgggaaaagggtggaagatctgggggcccagagccaccgtggggagatgccagggggcccaggccatcaggactgagtacctgggtccttcccagtcctgggccctgcagtcaacaggaggggatctcccagtctttgaagcccccacattcctccaggtccacagagccatgaacaactctgtcctaagagtggaaggcttgtcctgatgtcccacccctggcagaggctcttgcagggatagaggagggcagggcctggaggtcagatggcagactccctgcggtaagaaatgttgtccagaggaagggtagcggcttgcatgcgctccagatccaggtggctgccaaactcaagcatccggataatgcctgtctcctctttggagccagcctccaggcccaggccggcagccacggctgctgcggcagcagcctcctcttccatttcttcttcctcctggctcatgagggccaactcgttctcatagcagaaggcactgggagggggcggtggggcgggcagcaccgtgatcttgctctcttgaagctcacgggcagagcagcaaggggtgccagccacctcgtaggtcttgtggaaccgtgagtagtccaccttgtagtgactcttctcctcgaagaccacaggctcgaaccggtggccccacaggatctcactggccaggtaggagctgcgggcctgtgtggtcatagccgtggcctctaccatgccctccaggatgaccacaatctcaaagtcctccgactccagttcctccttgcccatgccgtagagtggactgtcctcatcaatctcatgcactatgatgatgggtgacaccaagaagatgcggtccaggccaatgtcatagcccacgttgaggtcccgctggtccagtggcaggtactcaccctcctgtgtcatgtagggcttgatgagctgggcccggacgtgggcctccacgatgtggctcttgcgcaggttgcccacgcgccacatcaggcagagcttgccgtcccgcacggagatgacagcgtggtggctgaacagcagggtctgcgcccgcttcttgggccgtgccatcttggccatgatagtaccaatcatgaaggagtcgatgacacagcccacaatggactggacaaccactgcgatgaccgccaacgggcactcctctgtcacacaccggaacccataaccgatggtcgtctgtgtctccaccgagaagaggaaggctcccaaaaagccgtttacatgcatgatacacggtttggccgctgtcggggctgccccgccgccattgccccccgggcctcccgccgtgggcccggagggactaggctccaggtcaccgtggaaaaaggcaatgcaccagaaaaggaggccgaaaaagagccaggaaacgaggaaggccgcggagaagatcatgagcatgtagcgccagcgcgtgtccacgcacgtcgtgaagatgtccgccatgtagcgctgggacttgttgctcaggttggcgaagtacacgttgcactggccgttcttcttgacgaagcggttgcggcgtttccgcctgggcacgtgggcctgcccgttgcggctgtgtccgtgcatgacctgaggccgtcgtcgtggtcacctggggagatgcagggcctgcagggttgaaacctctaggcatggaaggttctgagaccaagcttcccggtgcagctggctgtcacaaaggctgcccttggggctggagtgagggataggaccagaacagagatgggtatggcccttggcatgtgcaaggcactttgtagtttggcagcttcttttaaagttggtgactacttcacacacttggtgaaagctactctgagacattggtggtactgtcccatttcccagacttggaaaagagtggggacttcagagaaggtgcctgtggcctgtcttccacttgtctgcacagttctctgtcagaatgtcagccaccgaagtcagggcctggctttgcccacttcacccagtggtactgggacactgcctagccctccatctccccaccttgaaaccagagaaggtatgcccaggaaggtatccagccgcagctgatggccacactgaggctgggatgagtgggagtggagtttgtcggatgcccgcacaaaggacggaaggccgcgtggctcccctcacttggccagccacgatctctctcct

SEQ ID NO: 107 - DNA, 2171 bp, Macaca mulatta
  source 1..2171: mol_type = genomic DNA
cgggcccccggacccccgcgctctgagcccggccgagcccaacgatgctgacgccgaggcggcgcctagggcgcggcgcggggcagcgctgaaagttgggcggcccgcggggagcggcgcgggacggccgggacgcgcggagaccccaagacccacgcgcagaccgagcggcagccggggaggggggcgcgggccggccggccgagttcggaggcaggaggcaccgggactcccctctccgcgcccgggacgccgcccgccggatcccgccgtgggatgtagcgcccgctcgccgcctcccggactctcgtcggaccctccgcccagcggccctgcgtcttcccaggtgaccacgccggcttcaggacatgcacggacacagccgcaacggccaggcccacgtgccccggcggaaacgccgcaaccgctttgtcaagaagaacggccaatgcaatgtgtacttcgccaacctgagcaacaagtcgcagcgctacatggcggacatcttcaccacctgcgtggacacgcgctggcgctacatgctcatgatcttctccgcggccttccttgtttcctggctcttttttggcctcctcttctggtgtatcgccttcttccacggtgacctggaggccagcccaggggtgcccggggcgggcgggccggcggcgggcagtggcggggcagccccagcggcccccaagccctgcatcatgcacgtgaacggcttcctgggtgccttcctgttctcggtggagacgcagacgaccatcggctatgggttccggtgcgtgacggaggagtgcccgctggcagtcatcgctgtggtggtccagtccatcgtgggctgcgtcatcgactccttcatgatcggcaccatcatggccaagatggcgcggcccaagaagcgggcacagacgctgctgttcagccaccatgcggtcatctcggtgcgcgacggcaagctctgcctcatgtggcgcgtgggtaacctacgcaagagccacattgtggaggcccacgtgcgggcccagctcatcaagccctacatgacccaggagggtgagtacctgcccctggaccagcgggacctcaacgtgggctatgacatcggcctggaccgcatcttcctggtgtcgcccatcatcattgtccacgagatcgatgaggacagcccgctctatggcatgggcaaggaggagctggagtcagaggacttcgagatcgtggtcatcctggagggcatggtggaggccacggccatgaccacccaggcccgcagctcctacctggccagcgagatcctgtggggccaccgctttgagcccgtggtctttgaggagaagagccactacaaggtggactactcgcgttttcacaagacctacgaggtggccggcacaccctgctgctcggcccgggagctgcaggagagtaagatcaccgtgctgcccgccccgccgccccctcccagtgccttctgctatgagaacgagctggccctcatgagccaggaggaagaggagatggaggaggaggcggctgcggcggccgcagtggccgcaggcctgggcctggaggccggctccaaggaggaggcgggcatcatccggatgctggagttcggcagccacctggacctggagcgcatgcaggcttccctcccgctggacaacatctcctaccgcagggagtctgctatctgacctccaggcccggccctcaccactgcccacaagagcctctgccgggggtaggatgccaggacaccccctcccacactcaggacagagccaaccctggctccgtggaccttctggaggaaggtgggggtttcaaagactgggggaccccttcctcctgactccagcaccctggcctgggaagagctcggcccaatcagcctgggttcccccagcacctactcctggtggctctgggtccccggatccaccacccttcccccactgactcttcaaggacgtgccctctttgctctcagaaccttggggaaggtgactggactgctgggtgggagacatctcggggtttcagggtgggcagggggttagtttggggaggggggtgcgtttcttttgcatgactgtggcctgttgctcatgactttcttttgtaaatatctataaatggagacagatggagacaccaaa

SEQ ID NO: 108 - DNA, 2171 bp, Macaca mulatta
  source 1..2171: mol_type = genomic DNA
tttggtgtctccatctgtctccatttatagatatttacaaaagaaagtcatgagcaacaggccacagtcatgcaaaagaaacgcacccccctccccaaactaaccccctgcccaccctgaaaccccgagatgtctcccacccagcagtccagtcaccttccccaaggttctgagagcaaagagggcacgtccttgaagagtcagtgggggaagggtggtggatccggggacccagagccaccaggagtaggtgctgggggaacccaggctgattgggccgagctcttcccaggccagggtgctggagtcaggaggaaggggtcccccagtctttgaaacccccaccttcctccagaaggtccacggagccagggttggctctgtcctgagtgtgggagggggtgtcctggcatcctacccccggcagaggctcttgtgggcagtggtgagggccgggcctggaggtcagatagcagactccctgcggtaggagatgttgtccagcgggagggaagcctgcatgcgctccaggtccaggtggctgccgaactccagcatccggatgatgcccgcctcctccttggagccggcctccaggcccaggcctgcggccactgcggccgccgcagccgcctcctcctccatctcctcttcctcctggctcatgagggccagctcgttctcatagcagaaggcactgggagggggcggcggggcgggcagcacggtgatcttactctcctgcagctcccgggccgagcagcagggtgtgccggccacctcgtaggtcttgtgaaaacgcgagtagtccaccttgtagtggctcttctcctcaaagaccacgggctcaaagcggtggccccacaggatctcgctggccaggtaggagctgcgggcctgggtggtcatggccgtggcctccaccatgccctccaggatgaccacgatctcgaagtcctctgactccagctcctccttgcccatgccatagagcgggctgtcctcatcgatctcgtggacaatgatgatgggcgacaccaggaagatgcggtccaggccgatgtcatagcccacgttgaggtcccgctggtccaggggcaggtactcaccctcctgggtcatgtagggcttgatgagctgggcccgcacgtgggcctccacaatgtggctcttgcgtaggttacccacgcgccacatgaggcagagcttgccgtcgcgcaccgagatgaccgcatggtggctgaacagcagcgtctgtgcccgcttcttgggccgcgccatcttggccatgatggtgccgatcatgaaggagtcgatgacgcagcccacgatggactggaccaccacagcgatgactgccagcgggcactcctccgtcacgcaccggaacccatagccgatggtcgtctgcgtctccaccgagaacaggaaggcacccaggaagccgttcacgtgcatgatgcagggcttgggggccgctggggctgccccgccactgcccgccgccggcccgcccgccccgggcacccctgggctggcctccaggtcaccgtggaagaaggcgatacaccagaagaggaggccaaaaaagagccaggaaacaaggaaggccgcggagaagatcatgagcatgtagcgccagcgcgtgtccacgcaggtggtgaagatgtccgccatgtagcgctgcgacttgttgctcaggttggcgaagtacacattgcattggccgttcttcttgacaaagcggttgcggcgtttccgccggggcacgtgggcctggccgttgcggctgtgtccgtgcatgtcctgaagccggcgtggtcacctgggaagacgcagggccgctgggcggagggtccgacgagagtccgggaggcggcgagcgggcgctacatcccacggcgggatccggcgggcggcgtcccgggcgcggagaggggagtcccggtgcctcctgcctccgaactcggccggccggcccgcgcccccctccccggctgccgctcggtctgcgcgtgggtcttggggtctccgcgcgtcccggccgtcccgcgccgctccccgcgggccgcccaactttcagcgctgccccgcgccgcgccctaggcgccgcctcggcgtcagcatcgttgggctcggccgggctcagagcgcgggggtccgggggcccg

SEQ ID NO: 109 - DNA, 1969 bp, Macaca fascicularis
  source 1..1969: mol_type = genomic DNA
cgagttcggaggcaggaggcaccgggactcccctctccgcgcccgggacgccgcccgccggatcccgccgtgggatgtagcgcccgctcgccgcctcccggactctcgtcggaccctccgcccagcggccctgcgtcttcccaggtgaccacgccggcttcaggacatgcacggacacagccgcaacggccaggcccacgtgccccggcggaaacgccgcaaccgctttgtcaagaagaacggccaatgcaatgtgtacttcgccaacctgagcaacaagtcgcagcgctacatggcggacatcttcaccacctgcgtggacacgcgctggcgctacatgctcatgatcttctccgcggccttccttgtttcctggctcttttttggcctcctcttctggtgtatcgccttcttccacggtgacctggaggccagcccaggggtgcccggggcgggcgggccggcggcgggcagtggcggggcagccccggcggcccccaagccctgcatcatgcacgtgaacggcttcctgggtgccttcctgttctcggtggagacgcagacgaccatcggctatgggttccggtgcgtgacggaggagtgcccgctggcagtcatcgctgtggtggtccagtccatcgtgggctgcgtcatcgactccttcatgatcggcaccatcatggccaagatggcgcggcccaagaagcgggcacagacgctgctgttcagccaccatgcggtcatctcggtgcgcgacggcaagctctgcctcatgtggcgcgtgggtaacctacgcaagagccacattgtggaggcccacgtgcgggcccagctcatcaagccctacatgacccaggagggtgagtacctgcccctggaccagcgggacctcaacgtgggctatgacatcggcctggaccgcatcttcctggtgtcgcccatcatcattgtccacgagatcgatgaggacagcccgctctatggcatgggcaaggaggagctggagtcagaggacttcgagatcgtggtcatcctggagggcatggtggaggccacggccatgaccacccaggcccgcagctcctacctggccagcgagatcctgtggggccaccgctttgagcccgtggtctttgaggagaagagccactacaaggtggactactcgcgttttcacaagacctacgaggtggccggcacaccctgctgctcggcccgggagctgcaggagagtaagatcaccgtgctgcccgccccgccgccccctcccagtgccttctgctatgagaacgagctggccctcatgagccaggaggaagaggagatggaggaggaggcggctgcggcggccgcagtggccgcaggcctgggcctggaggccggctccaaggaggaggcgggcatcatccggatgctggagttcggcagccacctggacctggagcgcatgcaggcttccctcccgctggacaacatctcctaccgcagggagtctgctatctgacctccaggcccggccctcaccactgcccacaagagcctctgccgggggtaggatgccaggacaccccctcccacactcaggacagagccaaccctggctccgtggaccttctggaggaaggtgggggtttcaaagactgggggaccccttcctcctgactccagcaccctggcctgggaagagctcggcccaatcagcctgggttcccccagcacctactcctggtggctctgggtccccggatccaccacccttcccccactgactcttcaaggacgtgccctctttgctctcagaaccttggggaaggtgactggactgctgggtgggagacatctcggggtttcagggtgggcagggggttagtttggggaggggggtgcgtttcttttgcatgactgtggcctgttgctcatgactttcttttgtaaatatctataaatggagacagatggagacaccaaa

SEQ ID NO: 110 - DNA, 1969 bp, Macaca fascicularis
  source 1..1969: mol_type = genomic DNA
tttggtgtctccatctgtctccatttatagatatttacaaaagaaagtcatgagcaacaggccacagtcatgcaaaagaaacgcacccccctccccaaactaaccccctgcccaccctgaaaccccgagatgtctcccacccagcagtccagtcaccttccccaaggttctgagagcaaagagggcacgtccttgaagagtcagtgggggaagggtggtggatccggggacccagagccaccaggagtaggtgctgggggaacccaggctgattgggccgagctcttcccaggccagggtgctggagtcaggaggaaggggtcccccagtctttgaaacccccaccttcctccagaaggtccacggagccagggttggctctgtcctgagtgtgggagggggtgtcctggcatcctacccccggcagaggctcttgtgggcagtggtgagggccgggcctggaggtcagatagcagactccctgcggtaggagatgttgtccagcgggagggaagcctgcatgcgctccaggtccaggtggctgccgaactccagcatccggatgatgcccgcctcctccttggagccggcctccaggcccaggcctgcggccactgcggccgccgcagccgcctcctcctccatctcctcttcctcctggctcatgagggccagctcgttctcatagcagaaggcactgggagggggcggcggggcgggcagcacggtgatcttactctcctgcagctcccgggccgagcagcagggtgtgccggccacctcgtaggtcttgtgaaaacgcgagtagtccaccttgtagtggctcttctcctcaaagaccacgggctcaaagcggtggccccacaggatctcgctggccaggtaggagctgcgggcctgggtggtcatggccgtggcctccaccatgccctccaggatgaccacgatctcgaagtcctctgactccagctcctccttgcccatgccatagagcgggctgtcctcatcgatctcgtggacaatgatgatgggcgacaccaggaagatgcggtccaggccgatgtcatagcccacgttgaggtcccgctggtccaggggcaggtactcaccctcctgggtcatgtagggcttgatgagctgggcccgcacgtgggcctccacaatgtggctcttgcgtaggttacccacgcgccacatgaggcagagcttgccgtcgcgcaccgagatgaccgcatggtggctgaacagcagcgtctgtgcccgcttcttgggccgcgccatcttggccatgatggtgccgatcatgaaggagtcgatgacgcagcccacgatggactggaccaccacagcgatgactgccagcgggcactcctccgtcacgcaccggaacccatagccgatggtcgtctgcgtctccaccgagaacaggaaggcacccaggaagccgttcacgtgcatgatgcagggcttgggggccgccggggctgccccgccactgcccgccgccggcccgcccgccccgggcacccctgggctggcctccaggtcaccgtggaagaaggcgatacaccagaagaggaggccaaaaaagagccaggaaacaaggaaggccgcggagaagatcatgagcatgtagcgccagcgcgtgtccacgcaggtggtgaagatgtccgccatgtagcgctgcgacttgttgctcaggttggcgaagtacacattgcattggccgttcttcttgacaaagcggttgcggcgtttccgccggggcacgtgggcctggccgttgcggctgtgtccgtgcatgtcctgaagccggcgtggtcacctgggaagacgcagggccgctgggcggagggtccgacgagagtccgggaggcggcgagcgggcgctacatcccacggcgggatccggcgggcggcgtcccgggcgcggagaggggagtcccggtgcctcctgcctccgaactcg

SEQ ID NO: 111 - DNA, 4829 bp, Homo sapiens
  source 1..4829: mol_type = genomic DNA
gtcagagtcttccctcagctttgtacatcagcactgttttgatagataagagaggctactgtataagtgtgtaagatttgtaatggactgaggaatgcttgttctagctgctgaaactgactgtaactgtattgtcttaggagcatcatcatggggtctagtgccacagagattgaagaattggaaaacaccacttttaagtatcttacaggagaacagactgaaaaaatgtggcagcgcctgaaaggaatactaagatgcttggtgaagcagctggaaagaggtgatgttaacgtcgtcgacttaaagaagaatattgaatatgcggcatctgtgctggaagcagtttatatcgatgaaacaagaagacttctggatactgaagatgagctcagtgacattcagactgactcagtcccatctgaagtccgggactggttggcttctacctttacacggaaaatggggatgacaaaaaagaaacctgaggaaaaaccaaaatttcggagcattgtgcatgctgttcaagctggaatttttgtggaaagaatgtaccgaaaaacatatcatatggttggtttggcatatccagcagctgtcatcgtaacattaaaggatgttgataaatggtctttcgatgtatttgccctaaatgaagcaagtggagagcatagtctgaagtttatgatttatgaactgtttaccagatatgatcttatcaaccgtttcaagattcctgtttcttgcctaatcacctttgcagaagctttagaagttggttacagcaagtacaaaaatccatatcacaatttgattcatgcagctgatgtcactcaaactgtgcattacataatgcttcatacaggtatcatgcactggctcactgaactggaaattttagcaatggtctttgctgctgccattcatgattatgagcatacagggacaacaaacaactttcacattcagacaaggtcagatgttgccattttgtataatgatcgctctgtccttgagaatcaccacgtgagtgcagcttatcgacttatgcaagaagaagaaatgaatatcttgataaatttatccaaagatgactggagggatcttcggaacctagtgattgaaatggttttatctacagacatgtcaggtcacttccagcaaattaaaaatataagaaacagtttgcagcagcctgaagggattgacagagccaaaaccatgtccctgattctccacgcagcagacatcagccacccagccaaatcctggaagctgcattatcggtggaccatggccctaatggaggagtttttcctgcagggagataaagaagctgaattagggcttccattttccccactttgtgatcggaagtcaaccatggtggcccagtcacaaataggtttcatcgatttcatagtagagccaacattttctcttctgacagactcaacagagaaaattgttattcctcttatagaggaagcctcaaaagccgaaacttcttcctatgtggcaagcagctcaaccaccattgtggggttacacattgctgatgcactaagacgatcaaatacaaaaggctccatgagtgatgggtcctattccccagactactcccttgcagcagtggacctgaagagtttcaagaacaacctggtggacatcattcagcagaacaaagagaggtggaaagagttagctgcacaaggtgaatctgatcttcataagaactcagaagacttagtaaatgctgaagaaaaacatgatgagacacattcataggcccgaaacaccttaaagacttctgtcattttaaacatgagaggacaatgaaatcagcatgaaaacatcctaaattctcaactttccacaaagctatggctcttctttcaacatagaattggattgggccattttaattgactcctatacaaggaattaagaagaacataaattttgagctagtaactctggccaaataaatacactcaagtttttatcagagtttttggccagtgcttctgccatttttttccctccacaatttggccttcttcaatcaagccagataaatttttgagacaaaagtcagacagtttttaatttttcttgctttgaaccctgtcataatgactgtgcaatacatgtgcagaagatgaggtattttaaaatttacttccttgcactgtcttacacagagtgctataactataaatttttcaaggtcttaaataaaaggaagcaaaaacaaaattattgaaaaattttttttgttgtgctggggaatatactatttagattgtccttcttattttaaatgcatgggaacagaatgacaggtgggatgctgaggagctggttgaagcatcagagcaatgctacagtccaacaatggagcattagatccccagctaggtgacctgatgaacacctttgtaaactctcatactgggaaatggcagtgaaacctttttctgaacccgtggaccagcctgcgtccgtccccatggtttcaaagcacgaatgcattacctccatggttgtggttacaagcaagtcacatgctatctacagttcatgataacaagaccgtcaaccattgctggagacagacactagaatggaaaatgaaatttgccagcgggatgtttatcccatcagaatgtaacaaaatatattaccagccaagagataagagacaagaatgtgtgtgtgtgtgtgtgtgtgtgtgtgtgtgtgttcaaaaatgtctatgaaaatgaaaacccacacttttctgtacagataacattatttgatgtgacttttatattttactacacagaaacaaactgcagccctcagaggccctgcttccttgtcatgttttgcctgagcatgtgcaaagtctttcctttgcttaaagctgaaaaactacctttatgcattgttagctgacaagaaagatcaagcacaattagatgttgtaacttttcactgtacaagcattgcaatgattgtgagcttcagtgaatttatctttgtgaaaggtaaaaattggctggaaagaatcaggagtagccataaattaaatcatgcaaaggaggatccatgcatcctaacaagttttctgctgcatctgcttccttcctgggctccacaatgttaagcaatattttagaaaagggtacaattggaagcttttaagcctgagtggtgagattttataactcacaacttagatctcttttaatgtgtaagccatattctatatgcatatttattatgcatcattgtaatttaagatatatttggatgtaggctgtataaatgcttttaattgttctgtgaatagatccttagctttagtttcacctgaatcttgtgcaaaacacagctaaataattgaattgtattatagacattatgaggtaattgatcttttaaatgtaaggagtaagattgatctataataatgtgctggggaaaacatttatagatatgtacatcatggttactttttgtcctttcaaatggactttttatttctatttatggagagactgtaactactgcttttaatgtctttttaaagcaagctatttaccagcttgaaaatatcatgcatttaaaatagaatctatctggggagtctaattactattgttcctatttgagccagttgtctttcagtaaagctatagaatctctcaaagaagtaaatagaaatactacttcttaaatgtcataggaagcatatccactttgtttctattagtactttaagatctataagaccttattactaaaaagtagaggaatataaagaattcatcaatttctgtatatgggctttaacctaattttccaggttatgcgacttataaagcactgtgaccaaacttccagagacagtaaaaaaaaaaaaaagaaaaaaaagttttactccttcagaagtattgtcatgctactgctgtacttattttcctaatctctctctatctgctatactccctccttttctttctttttcttttaagcttttatatttattccttcctttgttttcctctctgtaagacagctactactgagcactaattagtagaaagtcagagtggaggttatctgtgcatgtctttctgcaaacattactgttgaggccatctgaagagagggattgataggttaggctgttgcaccgtgaatgtcctgctttgcatttttaacctcagctccccaacatatatatcttgcagtttatatgccttttcatttaaccgaaacctcttttatttaatttttaacataacaacctacaattcttgtgtttttattatgctgtatttttctgtgtttcttattacatgtgattgctaaataaatcatatttgagggaaaacattgtgaaacatttggtgttttatgcaattcaatttagtgaggcattgaaaagttggagaaattgggggaaacccaaaggagaccaacttaaaaattgatatgagtttggtaagaaagtgctttttgttccattaaataaatactgattgaattacttattattatacctattattcataagctcctggctggaagcatggtgcatatatgcatatggcaatatttcctctagaaatttcaagtcttataaaggagataatctacacagactgtaatttatacctaataactagaatgccacataaaaaagtaaccagttgcaaataaaatgcacctatgtatatttgaggaggtaaaaaactgcttctgtcttcagagctttcaggactaagtggtgcatcagttggcatttagtaaataaaaacaagtttataaacatt

SEQ ID NO: 112 - DNA, 4829 bp, Homo sapiens
  source 1..4829: mol_type = genomic DNA
aatgtttataaacttgtttttatttactaaatgccaactgatgcaccacttagtcctgaaagctctgaagacagaagcagttttttacctcctcaaatatacataggtgcattttatttgcaactggttacttttttatgtggcattctagttattaggtataaattacagtctgtgtagattatctcctttataagacttgaaatttctagaggaaatattgccatatgcatatatgcaccatgcttccagccaggagcttatgaataataggtataataataagtaattcaatcagtatttatttaatggaacaaaaagcactttcttaccaaactcatatcaatttttaagttggtctcctttgggtttcccccaatttctccaacttttcaatgcctcactaaattgaattgcataaaacaccaaatgtttcacaatgttttccctcaaatatgatttatttagcaatcacatgtaataagaaacacagaaaaatacagcataataaaaacacaagaattgtaggttgttatgttaaaaattaaataaaagaggtttcggttaaatgaaaaggcatataaactgcaagatatatatgttggggagctgaggttaaaaatgcaaagcaggacattcacggtgcaacagcctaacctatcaatccctctcttcagatggcctcaacagtaatgtttgcagaaagacatgcacagataacctccactctgactttctactaattagtgctcagtagtagctgtcttacagagaggaaaacaaaggaaggaataaatataaaagcttaaaagaaaaagaaagaaaaggagggagtatagcagatagagagagattaggaaaataagtacagcagtagcatgacaatacttctgaaggagtaaaacttttttttcttttttttttttttactgtctctggaagtttggtcacagtgctttataagtcgcataacctggaaaattaggttaaagcccatatacagaaattgatgaattctttatattcctctactttttagtaataaggtcttatagatcttaaagtactaatagaaacaaagtggatatgcttcctatgacatttaagaagtagtatttctatttacttctttgagagattctatagctttactgaaagacaactggctcaaataggaacaatagtaattagactccccagatagattctattttaaatgcatgatattttcaagctggtaaatagcttgctttaaaaagacattaaaagcagtagttacagtctctccataaatagaaataaaaagtccatttgaaaggacaaaaagtaaccatgatgtacatatctataaatgttttccccagcacattattatagatcaatcttactccttacatttaaaagatcaattacctcataatgtctataatacaattcaattatttagctgtgttttgcacaagattcaggtgaaactaaagctaaggatctattcacagaacaattaaaagcatttatacagcctacatccaaatatatcttaaattacaatgatgcataataaatatgcatatagaatatggcttacacattaaaagagatctaagttgtgagttataaaatctcaccactcaggcttaaaagcttccaattgtacccttttctaaaatattgcttaacattgtggagcccaggaaggaagcagatgcagcagaaaacttgttaggatgcatggatcctcctttgcatgatttaatttatggctactcctgattctttccagccaatttttacctttcacaaagataaattcactgaagctcacaatcattgcaatgcttgtacagtgaaaagttacaacatctaattgtgcttgatctttcttgtcagctaacaatgcataaaggtagtttttcagctttaagcaaaggaaagactttgcacatgctcaggcaaaacatgacaaggaagcagggcctctgagggctgcagtttgtttctgtgtagtaaaatataaaagtcacatcaaataatgttatctgtacagaaaagtgtgggttttcattttcatagacatttttgaacacacacacacacacacacacacacacacacacattcttgtctcttatctcttggctggtaatatattttgttacattctgatgggataaacatcccgctggcaaatttcattttccattctagtgtctgtctccagcaatggttgacggtcttgttatcatgaactgtagatagcatgtgacttgcttgtaaccacaaccatggaggtaatgcattcgtgctttgaaaccatggggacggacgcaggctggtccacgggttcagaaaaaggtttcactgccatttcccagtatgagagtttacaaaggtgttcatcaggtcacctagctggggatctaatgctccattgttggactgtagcattgctctgatgcttcaaccagctcctcagcatcccacctgtcattctgttcccatgcatttaaaataagaaggacaatctaaatagtatattccccagcacaacaaaaaaaatttttcaataattttgtttttgcttccttttatttaagaccttgaaaaatttatagttatagcactctgtgtaagacagtgcaaggaagtaaattttaaaatacctcatcttctgcacatgtattgcacagtcattatgacagggttcaaagcaagaaaaattaaaaactgtctgacttttgtctcaaaaatttatctggcttgattgaagaaggccaaattgtggagggaaaaaaatggcagaagcactggccaaaaactctgataaaaacttgagtgtatttatttggccagagttactagctcaaaatttatgttcttcttaattccttgtataggagtcaattaaaatggcccaatccaattctatgttgaaagaagagccatagctttgtggaaagttgagaatttaggatgttttcatgctgatttcattgtcctctcatgtttaaaatgacagaagtctttaaggtgtttcgggcctatgaatgtgtctcatcatgtttttcttcagcatttactaagtcttctgagttcttatgaagatcagattcaccttgtgcagctaactctttccacctctctttgttctgctgaatgatgtccaccaggttgttcttgaaactcttcaggtccactgctgcaagggagtagtctggggaataggacccatcactcatggagccttttgtatttgatcgtcttagtgcatcagcaatgtgtaaccccacaatggtggttgagctgcttgccacataggaagaagtttcggcttttgaggcttcctctataagaggaataacaattttctctgttgagtctgtcagaagagaaaatgttggctctactatgaaatcgatgaaacctatttgtgactgggccaccatggttgacttccgatcacaaagtggggaaaatggaagccctaattcagcttctttatctccctgcaggaaaaactcctccattagggccatggtccaccgataatgcagcttccaggatttggctgggtggctgatgtctgctgcgtggagaatcagggacatggttttggctctgtcaatcccttcaggctgctgcaaactgtttcttatatttttaatttgctggaagtgacctgacatgtctgtagataaaaccatttcaatcactaggttccgaagatccctccagtcatctttggataaatttatcaagatattcatttcttcttcttgcataagtcgataagctgcactcacgtggtgattctcaaggacagagcgatcattatacaaaatggcaacatctgaccttgtctgaatgtgaaagttgtttgttgtccctgtatgctcataatcatgaatggcagcagcaaagaccattgctaaaatttccagttcagtgagccagtgcatgatacctgtatgaagcattatgtaatgcacagtttgagtgacatcagctgcatgaatcaaattgtgatatggatttttgtacttgctgtaaccaacttctaaagcttctgcaaaggtgattaggcaagaaacaggaatcttgaaacggttgataagatcatatctggtaaacagttcataaatcataaacttcagactatgctctccacttgcttcatttagggcaaatacatcgaaagaccatttatcaacatcctttaatgttacgatgacagctgctggatatgccaaaccaaccatatgatatgtttttcggtacattctttccacaaaaattccagcttgaacagcatgcacaatgctccgaaattttggtttttcctcaggtttcttttttgtcatccccattttccgtgtaaaggtagaagccaaccagtcccggacttcagatgggactgagtcagtctgaatgtcactgagctcatcttcagtatccagaagtcttcttgtttcatcgatataaactgcttccagcacagatgccgcatattcaatattcttctttaagtcgacgacgttaacatcacctctttccagctgcttcaccaagcatcttagtattcctttcaggcgctgccacattttttcagtctgttctcctgtaagatacttaaaagtggtgttttccaattcttcaatctctgtggcactagaccccatgatgatgctcctaagacaatacagttacagtcagtttcagcagctagaacaagcattcctcagtccattacaaatcttacacacttatacagtagcctctcttatctatcaaaacagtgctgatgtacaaagctgagggaagactctgac

SEQ ID NO: 113 - DNA, 4514 bp, Mus musculus
  source 1..4514: mol_type = genomic DNA
atttttaagtgccgcttccagatcaattaagagacaaaagccttggtatttaaacaggcactttcttcccagggtggtgctgctggtactgcttcctaccatctggtttcttattacatcctgccctgcttcagctgctagagaggaattcagcttcttgtagagcgcgaaagtcattcacgtttctttcgtgcataattgagctcgtaaactgtagaaattctgatgtgcttctgtgcacggaacagttgcagatgagctgcttggcaaatagcctgagcagtcggtcagtagtacagtagcagctcacatgtgtggattgctcccgtgaggaacatcatcatggggtctactgatacggacatcgaagaattggaaaacgccacttacaagtatctcattggagaacagaccgagaagatgtggcagcgcctgaagggaatactaagatgcttagtgaagcagctggagaaaggtgatgtcaacgttgttgacctaaagaagaatatcgaatatgcagcatcagtactggaagctgtttacatcgatgagacaagaagactgctggacacagaggatgaactcagcgacatccagactgactccgtcccatcggaagtccgggattggttggcttcaactttcacacgcaaaatggggatgatgaaaaagaagcctgaagaaaaaccaaagtttcgcagcattgtccatgctgtccaggctgggatttttgtggaaaggatgtacaggaagaactatcacatggttggtttgacatatcctgcagctgtcatagtgacactcaaggaagttgataaatggtcttttgatgtatttgccttaaatgaagcaagcggggagcatagcctgaagtttatgatttatgaactctttaccagatatgatcttatcaaccgcttcaagattcctgtttcttgcctaattgcctttgcagaagccttagaagttggttacagcaagcacaaaaatccatatcataatttggtccatgcagctgacgtcactcaaactgtgcattatataatgcttcatacaggtatcatgcactggctcactgaactggaaattttagccatggtctttgcagctgccattcatgattatgagcacacaggaacaacaaacaacttccatattcagacgaggtcggacgttgctattctgtacaacgaccgctcagtgcttgagaatcaccacgtcagcgcagcctacagacttatgcaagaggaggaaatgaatattttggtaaatttgtctaaagatgactggagggatcttcggaacttagtgattgaaatggtcttagcgacagacatgtcagggcattttcagcaaattaaaaacataagaaacagcttgcagcagccggaagggattgacagagccaaaactatgtccctgatactccatgcagctgacatcagccacccagccaaaacttggaagttgcactacagatggaccatggccctaatggaggagtttttcctgcagggagacaaagaagctgaattagggcttccattttctccactttgtgatcggaagtcaacaatggttgcccagtcgcaaataggtttcattgatttcatagtggagccaacgttttctctcctgacggactcaacagagaaaattgtcattcctcttatagaggaagcttcaaagtcacagtcttcaaactacggggcaagcagctcgtccaccatgattgggttccatgttgctgactctctgaggcggtcaaatacaaaaggctccgtgtgtgatgggagctatgccccagactactcgctctcagctgtggatctgaagagtttcaaaaacaacctggtggacatcattcagcagaacaaagagaggtggaaagagttggctgcccaaggtgaacttgatcttcataagaactcagaagagttaggaaatactgaagaaaagcatgctgacacacgtccataggtgtgaacaaactttaagagttcagttgttttaaacacaacaggaaaatgaaagcagcatgaaaaacacacaaagaccttgattttctaaaaaaataaaataaaatgtttggctcagtccattttagtggactcctctgtaaggaagaaaagcataaatttcagtctagtaactgagccacaaagttcccacgagttatcattaggatcctggccactgtttttgccatggttttccttccatgatttggtcatcttagccagagaaatcttttaaggctgaaagctggatgctttcaagttttcatcatttttaacttgtatagaagatggaatggatttcaatatacaacttgcactgtgttactccagagtgacgcaacaacacaattgtcaacaagcaaggacaacaagaagaaaaacaaacaaacaaacaaaaaaagagtaaaagaaaggcaaaacaaaatgatgaaaaccctgttttcttgcaatgctgatctggtaagactgtcttgttttaaatgcatgggaacagaatgagaatcagatctgtcttcagaagcgccagcaacagctgaccgtaagacctgccgcacagtgattggatgaacgcctctatgggcctccagctgggaaactacagtgccatcttctcctgaagtcatcgaccatcctgcagccatccactgagttttaaggcactagtgtatcacccatgtgtgtgtggttatattataggtcgcagtttgctgtagggccaatgtaacaaggaacatcagccattgcaggagaagggcactcaaagagaagacagaattttccttctgggatgttgttaccactagaatataaagatatattacaggctgaggcataagatgtgtgtgtgtgtgtgtgtgtgtgtgtgtgtgtgtgtgtgtgtttgtgtctgtgtgtctgtgtgtctgtgtgtgtgtatgttgtagatgtgtgcactcgtgctcagaggtgtatatggaaacacatacttttctgtacagctaaaactgttatgtgatgtgactttttaattttactgaagagaaatgaactgcaaccctcagaggccctgcttcttggtcatgttttgcctgagcatgtgtgaagtagctaacaggaatggtcaagcccaattagatgttgtagtattttcactgtacatacagttcagggattgcgaacttcgtgaaaggtgacaattagatggaatgaacagttactgtcaattaggtgatgtgcagaaaggttcacccatcctaatgagttgcttctcgcacctgtgtttccccccaggttcctcaaggctaagcaatatttcagagagggacatgacaagaagcttttaagcctaagttgtgaggtctttataactcacaatttagatctactttaatgtgtaagccatattctctatgcatatttagtatgcatttattgtatttaagatatattgtgagtagactgtataaaatgcttttaaatgttctatgaattagattactagtgttattattgtctagatcttgttaaataattgaattgtattatagccattataatgtgatggatattttaaatatcaacagtaaagattgatctataataatgtgttgagattaatagaaatgtgtatgttagtagcctttgtcctttaaaatggacattttatttctatttatggagaaactgtaactactgcttttcaaatcttctttttaaaaatgagatatttactatctagaaaacattctgctttcaaagtaaaatctgagagtctaagaagtctaattactattgttcctaattgagccagttgtctttcagtaaagctagaatctaaggagagaagaataaaatgaagctctgctcctctcatggcgtagacaatacatctattttgttcctttgatctctatgcttggttaatgtaaattaaagaatatgcacattgatcagtgtatgtctgctagcctaattgtccaggctatgtgacttacagagcactgtgaccaaccgacttgcaggggtagctggggaggcacactgcttcagagccatcacactgcctggaccatgcacgctactcctcacctccctcccttttcttcctgtctccacgatgcccaatgtgtctgatattttgcctttggccttccacactccttccttcctctctccacaggacagctcctactggaagataataagtaggggtcacactggagatcacatgagcctccaaatatacagataatggtgtgaaaggccacaccatgaggcgggactatctctctccaaaggctgctgcacatgctttgcatttgtactcacagtgacccaccatatacttgcgagttcatctgccttttcatttagccagaactttactttttaacatgacaacctatgattcttgtgtttttattatgctgcgactctctgtatttcctactatatatgattgctgaataaatcatattcgatggaaattatcctgaaaaaaaaaaaaaaaaaaaa

SEQ ID NO: 114 - DNA, 4514 bp, Mus musculus
  source 1..4514: mol_type = genomic DNA
ttttttttttttttttttttcaggataatttccatcgaatatgatttattcagcaatcatatatagtaggaaatacagagagtcgcagcataataaaaacacaagaatcataggttgtcatgttaaaaagtaaagttctggctaaatgaaaaggcagatgaactcgcaagtatatggtgggtcactgtgagtacaaatgcaaagcatgtgcagcagcctttggagagagatagtcccgcctcatggtgtggcctttcacaccattatctgtatatttggaggctcatgtgatctccagtgtgacccctacttattatcttccagtaggagctgtcctgtggagagaggaaggaaggagtgtggaaggccaaaggcaaaatatcagacacattgggcatcgtggagacaggaagaaaagggagggaggtgaggagtagcgtgcatggtccaggcagtgtgatggctctgaagcagtgtgcctccccagctacccctgcaagtcggttggtcacagtgctctgtaagtcacatagcctggacaattaggctagcagacatacactgatcaatgtgcatattctttaatttacattaaccaagcatagagatcaaaggaacaaaatagatgtattgtctacgccatgagaggagcagagcttcattttattcttctctccttagattctagctttactgaaagacaactggctcaattaggaacaatagtaattagacttcttagactctcagattttactttgaaagcagaatgttttctagatagtaaatatctcatttttaaaaagaagatttgaaaagcagtagttacagtttctccataaatagaaataaaatgtccattttaaaggacaaaggctactaacatacacatttctattaatctcaacacattattatagatcaatctttactgttgatatttaaaatatccatcacattataatggctataatacaattcaattatttaacaagatctagacaataataacactagtaatctaattcatagaacatttaaaagcattttatacagtctactcacaatatatcttaaatacaataaatgcatactaaatatgcatagagaatatggcttacacattaaagtagatctaaattgtgagttataaagacctcacaacttaggcttaaaagcttcttgtcatgtccctctctgaaatattgcttagccttgaggaacctggggggaaacacaggtgcgagaagcaactcattaggatgggtgaacctttctgcacatcacctaattgacagtaactgttcattccatctaattgtcacctttcacgaagttcgcaatccctgaactgtatgtacagtgaaaatactacaacatctaattgggcttgaccattcctgttagctacttcacacatgctcaggcaaaacatgaccaagaagcagggcctctgagggttgcagttcatttctcttcagtaaaattaaaaagtcacatcacataacagttttagctgtacagaaaagtatgtgtttccatatacacctctgagcacgagtgcacacatctacaacatacacacacacagacacacagacacacagacacaaacacacacacacacacacacacacacacacacacacacacacatcttatgcctcagcctgtaatatatctttatattctagtggtaacaacatcccagaaggaaaattctgtcttctctttgagtgcccttctcctgcaatggctgatgttccttgttacattggccctacagcaaactgcgacctataatataaccacacacacatgggtgatacactagtgccttaaaactcagtggatggctgcaggatggtcgatgacttcaggagaagatggcactgtagtttcccagctggaggcccatagaggcgttcatccaatcactgtgcggcaggtcttacggtcagctgttgctggcgcttctgaagacagatctgattctcattctgttcccatgcatttaaaacaagacagtcttaccagatcagcattgcaagaaaacagggttttcatcattttgttttgcctttcttttactctttttttgtttgtttgtttgtttttcttcttgttgtccttgcttgttgacaattgtgttgttgcgtcactctggagtaacacagtgcaagttgtatattgaaatccattccatcttctatacaagttaaaaatgatgaaaacttgaaagcatccagctttcagccttaaaagatttctctggctaagatgaccaaatcatggaaggaaaaccatggcaaaaacagtggccaggatcctaatgataactcgtgggaactttgtggctcagttactagactgaaatttatgcttttcttccttacagaggagtccactaaaatggactgagccaaacattttattttatttttttagaaaatcaaggtctttgtgtgtttttcatgctgctttcattttcctgttgtgtttaaaacaactgaactcttaaagtttgttcacacctatggacgtgtgtcagcatgcttttcttcagtatttcctaactcttctgagttcttatgaagatcaagttcaccttgggcagccaactctttccacctctctttgttctgctgaatgatgtccaccaggttgtttttgaaactcttcagatccacagctgagagcgagtagtctggggcatagctcccatcacacacggagccttttgtatttgaccgcctcagagagtcagcaacatggaacccaatcatggtggacgagctgcttgccccgtagtttgaagactgtgactttgaagcttcctctataagaggaatgacaattttctctgttgagtccgtcaggagagaaaacgttggctccactatgaaatcaatgaaacctatttgcgactgggcaaccattgttgacttccgatcacaaagtggagaaaatggaagccctaattcagcttctttgtctccctgcaggaaaaactcctccattagggccatggtccatctgtagtgcaacttccaagttttggctgggtggctgatgtcagctgcatggagtatcagggacatagttttggctctgtcaatcccttccggctgctgcaagctgtttcttatgtttttaatttgctgaaaatgccctgacatgtctgtcgctaagaccatttcaatcactaagttccgaagatccctccagtcatctttagacaaatttaccaaaatattcatttcctcctcttgcataagtctgtaggctgcgctgacgtggtgattctcaagcactgagcggtcgttgtacagaatagcaacgtccgacctcgtctgaatatggaagttgtttgttgttcctgtgtgctcataatcatgaatggcagctgcaaagaccatggctaaaatttccagttcagtgagccagtgcatgatacctgtatgaagcattatataatgcacagtttgagtgacgtcagctgcatggaccaaattatgatatggatttttgtgcttgctgtaaccaacttctaaggcttctgcaaaggcaattaggcaagaaacaggaatcttgaagcggttgataagatcatatctggtaaagagttcataaatcataaacttcaggctatgctccccgcttgcttcatttaaggcaaatacatcaaaagaccatttatcaacttccttgagtgtcactatgacagctgcaggatatgtcaaaccaaccatgtgatagttcttcctgtacatcctttccacaaaaatcccagcctggacagcatggacaatgctgcgaaactttggtttttcttcaggcttctttttcatcatccccattttgcgtgtgaaagttgaagccaaccaatcccggacttccgatgggacggagtcagtctggatgtcgctgagttcatcctctgtgtccagcagtcttcttgtctcatcgatgtaaacagcttccagtactgatgctgcatattcgatattcttctttaggtcaacaacgttgacatcacctttctccagctgcttcactaagcatcttagtattcccttcaggcgctgccacatcttctcggtctgttctccaatgagatacttgtaagtggcgttttccaattcttcgatgtccgtatcagtagaccccatgatgatgttcctcacgggagcaatccacacatgtgagctgctactgtactactgaccgactgctcaggctatttgccaagcagctcatctgcaactgttccgtgcacagaagcacatcagaatttctacagtttacgagctcaattatgcacgaaagaaacgtgaatgactttcgcgctctacaagaagctgaattcctctctagcagctgaagcagggcaggatgtaataagaaaccagatggtaggaagcagtaccagcagcaccaccctgggaagaaagtgcctgtttaaataccaaggcttttgtctcttaattgatctggaagcggcacttaaaaat

SEQ ID NO: 115 - DNA, 2081 bp, Rattus norvegicus
  source 1..2081: mol_type = genomic DNA
gaggatagcctgaacagtcggtcagtagtacagtagcagctcacatgtgtggattgctcccgtgaggaacatcattatgggctctacagatacagacatcgaagaactggaaaacgccacttacaagtatctcattggagaacagaccgagaagatgtggcaacgcctgaaaggaatactaagatgcttagtgaagcagctggagaaaggtgatgtcaacgttgtcgacctaaagaagaatatcgaatatgcggcatctgtactggaagctgtttacatcgacgagacgaggaggcttctggatactgaggatgagctcagcgacattcagaccgactcggttccttcggaagtccgggactggttggcttcaacctttacacggaaaatggggatgacgaaaaagaaacccgaggaaaaaccgaagtttcgcagcattgtccacgctgtccaggctgggatttttgtggaaaggatgtacaggaagaactatcacatggttggtttgacatatcctgcagctgtcatagtgacactcaaggaagttgataaatggtcttttgatgtatttgccttaaatgaagcaagcggggagcatagtctgaagtttatgatttatgaactatttaccagtaatgatcttatcaaccgcttcaagattcctgtttcttgcctaattgcctttgcagaagctttagaagttggttacagcaagcacaaaaatccgtatcataatttggtccatgcagctgatgtcactcaaactgtgcattacataatgcttcatacaggtatcatgcactggctcactgaactggaaatcttagccatggtctttgcagccgccgttcatgactatgaacacacaggaactacaaacaacttccatattcagacgaggtcagacgtcgccattctgtataacgaccgctcagttcttgagaatcaccatgtcagcgcagcctacagacttatgcaagaggaggaaatgaatattttggtaaatttatctaaagatgactggagggatcttcggaacttagtgattgaaacggtcttagcaacagacatgtcaggccatttccagcaaattaaaaacataagaagcagcttgcagcagcctgaagggattgacagagccaaaacgatgtccctgatactccacgcagccgacatcagccacccagccaaaacgtggaagctgcactacaggtggactatggccttaatggaggaatttttcctgcagggagacaaagaagctgaattagggcttccgttttctccactttgtgatcggaagtcaacgatggttgcccagtctcaaataggtttcattgatttcatagtggagccaacgttttctctcctgacagactcgacagagaaaattgttattcctcttatagaggaagcttcaaaaccagagtcttctaactatggggcaagcagctcgtccaccatgattgggttccatgttgctgacgctctgaggcggtcaaacacaaaaggctgcatgagtgatgggacctatgccccagactactctctgtcagctgtggacctgaagagcttcaaaaacaacctggtggacatcattcagcagaacaaggagaggtggaaagagttggctgcccaaggcgaacttgatcttcataagaactcagaagacttagaagaaaagcatgctgacacacatccataggtgtgaacgaactttaagagttcagttattttaaacacaagaggaaaatgaaagcagcatgaaaaacatgcaaagaccttgatttttctgcaaaaaaatatatgtttggctcaggccattttagtcgactcctccataaggaacaagagcataagtttcactcttcttagctcagcaaagcagtacctgcaagttatcattaggattctggctgctgtttctgccatcgttctccctccatgatttggccatcttcaatgaagccagagaaatctggagactttcaactttccgtcatgtttgacttggcctgaagacagaatggttttcaatgcacttcttgcaccgtgtcactcaagaggacccacaaccacac

SEQ ID NO: 116 - DNA, 2081 bp, Rattus norvegicus
  source 1..2081: mol_type = genomic DNA
gtgtggttgtgggtcctcttgagtgacacggtgcaagaagtgcattgaaaaccattctgtcttcaggccaagtcaaacatgacggaaagttgaaagtctccagatttctctggcttcattgaagatggccaaatcatggagggagaacgatggcagaaacagcagccagaatcctaatgataacttgcaggtactgctttgctgagctaagaagagtgaaacttatgctcttgttccttatggaggagtcgactaaaatggcctgagccaaacatatatttttttgcagaaaaatcaaggtctttgcatgtttttcatgctgctttcattttcctcttgtgtttaaaataactgaactcttaaagttcgttcacacctatggatgtgtgtcagcatgcttttcttctaagtcttctgagttcttatgaagatcaagttcgccttgggcagccaactctttccacctctccttgttctgctgaatgatgtccaccaggttgtttttgaagctcttcaggtccacagctgacagagagtagtctggggcataggtcccatcactcatgcagccttttgtgtttgaccgcctcagagcgtcagcaacatggaacccaatcatggtggacgagctgcttgccccatagttagaagactctggttttgaagcttcctctataagaggaataacaattttctctgtcgagtctgtcaggagagaaaacgttggctccactatgaaatcaatgaaacctatttgagactgggcaaccatcgttgacttccgatcacaaagtggagaaaacggaagccctaattcagcttctttgtctccctgcaggaaaaattcctccattaaggccatagtccacctgtagtgcagcttccacgttttggctgggtggctgatgtcggctgcgtggagtatcagggacatcgttttggctctgtcaatcccttcaggctgctgcaagctgcttcttatgtttttaatttgctggaaatggcctgacatgtctgttgctaagaccgtttcaatcactaagttccgaagatccctccagtcatctttagataaatttaccaaaatattcatttcctcctcttgcataagtctgtaggctgcgctgacatggtgattctcaagaactgagcggtcgttatacagaatggcgacgtctgacctcgtctgaatatggaagttgtttgtagttcctgtgtgttcatagtcatgaacggcggctgcaaagaccatggctaagatttccagttcagtgagccagtgcatgatacctgtatgaagcattatgtaatgcacagtttgagtgacatcagctgcatggaccaaattatgatacggatttttgtgcttgctgtaaccaacttctaaagcttctgcaaaggcaattaggcaagaaacaggaatcttgaagcggttgataagatcattactggtaaatagttcataaatcataaacttcagactatgctccccgcttgcttcatttaaggcaaatacatcaaaagaccatttatcaacttccttgagtgtcactatgacagctgcaggatatgtcaaaccaaccatgtgatagttcttcctgtacatcctttccacaaaaatcccagcctggacagcgtggacaatgctgcgaaacttcggtttttcctcgggtttctttttcgtcatccccattttccgtgtaaaggttgaagccaaccagtcccggacttccgaaggaaccgagtcggtctgaatgtcgctgagctcatcctcagtatccagaagcctcctcgtctcgtcgatgtaaacagcttccagtacagatgccgcatattcgatattcttctttaggtcgacaacgttgacatcacctttctccagctgcttcactaagcatcttagtattcctttcaggcgttgccacatcttctcggtctgttctccaatgagatacttgtaagtggcgttttccagttcttcgatgtctgtatctgtagagcccataatgatgttcctcacgggagcaatccacacatgtgagctgctactgtactactgaccgactgttcaggctatcctc

SEQ ID NO: 117 - DNA, 2358 bp, Macaca mulatta
  source 1..2358: mol_type = genomic DNA
ctgtataagcgtgtaagatttgtaatggactgaggaatgcttgttctagctgctgaaactgactgtaactgtattgtcttaggagcatcatcatggggtctagtgccacagaaattgaagaattggaaaacaccacttttaagtatcttacaggagaacagactgaaaaaatgtggcagcgcctgaaaggaatattaagatgcttagtgaagcagctggaaagaggtgacgttaacgtcgttgacttaaagaagaatattgaatatgcggcatctgtgctggaagcagtttatatcgatgaaacaagaagacttctggatactgaagatgagctcagtgacattcagactgactcagtcccatctgaagtccgggactggttggcttctacctttacacggaaaatggggatgacaaaaaagaaacctgaggaaaaaccaaaatttcggagcattgtgcatgctgttcaagctggaatttttgtggaaaggatgtaccgaaaaacatatcatatggttggtttggcatatccagcagctgtcatcgtaacattaaaggatgttgataaatggtcttttgatgtatttgccctaaatgaagcaagtggagagcatagtctgaagtttatgatttatgaactgtttaccagatatgatcttatcaaccgtttcaagattcctgtttcttgcctaatcacctttgcagaagctttagaagttggttacagcaagtacaaaaatccatatcacaatttgattcatgcagctgatgtcactcaaactgtgcattacataatgcttcacacaggtatcatgcactggctcactgaactggaaattttagcaatggtctttgctgctgccattcatgattatgagcatacagggacaacaaacaactttcacattcagacaaggtcagatgttgccattttgtataatgatcgctctgtccttgagaatcaccatgtgagtgcagcttatcgacttatgcaagaagaagaaatgaatatcttggtaaatttatccaaagatgactggagggaccttcggaacctagtgattgaaatggttttatctacagacatgtcaggtcacttccagcaaattaaaaatataagaagcaatttgcagcagcctgaagggattgacagagccaaaaccatgtccctgattctccatgcagcagacatcagccacccagccaaatcctggaagctgcactatcggtggaccatggccctaatggaggagtttttcctgcagggagataaagaagctgaattagggcttcccttttccccactttgtgatcggaagtcaaccatggtggcccagtcacaaataggtttcatcgatttcatagtagagccaacattttctcttctgacagactcaacagagaaaattgttattcctcttatagaggaagcctcaaaagccgaaactacttcttcctatgtggcaagcagctcaaccaccattgtggggttacacattgctgatgcactaagacgaccaaatgcaaaaggttccatgagcgatgggtcctattcctcagactactcccttgcagcagtggacctgaagagcttcaagaacaacctggtggacatcattcagcagaacaaagagaggtggaaagagttagctgcacaaggtgaacctgatcttcataagaactcagaagacctagtaaatgctgaagaaaaacatgagacacattcataggcctgaaacaccttaaagacttctgtcattttaaacatgagaggacaatgaaaacagcatgaaaacatcctgagttctcaactttccacaaagctatagctcctctttcaacgtagaattggattgggccattttaattgactcctatacaaggaattaagaagaacataaattttgagctagcaactctggtcaaataaatacactcaagtttttatcagagtttttggccagtgcttgtgccatttttttccctccacaatttggccttcttcaatcaagccagaggaatttttgaaacaaaagtcagacagtttttaatttttcttgcttttactctgtcataatgactgtgcaatgcatgtgcagaagatgagatatttcaaaatttacttccttgcactgtcttacacagagtgctataagtataaatttttcaaggtcttaaataaaaggaagcaaaaacaacattatggaaaaaaatttttttgctgtgctggggaatagactatttagattgtccttcttattttaaatgtatgggaatggaatgacaggcgggatgctgaggagctggttgaagcatcagagcaatgctacaatccaacagtggagcattagatcccca

SEQ ID NO: 118 - DNA, 2358 bp, Macaca mulatta
  source 1..2358: mol_type = genomic DNA
tggggatctaatgctccactgttggattgtagcattgctctgatgcttcaaccagctcctcagcatcccgcctgtcattccattcccatacatttaaaataagaaggacaatctaaatagtctattccccagcacagcaaaaaaatttttttccataatgttgtttttgcttccttttatttaagaccttgaaaaatttatacttatagcactctgtgtaagacagtgcaaggaagtaaattttgaaatatctcatcttctgcacatgcattgcacagtcattatgacagagtaaaagcaagaaaaattaaaaactgtctgacttttgtttcaaaaattcctctggcttgattgaagaaggccaaattgtggagggaaaaaaatggcacaagcactggccaaaaactctgataaaaacttgagtgtatttatttgaccagagttgctagctcaaaatttatgttcttcttaattccttgtataggagtcaattaaaatggcccaatccaattctacgttgaaagaggagctatagctttgtggaaagttgagaactcaggatgttttcatgctgttttcattgtcctctcatgtttaaaatgacagaagtctttaaggtgtttcaggcctatgaatgtgtctcatgtttttcttcagcatttactaggtcttctgagttcttatgaagatcaggttcaccttgtgcagctaactctttccacctctctttgttctgctgaatgatgtccaccaggttgttcttgaagctcttcaggtccactgctgcaagggagtagtctgaggaataggacccatcgctcatggaaccttttgcatttggtcgtcttagtgcatcagcaatgtgtaaccccacaatggtggttgagctgcttgccacataggaagaagtagtttcggcttttgaggcttcctctataagaggaataacaattttctctgttgagtctgtcagaagagaaaatgttggctctactatgaaatcgatgaaacctatttgtgactgggccaccatggttgacttccgatcacaaagtggggaaaagggaagccctaattcagcttctttatctccctgcaggaaaaactcctccattagggccatggtccaccgatagtgcagcttccaggatttggctgggtggctgatgtctgctgcatggagaatcagggacatggttttggctctgtcaatcccttcaggctgctgcaaattgcttcttatatttttaatttgctggaagtgacctgacatgtctgtagataaaaccatttcaatcactaggttccgaaggtccctccagtcatctttggataaatttaccaagatattcatttcttcttcttgcataagtcgataagctgcactcacatggtgattctcaaggacagagcgatcattatacaaaatggcaacatctgaccttgtctgaatgtgaaagttgtttgttgtccctgtatgctcataatcatgaatggcagcagcaaagaccattgctaaaatttccagttcagtgagccagtgcatgatacctgtgtgaagcattatgtaatgcacagtttgagtgacatcagctgcatgaatcaaattgtgatatggatttttgtacttgctgtaaccaacttctaaagcttctgcaaaggtgattaggcaagaaacaggaatcttgaaacggttgataagatcatatctggtaaacagttcataaatcataaacttcagactatgctctccacttgcttcatttagggcaaatacatcaaaagaccatttatcaacatcctttaatgttacgatgacagctgctggatatgccaaaccaaccatatgatatgtttttcggtacatcctttccacaaaaattccagcttgaacagcatgcacaatgctccgaaattttggtttttcctcaggtttcttttttgtcatccccattttccgtgtaaaggtagaagccaaccagtcccggacttcagatgggactgagtcagtctgaatgtcactgagctcatcttcagtatccagaagtcttcttgtttcatcgatataaactgcttccagcacagatgccgcatattcaatattcttctttaagtcaacgacgttaacgtcacctctttccagctgcttcactaagcatcttaatattcctttcaggcgctgccacattttttcagtctgttctcctgtaagatacttaaaagtggtgttttccaattcttcaatttctgtggcactagaccccatgatgatgctcctaagacaatacagttacagtcagtttcagcagctagaacaagcattcctcagtccattacaaatcttacacgcttatacag

SEQ ID NO: 119 - DNA, 2392 bp, Macaca fascicularis
  source 1..2392: mol_type = genomic DNA
acatcctgccctcgttctgttggtagagaggaattcagcttcttctggagcgcgaaagtcattcacgtttctcttgtgcataatagagctcgtaaactgtaggaattctgatgtgcttcagtgcacagaacagtaacaaatgagctgcttttggggagagcttgagtactcagtcggtcagtagtacagtagcaggctcacatgtacggattgttcttgtgaggagcatcatcatggggtctagtgccacagaaattgaagaattggaaaacaccacttttaagtatcttacaggagaacagactgaaaaaatgtggcagcgcctgaaaggaatattaagatgcttagtgaagcagctggaaagaggtgacgttaacgtcgttgacttaaagaagaatattgaatatgcggcatctgtgctggaagcagtttatatcgatgaaacaagaagacttctggatactgaagatgagctcagtgacattcagactgactcagtcccatctgaagtccgggactggttggcttctacctttacacggaaaatggggatgacaaaaaagaaacctgaggagaaaccaaaatttcggagcattgtgcatgctgttcaagctggaatttttgtggaaaggatgtaccgaaaaacatatcatatggttggtttggcatatccagcagctgtcatcgtaacattaaaggatgttgataaatggtcttttgatgtatttgccctaaatgaagcaagtggagagcatagtctgaagtttatgatttatgaactgtttaccagatatgatcttatcaaccgtttcaagattcctgtttcttgcctaatcacctttgcagaagctttagaagttggttacagcaagtacaaaaatccatatcacaatttgattcatgcagctgatgtcactcaaactgtgcattacataatgcttcacacaggtatcatgcactggctcactgaactggaaattttagcaatggtctttgctgctgccattcatgattatgagcatacagggacaacaaacaactttcacattcagacaaggtcagatgttgccattttgtataatgatcgctctgtccttgagaatcaccatgtgagtgcagcttatcgacttatgcaagaagaagaaatgaatatcttggtaaatttatccaaagatgactggagggaccttcggaacctagtgattgaaatggttttatctacagacatgtcaggtcacttccagcaaattaaaaatataagaagcaatttgcagcagcctgaagggatcgacagagccaaaaccatgtccctgattctccatgcagcagacatcagccacccagccaaatcctggaagctgcactatcggtggaccatggccctaatggaggagtttttcctgcagggagataaagaagctgaattagggcttcccttttccccactttgtgatcggaagtcaaccatggtggcccagtcacaaataggtttcatcgatttcatagtagagccaacattttctcttctgacagactcaacagagaaaattgttattcctcttatagaggaagcctcaaaagccgaaactacttcttcctatgtggcaagcagctcaaccaccattgtggggttacacattgctgatgcactaagacgaccaaatgcaaaaggttccatgagcgatgggtcctattcctcagactactcccttgcagcagtggacctgaagagcttcaagaacaacctggtggacatcattcagcagaacaaagagaggtggaaagagttagctgcacaagcttcatcttcagatcatgttctacatcatgttagcagtacaatagagcaggagtatgcatttgatagagtggaactttcagaagataagaatcatgaagttctaagaagcgatattcagtcacttaaccctagaagagcttaaataattgtttgaatggagattaaggaatgatagagcacaattccacctgaaaatcatgttataacctatgtgacagcattagcccttccagaagcaagaaccagttcacagaagtgtgagtttatccatcagtaaacacctttaagtaaaacctcatgcaaaaggtggcagctctaatttgaccaaaaggcttggcgattttgatatgcttgctggaaatctaccttgccctgtgtgagaaagggaatccatttttgcagattgctcaataagcatcatgagccatataaataacagctgtaaactccttaattcaccgggctcaaccactatcgaacagattcatctagtggctacatcagcaccttgtgctttcaaatatctgtttcaatgggattttgtggcatttgtctttaccgagtgccaataaattttctttgagcaactaa

SEQ ID NO: 120 - DNA, 2392 bp, Macaca fascicularis
  source 1..2392: mol_type = genomic DNA
ttagttgctcaaagaaaatttattggcactcggtaaagacaaatgccacaaaatcccattgaaacagatatttgaaagcacaaggtgctgatgtagccactagatgaatctgttcgatagtggttgagcccggtgaattaaggagtttacagctgttatttatatggctcatgatgcttattgagcaatctgcaaaaatggattccctttctcacacagggcaaggtagatttccagcaagcatatcaaaatcgccaagccttttggtcaaattagagctgccaccttttgcatgaggttttacttaaaggtgtttactgatggataaactcacacttctgtgaactggttcttgcttctggaagggctaatgctgtcacataggttataacatgattttcaggtggaattgtgctctatcattccttaatctccattcaaacaattatttaagctcttctagggttaagtgactgaatatcgcttcttagaacttcatgattcttatcttctgaaagttccactctatcaaatgcatactcctgctctattgtactgctaacatgatgtagaacatgatctgaagatgaagcttgtgcagctaactctttccacctctctttgttctgctgaatgatgtccaccaggttgttcttgaagctcttcaggtccactgctgcaagggagtagtctgaggaataggacccatcgctcatggaaccttttgcatttggtcgtcttagtgcatcagcaatgtgtaaccccacaatggtggttgagctgcttgccacataggaagaagtagtttcggcttttgaggcttcctctataagaggaataacaattttctctgttgagtctgtcagaagagaaaatgttggctctactatgaaatcgatgaaacctatttgtgactgggccaccatggttgacttccgatcacaaagtggggaaaagggaagccctaattcagcttctttatctccctgcaggaaaaactcctccattagggccatggtccaccgatagtgcagcttccaggatttggctgggtggctgatgtctgctgcatggagaatcagggacatggttttggctctgtcgatcccttcaggctgctgcaaattgcttcttatatttttaatttgctggaagtgacctgacatgtctgtagataaaaccatttcaatcactaggttccgaaggtccctccagtcatctttggataaatttaccaagatattcatttcttcttcttgcataagtcgataagctgcactcacatggtgattctcaaggacagagcgatcattatacaaaatggcaacatctgaccttgtctgaatgtgaaagttgtttgttgtccctgtatgctcataatcatgaatggcagcagcaaagaccattgctaaaatttccagttcagtgagccagtgcatgatacctgtgtgaagcattatgtaatgcacagtttgagtgacatcagctgcatgaatcaaattgtgatatggatttttgtacttgctgtaaccaacttctaaagcttctgcaaaggtgattaggcaagaaacaggaatcttgaaacggttgataagatcatatctggtaaacagttcataaatcataaacttcagactatgctctccacttgcttcatttagggcaaatacatcaaaagaccatttatcaacatcctttaatgttacgatgacagctgctggatatgccaaaccaaccatatgatatgtttttcggtacatcctttccacaaaaattccagcttgaacagcatgcacaatgctccgaaattttggtttctcctcaggtttcttttttgtcatccccattttccgtgtaaaggtagaagccaaccagtcccggacttcagatgggactgagtcagtctgaatgtcactgagctcatcttcagtatccagaagtcttcttgtttcatcgatataaactgcttccagcacagatgccgcatattcaatattcttctttaagtcaacgacgttaacgtcacctctttccagctgcttcactaagcatcttaatattcctttcaggcgctgccacattttttcagtctgttctcctgtaagatacttaaaagtggtgttttccaattcttcaatttctgtggcactagaccccatgatgatgctcctcacaagaacaatccgtacatgtgagcctgctactgtactactgaccgactgagtactcaagctctccccaaaagcagctcatttgttactgttctgtgcactgaagcacatcagaattcctacagtttacgagctctattatgcacaagagaaacgtgaatgactttcgcgctccagaagaagctgaattcctctctaccaacagaacgagggcaggatgt

SEQ ID NO: 121 - DNA, 2032 bp, Homo sapiens
  source 1..2032: mol_type = genomic DNA
accacaccagccggggagccgccgccgccgccgccacctctgagcagccggctgggagcgagagccgacagctagtctgcaagccaccgctgtcgccatggggagccgcgtctcgcgggaagacttcgagtgggtctacaccgaccagccgcacgccgaccggcgccgggagatcctggcaaagtatccagagataaagtccttgatgaaacctgatcccaatttgatatggattataattatgatggttctcacccagttgggtgcattttacatagtaaaagacttggactggaaatgggtcatatttggggcctatgcgtttggcagttgcattaaccactcaatgactctggctattcatgagattgcccacaatgctgcctttggcaactgcaaagcaatgtggaatcgctggtttggaatgtttgctaatcttcctattgggattccatattcaatttcctttaagaggtatcacatggatcatcatcggtaccttggagctgatggcgtcgatgtagatattcctaccgattttgagggctggttcttctgtaccgctttcagaaagtttatatgggttattcttcagcctctcttttatgcctttcgacctctgttcatcaaccccaaaccaattacgtatctggaagttatcaataccgtggcacaggtcacttttgacattttaatttattactttttgggaattaaatccttagtctacatgttggcagcatctttacttggcctgggtttgcacccaatttctggacattttatagctgagcattacatgttcttaaagggtcatgaaacttactcatattatgggcctctgaatttacttaccttcaatgtgggttatcataatgaacatcatgatttccccaacattcctggaaaaagtcttccactggtgaggaaaatagcagctgaatactatgacaacctccctcactacaattcctggataaaagtactgtatgattttgtgatggatgatacaataagtccctactcaagaatgaagaggcaccaaaaaggagagatggtgctggagtaaatatcattagtgccaaagggattcttctccaaaactttagatgataaaatggaatttttgcattattaaacttgagaccagtgatgctcagaagctcccctggcacaatttcagagtaagagctcggtgataccaagaagtgaatctggcttttaaacagtcagcctgactctgtactgctcagtttcactcacaggaaacttgtgacttgtgtattatcgtcattgaggatgtttcactcatgtctgtcattttataagcatatcatttaaaaagcttctaaaaagctatttcgccaggcacggtggctcatgcctataatcccagcactttgggaggccaaggtgggtggatcacctgaggtcaggagttcgagaccagcctggccaacacggtgaaaccccatctctactaaaaatgcaaaaattagccgggcgtggcggcacatgcctgtaatcccagctacatgggaggctgaggtgggagaattgcttgaacccaggaggcggaggcagaggctgcagtgacccaagattgtgccactgcactccaccctgggcaacagagcaagaccccatctcaaaaataaataaatatatataaaaaataaaaagctatttctagtttatttcactataaagttttgctttattaaaaagctaataaacagctattaatcacagtgtattagtatttgttacatttttgtatttcactatctttatactatataatatggtaacttgggtaccgggggaactttaaaatttcatctcaaaaataatttttaaaaagcctgaggtatgatatagcataaaagattgagatgaaaatatatttccctgtaagctgaattactcatttaaaaattttaacttctatatgggacccgaattagacactgctgaatcctgtacagccttactcataaataaagtacttactgaatttccaccattcaaa

SEQ ID NO: 122 - DNA, 2032 bp, Homo sapiens
  source 1..2032: mol_type = genomic DNA
tttgaatggtggaaattcagtaagtactttatttatgagtaaggctgtacaggattcagcagtgtctaattcgggtcccatatagaagttaaaatttttaaatgagtaattcagcttacagggaaatatattttcatctcaatcttttatgctatatcatacctcaggctttttaaaaattatttttgagatgaaattttaaagttcccccggtacccaagttaccatattatatagtataaagatagtgaaatacaaaaatgtaacaaatactaatacactgtgattaatagctgtttattagctttttaataaagcaaaactttatagtgaaataaactagaaatagctttttattttttatatatatttatttatttttgagatggggtcttgctctgttgcccagggtggagtgcagtggcacaatcttgggtcactgcagcctctgcctccgcctcctgggttcaagcaattctcccacctcagcctcccatgtagctgggattacaggcatgtgccgccacgcccggctaatttttgcatttttagtagagatggggtttcaccgtgttggccaggctggtctcgaactcctgacctcaggtgatccacccaccttggcctcccaaagtgctgggattataggcatgagccaccgtgcctggcgaaatagctttttagaagctttttaaatgatatgcttataaaatgacagacatgagtgaaacatcctcaatgacgataatacacaagtcacaagtttcctgtgagtgaaactgagcagtacagagtcaggctgactgtttaaaagccagattcacttcttggtatcaccgagctcttactctgaaattgtgccaggggagcttctgagcatcactggtctcaagtttaataatgcaaaaattccattttatcatctaaagttttggagaagaatccctttggcactaatgatatttactccagcaccatctctcctttttggtgcctcttcattcttgagtagggacttattgtatcatccatcacaaaatcatacagtacttttatccaggaattgtagtgagggaggttgtcatagtattcagctgctattttcctcaccagtggaagactttttccaggaatgttggggaaatcatgatgttcattatgataacccacattgaaggtaagtaaattcagaggcccataatatgagtaagtttcatgaccctttaagaacatgtaatgctcagctataaaatgtccagaaattgggtgcaaacccaggccaagtaaagatgctgccaacatgtagactaaggatttaattcccaaaaagtaataaattaaaatgtcaaaagtgacctgtgccacggtattgataacttccagatacgtaattggtttggggttgatgaacagaggtcgaaaggcataaaagagaggctgaagaataacccatataaactttctgaaagcggtacagaagaaccagccctcaaaatcggtaggaatatctacatcgacgccatcagctccaaggtaccgatgatgatccatgtgatacctcttaaaggaaattgaatatggaatcccaataggaagattagcaaacattccaaaccagcgattccacattgctttgcagttgccaaaggcagcattgtgggcaatctcatgaatagccagagtcattgagtggttaatgcaactgccaaacgcataggccccaaatatgacccatttccagtccaagtcttttactatgtaaaatgcacccaactgggtgagaaccatcataattataatccatatcaaattgggatcaggtttcatcaaggactttatctctggatactttgccaggatctcccggcgccggtcggcgtgcggctggtcggtgtagacccactcgaagtcttcccgcgagacgcggctccccatggcgacagcggtggcttgcagactagctgtcggctctcgctcccagccggctgctcagaggtggcggcggcggcggcggctccccggctggtgtggt

SEQ ID NO: 123 - DNA, 1853 bp, Mus musculus
  source 1..1853: mol_type = genomic DNA
tctgcccgcgtccccgcggcttatcgactagagccgggcctcgagctgccgccgtccggacacgagccggaggcagagcgggtccacaggccgcagccatgggtagccgcgtgtcccgagaggagttcgaatgggtctacacggaccagccccacgccgcccggcgcaaggagatcttagcaaagtatccagagatcaagtccttgatgaaacctgaccacaatctgatctggattgtagccatgatgcttctcgtccagctggcttcattttacttagtcaaagatttggactggaaatgggtcatattttggtcctatgtctttggcagctgccttaaccactccatgactctggctatccatgagatttcccacaatttcccctttggccaccacaaggccctgtggaaccgctggtttggaatgtttgctaacctctctctcggagtgccatactcgatttcctttaagagataccacatggatcaccaccggtacctcggagcggataagattgatgtagatattcccaccgatttcgagggctggttcttctgcaccactttcaggaaatttgtctgggttatccttcagcctctcttttatgcttttagacccctgttcatcaatcccaaacccattacctatctggaaatcatcaatactgtgatccagatcacctttgacattatcatttattatgtgtttggagtgaaatctttagtctacatgttggcagccaccttgcttggcctgggtttgcacccaatttctgggcattttatagccgaacattacatgttcttgaagggacacgaaacctactcctattatgggcctctgaacttgctcaccttcaatgtgggctatcataacgagcaccatgacttccccaacgttcctgggaaaaacctgcccatggtgaggaagatcgcaagtgagtactacgatgacctcccgcactacaactcctggatcaaggtgctctatgactttgtgacggatgacacaataagtccctactcgcggatgaagaggcctccgaaagggaacgagattctggagtaaatatcacagccaaaggaattcctgtccacggcttcaaaataggtgatagagtggagtttttatctcgttaggcttatggtcagtgatgctcggaagctgggctggcatgattgccaactcagatctcggtgtcatcagaggctcctcagccttcagacagcccgacgacgacgcttgacgctagcggctgctgtgcttgctcactcccctgcactcacgagatgttattactgttactgagggcgtctttcctcgtgtctgtcatgctgtgagcaaatcataaaaagcttatattatttttcactataaagttactttattaaagcacctaataaactgaactgttaatcatatatattaataatattcattgcattattatatttctattgtattggtatacttaccagagtgctagggagaactttacaatttcatccagaaatttaattttgttaaaggcttgacttgagttcatatagtattgtgtgagttccctctggattcaatcatttgttcttagtggggaatggaaggcttataagtctcgggaaactgatgaaattctccatcacaaagtccaaagggtctttggacaagggtccaaacatgaagtgctttctggaggagcttttgtttagtccaacaggagtccaaggatgcagattagagttttgtgagtttgctgcccttgctgggctaggcatttcattgttgtaactgcctctgagtaactgatgatcctataagtaaccccaataaactctctggtttactaagcta

SEQ ID NO: 124 - DNA, 1853 bp, Mus musculus
  source 1..1853: mol_type = genomic DNA
tagcttagtaaaccagagagtttattggggttacttataggatcatcagttactcagaggcagttacaacaatgaaatgcctagcccagcaagggcagcaaactcacaaaactctaatctgcatccttggactcctgttggactaaacaaaagctcctccagaaagcacttcatgtttggacccttgtccaaagaccctttggactttgtgatggagaatttcatcagtttcccgagacttataagccttccattccccactaagaacaaatgattgaatccagagggaactcacacaatactatatgaactcaagtcaagcctttaacaaaattaaatttctggatgaaattgtaaagttctccctagcactctggtaagtataccaatacaatagaaatataataatgcaatgaatattattaatatatatgattaacagttcagtttattaggtgctttaataaagtaactttatagtgaaaaataatataagctttttatgatttgctcacagcatgacagacacgaggaaagacgccctcagtaacagtaataacatctcgtgagtgcaggggagtgagcaagcacagcagccgctagcgtcaagcgtcgtcgtcgggctgtctgaaggctgaggagcctctgatgacaccgagatctgagttggcaatcatgccagcccagcttccgagcatcactgaccataagcctaacgagataaaaactccactctatcacctattttgaagccgtggacaggaattcctttggctgtgatatttactccagaatctcgttccctttcggaggcctcttcatccgcgagtagggacttattgtgtcatccgtcacaaagtcatagagcaccttgatccaggagttgtagtgcgggaggtcatcgtagtactcacttgcgatcttcctcaccatgggcaggtttttcccaggaacgttggggaagtcatggtgctcgttatgatagcccacattgaaggtgagcaagttcagaggcccataataggagtaggtttcgtgtcccttcaagaacatgtaatgttcggctataaaatgcccagaaattgggtgcaaacccaggccaagcaaggtggctgccaacatgtagactaaagatttcactccaaacacataataaatgataatgtcaaaggtgatctggatcacagtattgatgatttccagataggtaatgggtttgggattgatgaacaggggtctaaaagcataaaagagaggctgaaggataacccagacaaatttcctgaaagtggtgcagaagaaccagccctcgaaatcggtgggaatatctacatcaatcttatccgctccgaggtaccggtggtgatccatgtggtatctcttaaaggaaatcgagtatggcactccgagagagaggttagcaaacattccaaaccagcggttccacagggccttgtggtggccaaaggggaaattgtgggaaatctcatggatagccagagtcatggagtggttaaggcagctgccaaagacataggaccaaaatatgacccatttccagtccaaatctttgactaagtaaaatgaagccagctggacgagaagcatcatggctacaatccagatcagattgtggtcaggtttcatcaaggacttgatctctggatactttgctaagatctccttgcgccgggcggcgtggggctggtccgtgtagacccattcgaactcctctcgggacacgcggctacccatggctgcggcctgtggacccgctctgcctccggctcgtgtccggacggcggcagctcgaggcccggctctagtcgataagccgcggggacgcgggcaga

SEQ ID NO: 125 - DNA, 1466 bp, Rattus norvegicus
  source 1..1466: mol_type = genomic DNA
ccgcccgaacgcgagccggaggcagagctggtccgcacgccgcagccatggggaaccgcgtgtcccgagaggagttcgaatgggtctacacggaccagccccacgccgcccggcgccaggagatcttagcgaagtatccagagataaaatccttgatgaagcccgaccctaacctgatctggattgtaacctcaatgcttctcgtccagttggcttcgttttacttagtcaaagacttggactggaagtggctcatgttttggtcctatgcctttggcagctgccttaaccattccatgactctggctatccatgagatttcccacaacttcccctttggccaccacaaggccatgtggaaccgctggtttggaatgttcgcgaacctctctctcggggttccatattcgatttcctttaagaggtaccacatggatcatcaccggtacctcggggcggacggcatcgatgtggatatccctactgatttcgagggctggttcttctgcaccactctcaggaagcttgtctgggttatccttcagcctctcttctatgcgtttagacccctgttcatcaaccccaagccaattacccatctggaagtcatcaacactgtgatccaggtcacttttgacgtcctcgtctactatgtttttggagtgaagtctctagtgtacatgttggcagcctccctgctcggcctgggcttgcacccaatttcggggcatttcatagccgaacattacatgttcctaaagggacacgaaacatactcctactatgggcctctgaacttactcaccttcaatgtgggctatcacaacgaacaccacgacttccccaatgttcctgggaaaaacctgcccctggtgagaaaaatcgcaagtgagtactatgataacctcccacactacaactcctggatccgagtgctgtatgactttgtgatggacgacacaataagtccctactcacggatgaagaggcccccgaaagggaatgagattcaggagtaaatgccatcacagccaaaggaattcctgtccacagcttcagaataggagataaagtggagctttcctctcgttaaggtcagtgatgctcagaagccgcgctgacgtaatttccggctcgctgacgtaatttccggctcgctgacgtaatttccggctaggatctcggtgtcatcagaagctcctcggccttcagacagccagaactcacacttgctcgcagccgcacgcctgctcaccgtactcacgcaacgtatgactgttactgaggcgtcctcactcatgtctgtcctgctgcaagcaaatcataaaagcttatgttatttttcactgtaaggttttactttattaaagcccctaataaactgaactgttaatcatatatattaatatgcattgcattattatatatatatatattaaaaaaaaaaaaaaaaaaaaaaaaaaaaa

SEQ ID NO: 126 - DNA, 1466 bp, Rattus norvegicus
  source 1..1466: mol_type = genomic DNA
tttttttttttttttttttttttttttttaatatatatatatataataatgcaatgcatattaatatatatgattaacagttcagtttattaggggctttaataaagtaaaaccttacagtgaaaaataacataagcttttatgatttgcttgcagcaggacagacatgagtgaggacgcctcagtaacagtcatacgttgcgtgagtacggtgagcaggcgtgcggctgcgagcaagtgtgagttctggctgtctgaaggccgaggagcttctgatgacaccgagatcctagccggaaattacgtcagcgagccggaaattacgtcagcgagccggaaattacgtcagcgcggcttctgagcatcactgaccttaacgagaggaaagctccactttatctcctattctgaagctgtggacaggaattcctttggctgtgatggcatttactcctgaatctcattccctttcgggggcctcttcatccgtgagtagggacttattgtgtcgtccatcacaaagtcatacagcactcggatccaggagttgtagtgtgggaggttatcatagtactcacttgcgatttttctcaccaggggcaggtttttcccaggaacattggggaagtcgtggtgttcgttgtgatagcccacattgaaggtgagtaagttcagaggcccatagtaggagtatgtttcgtgtccctttaggaacatgtaatgttcggctatgaaatgccccgaaattgggtgcaagcccaggccgagcagggaggctgccaacatgtacactagagacttcactccaaaaacatagtagacgaggacgtcaaaagtgacctggatcacagtgttgatgacttccagatgggtaattggcttggggttgatgaacaggggtctaaacgcatagaagagaggctgaaggataacccagacaagcttcctgagagtggtgcagaagaaccagccctcgaaatcagtagggatatccacatcgatgccgtccgccccgaggtaccggtgatgatccatgtggtacctcttaaaggaaatcgaatatggaaccccgagagagaggttcgcgaacattccaaaccagcggttccacatggccttgtggtggccaaaggggaagttgtgggaaatctcatggatagccagagtcatggaatggttaaggcagctgccaaaggcataggaccaaaacatgagccacttccagtccaagtctttgactaagtaaaacgaagccaactggacgagaagcattgaggttacaatccagatcaggttagggtcgggcttcatcaaggattttatctctggatacttcgctaagatctcctggcgccgggcggcgtggggctggtccgtgtagacccattcgaactcctctcgggacacgcggttccccatggctgcggcgtgcggaccagctctgcctccggctcgcgttcgggcgg

SEQ ID NO: 127 - DNA, 2113 bp, Macaca fascicularis
  source 1..2113: mol_type = genomic DNA
cgggccgcgaggggcggggcctcgggactccgcccacgcctccgtctcctccgcgctccgccgcagtcggccgacaccacacgagtcgggaagccgccgcagccacctctgaggagacggccaggagcgagagccgacagcgagcctgcgagccacctccgccgccatggggagccgcgtgtcgcgggaagacttcgagtgggtctacaccgaccagccccacgccgaccggcgccgggagatcctggcaaagtatccagagataaagtccttgatgaaacctgatcccaatttgatatggattataattatgatgtttctcacccagttggctgcattttacatagtaaaagacttggactggaaatgggtcatatttggggcctatgtgtttggcagttgcattaaccactcaatgactctggctattcatgagatttcccacaatgctgcctttggcaactgcaaagcaatgtggaatcgctggtttggaatgtttgctaatcttcctattggggttccatattcaatttcctttaagagatatcacatggatcatcaccggtaccttggagctgatggcgtcgatgtagatattcctaccgactttgagggctggttcttctgtaccactttcagaaagtttatatgggttattcttcagcctctcttctatgcctttcgacctctattcatcaaccccaaaccaattacttatttggaagttatcaatatcgtggcccaggtcacatttgacattttaatttattactttttgggaattaaatccttagtctacatgttggcagcatctttacttggcctgggtttgcacccgatttctggacattttatagctgagcattacatgttcttaaagggtcacgaaacttactcatattatgggcctctgaatttatttaccttcaatgtaggttatcataatgaacatcatgacttccccaacattcctggaaaaagccttccactggtgaggaaaatagcagctgaatactatgacaacctcccccactacaattcctggataaaagtactgtatgattttgtgatggatgatacaataagtccctactcaagaatgaagaggcaccaaaaaggagagatggtgctggagtagatatcattagtgccaaagggattcctctccaaaactttagatgataaagtggaagttttgcattattaaacttgagaccagggatacttagaagctcctctggcacaatttcagagtaagaggtcagtgatatcaagaagtaaatctggcttttcaacagtcagcctgactctgtactgctcggcttcactcacagaaaacttgtgacttgtgtattatcgtcattgagaatgtttcactcatgtctgtcattttataagcatatcattttaaaagcttttaaaaaggtattttgccgggcatggtggctcatgcctgtaatcccagcactttgggaggccaaggtgggtggattacctgaggtcaggagttcgagaccagcctggccaacatggtgaaaccccgtctctactaaaaatgcaaaaattagccgggcatggcagcacatgcctgtaatcccagctacatgggaggctgaggtgggagaattccttgaacccaggaggtgaaggcagaggctgcagtgagccaagatcgtgccactgcactccagcctgggcaacagagcaagaccccatctcaaaaataaatatataaaataaaaagctatttctagtttatttcactataaagttttgctttattaaaaagctaataaacagctattaatcacagtgtgttagtatttgttacatttttgtatttcactatctttattacatttttgtatttcactatctttataatatggtaaccagggtactgggggaactttaaaatttcatctcaaaaataatttttaaaaagcctgaggtatgatatagcataaaagattggatgaaaatatatttcaccgtaagctgaattgctcgtttaaaaattttagctatcatatatgagactcgaattagacactgttgaatcctgtacagccttactcataaataaagtacttactgaatttccaccgttcaa

SEQ ID NO: 128 - DNA, 2113 bp, Macaca fascicularis
  source 1..2113: mol_type = genomic DNA
ttgaacggtggaaattcagtaagtactttatttatgagtaaggctgtacaggattcaacagtgtctaattcgagtctcatatatgatagctaaaatttttaaacgagcaattcagcttacggtgaaatatattttcatccaatcttttatgctatatcatacctcaggctttttaaaaattatttttgagatgaaattttaaagttcccccagtaccctggttaccatattataaagatagtgaaatacaaaaatgtaataaagatagtgaaatacaaaaatgtaacaaatactaacacactgtgattaatagctgtttattagctttttaataaagcaaaactttatagtgaaataaactagaaatagctttttattttatatatttatttttgagatggggtcttgctctgttgcccaggctggagtgcagtggcacgatcttggctcactgcagcctctgccttcacctcctgggttcaaggaattctcccacctcagcctcccatgtagctgggattacaggcatgtgctgccatgcccggctaatttttgcatttttagtagagacggggtttcaccatgttggccaggctggtctcgaactcctgacctcaggtaatccacccaccttggcctcccaaagtgctgggattacaggcatgagccaccatgcccggcaaaatacctttttaaaagcttttaaaatgatatgcttataaaatgacagacatgagtgaaacattctcaatgacgataatacacaagtcacaagttttctgtgagtgaagccgagcagtacagagtcaggctgactgttgaaaagccagatttacttcttgatatcactgacctcttactctgaaattgtgccagaggagcttctaagtatccctggtctcaagtttaataatgcaaaacttccactttatcatctaaagttttggagaggaatccctttggcactaatgatatctactccagcaccatctctcctttttggtgcctcttcattcttgagtagggacttattgtatcatccatcacaaaatcatacagtacttttatccaggaattgtagtgggggaggttgtcatagtattcagctgctattttcctcaccagtggaaggctttttccaggaatgttggggaagtcatgatgttcattatgataacctacattgaaggtaaataaattcagaggcccataatatgagtaagtttcgtgaccctttaagaacatgtaatgctcagctataaaatgtccagaaatcgggtgcaaacccaggccaagtaaagatgctgccaacatgtagactaaggatttaattcccaaaaagtaataaattaaaatgtcaaatgtgacctgggccacgatattgataacttccaaataagtaattggtttggggttgatgaatagaggtcgaaaggcatagaagagaggctgaagaataacccatataaactttctgaaagtggtacagaagaaccagccctcaaagtcggtaggaatatctacatcgacgccatcagctccaaggtaccggtgatgatccatgtgatatctcttaaaggaaattgaatatggaaccccaataggaagattagcaaacattccaaaccagcgattccacattgctttgcagttgccaaaggcagcattgtgggaaatctcatgaatagccagagtcattgagtggttaatgcaactgccaaacacataggccccaaatatgacccatttccagtccaagtcttttactatgtaaaatgcagccaactgggtgagaaacatcataattataatccatatcaaattgggatcaggtttcatcaaggactttatctctggatactttgccaggatctcccggcgccggtcggcgtggggctggtcggtgtagacccactcgaagtcttcccgcgacacgcggctccccatggcggcggaggtggctcgcaggctcgctgtcggctctcgctcctggccgtctcctcagaggtggctgcggcggcttcccgactcgtgtggtgtcggccgactgcggcggagcgcggaggagacggaggcgtgggcggagtcccgaggccccgcccctcgcggcccg

SEQ ID NO: 129 - DNA, 1368 bp, Macaca mulatta
  source 1..1368: mol_type = genomic DNA
cgccgcagccacctctgaggagacggccaggagcgagagccgacagcgagcctgcgagccacctccgccgccatggggagccgcgtgtcgcgggaagacttcgagtgggtctacaccgaccagccccacgccgaccggcgccgggagatcctggcaaagtatccagagataaagtccttgatgaaacctgatcccaatttgatatggattataattatgatgtttctcacccagttggctgcattttacatagtaaaagacttggactggaaatgggtcatatttggggcctatgtgtttggcagttgcattaaccactcaatgactctggctattcatgagatttcccacaatgctgcctttggcaactgcaaagcaatgtggaatcgctggtttggaatgtttgctaatcttcctattggggttccatattcaatttcctttaagagatatcacatggatcatcaccggtaccttggagctgatggcgtcgatgtagatattcctaccgattttgagggctggttcttctgtaccactttcagaaagtttatatgggttattcttcagcctctcttctatgcctttcgacctctattcatcaaccccaaaccaattacttatttggaagttatcaatatcgtggcccaggtcacatttgacattttaatttattactttttgggaattaaatccttagtctacatgttggcagcatctttacttggcctgggtttgcacccgatttctggacattttatagctgagcattacatgttcttaaagggtcacgaaacttactcatattatgggcctctgaatttatttaccttcaatgtaggttatcataatgaacatcatgacttccccaacattcctggaaaaagccttccactggtgaggaaaatagcagctgaatactatgacaacctcccccactacaattcctggataaaagtactgtatgattttgtgatggatgatacaataagtccctactcaagaatgaagaggcaccaaaaaggagagatggtgctggagtagatatcattagtgccaaagggattcctctccaaaactttagatgataaagtggaagttttgcattattaaacttgagaccagggatacttagaagctcctctggcacaatttcagagtaagaggtcagtgatatcaagaagtaaatctggcttttcaacagtcaacctgactctgtactgctcggcttcactcacagaaaacttgtgacttgtgtattatcgtcattgagaatgtttcactcatgtctgtcattttataagcatatcattttaaaagcttttaaaaaggtattttgccgggcatggtggctcatgcctgtaatcc

SEQ ID NO: 130 - DNA, 1368 bp, Macaca mulatta
  source 1..1368: mol_type = genomic DNA
ggattacaggcatgagccaccatgcccggcaaaatacctttttaaaagcttttaaaatgatatgcttataaaatgacagacatgagtgaaacattctcaatgacgataatacacaagtcacaagttttctgtgagtgaagccgagcagtacagagtcaggttgactgttgaaaagccagatttacttcttgatatcactgacctcttactctgaaattgtgccagaggagcttctaagtatccctggtctcaagtttaataatgcaaaacttccactttatcatctaaagttttggagaggaatccctttggcactaatgatatctactccagcaccatctctcctttttggtgcctcttcattcttgagtagggacttattgtatcatccatcacaaaatcatacagtacttttatccaggaattgtagtgggggaggttgtcatagtattcagctgctattttcctcaccagtggaaggctttttccaggaatgttggggaagtcatgatgttcattatgataacctacattgaaggtaaataaattcagaggcccataatatgagtaagtttcgtgaccctttaagaacatgtaatgctcagctataaaatgtccagaaatcgggtgcaaacccaggccaagtaaagatgctgccaacatgtagactaaggatttaattcccaaaaagtaataaattaaaatgtcaaatgtgacctgggccacgatattgataacttccaaataagtaattggtttggggttgatgaatagaggtcgaaaggcatagaagagaggctgaagaataacccatataaactttctgaaagtggtacagaagaaccagccctcaaaatcggtaggaatatctacatcgacgccatcagctccaaggtaccggtgatgatccatgtgatatctcttaaaggaaattgaatatggaaccccaataggaagattagcaaacattccaaaccagcgattccacattgctttgcagttgccaaaggcagcattgtgggaaatctcatgaatagccagagtcattgagtggttaatgcaactgccaaacacataggccccaaatatgacccatttccagtccaagtcttttactatgtaaaatgcagccaactgggtgagaaacatcataattataatccatatcaaattgggatcaggtttcatcaaggactttatctctggatactttgccaggatctcccggcgccggtcggcgtggggctggtcggtgtagacccactcgaagtcttcccgcgacacgcggctccccatggcggcggaggtggctcgcaggctcgctgtcggctctcgctcctggccgtctcctcagaggtggctgcggcg

SEQ ID NO: 131 - DNA, 3427 bp, Homo sapiens
  source 1..3427: mol_type = genomic DNA
gtaggaatcgcagcgccagcggttgcaaggcccaagaagcccatcctgggaaggaaaatgcattggggaaccctgtgcggattcttgtggctttggccctatcttttctatgtccaagctgtgcccatccaaaaagtccaagatgacaccaaaaccctcatcaagacaattgtcaccaggatcaatgacatttcacacacgcagtcagtctcctccaaacagaaagtcaccggtttggacttcattcctgggctccaccccatcctgaccttatccaagatggaccagacactggcagtctaccaacagatcctcaccagtatgccttccagaaacgtgatccaaatatccaacgacctggagaacctccgggatcttcttcacgtgctggccttctctaagagctgccacttgccctgggccagtggcctggagaccttggacagcctggggggtgtcctggaagcttcaggctactccacagaggtggtggccctgagcaggctgcaggggtctctgcaggacatgctgtggcagctggacctcagccctgggtgctgaggccttgaaggtcactcttcctgcaaggactacgttaagggaaggaactctggcttccaggtatctccaggattgaagagcattgcatggacaccccttatccaggactctgtcaatttccctgactcctctaagccactcttccaaaggcataagaccctaagcctccttttgcttgaaaccaaagatatatacacaggatcctattctcaccaggaagggggtccacccagcaaagagtgggctgcatctgggattcccaccaaggtcttcagccatcaacaagagttgtcttgtcccctcttgacccatctccccctcactgaatgcctcaatgtgaccaggggtgatttcagagagggcagaggggtaggcagagcctttggatgaccagaacaaggttccctctgagaattccaaggagttccatgaagaccacatccacacacgcaggaactcccagcaacacaagctggaagcacatgtttatttattctgcattttattctggatggatttgaagcaaagcaccagcttctccaggctctttggggtcagccagggccaggggtctccctggagtgcagtttccaatcccatagatgggtctggctgagctgaacccattttgagtgactcgagggttgggttcatctgagcaagagctggcaaaggtggctctccagttagttctctcgtaactggtttcatttctactgtgactgatgttacatcacagtgtttgcaatggtgttgccctgagtggatctccaaggaccaggttattttaaaaagatttgttttgtcaagtgtcatatgtaggtgtctgcacccaggggtggggaatgtttgggcagaagggagaaggatctagaatgtgttttctgaataacatttgtgtggtgggttctttggaaggagtgagatcattttcttatcttctgcaattgcttaggatgtttttcatgaaaatagctctttcaggggggttgtgaggcctggccaggcaccccctggagagaagtttctggccctggctgaccccaaagagcctggagaagctgatgctttgcttcaaatccatccagaataaaacgcaaagggctgaaagccatttgttggggcagtggtaagctctggctttctccgactgctagggagtggtctttcctatcatggagtgacggtcccacactggtgactgcgatcttcagagcaggggtccttggtgtgaccctctgaatggtccagggttgatcacactctgggtttattacatggcagtgttcctatttggggcttgcatgccaaattgtagttcttgtctgattggctcacccaagcaaggccaaaattaccaaaaatcttggggggtttttactccagtggtgaagaaaactcctttagcaggtggtcctgagacctgacaagcactgctaggcgagtgccaggactccccaggccaggccaccaggatggcccttcccactggaggtcacattcaggaagatgaaagaggaggtttggggtctgccaccatcctgctgctgtgtttttgctatcacacagtgggtggtggatctgtccaaggaaacttgaatcaaagcagttaactttaagactgagcacctgcttcatgctcagccctgactggtgctataggctggagaagctcacccaataaacattaagattgaggcctgccctcagggatcttgcattcccagtggtcaaaccgcactcacccatgtgccaaggtggggtatttaccacagcagctgaacagccaaatgcatggtgcagttgacagcaggtgggaaatggtatgagctgaggggggccgtgcccaggggcccacagggaaccctgcttgcactttgtaacatgtttacttttcagggcatcttagcttctattatagccacatccctttgaaacaagataactgagaatttaaaaataagaaaatacataagaccataacagccaacaggtggcaggaccaggactatagcccaggtcctctgatacccagagcattacgtgagccaggtaatgagggactggaaccagggagaccgagcgctttctggaaaagaggagtttcgaggtagagtttgaaggaggtgagggatgtgaattgcctgcagagagaagcctgttttgttggaaggtttggtgtgtggagatgcagaggtaaaagtgtgagcagtgagttacagcgagaggcagagaaagaagagacaggagggcaagggccatgctgaagggaccttgaagggtaaagaagtttgatattaaaggagttaagagtagcaagttctagagaagaggctggtgctgtggccagggtgagagctgctctggaaaatgtgacccagatcctcacaaccacctaatcaggctgaggtgtcttaagccttttgctcacaaaacctggcacaatggctaattcccagagtgtgaaacttcctaagtataaatggttgtctgtttttgtaacttaaaaaaaaaaaaaaaagtttggccgggtgcggtggctcacgcctgtaatcccagcactttgggaggccaaggtggggggatcacaaggtcactagatggcgagcatcctggccaacatggtgaaaccccgtctctactaaaaacacaaaagttagctgagcgtggtggcgggcgcctgtagtcccagccactcgggaggctgagacaggagaatcgcttaaacctgggaggcggagagtacagtgagccaagatcgcgccactgcactccggcctgatgacagagcgagattccgtcttaaaaaaaaaaaaaaaaaagtttgtttttaaaaaaatctaaataaaataactttgccccctgc

SEQ ID NO: 132 - DNA, 3427 bp, Homo sapiens
  source 1..3427: mol_type = genomic DNA
gcagggggcaaagttattttatttagatttttttaaaaacaaacttttttttttttttttttaagacggaatctcgctctgtcatcaggccggagtgcagtggcgcgatcttggctcactgtactctccgcctcccaggtttaagcgattctcctgtctcagcctcccgagtggctgggactacaggcgcccgccaccacgctcagctaacttttgtgtttttagtagagacggggtttcaccatgttggccaggatgctcgccatctagtgaccttgtgatccccccaccttggcctcccaaagtgctgggattacaggcgtgagccaccgcacccggccaaacttttttttttttttttaagttacaaaaacagacaaccatttatacttaggaagtttcacactctgggaattagccattgtgccaggttttgtgagcaaaaggcttaagacacctcagcctgattaggtggttgtgaggatctgggtcacattttccagagcagctctcaccctggccacagcaccagcctcttctctagaacttgctactcttaactcctttaatatcaaacttctttacccttcaaggtcccttcagcatggcccttgccctcctgtctcttctttctctgcctctcgctgtaactcactgctcacacttttacctctgcatctccacacaccaaaccttccaacaaaacaggcttctctctgcaggcaattcacatccctcacctccttcaaactctacctcgaaactcctcttttccagaaagcgctcggtctccctggttccagtccctcattacctggctcacgtaatgctctgggtatcagaggacctgggctatagtcctggtcctgccacctgttggctgttatggtcttatgtattttcttatttttaaattctcagttatcttgtttcaaagggatgtggctataatagaagctaagatgccctgaaaagtaaacatgttacaaagtgcaagcagggttccctgtgggcccctgggcacggcccccctcagctcataccatttcccacctgctgtcaactgcaccatgcatttggctgttcagctgctgtggtaaataccccaccttggcacatgggtgagtgcggtttgaccactgggaatgcaagatccctgagggcaggcctcaatcttaatgtttattgggtgagcttctccagcctatagcaccagtcagggctgagcatgaagcaggtgctcagtcttaaagttaactgctttgattcaagtttccttggacagatccaccacccactgtgtgatagcaaaaacacagcagcaggatggtggcagaccccaaacctcctctttcatcttcctgaatgtgacctccagtgggaagggccatcctggtggcctggcctggggagtcctggcactcgcctagcagtgcttgtcaggtctcaggaccacctgctaaaggagttttcttcaccactggagtaaaaaccccccaagatttttggtaattttggccttgcttgggtgagccaatcagacaagaactacaatttggcatgcaagccccaaataggaacactgccatgtaataaacccagagtgtgatcaaccctggaccattcagagggtcacaccaaggacccctgctctgaagatcgcagtcaccagtgtgggaccgtcactccatgataggaaagaccactccctagcagtcggagaaagccagagcttaccactgccccaacaaatggctttcagccctttgcgttttattctggatggatttgaagcaaagcatcagcttctccaggctctttggggtcagccagggccagaaacttctctccagggggtgcctggccaggcctcacaacccccctgaaagagctattttcatgaaaaacatcctaagcaattgcagaagataagaaaatgatctcactccttccaaagaacccaccacacaaatgttattcagaaaacacattctagatccttctcccttctgcccaaacattccccacccctgggtgcagacacctacatatgacacttgacaaaacaaatctttttaaaataacctggtccttggagatccactcagggcaacaccattgcaaacactgtgatgtaacatcagtcacagtagaaatgaaaccagttacgagagaactaactggagagccacctttgccagctcttgctcagatgaacccaaccctcgagtcactcaaaatgggttcagctcagccagacccatctatgggattggaaactgcactccagggagacccctggccctggctgaccccaaagagcctggagaagctggtgctttgcttcaaatccatccagaataaaatgcagaataaataaacatgtgcttccagcttgtgttgctgggagttcctgcgtgtgtggatgtggtcttcatggaactccttggaattctcagagggaaccttgttctggtcatccaaaggctctgcctacccctctgccctctctgaaatcacccctggtcacattgaggcattcagtgagggggagatgggtcaagaggggacaagacaactcttgttgatggctgaagaccttggtgggaatcccagatgcagcccactctttgctgggtggacccccttcctggtgagaataggatcctgtgtatatatctttggtttcaagcaaaaggaggcttagggtcttatgcctttggaagagtggcttagaggagtcagggaaattgacagagtcctggataaggggtgtccatgcaatgctcttcaatcctggagatacctggaagccagagttccttcccttaacgtagtccttgcaggaagagtgaccttcaaggcctcagcacccagggctgaggtccagctgccacagcatgtcctgcagagacccctgcagcctgctcagggccaccacctctgtggagtagcctgaagcttccaggacaccccccaggctgtccaaggtctccaggccactggcccagggcaagtggcagctcttagagaaggccagcacgtgaagaagatcccggaggttctccaggtcgttggatatttggatcacgtttctggaaggcatactggtgaggatctgttggtagactgccagtgtctggtccatcttggataaggtcaggatggggtggagcccaggaatgaagtccaaaccggtgactttctgtttggaggagactgactgcgtgtgtgaaatgtcattgatcctggtgacaattgtcttgatgagggttttggtgtcatcttggactttttggatgggcacagcttggacatagaaaagatagggccaaagccacaagaatccgcacagggttccccaatgcattttccttcccaggatgggcttcttgggccttgcaaccgctggcgctgcgattcctac

SEQ ID NO: 133 - DNA, 3257 bp, Mus musculus
  source 1..3257: mol_type = genomic DNA
gagggatccctgctccagcagctgcaaggtgcaagaagaagaagatcccagggaggaaaatgtgctggagacccctgtgtcggttcctgtggctttggtcctatctgtcttatgttcaagcagtgcctatccagaaagtccaggatgacaccaaaaccctcatcaagaccattgtcaccaggatcaatgacatttcacacacgcagtcggtatccgccaagcagagggtcactggcttggacttcattcctgggcttcaccccattctgagtttgtccaagatggaccagactctggcagtctatcaacaggtcctcaccagcctgccttcccaaaatgtgctgcagatagccaatgacctggagaatctccgagacctcctccatctgctggccttctccaagagctgctccctgcctcagaccagtggcctgcagaagccagagagcctggatggcgtcctggaagcctcactctactccacagaggtggtggctttgagcaggctgcagggctctctgcaggacattcttcaacagttggatgttagccctgaatgctgaagtttcaaaggccaccaggctcccaagaatcatgtagagggaagaaaccttggcttccaggggtcttcaggagaagagagccatgtgcacacatccatcattcatttctctccctcctgtagaccacccatccaaaggcatgactccacaatgcttgactcaagttatccacacaacttcatgagcacaaggaggggccagcctgcagaggggactctcacctagttcttcagcaagtagagataagagccatcccatcccctccatgtcccacctgctccgggtacatgttcctccgtgggtacacgcttcgctgcggcccaggagaggtgaggtagggatgggtagagcctttgggctgtctcagagtctttgggagcaccgtgaaggctgcatccacacacagctggaaactcccaagcagcacacgatggaagcacttatttatttattctgcattctattttggatggatctgaagcaagccatcagctttttcaggctttgggggtcagccaggatgaggaaggctcctggggtgctgctttcaatcctattgatgggtctgcccaaggcaaacctaatttttgagtgactggaaggaaggttgggatcttccaaacaagagtctatgcaggtagcgctcaagcttgacctctggtgactggttttgtttctattgtgactgactctatgcaaacacgtttgcagcggcattgccgggagcataggctaggttattatcaaaagcagatgaattttgtcaagtgtaatatgtatctatgtgcacctgagggtagaggatgtgttagagggagggtgaaggatccggaagtgttctctgaattacatatgtgtggtaggcttttctgaaagggtgaggcattttcttacctctgtggccacatagtgtggctttgtgaaaaggacaaaggagttgactctttccggaacatttggagtgtaccaggcacccttggaggggctaaagctacaggccttttgttggcatattgctgagctcagggagtgagggccccacatttgagacagtgagccccaagaaaagggtccctggtgtagatctccaaggttgtccagggttgatctcacaatgcgtttcttaagcaggtagacgtttgcatgccaatatgtggttctcatctgattggttcatccaaagtagaaccctgtctcccacccattctgtggggagttttgttccagtgggaatgagaaatcacttagcagatggtcctgagccctgggccagcactgctgaggaagtgccagggccccaggccaggctgccagaattgcccttcgggctggaggatgaacaaaggggcttgggtttttccatcacccctgcaccctatgtcaccatcaaactggggggcagatcagtgagaggacacttgatggaaagcaatacactttaagactgagcacagtttcgtgctcagctctgtctggtgctgtgagctagagaagctcaccaaatacatataaaaatcagaggctcatgtccctgtggttagaccctactcacggcggtgtactccaccacagcagccccgcaccgctggaagtacagtgctgtcttcaacaggtgtgaaagaacctgagctgagggtgacagtgcccaggggaaccctgcttgcagtctattgcatttacataccgcatttcagggcacattagcatccactgctatggtagcacactgttgacacgggatacctggggtcgtaaaaataagaaaatacaggttgactatcccttatccaaaatgcttgggactagaagagttttggattttagagtcttttcaggcataggtatatttgagtatatataaaatgagatatcttggggatggggcccaagtataaacatgaagttcatttatatttcataataccgtatagacactgcttgaagtgtagttttatacagtgttttaaataacgttgtatgcatgaaagacgtttttacagcatgaacctgtctactcatgccagcactcaaaaaccttggggttttggagcagtttggatcttgggttttctgttaagagatggttagcttatacctaaaaccataatggcaaacaggctgcaggaccagactggatcctcagccctgaagtgtgcccttccagccaggtcataccctgtggaggtgagcgggatcaggttttgtggtgctaagagaggagttggaggtagattttggaggatctgaggggtgatgtgatgttttattggacacttggtatgttgaagggatgaaagtccaaacaggaagtgacagggaagactgaagagaccgggaaagagtgacaggaagtgctgagaggactttatgggccacaaaagtggcttctgaaagatcccacgtgccacagtctggagcgaaggctcgtggtggctggtgtcagattgctctggggctgtgctatgccaccttggtcacctcatcaagctggaatgtcctgagcctttcgctcagagaaccttgcactatggcttgttcccagattgtgaaacttcccatatgcaaaaatgcttggtttggtttttttggtttttgtttttgttttcttttttaaatacatatatatatgtaacaacagcaacaacaaaattttgttttattttgtgtcaattcaaataaattaatgatgcctcc

SEQ ID NO: 134 - DNA, 3257 bp, Mus musculus
  source 1..3257: mol_type = genomic DNA
ggaggcatcattaatttatttgaattgacacaaaataaaacaaaattttgttgttgctgttgttacatatatatatgtatttaaaaaagaaaacaaaaacaaaaaccaaaaaaaccaaaccaagcatttttgcatatgggaagtttcacaatctgggaacaagccatagtgcaaggttctctgagcgaaaggctcaggacattccagcttgatgaggtgaccaaggtggcatagcacagccccagagcaatctgacaccagccaccacgagccttcgctccagactgtggcacgtgggatctttcagaagccacttttgtggcccataaagtcctctcagcacttcctgtcactctttcccggtctcttcagtcttccctgtcacttcctgtttggactttcatcccttcaacataccaagtgtccaataaaacatcacatcacccctcagatcctccaaaatctacctccaactcctctcttagcaccacaaaacctgatcccgctcacctccacagggtatgacctggctggaagggcacacttcagggctgaggatccagtctggtcctgcagcctgtttgccattatggttttaggtataagctaaccatctcttaacagaaaacccaagatccaaactgctccaaaaccccaaggtttttgagtgctggcatgagtagacaggttcatgctgtaaaaacgtctttcatgcatacaacgttatttaaaacactgtataaaactacacttcaagcagtgtctatacggtattatgaaatataaatgaacttcatgtttatacttgggccccatccccaagatatctcattttatatatactcaaatatacctatgcctgaaaagactctaaaatccaaaactcttctagtcccaagcattttggataagggatagtcaacctgtattttcttatttttacgaccccaggtatcccgtgtcaacagtgtgctaccatagcagtggatgctaatgtgccctgaaatgcggtatgtaaatgcaatagactgcaagcagggttcccctgggcactgtcaccctcagctcaggttctttcacacctgttgaagacagcactgtacttccagcggtgcggggctgctgtggtggagtacaccgccgtgagtagggtctaaccacagggacatgagcctctgatttttatatgtatttggtgagcttctctagctcacagcaccagacagagctgagcacgaaactgtgctcagtcttaaagtgtattgctttccatcaagtgtcctctcactgatctgccccccagtttgatggtgacatagggtgcaggggtgatggaaaaacccaagcccctttgttcatcctccagcccgaagggcaattctggcagcctggcctggggccctggcacttcctcagcagtgctggcccagggctcaggaccatctgctaagtgatttctcattcccactggaacaaaactccccacagaatgggtgggagacagggttctactttggatgaaccaatcagatgagaaccacatattggcatgcaaacgtctacctgcttaagaaacgcattgtgagatcaaccctggacaaccttggagatctacaccagggacccttttcttggggctcactgtctcaaatgtggggccctcactccctgagctcagcaatatgccaacaaaaggcctgtagctttagcccctccaagggtgcctggtacactccaaatgttccggaaagagtcaactcctttgtccttttcacaaagccacactatgtggccacagaggtaagaaaatgcctcaccctttcagaaaagcctaccacacatatgtaattcagagaacacttccggatccttcaccctccctctaacacatcctctaccctcaggtgcacatagatacatattacacttgacaaaattcatctgcttttgataataacctagcctatgctcccggcaatgccgctgcaaacgtgtttgcatagagtcagtcacaatagaaacaaaaccagtcaccagaggtcaagcttgagcgctacctgcatagactcttgtttggaagatcccaaccttccttccagtcactcaaaaattaggtttgccttgggcagacccatcaataggattgaaagcagcaccccaggagccttcctcatcctggctgacccccaaagcctgaaaaagctgatggcttgcttcagatccatccaaaatagaatgcagaataaataaataagtgcttccatcgtgtgctgcttgggagtttccagctgtgtgtggatgcagccttcacggtgctcccaaagactctgagacagcccaaaggctctacccatccctacctcacctctcctgggccgcagcgaagcgtgtacccacggaggaacatgtacccggagcaggtgggacatggaggggatgggatggctcttatctctacttgctgaagaactaggtgagagtcccctctgcaggctggcccctccttgtgctcatgaagttgtgtggataacttgagtcaagcattgtggagtcatgcctttggatgggtggtctacaggagggagagaaatgaatgatggatgtgtgcacatggctctcttctcctgaagacccctggaagccaaggtttcttccctctacatgattcttgggagcctggtggcctttgaaacttcagcattcagggctaacatccaactgttgaagaatgtcctgcagagagccctgcagcctgctcaaagccaccacctctgtggagtagagtgaggcttccaggacgccatccaggctctctggcttctgcaggccactggtctgaggcagggagcagctcttggagaaggccagcagatggaggaggtctcggagattctccaggtcattggctatctgcagcacattttgggaaggcaggctggtgaggacctgttgatagactgccagagtctggtccatcttggacaaactcagaatggggtgaagcccaggaatgaagtccaagccagtgaccctctgcttggcggataccgactgcgtgtgtgaaatgtcattgatcctggtgacaatggtcttgatgagggttttggtgtcatcctggactttctggataggcactgcttgaacataagacagataggaccaaagccacaggaaccgacacaggggtctccagcacattttcctccctgggatcttcttcttcttgcaccttgcagctgctggagcagggatccctc

SEQ ID NO: 135 - DNA, 3290 bp, Rattus norvegicus
  source 1..3290: mol_type = genomic DNA
ccagcagctgcaaggtccaagaagaagaagaagaccccagcgaggaaaatgtgctggagacccctgtgccggttcctgtggctttggtcctatctgtcctatgttcaagctgtgcctatccacaaagtccaggatgacaccaaaaccctcatcaagaccattgtcaccaggatcaatgacatttcacacacgcagtcggtatccgccaggcagagggtcaccggtttggacttcattcccgggcttcaccccattctgagtttgtccaagatggaccagaccctggcagtctatcaacagatcctcaccagcttgccttcccaaaacgtgctgcagatagctcatgacctggagaacctgcgagacctcctccatctgctggccttctccaagagctgctccctgccgcagacccgtggcctgcagaagccagagagcctggatggcgtcctggaagcctcgctctactccacagaggtggtggctctgagcaggctgcagggctctctgcaggacattcttcaacagttggaccttagccctgaatgctgaggtttccaagaccaccgggctcccgaggatcatgttgagggaagaaaccttggctcccaggtatcctcaggagaagagagccatgtgttcacacccgtcatccaggaccctgtccgtttctcctactcctctagaccgcccttcagaaggcatggctctgcaaggcttgactaaagttatccgcacgattccatgagcactaggaggggattgaagccttgaagaggggattctcacctggttcttcggcaaatatagataagagccgtcctgtcccctccgtgttccacctcctctgggtgcgtgtttcactgtggcccagcggatgtgaggaaggggtgggtggagcctctggactgtctcagagtctttgggagcaccatgaaggctacatctgcacacagctggaaactcccaaagcagcacatgctggaagacgcacttatttatttattctgcattttattttggatggatttgaagcaaagcatcagctttttcaggctttggggtcagctggggctaggaaggctcctagggtgctgttttcaatcctactgatgggtcttgcccgaggcaaacctacttttttgagtgactggaaggaaggttgggaatcttccaaacaagagtctatgcaggtagctctcaagtttgtcctctggtggctggtttgtttctgtcgtgactgactctatgcaaacacgtttgccgtggcattgcctggagcgcaggctaggttattatgaaaagaagatgaattttgtcaagtgtaatatgcatctatgtgcacctgagggtaggggatgtgtcagagggagagagaaggatccagaagcattctctgaataacagagctgtggtagacttttctgaaaaggtgaggcattttctcacctctgcagccacatagtgtggctttgtgaaaaggacaaaggagttgactcttttagggacatttgaagtataccagacacccttagagggggctaaagttacaggccttttgttggcatattgctgagctcagggagtgagggccccacattggagacagtgagccccaagaaaagggtccctggtgtagccctccaaagttgcccagggttgatcccacaatgcatttcttaagcaggcaagtatccctggtagatgtttgcctgtcaatatgtggttctcatctgattggttcatccaaagtaaaaccaggtctcccacccattctgtggggcagttttgttccagtgggaatgagaaatcacttagcagatggtcctgagccctgggccagcactcctgaggaagtgccagggcctcaggccaggctgccagaattgcccttcgggctggaggatgaacaaaggggcttgggtttttccaccacccctgcacccttgtgtcaccatccagctgtgggtggcagatcaatgcaagaaaacttgatcgaacgcaatacacttttaagactgagcacagctctgtgctcagccctgactggtgctgtgggctagagaagctcaccaaataaacataaaaatcagaggcttttgtccctgcggtcagaccctactcaacagcgtgccaaggcgcgtacttcgccacagcagccccacacagttgaaaatacagtgctgtcttcaacggaggagaaaggaccggagctgggggtggcagtgcccaggggacccctgcttacagtctatagcatctccatacctttcagggcacattagcatccacagctatcgtagcacactgttgacacaggataactgggatcataaaaataagaaaatacaggttgactgtcccttatccaaagtgctcgggactagaagaagggttttggattttagagtctttccaggcataggtatatttgagtatatataatgagatatcttgggggtgggacccaagtataaacatgaagctcatttatatttcataataccgtatacacactgcttgaaggtagttttatacagtgttttaaataatgttgtgtgcatgaaagaagttttcacagcgtgaaattttcttctcgtggcatcatgtctgcactcaaaaacccttcaggttttggagcgttttggatctgttaagagatgtttaacctatacctaaagctatactgacaaacaggttacaggaccagaccagaccctggatcctcagccctgtgaagtgtgtccttccagtcaggtggaggtgaactggatcgggtttcgtggtgctgactaaaagagaggaatttgaggtagattttggaggagctgagggatgtgatgttttactagacagtgggtatgtggaggggtaagagtcggaacaggatgtgacaaggaagactgaaaagaacgggacagaacaacaggaagtgctgagaggactttgtgggccgagaaagtggctattgaaagagtcccaagtgccacagtctggagcgaaggcttgtggtagctggtgtcatggctggtgtcagactgctctggggtagcgctatgtcaccttggtcacctcatcaagctggaatgtcctgatccttttgctcagaaaaccttgcactgtggcttgttcccagattgtgaaacttcccatatgcaaaaatgcttggtttgggttttgtttttttttttgttgttgttgttgtttttgtttttaaatatatgtgtaacaacagcaacaacaaatttttgttttattttgtgtaaattcaaataaattaatgatgcctc

SEQ ID NO: 136 - DNA, 3290 bp, Rattus norvegicus
  source 1..3290: mol_type = genomic DNA
gaggcatcattaatttatttgaatttacacaaaataaaacaaaaatttgttgttgctgttgttacacatatatttaaaaacaaaaacaacaacaacaacaaaaaaaaaaacaaaacccaaaccaagcatttttgcatatgggaagtttcacaatctgggaacaagccacagtgcaaggttttctgagcaaaaggatcaggacattccagcttgatgaggtgaccaaggtgacatagcgctaccccagagcagtctgacaccagccatgacaccagctaccacaagccttcgctccagactgtggcacttgggactctttcaatagccactttctcggcccacaaagtcctctcagcacttcctgttgttctgtcccgttcttttcagtcttccttgtcacatcctgttccgactcttacccctccacatacccactgtctagtaaaacatcacatccctcagctcctccaaaatctacctcaaattcctctcttttagtcagcaccacgaaacccgatccagttcacctccacctgactggaaggacacacttcacagggctgaggatccagggtctggtctggtcctgtaacctgtttgtcagtatagctttaggtataggttaaacatctcttaacagatccaaaacgctccaaaacctgaagggtttttgagtgcagacatgatgccacgagaagaaaatttcacgctgtgaaaacttctttcatgcacacaacattatttaaaacactgtataaaactaccttcaagcagtgtgtatacggtattatgaaatataaatgagcttcatgtttatacttgggtcccacccccaagatatctcattatatatactcaaatatacctatgcctggaaagactctaaaatccaaaacccttcttctagtcccgagcactttggataagggacagtcaacctgtattttcttatttttatgatcccagttatcctgtgtcaacagtgtgctacgatagctgtggatgctaatgtgccctgaaaggtatggagatgctatagactgtaagcaggggtcccctgggcactgccacccccagctccggtcctttctcctccgttgaagacagcactgtattttcaactgtgtggggctgctgtggcgaagtacgcgccttggcacgctgttgagtagggtctgaccgcagggacaaaagcctctgatttttatgtttatttggtgagcttctctagcccacagcaccagtcagggctgagcacagagctgtgctcagtcttaaaagtgtattgcgttcgatcaagttttcttgcattgatctgccacccacagctggatggtgacacaagggtgcaggggtggtggaaaaacccaagcccctttgttcatcctccagcccgaagggcaattctggcagcctggcctgaggccctggcacttcctcaggagtgctggcccagggctcaggaccatctgctaagtgatttctcattcccactggaacaaaactgccccacagaatgggtgggagacctggttttactttggatgaaccaatcagatgagaaccacatattgacaggcaaacatctaccagggatacttgcctgcttaagaaatgcattgtgggatcaaccctgggcaactttggagggctacaccagggacccttttcttggggctcactgtctccaatgtggggccctcactccctgagctcagcaatatgccaacaaaaggcctgtaactttagccccctctaagggtgtctggtatacttcaaatgtccctaaaagagtcaactcctttgtccttttcacaaagccacactatgtggctgcagaggtgagaaaatgcctcaccttttcagaaaagtctaccacagctctgttattcagagaatgcttctggatccttctctctccctctgacacatcccctaccctcaggtgcacatagatgcatattacacttgacaaaattcatcttcttttcataataacctagcctgcgctccaggcaatgccacggcaaacgtgtttgcatagagtcagtcacgacagaaacaaaccagccaccagaggacaaacttgagagctacctgcatagactcttgtttggaagattcccaaccttccttccagtcactcaaaaaagtaggtttgcctcgggcaagacccatcagtaggattgaaaacagcaccctaggagccttcctagccccagctgaccccaaagcctgaaaaagctgatgctttgcttcaaatccatccaaaataaaatgcagaataaataaataagtgcgtcttccagcatgtgctgctttgggagtttccagctgtgtgcagatgtagccttcatggtgctcccaaagactctgagacagtccagaggctccacccaccccttcctcacatccgctgggccacagtgaaacacgcacccagaggaggtggaacacggaggggacaggacggctcttatctatatttgccgaagaaccaggtgagaatcccctcttcaaggcttcaatcccctcctagtgctcatggaatcgtgcggataactttagtcaagccttgcagagccatgccttctgaagggcggtctagaggagtaggagaaacggacagggtcctggatgacgggtgtgaacacatggctctcttctcctgaggatacctgggagccaaggtttcttccctcaacatgatcctcgggagcccggtggtcttggaaacctcagcattcagggctaaggtccaactgttgaagaatgtcctgcagagagccctgcagcctgctcagagccaccacctctgtggagtagagcgaggcttccaggacgccatccaggctctctggcttctgcaggccacgggtctgcggcagggagcagctcttggagaaggccagcagatggaggaggtctcgcaggttctccaggtcatgagctatctgcagcacgttttgggaaggcaagctggtgaggatctgttgatagactgccagggtctggtccatcttggacaaactcagaatggggtgaagcccgggaatgaagtccaaaccggtgaccctctgcctggcggataccgactgcgtgtgtgaaatgtcattgatcctggtgacaatggtcttgatgagggttttggtgtcatcctggactttgtggataggcacagcttgaacataggacagataggaccaaagccacaggaaccggcacaggggtctccagcacattttcctcgctggggtcttcttcttcttcttggaccttgcagctgctgg

SEQ ID NO: 137 - DNA, 788 bp, Macaca fascicularis
  source 1..788: mol_type = genomic DNA
gccccggggcctgcagggcagttgcgcaagttgtgaagggccgctataagaggggcaggcaggcatggagccccggaggaatcgcggagccagcgactgcaaggcccaagaagcacatcctgggaaggaaaatgtattggagaaccctgtggggattcttgtggctttggccctatctgttctacatccaagctgtgcccatccaaaaagtccaaagtgacaccaaaaccctcatcaagacaattgtcaccaggatcaatgacatttcacacacgcagtcggtctcctccaaacagagggtcactggtttggacttcattcctgggctccaccccgtcctgaccttatcccagatggaccagacactggcagtctaccaacagatcctcatcaatctgccttccagaaacgtgatccaaatatccaacgacttggagaatctccgggaccttcttcacctgctggccttctctaagagctgccatttgcccttggccagtggcctggagaccttggagagcctgggggatgtcctggaagcttcactctactccacggaggtggtggccctgagcaggctgcaggggtctctgcaggacatgctgtggcagctggacctcagccctgggtgctgaggccttgaaggtcactcttcctgcaaggactacattgagggaaggaactctggcttctaggtgtctccaggagaccatgagagctgggtgcggtggctcacaaatgtaatctgagcactttgggagggcaaggtgggtgaatcacctgatgtc

SEQ ID NO: 138 - DNA, 788 bp, Macaca fascicularis
  source 1..788: mol_type = genomic DNA
gacatcaggtgattcacccaccttgccctcccaaagtgctcagattacatttgtgagccaccgcacccagctctcatggtctcctggagacacctagaagccagagttccttccctcaatgtagtccttgcaggaagagtgaccttcaaggcctcagcacccagggctgaggtccagctgccacagcatgtcctgcagagacccctgcagcctgctcagggccaccacctccgtggagtagagtgaagcttccaggacatcccccaggctctccaaggtctccaggccactggccaagggcaaatggcagctcttagagaaggccagcaggtgaagaaggtcccggagattctccaagtcgttggatatttggatcacgtttctggaaggcagattgatgaggatctgttggtagactgccagtgtctggtccatctgggataaggtcaggacggggtggagcccaggaatgaagtccaaaccagtgaccctctgtttggaggagaccgactgcgtgtgtgaaatgtcattgatcctggtgacaattgtcttgatgagggttttggtgtcactttggactttttggatgggcacagcttggatgtagaacagatagggccaaagccacaagaatccccacagggttctccaatacattttccttcccaggatgtgcttcttgggccttgcagtcgctggctccgcgattcctccggggctccatgcctgcctgcccctcttatagcggcccttcacaacttgcgcaactgccctgcaggccccggggc

SEQ ID NO: 139 - DNA, 773 bp, Macaca mulatta
  source 1..773: mol_type = genomic DNA
cggagccagcgactgcaaggcccaagaagcacatcctgggaaggaaaatgtattggagaaccctgtggggattcttgtggctttggccctatctgttctacatccaagctgtgcccatccaaaaagtccaaagtgacaccaaaaccctcatcaagacaattgtcaccaggatcaatgacatttcacacacgcagtcggtctcctccaaacagagggtcactggtttggacttcattcctgggctccaccccgtcctgaccttatcccagatggaccagacactggcaatctaccaacagatcctcatcaatctgccttccagaaacgtgatccaaatatccaacgacttggagaatctccgggaccttcttcacctgctggccttctctaagagctgccatttgcccttggccagtggcctggagaccttggagagcctgggggatgtcctggaagcttcactctactccacggaggtggtggccctgagcaggctgcaggggtctctgcaggacatgctgtggcagctggacctcagccctgggtgctgaggccttgaaggtcactcttcctgcaaggactacattgagggaaggaactctggcttctaggtgtctccaggagaccatgagagctgggtgcggtggctcacaaatgtaatctgagcactttgggagggcaaggtgggtgaatcacctgatgtcaggagttcaagaccagcctggccaaatggcgaaaccccgtctctaataaaaatataaaaatcaaaaaaa

SEQ ID NO: 140 - DNA, 773 bp, Macaca mulatta
  source 1..773: mol_type = genomic DNA
tttttttgatttttatatttttattagagacggggtttcgccatttggccaggctggtcttgaactcctgacatcaggtgattcacccaccttgccctcccaaagtgctcagattacatttgtgagccaccgcacccagctctcatggtctcctggagacacctagaagccagagttccttccctcaatgtagtccttgcaggaagagtgaccttcaaggcctcagcacccagggctgaggtccagctgccacagcatgtcctgcagagacccctgcagcctgctcagggccaccacctccgtggagtagagtgaagcttccaggacatcccccaggctctccaaggtctccaggccactggccaagggcaaatggcagctcttagagaaggccagcaggtgaagaaggtcccggagattctccaagtcgttggatatttggatcacgtttctggaaggcagattgatgaggatctgttggtagattgccagtgtctggtccatctgggataaggtcaggacggggtggagcccaggaatgaagtccaaaccagtgaccctctgtttggaggagaccgactgcgtgtgtgaaatgtcattgatcctggtgacaattgtcttgatgagggttttggtgtcactttggactttttggatgggcacagcttggatgtagaacagatagggccaaagccacaagaatccccacagggttctccaatacattttccttcccaggatgtgcttcttgggccttgcagtcgctggctccg

SEQ ID NO: 141 - DNA, 3667 bp, Homo sapiens
  source 1..3667: mol_type = genomic DNA
ggcggggctgcgggaccgcgagtgagtgtggtcgctcctggttctgccagctcccctgagagcctgaacccgggcttgagagcctcgccaccccgggtgacatccctgccgtgggcttgggggctctgggtgtgattccgccggtccgggtcccgcagcgaccacctacccagcgcagtcaggggcggggctgggacccagagcgggaccccggctgccgagtccaggtgtcccgcgggcctcgatttggggagcagaaaacgccaggtcttcaagggtgtctgccaccaccatgcctgacccatttggcagcagcctcgtgtgtggtggtctggtgtggacggtggaagcgtgattctgctgagtgtcagtgtgaccactcgtgctcagccgtatctcagcaggaggacaggtgccggagcagctcgtgcagctaagcagccaactgcagaaacgtcaggcctgttgcagtctccaaggcaccatgaatgccatcgtggctctctgccacttctgcgagctccacggcccccgcactctcttctgcacggaggtgctgcacgccccacttcctcaaggggatgggaatgaggacagtcctggccagggtgagcaggcggaagaagaggaaggtggcattcagatgaacagtcggatgcgtgcgcacagccccgcagagggggccagcgtcgagtccagcagcccggggcccaaaaagtcggacatgtgcgagggctgccggtcacttgctgcagggcacccgggatatatcagccatgataaagagacctccattaaatacgtcagccaccagcaccccagccacccccagctcttcagcattgtccgccaggcctgtgtccggagcctgagctgtgaggtctgccctggccgtgaaggccccatcttcttcggagatgagcagcacggctttgtgttcagccacaccttcttcatcaaggacagcctggccaggggcttccagcgctggtacagcatcatcaccatcatgatggaccggatctacctcatcaactcctggcccttcctgctggggaaggtccggggaatcatcgatgagctccagggcaaggcgctcaaggtgtttgaggcagagcagtttggatgcccacagcgtgctcagaggatgaacacagccttcacgccattcctacaccagaggaacggcaacgccgcccgctcgctgacatcgctgacaagtgatgacaacctgtgggcgtgcctgcacacctcctttgcctggctcctgaaggcgtgtggcagccggctgaccgagaagctcctggaaggtgctccgaccgaggataccttggtccagatggagaagctcgctgatttagaagaggaatcagaaagctgggacaactctgaggctgaagaggaggagaaagcccctgtgttgccagagagtacagaagggcgggagctgacccagggcccggcagagtcctcctctctctcaggctgtgggagctggcagccccggaagctgccagtcttcaagtccctccggcacatgaggcaggtcctgggtgccccttctttccgcatgctggcctggcacgttctcatggggaaccaggtgatctggaaaagcagagacgtggacctcgtccagtcagcttttgaagtacttcggaccatgcttcccgtgggctgcgtccgcatcatcccatacagcagccagtacgaggaggcctatcggtgcaacttcctggggctcagcccgcacgtgcagatccccccccacgtgctctcctcagagtttgctgtcatcgtggaggtccacgcagccgcacgttccaccctccaccctgtggggtgtgaggatgaccagtctctcagcaagtacgagtttgtggtgaccagtgggagccctgtagctgcagaccgagtgggccccaccatcctgaataagattgaagcggctctgaccaaccagaacctgtctgtggatgtggtggaccagtgcctcgtctgcctcaaggaggagtggatgaacaaagtgaaggtgctttttaagttcaccaaggtggacagtcgacccaaagaggacacacagaagctgctgagcatcctgggtgcgtccgaggaggacaatgtcaagctgctgaagttctggatgactggcctgagcaagacctacaagtcacacctcatgtccacggtccgcagccccacagcctcggagtctcggaactgacccgtcacacacacctgcctaaagacagggatggctgtccacaggatcctccagccccgtgagagggactgtcccttgagtttctcaactgctggaaggagctgtgtcccagcaaggaagggaaaccatcagggctgggctcggccctgtcaggtttggggcctgtgtgcttcccagactctccctccagccgttggaatcgctgaagatggcaatgaaaggcggagggatgatgggctctctctgtgttcaaactccttggagagacgactaggaggacagcttgcctcccaggccccttgtggacttagactcaaaacccgcaggagaaacaggtccgactcagtatgcagtcgcaataacatgtctgctcccgaggttaacattcaagcgtttctactttgaaattcagcaagagtttctgggccttatgtttgagggtaccttttgctgcagttgtgaatattcagtacattgccagctcttggtcactgagtgattgagttagggctccgcaagagactttggggagtgaagtggatctcttcctcatcttttggtcctctgaaatgtgtgttctgaagccatggggctcgtcttctggggtgttcccctgcaggtgctggtgaaggtaacctggggcttaatgatggagtccctgatcatttttgcacaagacaggttgctgaggggtcggcaagcatctgacttgcccaatcccctggatatggtgagccccgccatgcttttattctgtatcgcttttgtctttattgctgctttcaacatttacgtttggttacagttaactattttcggagtgtggtgattgaagacaatttcatcatcccactgtacttttttttttgagagggagtttcactcttgttgcccaggctggagtgcaatggcacgatcttggctcactgcaacctctgcctcctgggttcaagcaattctcctgcctcagcctccagagtagctggaactacaggtgcccgccactatgcccagctaatttttgtattttttagtagagacggggtttcaccgtgttggccgggctggtctcaaactcctgacctcaggtgatccacccacctcagcctcccaaagtgctgggattacaagcgtgagccactgtgcctggcccttttttttttttttttttttttttttaaagagatggcatcttgctatgtcgtccaggctggtcttgaactcctgagttcaagcagtcctcctgcttcaacatacagctacaggtaccccccactatacatttttaataaggattcatggctcagagggattttctgatggttttgctgatttgtttctagtttttttgtgtttatatttaacatgaagaccaagtttatataactaggtatctgtataatgcaacaacattggaacacaataaagatgtatttttgtaaa

SEQ ID NO: 142 - DNA, 3667 bp, Homo sapiens
  source 1..3667: mol_type = genomic DNA
tttacaaaaatacatctttattgtgttccaatgttgttgcattatacagatacctagttatataaacttggtcttcatgttaaatataaacacaaaaaaactagaaacaaatcagcaaaaccatcagaaaatccctctgagccatgaatccttattaaaaatgtatagtggggggtacctgtagctgtatgttgaagcaggaggactgcttgaactcaggagttcaagaccagcctggacgacatagcaagatgccatctctttaaaaaaaaaaaaaaaaaaaaaaaaaagggccaggcacagtggctcacgcttgtaatcccagcactttgggaggctgaggtgggtggatcacctgaggtcaggagtttgagaccagcccggccaacacggtgaaaccccgtctctactaaaaaatacaaaaattagctgggcatagtggcgggcacctgtagttccagctactctggaggctgaggcaggagaattgcttgaacccaggaggcagaggttgcagtgagccaagatcgtgccattgcactccagcctgggcaacaagagtgaaactccctctcaaaaaaaaaagtacagtgggatgatgaaattgtcttcaatcaccacactccgaaaatagttaactgtaaccaaacgtaaatgttgaaagcagcaataaagacaaaagcgatacagaataaaagcatggcggggctcaccatatccaggggattgggcaagtcagatgcttgccgacccctcagcaacctgtcttgtgcaaaaatgatcagggactccatcattaagccccaggttaccttcaccagcacctgcaggggaacaccccagaagacgagccccatggcttcagaacacacatttcagaggaccaaaagatgaggaagagatccacttcactccccaaagtctcttgcggagccctaactcaatcactcagtgaccaagagctggcaatgtactgaatattcacaactgcagcaaaaggtaccctcaaacataaggcccagaaactcttgctgaatttcaaagtagaaacgcttgaatgttaacctcgggagcagacatgttattgcgactgcatactgagtcggacctgtttctcctgcgggttttgagtctaagtccacaaggggcctgggaggcaagctgtcctcctagtcgtctctccaaggagtttgaacacagagagagcccatcatccctccgcctttcattgccatcttcagcgattccaacggctggagggagagtctgggaagcacacaggccccaaacctgacagggccgagcccagccctgatggtttcccttccttgctgggacacagctccttccagcagttgagaaactcaagggacagtccctctcacggggctggaggatcctgtggacagccatccctgtctttaggcaggtgtgtgtgacgggtcagttccgagactccgaggctgtggggctgcggaccgtggacatgaggtgtgacttgtaggtcttgctcaggccagtcatccagaacttcagcagcttgacattgtcctcctcggacgcacccaggatgctcagcagcttctgtgtgtcctctttgggtcgactgtccaccttggtgaacttaaaaagcaccttcactttgttcatccactcctccttgaggcagacgaggcactggtccaccacatccacagacaggttctggttggtcagagccgcttcaatcttattcaggatggtggggcccactcggtctgcagctacagggctcccactggtcaccacaaactcgtacttgctgagagactggtcatcctcacaccccacagggtggagggtggaacgtgcggctgcgtggacctccacgatgacagcaaactctgaggagagcacgtggggggggatctgcacgtgcgggctgagccccaggaagttgcaccgataggcctcctcgtactggctgctgtatgggatgatgcggacgcagcccacgggaagcatggtccgaagtacttcaaaagctgactggacgaggtccacgtctctgcttttccagatcacctggttccccatgagaacgtgccaggccagcatgcggaaagaaggggcacccaggacctgcctcatgtgccggagggacttgaagactggcagcttccggggctgccagctcccacagcctgagagagaggaggactctgccgggccctgggtcagctcccgcccttctgtactctctggcaacacaggggctttctcctcctcttcagcctcagagttgtcccagctttctgattcctcttctaaatcagcgagcttctccatctggaccaaggtatcctcggtcggagcaccttccaggagcttctcggtcagccggctgccacacgccttcaggagccaggcaaaggaggtgtgcaggcacgcccacaggttgtcatcacttgtcagcgatgtcagcgagcgggcggcgttgccgttcctctggtgtaggaatggcgtgaaggctgtgttcatcctctgagcacgctgtgggcatccaaactgctctgcctcaaacaccttgagcgccttgccctggagctcatcgatgattccccggaccttccccagcaggaagggccaggagttgatgaggtagatccggtccatcatgatggtgatgatgctgtaccagcgctggaagcccctggccaggctgtccttgatgaagaaggtgtggctgaacacaaagccgtgctgctcatctccgaagaagatggggccttcacggccagggcagacctcacagctcaggctccggacacaggcctggcggacaatgctgaagagctgggggtggctggggtgctggtggctgacgtatttaatggaggtctctttatcatggctgatatatcccgggtgccctgcagcaagtgaccggcagccctcgcacatgtccgactttttgggccccgggctgctggactcgacgctggccccctctgcggggctgtgcgcacgcatccgactgttcatctgaatgccaccttcctcttcttccgcctgctcaccctggccaggactgtcctcattcccatccccttgaggaagtggggcgtgcagcacctccgtgcagaagagagtgcgggggccgtggagctcgcagaagtggcagagagccacgatggcattcatggtgccttggagactgcaacaggcctgacgtttctgcagttggctgcttagctgcacgagctgctccggcacctgtcctcctgctgagatacggctgagcacgagtggtcacactgacactcagcagaatcacgcttccaccgtccacaccagaccaccacacacgaggctgctgccaaatgggtcaggcatggtggtggcagacacccttgaagacctggcgttttctgctccccaaatcgaggcccgcgggacacctggactcggcagccggggtcccgctctgggtcccagccccgcccctgactgcgctgggtaggtggtcgctgcgggacccggaccggcggaatcacacccagagcccccaagcccacggcagggatgtcacccggggtggcgaggctctcaagcccgggttcaggctctcaggggagctggcagaaccaggagcgaccacactcactcgcggtcccgcagccccgcc

SEQ ID NO: 143 - DNA, 3420 bp, Mus musculus
  source 1..3420: mol_type = genomic DNA
gcttttccgcggggcgacttgccgcgccgaggggcgcgcgtggccgaggggcttggattccttgcctggaggagcattacgtgacacagcaaggctccgcacatcctagtcgcctgcgggggacgcaacgctgctcgctccggctagtcactggcgttgcctgccctctgccggcctgcggatggttcggtccggctgggtcacgcgctaaggctcagtgcaagggcctgcggaacgggctagcacttgccgaggggcagaacagtggcgacagccccaggacagttgcgagcgggttccggcccagcatccgggagacggcggcaagcgccccagctggacaacctcaagtctttgaattcgaatagtgcagcttgcttacctgactcttccggcgggcctcgtacatgttctgctctaggcgggatggtgcagttgtgatgtgctaagcataaggcctcggccattctccagcaccatgaacgccatagtcgccctctgccacttctgcgagctccatggcccccgcacgctcttctgcacggaagttctacacgctcccctgccccagggggccggaagtggggacagtcctgaccaggttgagcaggctgaggaggaggagggtggcattcagatgagcagccgggtccgtgcccacagcccagccgagggtgccagcagtgagtccagcagcccggggcccaagaagtcggacatgtgtgagggctgccggtcacttgccgtagggcacccaggctatatcagtcatgataaagagacctctattaagtacgtcagtcaccagcaccccaaccacccgcagctcttcagcatcgtccgccaggcctgtgtccggagcctgagctgtgaggtatgccctggtcgtgaaggccccatcttctttggtgatgagcagcacggctttgtgttcagccacaccttcttcatcaaagacagcctggccagaggcttccagcgctggtacagcatcatcgccatcatgatggatcggatctacctcatcaactcctggcccttcctgctggggaggatccgcggcatcatcagtgagctccaggccaaggccttcaaggtgtttgaggcagagcagtttggatgtccacagcgtgcccagaggatgaacactgccttcacgcccttcctgcaccagaggaacggcaacgctgcccgctctctgacctccttgaccagtgatgacaacttgtgggcgtgtctgcacacttcctttgcctggctcctgaaggcatgcggtagcaggctgacagaaaagctcttagagggcgctcccacagaggacaccctggtccagatggagaagcttgctgacttggaggaagaatcagaaagttgggacaattctgaggctgaggaggaggagaaagctcctgttacaccagagggtgctgaagggcgagagctgaccagttgcccaacagagtcatcctttctctcagcctgtgggagctggcagcccccaaagcttaccggcttcaagtctcttcgacacatgagacaggtcttgggtgctccatccttccgtatgttggcttggcatgtcctcatggggaatcaggtgatctggaaaagcagagatgtgaacctggtccattcagcgtttgaagtcctccggaccatgctgcctgtgggctgtgtccgcatcatcccttacagcagccagtatgaggaggcctatcgctgcaacttcctggggctcagccctcccgtgcctatccctgcccatgttctggcctcagagttcgtagttgtcgtggaggtccacacggccactcgctcaaacctccaccctgctgggtgcgaggatgaccagtccctcagcaagtatgagtttgtggtgaccagtggtagccctgtggctgcagacagagttgggcccactatcctgaataagattgaagcagctctgaccaaccagaacctgtctgtggatgtggtggaccaatgtctcatctgcctcaaggaggaatggatgaacaaagtgaaagtcctgtttaaattcaccaaggtagacagtcgccccaaggaggacacacagaagctcctaagcgtcctaggcgcatcagaggaggacaacgtcaaactgctgaagttctggatgacgggactgagcaaaacctacaagtcccatctcatgtccaccgtccgaagccccacagctacagagtcacggagctgactccgagaactccttctggaaggtggtgtacagaccagctctgtgggaaaaactgcccttgggtttctgacttctggggtgaggccctgtttatggcctagggttcaccctccttgtaagactctatcagcccatgttgaaatgtaggggacacagagacagtggtccctttgcatcaaactgcgctgtcaggacctggcgagatgtgttctgtgccccgtgaggacaaaggctgggaactgagaggagtccatcagtctgcctctgaggttttgttgttggagcgtgtcctcatggggttaggacaacgccttcccaccatggaagacagcaagcatcgtggatcatttgtctttcggttggtgacttctcaggtcacgtgcacagccgtggcctctgcacatcttgccggcctgtggatacatcaaaaccatggctgttttgtttgcttttgtttttttttaattttggtttttgagtcagggtcttattctgtatcctatcccagtttagaactcatggtgtggcctctgctacttccagacttgtagcaatcctcctgcctcagcctcccaagtgctgggattaccgaactgagccatcagaacattacattgctttcttctctgttgctgccgtagcgctaaccagccactgtagactatgacggtgttacgacagatcgcctctcaccattgcagtttaataaggacgtagcttggaaagatttcctgaaagctttcccaatttgtttttataatattcttggtgtttgtttatatttaacatgaagactgtgtatctcagtctctgtacagttgcaagaatgttgaaacacaataaatctgtatttttgtaaactgccgactacatgtttttatgttaaatactgtggtggtttgtatgtgctctgcccagggagtggcactattaggaggtgcagccctgttggagtaggtgtgtcactgtgggtgtggctttaagaccctcctcttagctgcctggaagtcagtatcctactagcagccttcagatgaagatggagaactcttagctcctcctgctccatgcctgcctggaagctgccatgttcccaccttgatgataatggactgaaactataagacagccccaattaaatgttgtccttatgagaattgccttggtcatggtgtctgttcatatcaataaaactgctaacc

SEQ ID NO: 144 - DNA, 3420 bp, Mus musculus
  source 1..3420: mol_type = genomic DNA
ggttagcagttttattgatatgaacagacaccatgaccaaggcaattctcataaggacaacatttaattggggctgtcttatagtttcagtccattatcatcaaggtgggaacatggcagcttccaggcaggcatggagcaggaggagctaagagttctccatcttcatctgaaggctgctagtaggatactgacttccaggcagctaagaggagggtcttaaagccacacccacagtgacacacctactccaacagggctgcacctcctaatagtgccactccctgggcagagcacatacaaaccaccacagtatttaacataaaaacatgtagtcggcagtttacaaaaatacagatttattgtgtttcaacattcttgcaactgtacagagactgagatacacagtcttcatgttaaatataaacaaacaccaagaatattataaaaacaaattgggaaagctttcaggaaatctttccaagctacgtccttattaaactgcaatggtgagaggcgatctgtcgtaacaccgtcatagtctacagtggctggttagcgctacggcagcaacagagaagaaagcaatgtaatgttctgatggctcagttcggtaatcccagcacttgggaggctgaggcaggaggattgctacaagtctggaagtagcagaggccacaccatgagttctaaactgggataggatacagaataagaccctgactcaaaaaccaaaattaaaaaaaaacaaaagcaaacaaaacagccatggttttgatgtatccacaggccggcaagatgtgcagaggccacggctgtgcacgtgacctgagaagtcaccaaccgaaagacaaatgatccacgatgcttgctgtcttccatggtgggaaggcgttgtcctaaccccatgaggacacgctccaacaacaaaacctcagaggcagactgatggactcctctcagttcccagcctttgtcctcacggggcacagaacacatctcgccaggtcctgacagcgcagtttgatgcaaagggaccactgtctctgtgtcccctacatttcaacatgggctgatagagtcttacaaggagggtgaaccctaggccataaacagggcctcaccccagaagtcagaaacccaagggcagtttttcccacagagctggtctgtacaccaccttccagaaggagttctcggagtcagctccgtgactctgtagctgtggggcttcggacggtggacatgagatgggacttgtaggttttgctcagtcccgtcatccagaacttcagcagtttgacgttgtcctcctctgatgcgcctaggacgcttaggagcttctgtgtgtcctccttggggcgactgtctaccttggtgaatttaaacaggactttcactttgttcatccattcctccttgaggcagatgagacattggtccaccacatccacagacaggttctggttggtcagagctgcttcaatcttattcaggatagtgggcccaactctgtctgcagccacagggctaccactggtcaccacaaactcatacttgctgagggactggtcatcctcgcacccagcagggtggaggtttgagcgagtggccgtgtggacctccacgacaactacgaactctgaggccagaacatgggcagggataggcacgggagggctgagccccaggaagttgcagcgataggcctcctcatactggctgctgtaagggatgatgcggacacagcccacaggcagcatggtccggaggacttcaaacgctgaatggaccaggttcacatctctgcttttccagatcacctgattccccatgaggacatgccaagccaacatacggaaggatggagcacccaagacctgtctcatgtgtcgaagagacttgaagccggtaagctttgggggctgccagctcccacaggctgagagaaaggatgactctgttgggcaactggtcagctctcgcccttcagcaccctctggtgtaacaggagctttctcctcctcctcagcctcagaattgtcccaactttctgattcttcctccaagtcagcaagcttctccatctggaccagggtgtcctctgtgggagcgccctctaagagcttttctgtcagcctgctaccgcatgccttcaggagccaggcaaaggaagtgtgcagacacgcccacaagttgtcatcactggtcaaggaggtcagagagcgggcagcgttgccgttcctctggtgcaggaagggcgtgaaggcagtgttcatcctctgggcacgctgtggacatccaaactgctctgcctcaaacaccttgaaggccttggcctggagctcactgatgatgccgcggatcctccccagcaggaagggccaggagttgatgaggtagatccgatccatcatgatggcgatgatgctgtaccagcgctggaagcctctggccaggctgtctttgatgaagaaggtgtggctgaacacaaagccgtgctgctcatcaccaaagaagatggggccttcacgaccagggcatacctcacagctcaggctccggacacaggcctggcggacgatgctgaagagctgcgggtggttggggtgctggtgactgacgtacttaatagaggtctctttatcatgactgatatagcctgggtgccctacggcaagtgaccggcagccctcacacatgtccgacttcttgggccccgggctgctggactcactgctggcaccctcggctgggctgtgggcacggacccggctgctcatctgaatgccaccctcctcctcctcagcctgctcaacctggtcaggactgtccccacttccggccccctggggcaggggagcgtgtagaacttccgtgcagaagagcgtgcgggggccatggagctcgcagaagtggcagagggcgactatggcgttcatggtgctggagaatggccgaggccttatgcttagcacatcacaactgcaccatcccgcctagagcagaacatgtacgaggcccgccggaagagtcaggtaagcaagctgcactattcgaattcaaagacttgaggttgtccagctggggcgcttgccgccgtctcccggatgctgggccggaacccgctcgcaactgtcctggggctgtcgccactgttctgcccctcggcaagtgctagcccgttccgcaggcccttgcactgagccttagcgcgtgacccagccggaccgaaccatccgcaggccggcagagggcaggcaacgccagtgactagccggagcgagcagcgttgcgtcccccgcaggcgactaggatgtgcggagccttgctgtgtcacgtaatgctcctccaggcaaggaatccaagcccctcggccacgcgcgcccctcggcgcggcaagtcgccccgcggaaaagc

SEQ ID NO: 145 - DNA, 2987 bp, Rattus norvegicus
  source 1..2987: mol_type = genomic DNA
ggactcttggcttggaagagcgtaacgcagcacagcgtggctcggcgcatcctagtctcctgtcggcgccgcggcaccgctcgccgtggctagtctctggcgttgccttccctccgccagcctgcggatggttcggtccggctgggtcacgcgctagactcggtgcaagggcctgcggaacgggcgaggggcagaacggtggcgacagcctcaggacagttgcgagcgggttccggcccagcatccgggagacggcggcgagcgccccagctgagttgacaacctcaagcctttgaattcgagtgcagtttgcataccatacctgactcatccggcaggcctcgtacacgttctggtctaggcaggatggtgcagccgtgatctgtcaagcataaggcctcggccattctccagcaccatgaacgccattgtggctctctgccacttctgcgagctccatggcccccgcacgctcttctgcacggaggttctacacgctcccctgccccagggtgccggaagtggggacagtcctggccaggttgagcaggctgaggaagaagagggcggcatccagatgagcagccgagtccgtgcccacagcccagccgagggcgccagcactgactccagcagcccggggcccaagaagtcagacatgtgcgagggctgccgctcgcttgctgtagggcacccaggttatatcagtcatgataaggagacctctatcaagtacgtcagccaccagcaccccaaccacccacagctcttcagcattgtccgccaggcctgtgtccgcagcctgagctgtgaggtgtgccctggtcgtgaaggccccatcttctttggtgatgagcaacatggctttgtgttcagccacaccttcttcatcaaagacagcctggccagaggcttccagcgctggtacagcatcatcgccatcatgatggatcggatctacctcatcaactcctggcccttcctgctgggcaagatccgcgggatcatcagcgagctccagggcaaggccctcaaggtgtttgaggcagaacagtttggatgtccacagcgtgcccagaggatgaacactgccttcacacccttcctgcaccagaggaacggcaacgctgcccgctctctgacctccttgaccagtgatgacaacttgtgggcctgtctgcatacttcctttgcctggctcctgaaggcatgtggtagccggctgacagaaaagctcttagagggtgctcccacagaggacaccctggtccagatggagaagcttgctgacttagaggaagaatcagaaagttgggataattcagaggctgaagaggaggagaaagcccctgctacggcagagggtgctgaagggcgagagctggccagttgcccaacagaatcatcctttctctcagcctgtgggagctggcagcccccaaagctttctgtcttcaagtcccttcgacacatgagacaggtcttgggagccccatctttccgaatgttggcctggcatgtcctcatgggtaatcaggtgatctggaaaagcagagatgtgaaccttgtccattccgcatttgaagtcctccggaccatgctgcctgtaggctgtgtgcgaatcatcccttacagcagccagtatgaggaggcctatcgctgcaacttcctagggctcagccctccggtgcctatccctgctcatgtcctggcctctgagttcgtagttgtcgtggaggtacacacagccactcgctcaaacccgcacccggctggatgtgaggacgaccagtccctcagcaagtatgagtttgtggtgaccagcggtagccctgtggctgcagacagagttgggcccaccatcctgaataaaatggaggcagctctgaccaaccagaacctgtctgtggatgtggtggaccagtgcctcgtctgtctcaaggaggagtggatgaacaaagtgaaagtcctgttcaaattcaccaaggtggacagccgccccaaggaggacacccagaagctcctgagcgtcctcggcgcatcagaggaggacaacgttaagctactgaagttctggatgacgggcctgagcaaaacctacaagtcacacctcatgtccacagtccgaagcccgacagccgcagagtcacggaactgactccgagaacaccgtctggaaggtggtgtacatcttagctctgtgggaaagactgcccttgggtttctgagtgctggcgtgagatcctgtttgaggagtgaagacttacgggctaggcctcgccctccttgtgaggctctcttagcccatgttgaagtgtaggggacacagggacagtggtcccactgcataaaattgctctgtcaggaactggtgagatgtgctatgtgcctcttgaggagaaaggctgggagctgagaggagtctacgagccagcctctgaggttttgttgttgcaggatgtcctcgtgggcttaggacaacaccttcccaccatggaagaccaagcatcctggatcgtttgtctttgggttgatgacttctcaggtcatgtgcacacccgtggcctctggacatcaagaccatggctgttttgtttttgtttttttaattttagtctttgagtcagggtcttattctgtctcctatcccagtttagaactcacggtgtggcctatgctacttccagacttgtagcagtcctcctgcctcagcttcccaagtgctgggagtacagaactgagccatcagaaccttacgttgctttcttctctgttgctgccatagcattaaccagcgactgtagactgtggtggggttgaggcggagtgcctctcaccgtagcagcttagactccctgaagctttcccaatttgttcataatttaacacgaagactacgtttgtgtgtcttggtctctgtacagttgcaagaatgttgaaacacaataaatctgtatttttgtaaaaaaaaaaaaaaaaaaaaaaaa

SEQ ID NO: 146 - DNA, 2987 bp, Rattus norvegicus
  source 1..2987: mol_type = genomic DNA
ttttttttttttttttttttttttacaaaaatacagatttattgtgtttcaacattcttgcaactgtacagagaccaagacacacaaacgtagtcttcgtgttaaattatgaacaaattgggaaagcttcagggagtctaagctgctacggtgagaggcactccgcctcaaccccaccacagtctacagtcgctggttaatgctatggcagcaacagagaagaaagcaacgtaaggttctgatggctcagttctgtactcccagcacttgggaagctgaggcaggaggactgctacaagtctggaagtagcataggccacaccgtgagttctaaactgggataggagacagaataagaccctgactcaaagactaaaattaaaaaaacaaaaacaaaacagccatggtcttgatgtccagaggccacgggtgtgcacatgacctgagaagtcatcaacccaaagacaaacgatccaggatgcttggtcttccatggtgggaaggtgttgtcctaagcccacgaggacatcctgcaacaacaaaacctcagaggctggctcgtagactcctctcagctcccagcctttctcctcaagaggcacatagcacatctcaccagttcctgacagagcaattttatgcagtgggaccactgtccctgtgtcccctacacttcaacatgggctaagagagcctcacaaggagggcgaggcctagcccgtaagtcttcactcctcaaacaggatctcacgccagcactcagaaacccaagggcagtctttcccacagagctaagatgtacaccaccttccagacggtgttctcggagtcagttccgtgactctgcggctgtcgggcttcggactgtggacatgaggtgtgacttgtaggttttgctcaggcccgtcatccagaacttcagtagcttaacgttgtcctcctctgatgcgccgaggacgctcaggagcttctgggtgtcctccttggggcggctgtccaccttggtgaatttgaacaggactttcactttgttcatccactcctccttgagacagacgaggcactggtccaccacatccacagacaggttctggttggtcagagctgcctccattttattcaggatggtgggcccaactctgtctgcagccacagggctaccgctggtcaccacaaactcatacttgctgagggactggtcgtcctcacatccagccgggtgcgggtttgagcgagtggctgtgtgtacctccacgacaactacgaactcagaggccaggacatgagcagggataggcaccggagggctgagccctaggaagttgcagcgataggcctcctcatactggctgctgtaagggatgattcgcacacagcctacaggcagcatggtccggaggacttcaaatgcggaatggacaaggttcacatctctgcttttccagatcacctgattacccatgaggacatgccaggccaacattcggaaagatggggctcccaagacctgtctcatgtgtcgaagggacttgaagacagaaagctttgggggctgccagctcccacaggctgagagaaaggatgattctgttgggcaactggccagctctcgcccttcagcaccctctgccgtagcaggggctttctcctcctcttcagcctctgaattatcccaactttctgattcttcctctaagtcagcaagcttctccatctggaccagggtgtcctctgtgggagcaccctctaagagcttttctgtcagccggctaccacatgccttcaggagccaggcaaaggaagtatgcagacaggcccacaagttgtcatcactggtcaaggaggtcagagagcgggcagcgttgccgttcctctggtgcaggaagggtgtgaaggcagtgttcatcctctgggcacgctgtggacatccaaactgttctgcctcaaacaccttgagggccttgccctggagctcgctgatgatcccgcggatcttgcccagcaggaagggccaggagttgatgaggtagatccgatccatcatgatggcgatgatgctgtaccagcgctggaagcctctggccaggctgtctttgatgaagaaggtgtggctgaacacaaagccatgttgctcatcaccaaagaagatggggccttcacgaccagggcacacctcacagctcaggctgcggacacaggcctggcggacaatgctgaagagctgtgggtggttggggtgctggtggctgacgtacttgatagaggtctccttatcatgactgatataacctgggtgccctacagcaagcgagcggcagccctcgcacatgtctgacttcttgggccccgggctgctggagtcagtgctggcgccctcggctgggctgtgggcacggactcggctgctcatctggatgccgccctcttcttcctcagcctgctcaacctggccaggactgtccccacttccggcaccctggggcaggggagcgtgtagaacctccgtgcagaagagcgtgcgggggccatggagctcgcagaagtggcagagagccacaatggcgttcatggtgctggagaatggccgaggccttatgcttgacagatcacggctgcaccatcctgcctagaccagaacgtgtacgaggcctgccggatgagtcaggtatggtatgcaaactgcactcgaattcaaaggcttgaggttgtcaactcagctggggcgctcgccgccgtctcccggatgctgggccggaacccgctcgcaactgtcctgaggctgtcgccaccgttctgcccctcgcccgttccgcaggcccttgcaccgagtctagcgcgtgacccagccggaccgaaccatccgcaggctggcggagggaaggcaacgccagagactagccacggcgagcggtgccgcggcgccgacaggagactaggatgcgccgagccacgctgtgctgcgttacgctcttccaagccaagagtcc

SEQ ID NO: 147 - DNA, 3687 bp, Macaca fascicularis
  source 1..3687: mol_type = genomic DNA
gagtcacgcgccagggtctcggcggggatgtggggccgcgagtgagtgtggtaactcttggttctgccagctccccgagagcccgaaccggggcttgagagcctcgccaccccggctgacgttccggccgtgggctcgggggctctgtgtgtgatcccgcctgtctgggacccgcagcgaccacctacccagcgcagtcaggggcggggctgagacccggagcgggaccccggctgccgagtccaggtgtcccgcgggcctcgattcggggagcagaaaacgccaggtcttcaaggatgtctgccgccaccatgcctgacccatttggctgcagcctcgtgtgtgctggtctggtgtggacggtggaaatgtgattctgctgaatgtcagtgtgaccactcgtgctcagctgtatctcagggaggaggacaggtgctggagcagctcgtgccagctgagcagccaactgcagaaacgtcaggcctctcgcagtctccaaggcaccatgaatgccatcgtggctctctgccacttctgtgagctccacggcccccgcactctcttctgcacggaggtcctgcacgccccacttccccaaggggctgggaatgaggacagtcctggccagggcgagcaggcggaggaagaggaaggcggcattcagatgagcagtcggatgcgtgcacacagccccgcagagggggccagcgttgagtccagcagcccagggcccaaaaagtcggacatgtgcgagggctgccggtcacttgctgcagggcacccggggtatatcagccatgataaagagacctccattaaatacgtcagccaccagcaccccagccacccccagctcttcagcatcgtccgccaggcctgtgtccggagcctgagctgtgaggtctgccctggccgcgaaggccccatcttcttcggagatgagcagcacggctttgtgttcagccacaccttcttcatcaaggacagcctggccaggggcttccagcgctggtacagcatcatcaccatcatgatggaccggatctacctcatcaactcctggcccttcctgctggggaaggtccggggaatcatcgatgagctccagggcaaggcgctcaaggtgtttgaggcagagcagtttggatgcccacagcgtgctcagaggatgaacacagccttcacgccattcctacaccagaggaacggcaatgccgcccgctcgctgacatcgctgacaagtgatgacaacttgtgggcgtgcctgcacacctcctttgcctggctcctgaaggcgtgtggcagccggctgaccgagaagctcctggaaggtgctccgaccgaggacaccttggtccagatggagaagctcgctgatttagaagaggaatcagaaagctgggacaactctgaggctgaagaggaagagaaagcccctgtgttaacggagggtgtagaagggcgggagctgacccagggcccagcagagtcctcctctctctcaggctgtgggagctggcagccccggaagctgccagtcttcaagtccctccggcacatgaggcaggtcctgggtgccccatctttccgcatgctggcctggcacgttctcatggggaaccaggtgatctggaaaagtggagacgtggacctcgtccagtcagcttttgaagtgcttcggactatgctgcccgtgggctgcgtccgcatcatcccgtacagcagccagtacgaggaggcctatcggtgcaacttcctggggctcagcccacacgtgcagatccccccccacgtgctctcctcagagtttgccgtcatcgtggaggtccatgcagccgcacgttccaccctccaccctgtggggtgtgaggatgaccagtctctcagcaagtacgagtttgtggtgaccagcgggagccctgtagctgcagaccgagtcggccccaccatcctgaataagattgaagcggctctgaccaaccaaaacctgtctgtggatgtggtggaccagtgcctcgtgtgcctcaaggaggagtggatgaacaaagtgaaggtgctttttaagttcaccaaggtggacagtcgacccaaagaggacacacagaagctgctgagcatcctgggtgcgtccgaggaggacaacgtcaagctgctgaagttctggatgactggcctgagcaagacctacaagtcacacctcatgtccacggtccgcagccccacggcttccgagtctcggaactgacccgccccacacacctgcccgaagacggggatggctgtccacagactcctccagccccgcgagaggaactgtcccttgagtttctgaactgctgggaggagctgtgtcctggtaaggaagggaaaccgtccgggcttggctcggctctctgtcaggtttggggcctgtgtgcttcccacaccctccctcaagccgctggaatcgctgaagatggcagtgaaaggcggagggatggtggactctgtgttcaaaccccttggagagacgcttaggaggatagcttgtctctcaggccccttgtggacttagatctcaaaacctgttggagaaacaggtccaactcggcatgcagtcgcaataacgtatcctctcccgaggttaacattcaagcgtttctattttgaaattcagcaagagtttctgggcctcatgtttgagtgtacattttgctgcgttgtgaatattcaacacattgccagctcttggtcactgagtgattgagttagggctcctcgagagactttggggagtgaagtggacctgttccacatcttccggtcctctgaactgtgtgttctgaagccatgggctcatcttctggggtgttcccctgcaggtactggtgaaggtaacctggggcttaacaatggagcccctgatggtttattttgctcaacataggttgctgagggtcggagcaagcatctgacttgtgcagtcccctggatatggtgaggcccaccatgcttttattctgtatcgcttttgtctttactgtggctttcaacatttacatttggctaccaataactattttcagagggtggtgattgaaaacagtttcatcatcccactgtacttttttgtttttgagacggagtttcactcttattgcccagactggagtgcaatggcgcaatctcggctcactgcaacctctgcctcctgggttcaagcgattctcctgcctctgcctacagagtagctgggattacaggcgcccaccaccacgcccagctaatttttatatttttagtagagacagggtttcaccatgttggccgggctggtctcaaactcctgacctcaagtgatccacccacctcagcctcccaaagtgctgggattacaggtgtgagcccctgtgcctggccctttttttttttttttttaagagatggtatcttgctgtatcatccaggctggtcttgaactcctgagttcaagcagtcctgctttaacctacagctacaggtaccccaactatacatttttaatgaggattcatggctcagagggattttctggtggttttgctgatttgtttctagttttttgtgtttaatttatatttaacatgaagaccaagtttatataactaggtatctgtataacacaacaacattggaacacaataaagatgtatttttgtaaattgttga

SEQ ID NO: 148 - DNA, 3687 bp, Macaca fascicularis
  source 1..3687: mol_type = genomic DNA
tcaacaatttacaaaaatacatctttattgtgttccaatgttgttgtgttatacagatacctagttatataaacttggtcttcatgttaaatataaattaaacacaaaaaactagaaacaaatcagcaaaaccaccagaaaatccctctgagccatgaatcctcattaaaaatgtatagttggggtacctgtagctgtaggttaaagcaggactgcttgaactcaggagttcaagaccagcctggatgatacagcaagataccatctcttaaaaaaaaaaaaaaaaagggccaggcacaggggctcacacctgtaatcccagcactttgggaggctgaggtgggtggatcacttgaggtcaggagtttgagaccagcccggccaacatggtgaaaccctgtctctactaaaaatataaaaattagctgggcgtggtggtgggcgcctgtaatcccagctactctgtaggcagaggcaggagaatcgcttgaacccaggaggcagaggttgcagtgagccgagattgcgccattgcactccagtctgggcaataagagtgaaactccgtctcaaaaacaaaaaagtacagtgggatgatgaaactgttttcaatcaccaccctctgaaaatagttattggtagccaaatgtaaatgttgaaagccacagtaaagacaaaagcgatacagaataaaagcatggtgggcctcaccatatccaggggactgcacaagtcagatgcttgctccgaccctcagcaacctatgttgagcaaaataaaccatcaggggctccattgttaagccccaggttaccttcaccagtacctgcaggggaacaccccagaagatgagcccatggcttcagaacacacagttcagaggaccggaagatgtggaacaggtccacttcactccccaaagtctctcgaggagccctaactcaatcactcagtgaccaagagctggcaatgtgttgaatattcacaacgcagcaaaatgtacactcaaacatgaggcccagaaactcttgctgaatttcaaaatagaaacgcttgaatgttaacctcgggagaggatacgttattgcgactgcatgccgagttggacctgtttctccaacaggttttgagatctaagtccacaaggggcctgagagacaagctatcctcctaagcgtctctccaaggggtttgaacacagagtccaccatccctccgcctttcactgccatcttcagcgattccagcggcttgagggagggtgtgggaagcacacaggccccaaacctgacagagagccgagccaagcccggacggtttcccttccttaccaggacacagctcctcccagcagttcagaaactcaagggacagttcctctcgcggggctggaggagtctgtggacagccatccccgtcttcgggcaggtgtgtggggcgggtcagttccgagactcggaagccgtggggctgcggaccgtggacatgaggtgtgacttgtaggtcttgctcaggccagtcatccagaacttcagcagcttgacgttgtcctcctcggacgcacccaggatgctcagcagcttctgtgtgtcctctttgggtcgactgtccaccttggtgaacttaaaaagcaccttcactttgttcatccactcctccttgaggcacacgaggcactggtccaccacatccacagacaggttttggttggtcagagccgcttcaatcttattcaggatggtggggccgactcggtctgcagctacagggctcccgctggtcaccacaaactcgtacttgctgagagactggtcatcctcacaccccacagggtggagggtggaacgtgcggctgcatggacctccacgatgacggcaaactctgaggagagcacgtggggggggatctgcacgtgtgggctgagccccaggaagttgcaccgataggcctcctcgtactggctgctgtacgggatgatgcggacgcagcccacgggcagcatagtccgaagcacttcaaaagctgactggacgaggtccacgtctccacttttccagatcacctggttccccatgagaacgtgccaggccagcatgcggaaagatggggcacccaggacctgcctcatgtgccggagggacttgaagactggcagcttccggggctgccagctcccacagcctgagagagaggaggactctgctgggccctgggtcagctcccgcccttctacaccctccgttaacacaggggctttctcttcctcttcagcctcagagttgtcccagctttctgattcctcttctaaatcagcgagcttctccatctggaccaaggtgtcctcggtcggagcaccttccaggagcttctcggtcagccggctgccacacgccttcaggagccaggcaaaggaggtgtgcaggcacgcccacaagttgtcatcacttgtcagcgatgtcagcgagcgggcggcattgccgttcctctggtgtaggaatggcgtgaaggctgtgttcatcctctgagcacgctgtgggcatccaaactgctctgcctcaaacaccttgagcgccttgccctggagctcatcgatgattccccggaccttccccagcaggaagggccaggagttgatgaggtagatccggtccatcatgatggtgatgatgctgtaccagcgctggaagcccctggccaggctgtccttgatgaagaaggtgtggctgaacacaaagccgtgctgctcatctccgaagaagatggggccttcgcggccagggcagacctcacagctcaggctccggacacaggcctggcggacgatgctgaagagctgggggtggctggggtgctggtggctgacgtatttaatggaggtctctttatcatggctgatataccccgggtgccctgcagcaagtgaccggcagccctcgcacatgtccgactttttgggccctgggctgctggactcaacgctggccccctctgcggggctgtgtgcacgcatccgactgctcatctgaatgccgccttcctcttcctccgcctgctcgccctggccaggactgtcctcattcccagccccttggggaagtggggcgtgcaggacctccgtgcagaagagagtgcgggggccgtggagctcacagaagtggcagagagccacgatggcattcatggtgccttggagactgcgagaggcctgacgtttctgcagttggctgctcagctggcacgagctgctccagcacctgtcctcctccctgagatacagctgagcacgagtggtcacactgacattcagcagaatcacatttccaccgtccacaccagaccagcacacacgaggctgcagccaaatgggtcaggcatggtggcggcagacatccttgaagacctggcgttttctgctccccgaatcgaggcccgcgggacacctggactcggcagccggggtcccgctccgggtctcagccccgcccctgactgcgctgggtaggtggtcgctgcgggtcccagacaggcgggatcacacacagagcccccgagcccacggccggaacgtcagccggggtggcgaggctctcaagccccggttcgggctctcggggagctggcagaaccaagagttaccacactcactcgcggccccacatccccgccgagaccctggcgcgtgactc

SEQ ID NO: 149 - DNA, 3140 bp, Macaca mulatta
  source 1..3140: mol_type = genomic DNA
ccgcgagtgagtgtggtaactcttggttctgccagctccccgagagcccgaaccggggcttgagagcctcgccaccccggctgacgttccggccgtgggctcgggggctctgtgtgtgatcccgcctgtctgggacccgcagcgaccacctacccagcgcagtcaggggcggggctgagacccggagcgggaccccggctgccgagtccaggtgtcccgcgggcctcgattcggggagcagaaaacgccaggtcttcaaggatgtctgccgccaccatgcctgacccatttggctgcagcctcgtgtgtgctggtctggtgtggacggtggaagtgtgattctgctgaatgtcagtgtgaccactcgtgctcagctgtatctcagggaggaggacaggtgctggagcagctcgtgccagctgagcagctaactgcagaaacgtcaggcctctcgcagtctccaaggcaccatgaatgccatcgtggctctctgccacttctgtgagctccacggcccccgcactctcttctgcacggaggtcctgcacgccccacttccccaaggggctgggaatgaggacagtcctggccagggcgagcaggcggaggaagaggaaggcggcattcagatgagcagtcggatgcgtgcacacagccccgcagagggggccagcgttgagtccagcagcccagggcccaaaaagtcagacatgtgcgagggctgccggtcacttgctgcagggcacccggggtatatcagccatgataaagagacctccattaaatacgtcagccaccagcaccccagccacccccagctcttcagcatcgtccgccaggcctgtgtccggagcctgagctgtgaggtctgccctggccgcgaaggccccatcttcttcggagatgagcagcacggctttgtgttcagccacaccttcttcatcaaggacagcctggccaggggcttccagcgctggtacagcatcatcaccatcatgatggaccggatctacctcatcaactcctggcccttcctgctggggaaggtccggggaatcatcgatgagctccagggcaaggcgctcaaggtgtttgaggcagagcagtttggatgcccacagcgtgctcagaggatgaacacagccttcacgccattcctacaccagaggaacggcaatgccgcccgctcgctgacatcgctgacaagtgatgacaacttgtgggcgtgcctgcacacctcctttgcctggctcctgaaggcgtgtggcagccggctgaccgagaagctcctggaaggtgctccgaccgaggacaccttggtccagatggagaagctcgctgatttagaagaggaatcagaaagctgggacaactctgaggctgaagaggaagagaaagcccctgtgttgacggagggtgtagaagggcgggagctgacccagggcacagcagagtcctcctctctctcaggctgtgggagctggcagccccggaagctgccagtcttcaagtccctccggcacatgaggcaggtcctgggtgccccatctttccgcatgctggcctggcacgttctcatggggaaccaggtgatctggaaaagtggagacgtggacctcgtccagtcagcttttgaagtgcttcggactatgctgcccgtgggctgcgtccgcatcatcccgtacagcagccagtacgaggaggcctatcggtgcaacttcctggggctcagcccacacgtgcagatccccccccacgtgctctcctcagagtttgccgtcatcgtggaggtccatgcagccgcacgttccaccctccaccctgtggggtgtgaggatgaccagtctctcagcaagtacgagtttgtggtgaccagcgggagccctgtagctgcagaccgagtcggccccaccatcctgaataagattgaagcggctctgaccaaccaaaacctgtctgtggatgtggtggaccagtgcctcgtgtgcctcaaggaggagtggatgaacaaagtgaaggtgctttttaagttcaccaaggtggacagtcgacccaaagaggacacacagaagctgctgagcatcctgggtgcgtccgaggaggacaacgtcaagctgctgaagttctggatgactggcctgagcaagacctacaagtcacacctcatgtccacggtccgcagccccacggcttcggagtctcggaactgacccgccccacacacctgcccgaagacggggatggctgtccacagactcctccagccccgcgagaggaactgtcccttgagtttctgaactgctgggaggagctgtgtcctggtaaggaagggaaaccgtccgggcttggctcggctctctgtcaggtttggggcctgtgtgcttcccacaccctccctcaagccgttggaatcgctgaagatggcagtgaaaggcggagggatggtggactctgtgttcaaaccccttggagagacgcttaggaggatagcttgtctctcaggccccttgtggacttagatctcaaaacctgttggagaaacaggtccaactcggcatgcagtcgcaatgacatatcctctcccgaggttaacattcaagcgtttctattttgaaattcagcaagagtttctgggcctcatgtttgagtgtacattttgctgcgttgtgaatattcaacacattgccagctcttggtcactgagtgattgagttagggctccgcgagagactttggggagtgaagtggacctgttccgcatcttccggtcctctgaactgtgtgttctgaagccatgggctcatcttctggggtgttcccctgcaggtactggtgaaggtaacctggggcttaacaatggagcccctgatggtttattttgctcaacataggttgctgagggtcggagcaagcatctgacttgtgcagtcccctggatatggcgaggcccaccatgcttttattctgtgtcgcttttgtctttactgtggctttcaacatttacatttggctaccaataactgttttcagagggtggtgattgaaaacaatttcatcatcccactgtacttttttgtttttgagacggagtttcactcttattgcccagactggagtgcaatggcgcaatcttggctcac

SEQ ID NO: 150 - DNA, 3140 bp, Macaca mulatta
  source 1..3140: mol_type = genomic DNA
gtgagccaagattgcgccattgcactccagtctgggcaataagagtgaaactccgtctcaaaaacaaaaaagtacagtgggatgatgaaattgttttcaatcaccaccctctgaaaacagttattggtagccaaatgtaaatgttgaaagccacagtaaagacaaaagcgacacagaataaaagcatggtgggcctcgccatatccaggggactgcacaagtcagatgcttgctccgaccctcagcaacctatgttgagcaaaataaaccatcaggggctccattgttaagccccaggttaccttcaccagtacctgcaggggaacaccccagaagatgagcccatggcttcagaacacacagttcagaggaccggaagatgcggaacaggtccacttcactccccaaagtctctcgcggagccctaactcaatcactcagtgaccaagagctggcaatgtgttgaatattcacaacgcagcaaaatgtacactcaaacatgaggcccagaaactcttgctgaatttcaaaatagaaacgcttgaatgttaacctcgggagaggatatgtcattgcgactgcatgccgagttggacctgtttctccaacaggttttgagatctaagtccacaaggggcctgagagacaagctatcctcctaagcgtctctccaaggggtttgaacacagagtccaccatccctccgcctttcactgccatcttcagcgattccaacggcttgagggagggtgtgggaagcacacaggccccaaacctgacagagagccgagccaagcccggacggtttcccttccttaccaggacacagctcctcccagcagttcagaaactcaagggacagttcctctcgcggggctggaggagtctgtggacagccatccccgtcttcgggcaggtgtgtggggcgggtcagttccgagactccgaagccgtggggctgcggaccgtggacatgaggtgtgacttgtaggtcttgctcaggccagtcatccagaacttcagcagcttgacgttgtcctcctcggacgcacccaggatgctcagcagcttctgtgtgtcctctttgggtcgactgtccaccttggtgaacttaaaaagcaccttcactttgttcatccactcctccttgaggcacacgaggcactggtccaccacatccacagacaggttttggttggtcagagccgcttcaatcttattcaggatggtggggccgactcggtctgcagctacagggctcccgctggtcaccacaaactcgtacttgctgagagactggtcatcctcacaccccacagggtggagggtggaacgtgcggctgcatggacctccacgatgacggcaaactctgaggagagcacgtggggggggatctgcacgtgtgggctgagccccaggaagttgcaccgataggcctcctcgtactggctgctgtacgggatgatgcggacgcagcccacgggcagcatagtccgaagcacttcaaaagctgactggacgaggtccacgtctccacttttccagatcacctggttccccatgagaacgtgccaggccagcatgcggaaagatggggcacccaggacctgcctcatgtgccggagggacttgaagactggcagcttccggggctgccagctcccacagcctgagagagaggaggactctgctgtgccctgggtcagctcccgcccttctacaccctccgtcaacacaggggctttctcttcctcttcagcctcagagttgtcccagctttctgattcctcttctaaatcagcgagcttctccatctggaccaaggtgtcctcggtcggagcaccttccaggagcttctcggtcagccggctgccacacgccttcaggagccaggcaaaggaggtgtgcaggcacgcccacaagttgtcatcacttgtcagcgatgtcagcgagcgggcggcattgccgttcctctggtgtaggaatggcgtgaaggctgtgttcatcctctgagcacgctgtgggcatccaaactgctctgcctcaaacaccttgagcgccttgccctggagctcatcgatgattccccggaccttccccagcaggaagggccaggagttgatgaggtagatccggtccatcatgatggtgatgatgctgtaccagcgctggaagcccctggccaggctgtccttgatgaagaaggtgtggctgaacacaaagccgtgctgctcatctccgaagaagatggggccttcgcggccagggcagacctcacagctcaggctccggacacaggcctggcggacgatgctgaagagctgggggtggctggggtgctggtggctgacgtatttaatggaggtctctttatcatggctgatataccccgggtgccctgcagcaagtgaccggcagccctcgcacatgtctgactttttgggccctgggctgctggactcaacgctggccccctctgcggggctgtgtgcacgcatccgactgctcatctgaatgccgccttcctcttcctccgcctgctcgccctggccaggactgtcctcattcccagccccttggggaagtggggcgtgcaggacctccgtgcagaagagagtgcgggggccgtggagctcacagaagtggcagagagccacgatggcattcatggtgccttggagactgcgagaggcctgacgtttctgcagttagctgctcagctggcacgagctgctccagcacctgtcctcctccctgagatacagctgagcacgagtggtcacactgacattcagcagaatcacacttccaccgtccacaccagaccagcacacacgaggctgcagccaaatgggtcaggcatggtggcggcagacatccttgaagacctggcgttttctgctccccgaatcgaggcccgcgggacacctggactcggcagccggggtcccgctccgggtctcagccccgcccctgactgcgctgggtaggtggtcgctgcgggtcccagacaggcgggatcacacacagagcccccgagcccacggccggaacgtcagccggggtggcgaggctctcaagccccggttcgggctctcggggagctggcagaaccaagagttaccacactcactcgcgg

SEQ ID NO: 151 - DNA, 7659 bp, Homo sapiens
  source 1..7659: mol_type = genomic DNA
gaaaacttcctggagaaggatggattttaccctgtaaaagaagaaagacatggatgcataagaagagggttgaagagggggaggcctcagacttctcgctggcctgggattcctccgtgacagcagcaggaggcctagaaggagagccagagtgcgatcagaaaaccagccgtgcgctggaagacaggaacagcgtgacaagtcaagaggagagaaatgaggatgatgaagacatggaggatgaatcaatttacacctgcgatcactgtcagcaggacttcgagtctctggcagacctgacggaccaccgggcccaccgctgtcctggagatggtgatgacgacccacaactctcctgggtggcctcgtctccctccagcaaggatgttgcgtcacccacgcagatgatcggagatggttgtgacctcggcctcggcgaggaggaagggggcacgggcctgccatacccttgccagttctgcgacaagtccttcatccgcttgagctacttgaagaggcacgagcagatccacagcgacaagctgccgttcaagtgcacctactgcagccgcctcttcaagcacaagaggagccgtgaccggcacatcaagctgcatacgggcgacaagaagtatcactgccacgagtgcgaggcagccttctcccgcagcgaccacctcaagatccacctgaagacccacagctccagcaagcccttcaagtgcactgtgtgcaagcgcggcttctcctccaccagctcgctgcagagccacatgcaggcccacaaaaagaacaaggagcatctggccaagtcggagaaggaagccaagaaggacgacttcatgtgcgactactgcgaggacaccttcagccagacggaggagctggagaagcacgtgctcacccgccacccgcagctgtccgagaaggcggacctgcagtgcattcactgccctgaggtcttcgtcgacgagaacacactgctcgcccatatccaccaagcccacgccaaccagaaacacaagtgccccatgtgccctgagcagttctcctcagtggaaggtgtctactgccacctggacagccaccggcagcccgactccagcaaccacagtgtcagtcccgaccctgtactgggcagcgtggcctccatgagcagcgccacacccgactccagcgcctctgtggagcgtggctccaccccggactccaccttgaagccgctgcgggggcagaagaagatgcgggatgacgggcagggctggaccaaggtggtctatagctgcccctattgttccaagcgggactttaacagcctggccgtgctggagatccacctgaagaccatccacgcggacaagccccagcagagccacacatgtcagatctgcctggactccatgcccaccctctacaacctcaacgagcacgttcgcaagctgcacaagaaccatgcctaccctgtgatgcagtttggcaacatctctgccttccactgcaactactgccccgagatgttcgccgacatcaatagcctgcaggagcacatccgcgtctcccactgcggccccaacgccaacccctctgacggtaataatgctttcttctgcaaccagtgctccatgggtttccttactgagtcctccctcaccgagcacatccagcaggcccactgcagtgtgggcagtgccaaactagagtctccggtggtgcagcccacgcagtccttcatggaggtctattcctgcccctactgcaccaactcccccatctttggctccatcctgaaactcaccaagcacatcaaggagaaccacaagaacattccactggcccacagcaagaagtccaaggccgagcagagcccagtctcgtccgatgtggaggtgtcttccccgaagcggcagcggctctcagcaagcgccaactccatctccaatggggagtatccttgcaatcaatgcgacctcaagttctccaactttgagagcttccagacccacctgaagctgcacctggagctgctgctgcggaagcaagcgtgcccccagtgcaaagaggactttgactcccaggagtccctcctgcagcacctgacagtgcattacatgaccacgtcgacccactatgtgtgcgagagctgcgacaagcaattttcctcggtggatgacctgcagaagcacctgctggacatgcacacctttgtgttgtaccactgcaccctgtgtcaggaggtcttcgactccaaggtgtccatccaggtgcacctggcggtgaagcacagcaatgagaagaagatgtaccgctgcacggcctgcaactgggacttccgcaaggaggctgacctgcaggtgcacgtcaaacacagccacctgggcaacccggccaaggctcacaagtgcatcttctgtggggagaccttcagcaccgaggtggagctgcagtgccacatcaccacacacagcaagaagtataactgtaagttctgcagcaaggccttccacgccatcatcctgctggagaagcacctgcgggagaagcactgtgtgtttgatgctgcgaccgagaacggcacggccaatggggtacccccaatggccaccaagaaagctgagcctgctgacctgcagggcatgctgcttaagaaccctgaggcacctaacagccatgaggccagcgaggatgacgtggacgcgtcggagcccatgtacggctgtgacatctgtggggcggcctacaccatggaggtgctgctgcagaatcaccggctgcgggaccacaatatccggccgggcgaggatgatggctcacgcaagaaggctgagtttatcaagggcagtcacaagtgcaacgtttgttcacggactttcttctcggagaacgggctacgggagcacctgcagacgcaccggggccctgccaagcactacatgtgtcccatctgtggtgagcgcttcccttcgctgctgacgctcaccgaacacaaggtgacccacagcaagagcctggacacgggcacctgtcgcatctgcaagatgcccctgcagagcgaggaggagtttattgagcactgccagatgcaccctgacctgcgcaactcactcacgggcttccgctgtgtggtctgcatgcagacagtcacttccacgcttgagctcaagatccatggcaccttccacatgcagaagctggcgggcagctcagcggcgtcctcccccaatggccaggggctgcagaagctctacaagtgcgccctgtgcctcaaggagttccgcagcaagcaggacctggtgaagcttgacgtcaatgggctgccctacggcctctgcgccggctgcatggcccgcagcgccaacggacaggtgggtggcctggccccgcccgagcccgccgaccggccctgtgccggcctccgttgccccgagtgcagtgtcaagtttgagagtgccgaagacctggagagccacatgcaggtggaccaccgtgacctcacgccggagaccagtgggccccggaaaggcacccagacatcgccagtgccccggaaaaagacataccagtgcatcaagtgccagatgaccttcgagaacgagagagagatccaaatccacgttgccaaccacatgattgaggaaggcatcaaccacgagtgtaagctgtgcaaccagatgttcgactccccggccaagctcctctgtcacctcattgagcacagcttcgagggcatgggcggcaccttcaaatgccccgtgtgtttcacagtcttcgtccaggccaacaagttgcagcagcacatctttgccgtgcacgggcaggaggacaagatctacgactgctcacagtgccctcagaagttcttcttccagaccgagctgcagaaccacacgatgagccagcacgcacagtgagggatcgctcaacaggacacctctccgcagaaggcttgccggagacgccgtggggagggccatttgaacattacatccaatcaaagtgtcatttgcaacccagatgtaaaactctaatgatttggccatgaggcgctgctattataagcagctggaaatgaatattaatggcagagattaaaagtattccatgctcagtattttttattgtcctgctacagctagtgtgcttttagactttccgccgcagactacatttctagagttagagaaacctgctttttaaggctattgtcctttgttccttcatgtattatattgatagtttttaaaaaagaattagtgtgattttttttctttgcttcttttttttctttcttgtttttcttcccccccaccccccacccccttcggttaactactttttaattgcaattctaggtaattgtgcatcgtgatgtgattgcttggctattgtctgaatatttccttttaattttttaattaaagactaatgctttgattggatttgccagttcaccggacagtgattaaaactatgtaatgaatataatcggtttcagtgcaactggatggtctgcttttaaatgtgacttaatctgactgcagtaactagtacagttcaataaagggaatccatgcgattagcatccggctgcctggttctctcctccccagcctagggccgcgtggggggctgtcagctcctgtaaggtgtgttcccctacaagttcctgtgggcttgcacacgcccttggggacctgcacacaatagaccctgctccccttggaaaagaatcgtagtaacctaatgcatgcagactggacaggctggcagtggccacaggagtcaaagcagaagaccccttaatgatggaataccctgatcttcccactcttggatggggaaacagaggcccaagggtaacgtgcagctttcccaaggccacgcagcaggttggtcaccatgctgattgtgaagtcttcttggctttcccttcagggttggctttcccctttgttggatacaggcaggcaagtgggtagcccttcccttgccaggactccaggtggcacttgggttctgaggcacggagatgtgtgactggggactgcagagcagagccaggtaggagccgcaggttcccagtcatagagatcagtaggatgtgagagcattgagactggtggcgggggccaggtctggagtgaggcaggcaggggcctggggtacattatttcagggggcactcgctctcagggcccccctacacctgcaagtgctgggaatgggtgtcctcttgcattttacactctaggcaccttgcttatttcacctactcctggccctgctggcctcccagggcccacccagcagccttggtctccaggcctcctccatgttacctcccacacctccatcatgctggtgctcagctgacttgccaatcagaggccagaacttgcacggggaaacccttccttgctaacttttcacaaggggcaaggaaattggttattaccctctgcagagcggaaatgaaacaggcagacagattgcacctaattataatgtaatactaagtcacgggtgtggaatttggagcaattatacccatcatcttctagaagactcccatatcaaggggcttctggtgacctataagagttcccctttctttctgtcacctcatgtaatgttctcacgcgggtggggctttcagtttttcaaaaggcatcttacatatgtgaatcatagagcagaccctgccagtagtgggctgttgcctcctggaaactgaaggctgtgaatgccaattttcagcctcctggagacctggcagttttgggggaagaccccagggtagacaccagtgttcctctaagtgtgcccacccgtggactggggcttggggcctggggctggggctatgtctgagtgaggctgccacacatccacagccaggcctaccttttgggcagtgctgggactgtcgatgggaccagtatgtcccggggcctgccacatctccgtctcagggccctctccagctctggatttatcccaaaccccatggagcccaggtgagccctcagtaactaccaatagaagattcgatttgacggttggtggcgtagggctaaattagtcactgcccccattaaaaatacagcggggggtttaagagcttttcacgccatgtgggaatcagcagcgaagccggctgatgccttgggtaaggagagaggcggcctaggggaccgtgaggtaatgaggtttatggcggtgacaaggcagccagggaaccccaccgactcccccctcaccccggccgcattgttctccggctggctctgtccctgctgctacggctgagagcccctcgtgactttgtgtggggagggggctggcagtggggaccctgaggcccttcctgggactggcattctttaccatcaggtggtattagggttggggagcagtgtagggttataaacctgtgcctcggagaactcactaaccccttccagaggaaaggtctggagctgggatgagacacttgcctttcaactgtgaggggccttagagggtctctgggaggcttgtatgaagtgatgcctgacaaagggctgcacacagagacctgtaagcagcatggtcatcaatgatggtgccaggcatcctgcaggagggcaccttttcagccaggagggcgcgatggaatcagcctctcatttggatttggctttggggagtgggcgaggtgactgaaagcctaaggttcattgctgctgtatttagatgtacaaattgtcagtttctagcggctctctgggcagaggaattttgcccaggctgggaaatggaccaggacccttgggccacaggcccctgtcatggaacacctgcccagagtgcccagaagcaggcaggtaagggtttcagtctcagtggagaaactgtcatgggagaaatcttctcgagttccccagccttaaagaacgctccttttaaattcacagttgtgtaatattgaacttttcacctgtttttcttccctcctaaggtgtgtgttcctagggatggaacctgtacctataaatattcagtaaataggaccaaaactcaaatccatcccttcctctactcatccattcagcaagtatttactgagctgcccccaggtgccaggcactgcacagggcactggggataaggagatgaccagcagatgtggtccctggcctcatggaggccacagtggcacaggcaagcatgccagtaaatgcatagccacacctggtcatgagtgccgtgatggcaaagccagaagctgccagggattaatggagggacccgtgtatgagacacaggggtgcattaaggaaggccttgctgaggcaggggcttgagacctgaagaaataagggaggtgggcagtccaagagcagtgggaagagaacactgcaaatgcagaagccgtgagctggaaacgagccagaagtacccttagagagctgtattcctatggagtttcaattctaggtggcttaaaacaatcccagagaagttcagaatcttgtccaagatcataccattcaggatagacttgcgactataacttgggtgcctcaccttccagcctggggtgtctgactccattgttaattttattataacaatcatgatgacaacgatgaataaagtgaaattgtactgtacaggaaa

SEQ ID NO: 152 - DNA, 7659 bp, Homo sapiens
  source 1..7659: mol_type = genomic DNA
tttcctgtacagtacaatttcactttattcatcgttgtcatcatgattgttataataaaattaacaatggagtcagacaccccaggctggaaggtgaggcacccaagttatagtcgcaagtctatcctgaatggtatgatcttggacaagattctgaacttctctgggattgttttaagccacctagaattgaaactccataggaatacagctctctaagggtacttctggctcgtttccagctcacggcttctgcatttgcagtgttctcttcccactgctcttggactgcccacctcccttatttcttcaggtctcaagcccctgcctcagcaaggccttccttaatgcacccctgtgtctcatacacgggtccctccattaatccctggcagcttctggctttgccatcacggcactcatgaccaggtgtggctatgcatttactggcatgcttgcctgtgccactgtggcctccatgaggccagggaccacatctgctggtcatctccttatccccagtgccctgtgcagtgcctggcacctgggggcagctcagtaaatacttgctgaatggatgagtagaggaagggatggatttgagttttggtcctatttactgaatatttataggtacaggttccatccctaggaacacacaccttaggagggaagaaaaacaggtgaaaagttcaatattacacaactgtgaatttaaaaggagcgttctttaaggctggggaactcgagaagatttctcccatgacagtttctccactgagactgaaacccttacctgcctgcttctgggcactctgggcaggtgttccatgacaggggcctgtggcccaagggtcctggtccatttcccagcctgggcaaaattcctctgcccagagagccgctagaaactgacaatttgtacatctaaatacagcagcaatgaaccttaggctttcagtcacctcgcccactccccaaagccaaatccaaatgagaggctgattccatcgcgccctcctggctgaaaaggtgccctcctgcaggatgcctggcaccatcattgatgaccatgctgcttacaggtctctgtgtgcagccctttgtcaggcatcacttcatacaagcctcccagagaccctctaaggcccctcacagttgaaaggcaagtgtctcatcccagctccagacctttcctctggaaggggttagtgagttctccgaggcacaggtttataaccctacactgctccccaaccctaataccacctgatggtaaagaatgccagtcccaggaagggcctcagggtccccactgccagccccctccccacacaaagtcacgaggggctctcagccgtagcagcagggacagagccagccggagaacaatgcggccggggtgaggggggagtcggtggggttccctggctgccttgtcaccgccataaacctcattacctcacggtcccctaggccgcctctctccttacccaaggcatcagccggcttcgctgctgattcccacatggcgtgaaaagctcttaaaccccccgctgtatttttaatgggggcagtgactaatttagccctacgccaccaaccgtcaaatcgaatcttctattggtagttactgagggctcacctgggctccatggggtttgggataaatccagagctggagagggccctgagacggagatgtggcaggccccgggacatactggtcccatcgacagtcccagcactgcccaaaaggtaggcctggctgtggatgtgtggcagcctcactcagacatagccccagccccaggccccaagccccagtccacgggtgggcacacttagaggaacactggtgtctaccctggggtcttcccccaaaactgccaggtctccaggaggctgaaaattggcattcacagccttcagtttccaggaggcaacagcccactactggcagggtctgctctatgattcacatatgtaagatgccttttgaaaaactgaaagccccacccgcgtgagaacattacatgaggtgacagaaagaaaggggaactcttataggtcaccagaagccccttgatatgggagtcttctagaagatgatgggtataattgctccaaattccacacccgtgacttagtattacattataattaggtgcaatctgtctgcctgtttcatttccgctctgcagagggtaataaccaatttccttgccccttgtgaaaagttagcaaggaagggtttccccgtgcaagttctggcctctgattggcaagtcagctgagcaccagcatgatggaggtgtgggaggtaacatggaggaggcctggagaccaaggctgctgggtgggccctgggaggccagcagggccaggagtaggtgaaataagcaaggtgcctagagtgtaaaatgcaagaggacacccattcccagcacttgcaggtgtaggggggccctgagagcgagtgccccctgaaataatgtaccccaggcccctgcctgcctcactccagacctggcccccgccaccagtctcaatgctctcacatcctactgatctctatgactgggaacctgcggctcctacctggctctgctctgcagtccccagtcacacatctccgtgcctcagaacccaagtgccacctggagtcctggcaagggaagggctacccacttgcctgcctgtatccaacaaaggggaaagccaaccctgaagggaaagccaagaagacttcacaatcagcatggtgaccaacctgctgcgtggccttgggaaagctgcacgttacccttgggcctctgtttccccatccaagagtgggaagatcagggtattccatcattaaggggtcttctgctttgactcctgtggccactgccagcctgtccagtctgcatgcattaggttactacgattcttttccaaggggagcagggtctattgtgtgcaggtccccaagggcgtgtgcaagcccacaggaacttgtaggggaacacaccttacaggagctgacagccccccacgcggccctaggctggggaggagagaaccaggcagccggatgctaatcgcatggattccctttattgaactgtactagttactgcagtcagattaagtcacatttaaaagcagaccatccagttgcactgaaaccgattatattcattacatagttttaatcactgtccggtgaactggcaaatccaatcaaagcattagtctttaattaaaaaattaaaaggaaatattcagacaatagccaagcaatcacatcacgatgcacaattacctagaattgcaattaaaaagtagttaaccgaagggggtggggggtgggggggaagaaaaacaagaaagaaaaaaaagaagcaaagaaaaaaaatcacactaattcttttttaaaaactatcaatataatacatgaaggaacaaaggacaatagccttaaaaagcaggtttctctaactctagaaatgtagtctgcggcggaaagtctaaaagcacactagctgtagcaggacaataaaaaatactgagcatggaatacttttaatctctgccattaatattcatttccagctgcttataatagcagcgcctcatggccaaatcattagagttttacatctgggttgcaaatgacactttgattggatgtaatgttcaaatggccctccccacggcgtctccggcaagccttctgcggagaggtgtcctgttgagcgatccctcactgtgcgtgctggctcatcgtgtggttctgcagctcggtctggaagaagaacttctgagggcactgtgagcagtcgtagatcttgtcctcctgcccgtgcacggcaaagatgtgctgctgcaacttgttggcctggacgaagactgtgaaacacacggggcatttgaaggtgccgcccatgccctcgaagctgtgctcaatgaggtgacagaggagcttggccggggagtcgaacatctggttgcacagcttacactcgtggttgatgccttcctcaatcatgtggttggcaacgtggatttggatctctctctcgttctcgaaggtcatctggcacttgatgcactggtatgtctttttccggggcactggcgatgtctgggtgcctttccggggcccactggtctccggcgtgaggtcacggtggtccacctgcatgtggctctccaggtcttcggcactctcaaacttgacactgcactcggggcaacggaggccggcacagggccggtcggcgggctcgggcggggccaggccacccacctgtccgttggcgctgcgggccatgcagccggcgcagaggccgtagggcagcccattgacgtcaagcttcaccaggtcctgcttgctgcggaactccttgaggcacagggcgcacttgtagagcttctgcagcccctggccattgggggaggacgccgctgagctgcccgccagcttctgcatgtggaaggtgccatggatcttgagctcaagcgtggaagtgactgtctgcatgcagaccacacagcggaagcccgtgagtgagttgcgcaggtcagggtgcatctggcagtgctcaataaactcctcctcgctctgcaggggcatcttgcagatgcgacaggtgcccgtgtccaggctcttgctgtgggtcaccttgtgttcggtgagcgtcagcagcgaagggaagcgctcaccacagatgggacacatgtagtgcttggcagggccccggtgcgtctgcaggtgctcccgtagcccgttctccgagaagaaagtccgtgaacaaacgttgcacttgtgactgcccttgataaactcagccttcttgcgtgagccatcatcctcgcccggccggatattgtggtcccgcagccggtgattctgcagcagcacctccatggtgtaggccgccccacagatgtcacagccgtacatgggctccgacgcgtccacgtcatcctcgctggcctcatggctgttaggtgcctcagggttcttaagcagcatgccctgcaggtcagcaggctcagctttcttggtggccattgggggtaccccattggccgtgccgttctcggtcgcagcatcaaacacacagtgcttctcccgcaggtgcttctccagcaggatgatggcgtggaaggccttgctgcagaacttacagttatacttcttgctgtgtgtggtgatgtggcactgcagctccacctcggtgctgaaggtctccccacagaagatgcacttgtgagccttggccgggttgcccaggtggctgtgtttgacgtgcacctgcaggtcagcctccttgcggaagtcccagttgcaggccgtgcagcggtacatcttcttctcattgctgtgcttcaccgccaggtgcacctggatggacaccttggagtcgaagacctcctgacacagggtgcagtggtacaacacaaaggtgtgcatgtccagcaggtgcttctgcaggtcatccaccgaggaaaattgcttgtcgcagctctcgcacacatagtgggtcgacgtggtcatgtaatgcactgtcaggtgctgcaggagggactcctgggagtcaaagtcctctttgcactgggggcacgcttgcttccgcagcagcagctccaggtgcagcttcaggtgggtctggaagctctcaaagttggagaacttgaggtcgcattgattgcaaggatactccccattggagatggagttggcgcttgctgagagccgctgccgcttcggggaagacacctccacatcggacgagactgggctctgctcggccttggacttcttgctgtgggccagtggaatgttcttgtggttctccttgatgtgcttggtgagtttcaggatggagccaaagatgggggagttggtgcagtaggggcaggaatagacctccatgaaggactgcgtgggctgcaccaccggagactctagtttggcactgcccacactgcagtgggcctgctggatgtgctcggtgagggaggactcagtaaggaaacccatggagcactggttgcagaagaaagcattattaccgtcagaggggttggcgttggggccgcagtgggagacgcggatgtgctcctgcaggctattgatgtcggcgaacatctcggggcagtagttgcagtggaaggcagagatgttgccaaactgcatcacagggtaggcatggttcttgtgcagcttgcgaacgtgctcgttgaggttgtagagggtgggcatggagtccaggcagatctgacatgtgtggctctgctggggcttgtccgcgtggatggtcttcaggtggatctccagcacggccaggctgttaaagtcccgcttggaacaataggggcagctatagaccaccttggtccagccctgcccgtcatcccgcatcttcttctgcccccgcagcggcttcaaggtggagtccggggtggagccacgctccacagaggcgctggagtcgggtgtggcgctgctcatggaggccacgctgcccagtacagggtcgggactgacactgtggttgctggagtcgggctgccggtggctgtccaggtggcagtagacaccttccactgaggagaactgctcagggcacatggggcacttgtgtttctggttggcgtgggcttggtggatatgggcgagcagtgtgttctcgtcgacgaagacctcagggcagtgaatgcactgcaggtccgccttctcggacagctgcgggtggcgggtgagcacgtgcttctccagctcctccgtctggctgaaggtgtcctcgcagtagtcgcacatgaagtcgtccttcttggcttccttctccgacttggccagatgctccttgttctttttgtgggcctgcatgtggctctgcagcgagctggtggaggagaagccgcgcttgcacacagtgcacttgaagggcttgctggagctgtgggtcttcaggtggatcttgaggtggtcgctgcgggagaaggctgcctcgcactcgtggcagtgatacttcttgtcgcccgtatgcagcttgatgtgccggtcacggctcctcttgtgcttgaagaggcggctgcagtaggtgcacttgaacggcagcttgtcgctgtggatctgctcgtgcctcttcaagtagctcaagcggatgaaggacttgtcgcagaactggcaagggtatggcaggcccgtgcccccttcctcctcgccgaggccgaggtcacaaccatctccgatcatctgcgtgggtgacgcaacatccttgctggagggagacgaggccacccaggagagttgtgggtcgtcatcaccatctccaggacagcggtgggcccggtggtccgtcaggtctgccagagactcgaagtcctgctgacagtgatcgcaggtgtaaattgattcatcctccatgtcttcatcatcctcatttctctcctcttgacttgtcacgctgttcctgtcttccagcgcacggctggttttctgatcgcactctggctctccttctaggcctcctgctgctgtcacggaggaatcccaggccagcgagaagtctgaggcctccccctcttcaaccctcttcttatgcatccatgtctttcttcttttacagggtaaaatccatccttctccaggaagttttc

SEQ ID NO: 153 - DNA, 4916 bp, Mus musculus
  source 1..4916: mol_type = genomic DNA
ttttttttttttttttttttttttgcataactcggctcggccgagtggcctccggactccccgcgccgctgggaccgccgctgggacccggagcccccggctgccgcattgcaacaggcagggccccggcgcgccccccgggcctcccccggtcccccagcggcctgggccgtccagggctgtcccctacagggaggctgcccgggacctgcggtccgttccttacggccgccgacccggctgcaaaaaacaaagtttccgagaggcaggaggagaagggggagaagggctgcccggagcggcggggggcggtgcggggagccgaccgcggacggcgacggagcgcccggagccccggacatgtccaggcggaagcaggcgaagccgcgatcggtgaaagttgaagagggggaggcctcggacttctcgctggcctgggattcctctgtggcagcagcaggaggcctggaaggagagccagagtgtgatcggaaaaccagccgtgcgctggaagacaggaacagcgtgacaagtcaagaggagagaaatgaggacgatgaagacgtggaagatgagtcaatttacacctgcgatcactgtcagcaggacttcgagtctctggcagacctgacggaccaccgggcccaccgctgtcctggagatggtgatgacgacccacagctctcctgggtggcttcatctccctccagcaaggatgttgcgtcacctacgcagatgataggagatggttgtgacctcggcctcggcgaggaggaaggcggcaccggcctgccctacccttgccagttctgcgacaagtccttcatccgcctgagctacttgaagaggcatgaacagatccacagcgacaagctgccgttcaagtgcaccttctgcagccgcctcttcaaacacaagaggagccgagaccggcacatcaagctgcacacgggcgacaagaagtaccactgtcacgagtgcgaggcagctttctcccgcagcgaccacctcaagatccacctgaagacccacagctccagcaagccgttcaagtgcagcgtgtgcaagcgcggcttctcctccaccagctccctgcagagccacatgcaggcccacaagaagaacaaggaacacctggccaagtcggagaaggaagccaagaaggacgacttcatgtgcgactactgcgaggatacctttagccagacagaggagctggagaagcacgtgctcaccctccacccgcagctctcagagaaggcggatctacagtgcatccactgcccagaggtctttgttgatgagagcacgctgcttgcccacatccaccaagcccacgccaaccagaaacacaagtgccccatgtgccctgagcagttctcctctgtggagggtgtgtactgccacctggacagccaccggcagcccgactccagtaaccacagcgtcagccctgaccctgtgctgggcagtgtggcttccatgagcagtgctacacctgactccagcgcctctgtggagcgcgggtccacgccagactccaccttgaagccactgagggggcagaagaagatgcgggatgatgggcagagctggcccaaggtcgtctacagctgcccctattgttctaagcgggactttaccagcctggctgtgctagagattcatctgaagaccattcacgcggataaacctcagcagagtcacacgtgtcagatctgccttgactccatgcccacgctctacaacctcaatgagcatgtgcgcaagctgcacaagagccacgcctaccccgtcatgcagtttggcaacatctctgccttccactgcaactactgccccgagatgtttgctgacatcaacagcctgcaggagcacattcgagtctcgcactgtggccccaatgccaacccccctgatgggaataatgctttcttctgcaaccagtgctccatgggcttcctcaccgagtcctcgctcacagagcacatccaacaggcgcattgcagtgtggggagcaccaagctggagtctcctgttgttcagcccacacagtccttcatggaggtctactcctgcccttactgtaccaactcccctatctttggctccatcctgaagctcactaaacacattaaagagaaccacaagaacatcccgctggcacacagcaagaagtccaaggctgagcagagcccagtctcctccgacgtcgaggtgtcttccccgaaacgacagcgcctctcggggagcgccaactccatctctaatggcgagtacccctgcaatcagtgcgacctcaagttctccaacttcgagagcttccagacccacctgaagctgcacctggagctgctgcttcggaaacaggcctgcccccagtgcaaagaggacttcgactctcaggagtccctcctgcagcatctgacggtgcattacatgactacatccacccactacgtgtgcgagagctgtgacaagcagttctcctcggtggatgacctacagaagcacctgctggacatgcacacctttgtgctataccactgcacgctgtgtcaggaggtcttcgactccaaggtgtccatccaggtgcacctggccgtgaagcacagcaacgagaagaagatgtaccgctgcacagcctgcaactgggacttccgcaaggaggctgacctgcaggtgcacgtcaaacacagccacctcggcaacccggccaaggcccacaagtgcatcttctgcggcgagaccttcagcaccgaggtggagctgcagtgccacatcaccacacacagcaagaagtacaactgcaggttctgcagcaaggccttccatgccgtcatcctgctggagaagcacctgcgggagaagcactgcgtgtttgacgctgccgcggagaatggcacggccaacggggtgccccccacctccaccaagaaggcagagcccgccgacctgcagggcatgctgctcaagaatcctgaggcgccgaacagccacgaggccagtgaggatgacgtggacgcatcagagcccatgtatggctgtgacatctgcggtgcagcctacaccatggaggtgttgctgcagaaccaccgcctccgggatcacaacatccggcccggcgaggacgacggctcacgcaagaaggcagaattcataaagggcagccataagtgtaacgtgtgctctcggactttcttctcggagaacgggctccgggaacacctgcagacgcaccggggccctgccaagcactacatgtgtcccatctgtggcgagcgcttcccctcgctgctgacactcaccgagcacaaggtgacccacagcaagagtctggacacgggcacctgtcgcatctgcaaaatgccactgcagagtgaggaggagttcattgagcactgccagatgcaccccgacttacggaactccctcaccggcttccgctgtgtggtctgtatgcagactgtcacctcgacgctggaactcaagatccatggcacctttcacatgcagaagctggctggcagctcagctgcctcctcccccaatggccagggactgcagaagctctacaaatgcgccctgtgcctcaaagagttccgtagcaagcaggacctggtcaggcttgatgtcaatgggctgccctatggcctgtgtgccggctgcatggcccggagtgccaatggacaggtgggtggcctggccccacccgaacctgctgaccggccctgtgccggcctccgctgccctgaatgtaacgtgaagttcgagagtgctgaggacctggagagccacatgcaggtggaccaccgtgatcttacaccagagaccagtgggccccggaaaggtgcccagacgtcaccagtgcccaggaagaagacgtaccagtgtatcaagtgccagatgacgttcgagaacgagagagagattcagatccacgtcgccaaccacatgatcgaggaaggcattaaccatgagtgtaaactgtgcaaccagatgttcgactccccagccaagctcctctgccacctcattgagcacagcttcgagggcatgggcggtaccttcaagtgccccgtctgcttcacagtcttcgtccaggccaacaagctgcaacagcatatctttgccgtgcacgggcaggaggacaaaatctacgactgctcgcagtgcccacagaagtttttcttccagacagagttgcagaaccacacgatgagccagcacgcacagtgagggacctcgcgacaggacacctctccgcagaaggcttgccggagacgccgtggggagggccatttgaacattacatccaatcaaagtgtcatttgcaacccagatgtaaaactctaatgatttggccatgaggcgctgctattataagcagctggaaatgaatattaatggcagagattaaaagtattccatgctcagtgtttttattgtcctgctccagctagtgtgcttttagagttttcgccgcagactacatttctagtgttagagaaacctgctttttgaggctattgtcctttgttccttcatgtattatattaatagttttttttttaaggattagtgtgattttttttttgcttcttttctatttctttcttgtttttctttctcccccccccccccttcagttaactactttttaattgcaattctaggtaattgtgcatcgtgatgtgattgcttggctattgtctgaatatttccttttaattttttaattaaagactaatgctttgattggatttgccagttcaccggacagtgattaaaactctgtaatgaatataatcggtttccgtgcaactggatggtctgcttttaaatgtgacttgatctgactgcagtaactagttcagctcaataaagggaatccatgcgatcagcaaaaaaaaaaa

SEQ ID NO: 154 - DNA, 4916 bp, Mus musculus
  source 1..4916: mol_type = genomic DNA
tttttttttttgctgatcgcatggattccctttattgagctgaactagttactgcagtcagatcaagtcacatttaaaagcagaccatccagttgcacggaaaccgattatattcattacagagttttaatcactgtccggtgaactggcaaatccaatcaaagcattagtctttaattaaaaaattaaaaggaaatattcagacaatagccaagcaatcacatcacgatgcacaattacctagaattgcaattaaaaagtagttaactgaagggggggggggggagaaagaaaaacaagaaagaaatagaaaagaagcaaaaaaaaaatcacactaatccttaaaaaaaaaactattaatataatacatgaaggaacaaaggacaatagcctcaaaaagcaggtttctctaacactagaaatgtagtctgcggcgaaaactctaaaagcacactagctggagcaggacaataaaaacactgagcatggaatacttttaatctctgccattaatattcatttccagctgcttataatagcagcgcctcatggccaaatcattagagttttacatctgggttgcaaatgacactttgattggatgtaatgttcaaatggccctccccacggcgtctccggcaagccttctgcggagaggtgtcctgtcgcgaggtccctcactgtgcgtgctggctcatcgtgtggttctgcaactctgtctggaagaaaaacttctgtgggcactgcgagcagtcgtagattttgtcctcctgcccgtgcacggcaaagatatgctgttgcagcttgttggcctggacgaagactgtgaagcagacggggcacttgaaggtaccgcccatgccctcgaagctgtgctcaatgaggtggcagaggagcttggctggggagtcgaacatctggttgcacagtttacactcatggttaatgccttcctcgatcatgtggttggcgacgtggatctgaatctctctctcgttctcgaacgtcatctggcacttgatacactggtacgtcttcttcctgggcactggtgacgtctgggcacctttccggggcccactggtctctggtgtaagatcacggtggtccacctgcatgtggctctccaggtcctcagcactctcgaacttcacgttacattcagggcagcggaggccggcacagggccggtcagcaggttcgggtggggccaggccacccacctgtccattggcactccgggccatgcagccggcacacaggccatagggcagcccattgacatcaagcctgaccaggtcctgcttgctacggaactctttgaggcacagggcgcatttgtagagcttctgcagtccctggccattgggggaggaggcagctgagctgccagccagcttctgcatgtgaaaggtgccatggatcttgagttccagcgtcgaggtgacagtctgcatacagaccacacagcggaagccggtgagggagttccgtaagtcggggtgcatctggcagtgctcaatgaactcctcctcactctgcagtggcattttgcagatgcgacaggtgcccgtgtccagactcttgctgtgggtcaccttgtgctcggtgagtgtcagcagcgaggggaagcgctcgccacagatgggacacatgtagtgcttggcagggccccggtgcgtctgcaggtgttcccggagcccgttctccgagaagaaagtccgagagcacacgttacacttatggctgccctttatgaattctgccttcttgcgtgagccgtcgtcctcgccgggccggatgttgtgatcccggaggcggtggttctgcagcaacacctccatggtgtaggctgcaccgcagatgtcacagccatacatgggctctgatgcgtccacgtcatcctcactggcctcgtggctgttcggcgcctcaggattcttgagcagcatgccctgcaggtcggcgggctctgccttcttggtggaggtggggggcaccccgttggccgtgccattctccgcggcagcgtcaaacacgcagtgcttctcccgcaggtgcttctccagcaggatgacggcatggaaggccttgctgcagaacctgcagttgtacttcttgctgtgtgtggtgatgtggcactgcagctccacctcggtgctgaaggtctcgccgcagaagatgcacttgtgggccttggccgggttgccgaggtggctgtgtttgacgtgcacctgcaggtcagcctccttgcggaagtcccagttgcaggctgtgcagcggtacatcttcttctcgttgctgtgcttcacggccaggtgcacctggatggacaccttggagtcgaagacctcctgacacagcgtgcagtggtatagcacaaaggtgtgcatgtccagcaggtgcttctgtaggtcatccaccgaggagaactgcttgtcacagctctcgcacacgtagtgggtggatgtagtcatgtaatgcaccgtcagatgctgcaggagggactcctgagagtcgaagtcctctttgcactgggggcaggcctgtttccgaagcagcagctccaggtgcagcttcaggtgggtctggaagctctcgaagttggagaacttgaggtcgcactgattgcaggggtactcgccattagagatggagttggcgctccccgagaggcgctgtcgtttcggggaagacacctcgacgtcggaggagactgggctctgctcagccttggacttcttgctgtgtgccagcgggatgttcttgtggttctctttaatgtgtttagtgagcttcaggatggagccaaagataggggagttggtacagtaagggcaggagtagacctccatgaaggactgtgtgggctgaacaacaggagactccagcttggtgctccccacactgcaatgcgcctgttggatgtgctctgtgagcgaggactcggtgaggaagcccatggagcactggttgcagaagaaagcattattcccatcaggggggttggcattggggccacagtgcgagactcgaatgtgctcctgcaggctgttgatgtcagcaaacatctcggggcagtagttgcagtggaaggcagagatgttgccaaactgcatgacggggtaggcgtggctcttgtgcagcttgcgcacatgctcattgaggttgtagagcgtgggcatggagtcaaggcagatctgacacgtgtgactctgctgaggtttatccgcgtgaatggtcttcagatgaatctctagcacagccaggctggtaaagtcccgcttagaacaataggggcagctgtagacgaccttgggccagctctgcccatcatcccgcatcttcttctgccccctcagtggcttcaaggtggagtctggcgtggacccgcgctccacagaggcgctggagtcaggtgtagcactgctcatggaagccacactgcccagcacagggtcagggctgacgctgtggttactggagtcgggctgccggtggctgtccaggtggcagtacacaccctccacagaggagaactgctcagggcacatggggcacttgtgtttctggttggcgtgggcttggtggatgtgggcaagcagcgtgctctcatcaacaaagacctctgggcagtggatgcactgtagatccgccttctctgagagctgcgggtggagggtgagcacgtgcttctccagctcctctgtctggctaaaggtatcctcgcagtagtcgcacatgaagtcgtccttcttggcttccttctccgacttggccaggtgttccttgttcttcttgtgggcctgcatgtggctctgcagggagctggtggaggagaagccgcgcttgcacacgctgcacttgaacggcttgctggagctgtgggtcttcaggtggatcttgaggtggtcgctgcgggagaaagctgcctcgcactcgtgacagtggtacttcttgtcgcccgtgtgcagcttgatgtgccggtctcggctcctcttgtgtttgaagaggcggctgcagaaggtgcacttgaacggcagcttgtcgctgtggatctgttcatgcctcttcaagtagctcaggcggatgaaggacttgtcgcagaactggcaagggtagggcaggccggtgccgccttcctcctcgccgaggccgaggtcacaaccatctcctatcatctgcgtaggtgacgcaacatccttgctggagggagatgaagccacccaggagagctgtgggtcgtcatcaccatctccaggacagcggtgggcccggtggtccgtcaggtctgccagagactcgaagtcctgctgacagtgatcgcaggtgtaaattgactcatcttccacgtcttcatcgtcctcatttctctcctcttgacttgtcacgctgttcctgtcttccagcgcacggctggttttccgatcacactctggctctccttccaggcctcctgctgctgccacagaggaatcccaggccagcgagaagtccgaggcctccccctcttcaactttcaccgatcgcggcttcgcctgcttccgcctggacatgtccggggctccgggcgctccgtcgccgtccgcggtcggctccccgcaccgccccccgccgctccgggcagcccttctcccccttctcctcctgcctctcggaaactttgttttttgcagccgggtcggcggccgtaaggaacggaccgcaggtcccgggcagcctccctgtaggggacagccctggacggcccaggccgctgggggaccgggggaggcccggggggcgcgccggggccctgcctgttgcaatgcggcagccgggggctccgggtcccagcggcggtcccagcggcgcggggagtccggaggccactcggccgagccgagttatgcaaaaaaaaaaaaaaaaaaaaaaaa

SEQ ID NO: 155 - DNA, 4901 bp, Rattus norvegicus
  source 1..4901: mol_type = genomic DNA
ttttttttttttttttttttttgcataactcggctcggccgagtggcctccggactccccgcgccgctgggaccgccgctgggacccggagcccccggctgccgcattgcaacaggcagggccccggcgcgccccccgggcctccccccatcccctagcggcctgggctggctagggctgccccccgcagggaggctgcccgggacctgcggtccgttccttacggccgccgacccggcggcaaaaaacaaagtttccgagaggcaggcggaggagaagggggagaagggctgcccggagcggcggggggcggtacggggagccggccgcggacggcgacggagcgcccggagccccggacatgtccaggcggaagcaggcgaagccgcgatcggtgaaagttgaagagggggaggcctcggacttctcgctggcctgggattcctctgtggcagcagcgggaggcctagaaggagagtcagagtgtgatcggaaaaccagccgtgcgctggaagacaggaacagcgtgacaagtcaagaggagagaaacgaggacgatgaagatgtggaagatgagtcaatttacacctgcgatcactgtcagcaggacttcgagtctctggcagacctgacggaccaccgggcccaccgctgtcctggagatggtgatgacgacccacagctctcctgggtggcttcatctccctccagcaaggatgttgcgtcacccacgcagatgatcggcgatggttgtgaccttggcctcggcgaggaggaaggcggcaccggcctgccgtacccttgccagttctgcgacaagtccttcatccgcctgagctacttgaagaggcatgaacagatccacagcgacaagctgccgttcaagtgcaccttctgcagccgcctcttcaaacacaagaggagccgggaccggcacatcaagctgcacacaggcgacaagaagtaccactgccacgagtgcgaggcggctttctcccgcagcgaccacctcaagatccacctgaagacccacagctccagcaagccgttcaagtgcagcgtgtgcaaacgcgggttctcctccaccagctccctgcagagccacatgcaggcccacaagaagaataaggaacacctggctaagtcagagaaggaagccaagaaggacgacttcatgtgtgactactgcgaggacacctttagccagacagaagagctggagaagcatgtgcttaccctccacccgcagctctcagagaaggcggacctccagtgtatccactgccccgaggtctttgtcgacgagagcacgctgctggcccacatccaccaagctcacgccaaccagaaacacaagtgccccatgtgccctgagcagttctcctccgtggagggtgtgtactgccacctggacagccaccggcagcctgattccagcaatcacagtgtcagccccgaccccgtgctgggcagtgtggcttccatgagcagtgctacacctgactcgagcgcctctgtggagcgcgggtccacgccagactccaccttgaagccgctgagggggcagaagaagatgcgggatgacgggcagagctggtccaaggttgtctacagctgcccctactgttctaagcgggactttaccagcctggctgtgctagagattcatctgaagaccattcacgcggacaaacctcagcagagtcacacgtgtcagatttgcctggactccatgcccacgctctacaacctcaacgagcatgtgcgcaagctgcacaagagccacgcttaccccgtcatgcaattcggcaacatctccgccttccactgcaactactgccccgagatgttcgcggacatcaacagcctgcaggagcacatccgagtctcgcactgtggccccaatgccaacccccccgacgggaacaatgctttcttctgtaaccagtgttctatgggctttctcactgaatcctccctcacagagcacatccaacaggcacactgcagtgtggggagcaccaagctggagtctcccgttatccagcccacacagtccttcatggaggtctactcctgcccttactgtaccaactcccctatctttggctccatcctgaagctcactaagcacatcaaagagaaccacaagaacatcccgttggcacacagcaagaagtccaaggcggagcagagtccggtctcctctgacgtcgaggtgtcttccccgaaacgacagcgcctctcggggagtgccaactccatctctaacggcgagtacccctgcaatcagtgcgacctcaagttctccaacttcgagagcttccagacccacttgaagctgcacctggagctgctgctccggaagcaggcctgcccccagtgcaaagaggacttcgactctcaggagtccctcctgcagcatctgaccgtgcactacatgaccacgtccacccactacgtctgcgagagctgtgacaagcagttctcctcagtggacgacctgcagaagcacctgctggacatgcacacctttgtgctataccactgcaccctgtgtcaggaggtcttcgactctaaggtgtccatccaggtgcacctggccgtgaagcacagcaacgagaagaagatgtaccgttgcaccgcctgcaactgggacttccgcaaggaggctgacctgcaggtgcacgtcaagcacagtcacctcggcaacccggccaaggcccacaagtgcatcttctgtggtgagaccttcagcaccgaggtggagctccagtgccacatcaccacgcacagcaagaagtacaattgcaggttctgcagcaaagccttccacgccgtcctcctgctggagaagcaccttcgggagaagcattgtgtgtttgacccagctgcagagaatggcacggccaacggggtgccccccacctccaccaagaaggcagagcccgccgacctgcagggcatgctgctcaagaaccctgaggcaccgaacagccacgaggccagtgaggacgatgtggatgcatcagagcccatgtacggctgtgacatctgtggtgcagcctacaccatggaggtgctgctgcagaaccaccgactccgggatcataacatccggcccggagaggacgatggctcacgcaagaaggcagagttcataaagggcagccacaagtgtaacgtgtgctctcggactttcttctcggagaacgggctccgggaacacctgcagacgcaccggggccctgccaagcactacatgtgtcccatctgtggcgagcgcttcccctcgctgctgacgctcactgagcacaaggtgacccacagcaagagtctggacacaggcacctgtcgcatctgcaaaatgcccctgcagagtgaggaggagtttatcgagcactgccagatgcaccccgacttgcggaactccctcactggtttccgctgtgtggtctgtatgcagactgtcacctcaaccctggagctcaagatccatggcacctttcacatgcagaagctggctggcagctcagctgcttcctcccccaatggccaggggctgcagaagctctacaagtgcgccctgtgcctcaaagagttccgtagcaagcaggacctggtcaggcttgacgtcaatgggctgccctatggcctatgtgccggctgcatggcccgtagtgccaatggacaggtgggtggcctggccccacccgaacctgccgaccggccctgcgctggcctccgctgccctgaatgtaacgtgaagtttgagagtgctgaggacctggagagccacatgcaggtggaccaccgtgatcttaccccagagaccagtgggccccggaaaggtgcccagacgtcaccagtgccccggaagaagacgtaccagtgcatcaagtgccagatgaccttcgagaacgagagagagatccagatccacgtcgccaaccacatgatcgaggaaggcatcaaccatgagtgtaagctgtgcaaccagatgttcgactccccagccaagctcctttgtcacctcatcgaacacagcttcgagggcatgggtggtactttcaagtgccccgtgtgcttcacagtcttcgtccaggccaacaagctgcaacagcacatcttcgccgtgcacgggcaggaggacaaaatctacgactgctcgcagtgcccacagaagtttttcttccagacagagttgcagaaccacacgatgagccagcacgcacagtgagggacctcgcgacaggacacctctccgcagaaggcttgccggagacgccgtggggagggccatttgaacattacatccaatcaaagtgtcatttgcaacccagatgtaaaactctaatgatttggccatgaggcgctgctattataagcagctggaaatgaatattaatggcagagattaaaagtattccatgctcagtgttttttattgtcctgctacagctagtgtgcttttagagttttcgccgcagactacatttctagtgttagagaaacctgcttttttgaggctattgtcctttgttccttcatgtattatattgatagttttttttaaaggattagtgtgattttttttgcttcttttctatttctttctttcttgtttttctttctcccccttcagttaactactttttaattgaaattctaggtaattgtgcatcgtgatgtgattgcttggctattgtctgaatatttccttttaattttttaattaaagactaatgctttgattggatttgccagttcaccggacagtgattaaaactctgtaatgaatataatcggtttccgtgcaactggatggtctgcttttaaatgtgacttgatctgactgcagtaactagttcagctcaataaagggaatccatgcgttcagc

SEQ ID NO: 156 - DNA, 4901 bp, Rattus norvegicus
  source 1..4901: mol_type = genomic DNA
gctgaacgcatggattccctttattgagctgaactagttactgcagtcagatcaagtcacatttaaaagcagaccatccagttgcacggaaaccgattatattcattacagagttttaatcactgtccggtgaactggcaaatccaatcaaagcattagtctttaattaaaaaattaaaaggaaatattcagacaatagccaagcaatcacatcacgatgcacaattacctagaatttcaattaaaaagtagttaactgaagggggagaaagaaaaacaagaaagaaagaaatagaaaagaagcaaaaaaaatcacactaatcctttaaaaaaaactatcaatataatacatgaaggaacaaaggacaatagcctcaaaaaagcaggtttctctaacactagaaatgtagtctgcggcgaaaactctaaaagcacactagctgtagcaggacaataaaaaacactgagcatggaatacttttaatctctgccattaatattcatttccagctgcttataatagcagcgcctcatggccaaatcattagagttttacatctgggttgcaaatgacactttgattggatgtaatgttcaaatggccctccccacggcgtctccggcaagccttctgcggagaggtgtcctgtcgcgaggtccctcactgtgcgtgctggctcatcgtgtggttctgcaactctgtctggaagaaaaacttctgtgggcactgcgagcagtcgtagattttgtcctcctgcccgtgcacggcgaagatgtgctgttgcagcttgttggcctggacgaagactgtgaagcacacggggcacttgaaagtaccacccatgccctcgaagctgtgttcgatgaggtgacaaaggagcttggctggggagtcgaacatctggttgcacagcttacactcatggttgatgccttcctcgatcatgtggttggcgacgtggatctggatctctctctcgttctcgaaggtcatctggcacttgatgcactggtacgtcttcttccggggcactggtgacgtctgggcacctttccggggcccactggtctctggggtaagatcacggtggtccacctgcatgtggctctccaggtcctcagcactctcaaacttcacgttacattcagggcagcggaggccagcgcagggccggtcggcaggttcgggtggggccaggccacccacctgtccattggcactacgggccatgcagccggcacataggccatagggcagcccattgacgtcaagcctgaccaggtcctgcttgctacggaactctttgaggcacagggcgcacttgtagagcttctgcagcccctggccattgggggaggaagcagctgagctgccagccagcttctgcatgtgaaaggtgccatggatcttgagctccagggttgaggtgacagtctgcatacagaccacacagcggaaaccagtgagggagttccgcaagtcggggtgcatctggcagtgctcgataaactcctcctcactctgcaggggcattttgcagatgcgacaggtgcctgtgtccagactcttgctgtgggtcaccttgtgctcagtgagcgtcagcagcgaggggaagcgctcgccacagatgggacacatgtagtgcttggcagggccccggtgcgtctgcaggtgttcccggagcccgttctccgagaagaaagtccgagagcacacgttacacttgtggctgccctttatgaactctgccttcttgcgtgagccatcgtcctctccgggccggatgttatgatcccggagtcggtggttctgcagcagcacctccatggtgtaggctgcaccacagatgtcacagccgtacatgggctctgatgcatccacatcgtcctcactggcctcgtggctgttcggtgcctcagggttcttgagcagcatgccctgcaggtcggcgggctctgccttcttggtggaggtggggggcaccccgttggccgtgccattctctgcagctgggtcaaacacacaatgcttctcccgaaggtgcttctccagcaggaggacggcgtggaaggctttgctgcagaacctgcaattgtacttcttgctgtgcgtggtgatgtggcactggagctccacctcggtgctgaaggtctcaccacagaagatgcacttgtgggccttggccgggttgccgaggtgactgtgcttgacgtgcacctgcaggtcagcctccttgcggaagtcccagttgcaggcggtgcaacggtacatcttcttctcgttgctgtgcttcacggccaggtgcacctggatggacaccttagagtcgaagacctcctgacacagggtgcagtggtatagcacaaaggtgtgcatgtccagcaggtgcttctgcaggtcgtccactgaggagaactgcttgtcacagctctcgcagacgtagtgggtggacgtggtcatgtagtgcacggtcagatgctgcaggagggactcctgagagtcgaagtcctctttgcactgggggcaggcctgcttccggagcagcagctccaggtgcagcttcaagtgggtctggaagctctcgaagttggagaacttgaggtcgcactgattgcaggggtactcgccgttagagatggagttggcactccccgagaggcgctgtcgtttcggggaagacacctcgacgtcagaggagaccggactctgctccgccttggacttcttgctgtgtgccaacgggatgttcttgtggttctctttgatgtgcttagtgagcttcaggatggagccaaagataggggagttggtacagtaagggcaggagtagacctccatgaaggactgtgtgggctggataacgggagactccagcttggtgctccccacactgcagtgtgcctgttggatgtgctctgtgagggaggattcagtgagaaagcccatagaacactggttacagaagaaagcattgttcccgtcgggggggttggcattggggccacagtgcgagactcggatgtgctcctgcaggctgttgatgtccgcgaacatctcggggcagtagttgcagtggaaggcggagatgttgccgaattgcatgacggggtaagcgtggctcttgtgcagcttgcgcacatgctcgttgaggttgtagagcgtgggcatggagtccaggcaaatctgacacgtgtgactctgctgaggtttgtccgcgtgaatggtcttcagatgaatctctagcacagccaggctggtaaagtcccgcttagaacagtaggggcagctgtagacaaccttggaccagctctgcccgtcatcccgcatcttcttctgccccctcagcggcttcaaggtggagtctggcgtggacccgcgctccacagaggcgctcgagtcaggtgtagcactgctcatggaagccacactgcccagcacggggtcggggctgacactgtgattgctggaatcaggctgccggtggctgtccaggtggcagtacacaccctccacggaggagaactgctcagggcacatggggcacttgtgtttctggttggcgtgagcttggtggatgtgggccagcagcgtgctctcgtcgacaaagacctcggggcagtggatacactggaggtccgccttctctgagagctgcgggtggagggtaagcacatgcttctccagctcttctgtctggctaaaggtgtcctcgcagtagtcacacatgaagtcgtccttcttggcttccttctctgacttagccaggtgttccttattcttcttgtgggcctgcatgtggctctgcagggagctggtggaggagaacccgcgtttgcacacgctgcacttgaacggcttgctggagctgtgggtcttcaggtggatcttgaggtggtcgctgcgggagaaagccgcctcgcactcgtggcagtggtacttcttgtcgcctgtgtgcagcttgatgtgccggtcccggctcctcttgtgtttgaagaggcggctgcagaaggtgcacttgaacggcagcttgtcgctgtggatctgttcatgcctcttcaagtagctcaggcggatgaaggacttgtcgcagaactggcaagggtacggcaggccggtgccgccttcctcctcgccgaggccaaggtcacaaccatcgccgatcatctgcgtgggtgacgcaacatccttgctggagggagatgaagccacccaggagagctgtgggtcgtcatcaccatctccaggacagcggtgggcccggtggtccgtcaggtctgccagagactcgaagtcctgctgacagtgatcgcaggtgtaaattgactcatcttccacatcttcatcgtcctcgtttctctcctcttgacttgtcacgctgttcctgtcttccagcgcacggctggttttccgatcacactctgactctccttctaggcctcccgctgctgccacagaggaatcccaggccagcgagaagtccgaggcctccccctcttcaactttcaccgatcgcggcttcgcctgcttccgcctggacatgtccggggctccgggcgctccgtcgccgtccgcggccggctccccgtaccgccccccgccgctccgggcagcccttctcccccttctcctccgcctgcctctcggaaactttgttttttgccgccgggtcggcggccgtaaggaacggaccgcaggtcccgggcagcctccctgcggggggcagccctagccagcccaggccgctaggggatggggggaggcccggggggcgcgccggggccctgcctgttgcaatgcggcagccgggggctccgggtcccagcggcggtcccagcggcgcggggagtccggaggccactcggccgagccgagttatgcaaaaaaaaaaaaaaaaaaaaaa

SEQ ID NO: 157 - DNA, 7932 bp, Macaca fascicularis
  source 1..7932: mol_type = genomic DNA
ctcggctcggccgagtggcctccggactccccgcgccgctgggaccgccgcttggaccgggagcccccgactgccgcattgcaacaggcagggccccggcgcgccccccgggcctccccccgccttcgagcggcctcggccggcccgggccgcccccccaagggaggccgccccggacctgcggtccgctccccacagccgccaaccgggctgcaaaaaaaaaagtttccaagagacaggcggaggagaagggggagaagggcggcccggagcggcggggggcggcggggggagccggctgcggagggcgacggagcgcccggagccccggacatgtccaggcggaagcaggcgaagccgcgctcggtgaaagttgaagagggggaggcctcagacttctcgctggcctgggattcctccgtgacagcagcaggaggcctagaaggagagccggagtgcgatcggaaaaccagccgtgcgctggaagacaggaacagcgtgacaagtcaagaggagagaaatgaggatgatgaagacatggaggatgaatcaatttacacctgcgatcactgtcagcaggacttcgagtctctggcagacctgacggaccaccgggcccaccgctgtcctggagatggtgatgacgacccacaactctcctgggtggcctcgtctccctccagcaaggatgttgcgtcacccacgcagatgatcggagatggttgtgacctcggcctcggtgaggaggaagggggcacaggcctgccgtacccttgccagttctgcgacaagtccttcatccgcctgagctacttgaagaggcacgagcagatccacagcgacaagctgccgttcaagtgtacctactgcagccgcctcttcaagcacaagaggagccgcgaccggcacatcaagctgcatacgggcgacaagaagtaccactgccacgagtgcgaggcagccttctcccgcagcgaccacctcaagatccacctgaagacccacagctccagcaagcccttcaagtgcactgtgtgcaagcgtggcttctcctccaccagctcgctgcagagccacatgcaggcccacaaaaagaacaaggagcatctggccaagtcagagaaggaagccaagaaggacgacttcatgtgcgactactgcgaggacaccttcagccagacggaggagctggagaagcacgtgctcacccgccacccacagctgtccgagaaggcggacctgcagtgtatccactgccccgaggtcttcgtcgacgagaacacgctgctcacccatatccaccaagcccacgccaaccagaaacacaagtgccccatgtgccctgagcagttctcctcggtggaaggtgtctactgccacctggacagccaccggcagcccgactccagcaaccacagcgtcagtcccgaccccgtactgggcagcgtggcctccatgagtagcgccacgcctgactccagcgcctctgtggaacgcggctccacaccggactccaccttgaagccgctgcgggggcagaagaagatgcgggatgacgggcagggctggaccaaggtggtctatagctgcccctattgttccaagcgggactttaacagcctggccgtgctggagatccacctgaagaccatccacgcagacaagccccagcagagccacacgtgtcagatctgcctggactccatgcccaccctctataacctcaacgagcacgttcgcaagctgcacaagaaccatgcctaccccatgatgcagtttggcaacatctccgccttccactgcaactactgccccgagatgttcgccgacatcaatagcctgcaggagcacatccgtgtctcccactgcggccccaataccaacccctccgacggcaataacgccttcttctgcaaccagtgctccatgggtttcctcactgagtcctccctcaccgagcacatccagcaggcccactgcagtgtgggcagtgccaaactagagtctccggtggtgcagcccacacagtccttcatggaggtctattcctgcccctactgcaccaactcccctatctttggctccatcctgaagctcaccaagcacatcaaggagaaccacaagaacattccactggcccacagcaagaagtccaaggctgagcagagcccagtctcatctgacgtggaagtgtcttccccgaagcggcagcggctctcagcaagcgccaactccatctccaatggcgagtatccttgcaatcagtgcgacctcaagttttccaactttgagagcttccagacccacctgaagctgcacctggagctgctgctgcggaagcaggcgtgcccccagtgcaaagaggactttgactcccaggagtccctcctgcagcacctgacggtgcattatatgaccacgtcgacccactatgtgtgcgagagctgcgacaagcaattttcctcggtggatgacctgcagaagcacctgctggacatgcacaccttcgtgctgtatcactgtaccctgtgtcaggaggtcttcgactccaaggtgtctatccaggtgcacttggcagtgaagcacagcaatgagaagaagatgtaccgctgcacggcctgcaactgggacttccgcaaggaggctgacctgcaggtgcacgtcaaacacagccacctgggcaacccagccaaggctcacaagtgcatcttctgtggggagaccttcagcaccgaggtggagctgcagtgccatatcaccacacacagcaagaagtataactgcaaattctgcagcaaggccttccacgccatcatcctgctggagaagcacctgcgggagaagcactgtgtgtttgatgctgcaactgagaacggcacggccaacggggtgccccccacggccaccaagaaagctgagcctgctgacctacagggcatgctgcttaagaaccctgaggcgcctaacagccacgaggccagcgaggatgacgtggacgcatcggagcccatgtacggctgcgacatctgtggggcggcctacaccatggaggtgctgctgcagaaccaccggctgcgggaccacaacatccggccgggcgaggatgatggctcacgcaagaaggctgagtttatcaagggcagccacaaatgcaacgtttgctcacggactttcttctcggagaacgggctacgggagcacctgcagacgcaccggggccctgccaagcactacatgtgtcccatctgtggtgagcgtttcccttcgctgctgacgctcactgagcacaaggtgacccacagcaagagcctggacacgggcacctgtcgcatctgcaagatgcccctgcagagcgaggaggagtttattgagcactgccagatgcaccccgacctgcgcaactcgctcacgggcttccgctgtgtggtctgcatgcagacagtcacctccacgctcgagctcaagatccatggcaccttccatatgcagaagctggcaggcagctcggcagcatcctccccgaatggccagggactgcagaagctctacaagtgcgccctgtgcctcaaggagttccgcagcaagcaggacctggtgaagctcgacgtcaatgggctgccctatggcctctgcgccggctgcatggcccgcagcgccaatggacaggtgggtggcctggtcccgcccgagcccgccgaccggccctgtgccggcctccgctgccccgagtgcagtgtcaagttcgagagtgccgaagacctggagagccacatgcaggtggaccaccgtgacctcacgccggagaccagtgggccccggaaagccacccagacgtcgccagtgccccggaaaaaaacataccagtgcatcaagtgccagatgaccttcgagaacgagagagagatccaaatccatgttgccaaccacatgattgaggaaggcatcaaccacgagtgtaagctgtgcaaccagatgttcgactccccggccaagctcctctgtcacctcattgagcacagcttcgagggcatgggcggcaccttcaaatgccctgtgtgtttcacagtctttgtccaggccaacaagttgcagcagcacatctttgccgtgcacgggcaggaggacaagatctacgactgctcgcagtgccctcagaagttcttcttccagactgagctgcagaaccacacgatgagccagcacgcacagtgagggatcgctcaacaggacacctctccgcagaaggcttgccggagacgccgtggggagggccatttgaacattacatccaatcaaagtgtcatttgcaacccagatgtaaaactctaatgatttggccatgaggcgctgctattataagcagctggaaatgaatattaatggcagagattaaaagtattccatgctcagtattttttattgtcctgctacagctagtgtgcttttagagtttccgccgcagacgacatttctagagttagagaaacccgctttttaaggctattgtcctttgttccttcatgtattatattgatagtttaaaaaaaaaaattagtgtgattttttttctttgcttctttttttttctttcttgtttttctttctcccccttcagttaactactttttaattgcaattctaggtaattgtgcattgtgatgtgattgcttggctattgtctgaatatttccttttaattttttaattaaagactaatgctttgattggatttgccagttcaccggacagtgattaaaactatgtaatgaatataatcggtttcagtgcaactggatggtctgcttttaaatgtgacttaatctgactgcagtaactagtacagttcaataaagggaatccatgcgattagcatccggctgcctggttctctcctccccagcctagggccgcgtggggggctgtcagctcctgtgaggtgtgttcccctacaagttcctgtgggcttgcatacgcccttggggacctgcacaccatagaccctgcttcccttggaaaagaatcgtagtaacctaatgcacgcagactggacaggctggcagtggccatagaagtcaaagcagagactccttaatgatggaataccctgatcttcccactcatggatcgggaagcagaggcccaggggtaacgtgcagctttcccaaggccacgcagcaggttggtcaccatgctcatcgcgatgtcttcttggttttcccttcagggttggctttcccctgtgttggatactggcaggcaagtggttagcccttccctcgccaggactccaggtggcacttgggttctgaggagatgtgtgattggggaccgcagagcagagccaagtaggagccgcaggttcccagtcatagagatcagtgggatgtgagagcattgagactggtggccggggccaggtctggagtgaggcaggtaggggcctggggtacattatttcagggggcactcactgtcacagcccccttacacctgcaagtgctgggaatgagtgtcctcttgcattttacactctaggtaccttgcttatttcacctactcctggccctgctggcatcccagggcccacccagcagccttggtctccaggctgcctccattttacttcccacacctccttcatgctggtgctcagctgacttgccaatcagaggccggaacttgcacggggaaacccttccttgctaacttttcacaaggggcatggaaattggttattaccctctgcagagcggaaatgaaacaggcagacagattgcacctaattataatgtaatactaagtcatgggcgtggaatttggagcaattatacccatcatcttctagaagactcccatatcaaggggcttctggtgacctataagaattcccctttctttctgtcacctcatgtaatgttctcacacgggcggggctttcagtttttcaaaaggcatcttacacgtgtgaatcatagagcagaccctgccagtagtgggctgttgcctcctggaaactgaaggctgtgaatgccaattttcagcctctggagacttggcagttttggggtcagaccccagggtagacaccagtgttcccctaagtgtgcccacccatggactggggcttggagcctggggctcgggctatgtctgagtgaggctgtcacatgtccacagccaggcctgccttttgggcagtgctgggactgtcgatgggaccagtgtgtcccagggcctgccacatctccgactcagggccctctccagctctggatttatcccaaaccccatggagcccaggtgagccctcagtaagtaccaatagaagatctgatttgacggttggtggcgtagggctaaattagtcactgcccccattaaaaatacagcggggggtttaagagcttttcacgccatgtgggaatcagcagcgaagccggctgatgccttgggtaaggagagaggcggcctaggggaccgcgaggtaatgaggtttatggcggtgacaaggcagccagggaaccccaccgactcccccctcaccccggccctattgttctccggctggctctgtccccgctgctacgaccgagagcccctcgtgacttcgtgtgggaagggggctggcagtggggacactgaggcccttcctgggactggcattctttaccatcaggcagtattagggttggggagcagtgtagggttataaacctgtgcctcggagaacccgctacccctttccagaggaatggtctggagctgggatgagacacttgcctttcaactgtgaggagccttggagggtctctgggaggcttgtatgaaatgatgcccgacaaagggctgctcacagagacctgcaggcagcatggtcgtcaatgatggcgccgggcatcctgcaggggggcaccttttcagccaggagggcgcgatggaatcagcctctcatgtggatttggctttggggagtgggcgaggtgactgaaagcctgaggttcattgctgctgtatttagatgtacaaattgtcagtttctagcggcactctgggtggaggaattttgcccgggctgggaagtggaccaggaccctggaccacaggcccctgtcacggagcacctgcccagagtgcccagaagcaggcagggcagggtttcagtctcagtggagacactgtcatgggaggaatcttctcgagttccccatccttaaagaattctccttttaatctcacagttgcataatattgaacttttcacctgtttttcttccttcctaaggtatgtgttcctaggaatgggacctgtacctacaaatgttcagtaaataggaccaaaactcaaatccatgccttcctccactcatccattcagcagatatttactgagctgcccccatgtgccaggcactgtacagggcactggggataaggagatgaccagcagatgtggcccctggcctcatggaggccacagtggcacaggcaagcatgccagtaaatgcatagcgacccctcgtcatgagtgccgtgatggcaaagccagaagctgccagggattaatggagggacccatgtatgagacacaggggtgcattaaggaaggccttgctgaggcaggggcttgagacctgaagaaagaagggaggtgggcagtccaagagcagtgggaagagagcactgcaaatgcagaagccatgagctggaaacaagccagaagtaccctgagagatctatattcctatggagtttcaattctagatgactcaatcccagagaagttcagaatcttgtccaagatcataccattcaggatagacttgcgactataactccggtgcctcaccttccagcctggggtgtctgactccattgttaattttattataataatcatgatgatgacaatcaataaagtggtattgtactgta

SEQ ID NO: 158 - DNA, 7932 bp, Macaca fascicularis
  source 1..7932: mol_type = genomic DNA
tacagtacaataccactttattgattgtcatcatcatgattattataataaaattaacaatggagtcagacaccccaggctggaaggtgaggcaccggagttatagtcgcaagtctatcctgaatggtatgatcttggacaagattctgaacttctctgggattgagtcatctagaattgaaactccataggaatatagatctctcagggtacttctggcttgtttccagctcatggcttctgcatttgcagtgctctcttcccactgctcttggactgcccacctcccttctttcttcaggtctcaagcccctgcctcagcaaggccttccttaatgcacccctgtgtctcatacatgggtccctccattaatccctggcagcttctggctttgccatcacggcactcatgacgaggggtcgctatgcatttactggcatgcttgcctgtgccactgtggcctccatgaggccaggggccacatctgctggtcatctccttatccccagtgccctgtacagtgcctggcacatgggggcagctcagtaaatatctgctgaatggatgagtggaggaaggcatggatttgagttttggtcctatttactgaacatttgtaggtacaggtcccattcctaggaacacataccttaggaaggaagaaaaacaggtgaaaagttcaatattatgcaactgtgagattaaaaggagaattctttaaggatggggaactcgagaagattcctcccatgacagtgtctccactgagactgaaaccctgccctgcctgcttctgggcactctgggcaggtgctccgtgacaggggcctgtggtccagggtcctggtccacttcccagcccgggcaaaattcctccacccagagtgccgctagaaactgacaatttgtacatctaaatacagcagcaatgaacctcaggctttcagtcacctcgcccactccccaaagccaaatccacatgagaggctgattccatcgcgccctcctggctgaaaaggtgcccccctgcaggatgcccggcgccatcattgacgaccatgctgcctgcaggtctctgtgagcagccctttgtcgggcatcatttcatacaagcctcccagagaccctccaaggctcctcacagttgaaaggcaagtgtctcatcccagctccagaccattcctctggaaaggggtagcgggttctccgaggcacaggtttataaccctacactgctccccaaccctaatactgcctgatggtaaagaatgccagtcccaggaagggcctcagtgtccccactgccagcccccttcccacacgaagtcacgaggggctctcggtcgtagcagcggggacagagccagccggagaacaatagggccggggtgaggggggagtcggtggggttccctggctgccttgtcaccgccataaacctcattacctcgcggtcccctaggccgcctctctccttacccaaggcatcagccggcttcgctgctgattcccacatggcgtgaaaagctcttaaaccccccgctgtatttttaatgggggcagtgactaatttagccctacgccaccaaccgtcaaatcagatcttctattggtacttactgagggctcacctgggctccatggggtttgggataaatccagagctggagagggccctgagtcggagatgtggcaggccctgggacacactggtcccatcgacagtcccagcactgcccaaaaggcaggcctggctgtggacatgtgacagcctcactcagacatagcccgagccccaggctccaagccccagtccatgggtgggcacacttaggggaacactggtgtctaccctggggtctgaccccaaaactgccaagtctccagaggctgaaaattggcattcacagccttcagtttccaggaggcaacagcccactactggcagggtctgctctatgattcacacgtgtaagatgccttttgaaaaactgaaagccccgcccgtgtgagaacattacatgaggtgacagaaagaaaggggaattcttataggtcaccagaagccccttgatatgggagtcttctagaagatgatgggtataattgctccaaattccacgcccatgacttagtattacattataattaggtgcaatctgtctgcctgtttcatttccgctctgcagagggtaataaccaatttccatgccccttgtgaaaagttagcaaggaagggtttccccgtgcaagttccggcctctgattggcaagtcagctgagcaccagcatgaaggaggtgtgggaagtaaaatggaggcagcctggagaccaaggctgctgggtgggccctgggatgccagcagggccaggagtaggtgaaataagcaaggtacctagagtgtaaaatgcaagaggacactcattcccagcacttgcaggtgtaagggggctgtgacagtgagtgccccctgaaataatgtaccccaggcccctacctgcctcactccagacctggccccggccaccagtctcaatgctctcacatcccactgatctctatgactgggaacctgcggctcctacttggctctgctctgcggtccccaatcacacatctcctcagaacccaagtgccacctggagtcctggcgagggaagggctaaccacttgcctgccagtatccaacacaggggaaagccaaccctgaagggaaaaccaagaagacatcgcgatgagcatggtgaccaacctgctgcgtggccttgggaaagctgcacgttacccctgggcctctgcttcccgatccatgagtgggaagatcagggtattccatcattaaggagtctctgctttgacttctatggccactgccagcctgtccagtctgcgtgcattaggttactacgattcttttccaagggaagcagggtctatggtgtgcaggtccccaagggcgtatgcaagcccacaggaacttgtaggggaacacacctcacaggagctgacagccccccacgcggccctaggctggggaggagagaaccaggcagccggatgctaatcgcatggattccctttattgaactgtactagttactgcagtcagattaagtcacatttaaaagcagaccatccagttgcactgaaaccgattatattcattacatagttttaatcactgtccggtgaactggcaaatccaatcaaagcattagtctttaattaaaaaattaaaaggaaatattcagacaatagccaagcaatcacatcacaatgcacaattacctagaattgcaattaaaaagtagttaactgaagggggagaaagaaaaacaagaaagaaaaaaaaagaagcaaagaaaaaaaatcacactaatttttttttttaaactatcaatataatacatgaaggaacaaaggacaatagccttaaaaagcgggtttctctaactctagaaatgtcgtctgcggcggaaactctaaaagcacactagctgtagcaggacaataaaaaatactgagcatggaatacttttaatctctgccattaatattcatttccagctgcttataatagcagcgcctcatggccaaatcattagagttttacatctgggttgcaaatgacactttgattggatgtaatgttcaaatggccctccccacggcgtctccggcaagccttctgcggagaggtgtcctgttgagcgatccctcactgtgcgtgctggctcatcgtgtggttctgcagctcagtctggaagaagaacttctgagggcactgcgagcagtcgtagatcttgtcctcctgcccgtgcacggcaaagatgtgctgctgcaacttgttggcctggacaaagactgtgaaacacacagggcatttgaaggtgccgcccatgccctcgaagctgtgctcaatgaggtgacagaggagcttggccggggagtcgaacatctggttgcacagcttacactcgtggttgatgccttcctcaatcatgtggttggcaacatggatttggatctctctctcgttctcgaaggtcatctggcacttgatgcactggtatgtttttttccggggcactggcgacgtctgggtggctttccggggcccactggtctccggcgtgaggtcacggtggtccacctgcatgtggctctccaggtcttcggcactctcgaacttgacactgcactcggggcagcggaggccggcacagggccggtcggcgggctcgggcgggaccaggccacccacctgtccattggcgctgcgggccatgcagccggcgcagaggccatagggcagcccattgacgtcgagcttcaccaggtcctgcttgctgcggaactccttgaggcacagggcgcacttgtagagcttctgcagtccctggccattcggggaggatgctgccgagctgcctgccagcttctgcatatggaaggtgccatggatcttgagctcgagcgtggaggtgactgtctgcatgcagaccacacagcggaagcccgtgagcgagttgcgcaggtcggggtgcatctggcagtgctcaataaactcctcctcgctctgcaggggcatcttgcagatgcgacaggtgcccgtgtccaggctcttgctgtgggtcaccttgtgctcagtgagcgtcagcagcgaagggaaacgctcaccacagatgggacacatgtagtgcttggcagggccccggtgcgtctgcaggtgctcccgtagcccgttctccgagaagaaagtccgtgagcaaacgttgcatttgtggctgcccttgataaactcagccttcttgcgtgagccatcatcctcgcccggccggatgttgtggtcccgcagccggtggttctgcagcagcacctccatggtgtaggccgccccacagatgtcgcagccgtacatgggctccgatgcgtccacgtcatcctcgctggcctcgtggctgttaggcgcctcagggttcttaagcagcatgccctgtaggtcagcaggctcagctttcttggtggccgtggggggcaccccgttggccgtgccgttctcagttgcagcatcaaacacacagtgcttctcccgcaggtgcttctccagcaggatgatggcgtggaaggccttgctgcagaatttgcagttatacttcttgctgtgtgtggtgatatggcactgcagctccacctcggtgctgaaggtctccccacagaagatgcacttgtgagccttggctgggttgcccaggtggctgtgtttgacgtgcacctgcaggtcagcctccttgcggaagtcccagttgcaggccgtgcagcggtacatcttcttctcattgctgtgcttcactgccaagtgcacctggatagacaccttggagtcgaagacctcctgacacagggtacagtgatacagcacgaaggtgtgcatgtccagcaggtgcttctgcaggtcatccaccgaggaaaattgcttgtcgcagctctcgcacacatagtgggtcgacgtggtcatataatgcaccgtcaggtgctgcaggagggactcctgggagtcaaagtcctctttgcactgggggcacgcctgcttccgcagcagcagctccaggtgcagcttcaggtgggtctggaagctctcaaagttggaaaacttgaggtcgcactgattgcaaggatactcgccattggagatggagttggcgcttgctgagagccgctgccgcttcggggaagacacttccacgtcagatgagactgggctctgctcagccttggacttcttgctgtgggccagtggaatgttcttgtggttctccttgatgtgcttggtgagcttcaggatggagccaaagataggggagttggtgcagtaggggcaggaatagacctccatgaaggactgtgtgggctgcaccaccggagactctagtttggcactgcccacactgcagtgggcctgctggatgtgctcggtgagggaggactcagtgaggaaacccatggagcactggttgcagaagaaggcgttattgccgtcggaggggttggtattggggccgcagtgggagacacggatgtgctcctgcaggctattgatgtcggcgaacatctcggggcagtagttgcagtggaaggcggagatgttgccaaactgcatcatggggtaggcatggttcttgtgcagcttgcgaacgtgctcgttgaggttatagagggtgggcatggagtccaggcagatctgacacgtgtggctctgctggggcttgtctgcgtggatggtcttcaggtggatctccagcacggccaggctgttaaagtcccgcttggaacaataggggcagctatagaccaccttggtccagccctgcccgtcatcccgcatcttcttctgcccccgcagcggcttcaaggtggagtccggtgtggagccgcgttccacagaggcgctggagtcaggcgtggcgctactcatggaggccacgctgcccagtacggggtcgggactgacgctgtggttgctggagtcgggctgccggtggctgtccaggtggcagtagacaccttccaccgaggagaactgctcagggcacatggggcacttgtgtttctggttggcgtgggcttggtggatatgggtgagcagcgtgttctcgtcgacgaagacctcggggcagtggatacactgcaggtccgccttctcggacagctgtgggtggcgggtgagcacgtgcttctccagctcctccgtctggctgaaggtgtcctcgcagtagtcgcacatgaagtcgtccttcttggcttccttctctgacttggccagatgctccttgttctttttgtgggcctgcatgtggctctgcagcgagctggtggaggagaagccacgcttgcacacagtgcacttgaagggcttgctggagctgtgggtcttcaggtggatcttgaggtggtcgctgcgggagaaggctgcctcgcactcgtggcagtggtacttcttgtcgcccgtatgcagcttgatgtgccggtcgcggctcctcttgtgcttgaagaggcggctgcagtaggtacacttgaacggcagcttgtcgctgtggatctgctcgtgcctcttcaagtagctcaggcggatgaaggacttgtcgcagaactggcaagggtacggcaggcctgtgcccccttcctcctcaccgaggccgaggtcacaaccatctccgatcatctgcgtgggtgacgcaacatccttgctggagggagacgaggccacccaggagagttgtgggtcgtcatcaccatctccaggacagcggtgggcccggtggtccgtcaggtctgccagagactcgaagtcctgctgacagtgatcgcaggtgtaaattgattcatcctccatgtcttcatcatcctcatttctctcctcttgacttgtcacgctgttcctgtcttccagcgcacggctggttttccgatcgcactccggctctccttctaggcctcctgctgctgtcacggaggaatcccaggccagcgagaagtctgaggcctccccctcttcaactttcaccgagcgcggcttcgcctgcttccgcctggacatgtccggggctccgggcgctccgtcgccctccgcagccggctccccccgccgccccccgccgctccgggccgcccttctcccccttctcctccgcctgtctcttggaaacttttttttttgcagcccggttggcggctgtggggagcggaccgcaggtccggggcggcctcccttgggggggcggcccgggccggccgaggccgctcgaaggcggggggaggcccggggggcgcgccggggccctgcctgttgcaatgcggcagtcgggggctcccggtccaagcggcggtcccagcggcgcggggagtccggaggccactcggccgagccgag

SEQ ID NO: 159 - DNA, 4563 bp, Macaca mulatta
  source 1..4563: mol_type = genomic DNA
cttcctggagaaggatggattttaccctgtaaaagaagaaagacatggatgcataagaagagggttgaagagggggaggcctcagacttctcgctggcctgggattcctccgtgacagcagcaggaggcctagaaggagagccggagtgcgatcggaaaaccagccgtgcgctggaagacaggaacagcgtgacaagtcaagaggagagaaatgaggatgatgaagacatggaggatgaatcaatttacacctgcgatcactgtcagcaggacttcgagtctctggcagacctgacggaccaccgggcccaccgctgtcctggagatggtgatgacgacccacaactctcctgggtggcctcgtctccctccagcaaggatgttgcgtcacccacgcagatgatcggagatggttgtgacctcggcctcggtgaggaggaagggggcacaggcctgccgtacccttgccagttctgcgacaagtccttcatccgcctgagctacttgaagaggcacgagcagatccacagcgacaagctgccgttcaagtgtacctactgcagccgcctcttcaagcacaagaggagccgcgaccggcacatcaagctgcatacgggcgacaagaagtaccactgccacgagtgcgaggcagccttctcccgcagcgaccacctcaagatccacctgaagacccacagctccagcaagcccttcaagtgcactgtgtgcaagcgtggcttctcctccaccagctcgctgcagagccacatgcaggcccacaaaaagaacaaggagcatctggccaagtcagagaaggaagccaagaaggacgacttcatgtgcgactactgcgaggacaccttcagccagacggaggagctggagaagcacgtgctcacccgccacccacagctgtccgagaaggcggacctgcagtgtatccactgccccgaggtcttcgtcgacgagaacacgctgctcacccatatccaccaagcccacgccaaccagaaacacaagtgccccatgtgccctgagcagttctcctcggtggaaggtgtctactgccacctggacagccaccggcagcccgactccagcaaccacagcgtcagtcccgaccccgtactgggcagcgtggcctccatgagtagcgccacgcctgactccagcgcctctgtggaacgcggctccacaccggactccaccttgaagccgctgcgggggcagaagaagatgcgggatgacgggcagggctggaccaaggtggtctatagctgcccctattgttccaagcgggactttaacagcctggccgtgctggagatccacctgaagaccatccacgcagacaagccccagcagagccacacatgtcagatctgcctggactccatgcccaccctctataacctcaacgagcacgttcgcaagctgcacaagaaccatgcctaccccatgatgcagtttggcaacatctccgccttccactgcaactactgccccgagatgttcgccgacatcaatagcctgcaggagcacatccgtgtctcccactgcggccccaataccaacccctccgacggcaataacgccttcttctgcaaccagtgctccatgggtttcctcactgagtcctccctcaccgagcacatccagcaggcccactgcagtgtgggcagtgccaaactagagtctccggtggtgcagcccacacagtccttcatggaggtctattcctgcccctactgcaccaactcccctatctttggctccatcctgaagctcaccaagcacatcaaggagaaccacaagaacattccactggcccacagcaagaagtccaaggctgagcagagcccagtctcatctgacgtggaagtgtcttccccgaagcggcagcggctctcagcaagcgccaactccatctccaatggcgagtatccttgcaatcagtgcgacctcaagttttccaactttgagagcttccagacccacctgaagctgcacctggagctgctgctgcggaagcaggcgtgcccccagtgcaaagaggactttgactcccaggagtccctcctgcagcacctgacggtgcattatatgaccacgtcgacccactatgtgtgcgagagctgcgacaagcaattttcctcggtggatgacctgcagaagcacctgctggacatgcacaccttcgtgctgtatcactgtaccctgtgtcaggaggtcttcgactccaaggtgtctatccaggtgcacttggcagtgaagcacagcaatgagaagaagatgtaccgctgcacggcctgcaactgggacttccgcaaggaggctgacctgcaggtgcacgtcaaacacagccacctgggcaacccagccaaggctcacaagtgcatcttctgtggggagaccttcagcaccgaggtggagctgcagtgccatatcaccacacacagcaagaagtataactgcaaattctgcagcaaggccttccacgccatcatcctgctggagaagcacctgcgggagaagcactgtgtgtttgatgctgcaactgagaacggcacggccaacggggtgccccccacggccaccaagaaagctgagcctgctgacctacagggcatgctgcttaagaaccctgaggcgcctaacagccacgaggccagcgaggatgacgtggacgcatcggagcccatgtacggctgcgacatctgtggggcggcctacaccatggaggtgctgctgcagaaccaccggctgcgggaccacaacatccggccgggcgaggatgatggctcacgcaagaaggctgagtttatcaagggcagccacaaatgcaacgtttgctcacggactttcttctcggagaacgggctacgggagcacctgcagacgcaccggggccctgccaagcactacatgtgtcccatctgtggtgagcgtttcccttcgctgctgacgctcactgagcacaaggtgacccacagcaagagcctggacacgggcacctgtcgcatctgcaagatgcccctgcagagcgaggaggagtttattgagcactgccagatgcaccccgacctgcgcaactcgctcacgggcttccgctgtgtggtctgcatgcagacagtcacctccacgctcgagctcaagatccacggcaccttccatatgcagaagctggcaggcagctcggcggcatcctccccgaatggccagggactgcagaagctctacaagtgtgccctgtgcctcaaggagttccgcagcaagcaggacctggtgaagctcgacgtcaatgggctgccctatggcctctgcgccggctgcatggcccgcagcgccaatggacaggtgggtggcctggtcccgcccgagcccgccgaccggccctgtgccggcctccgctgccccgagtgcagtgtcaagttcgagagtgccgaagacctggagagccacatgcaggtggaccaccgtgacctcacgccggagaccagtgggccccggaaagccacccagacgtcgccagtgccccggaaaaaaacataccagtgcatcaagtgccagatgaccttcgagaacgagagagagatccaaatccatgttgccaaccacatgattgaggaaggcatcaaccacgagtgtaagctgtgcaaccagatgttcgactccccggccaagctcctctgtcacctcattgagcacagcttcgagggcatgggcggcaccttcaaatgccctgtgtgtttcacagtctttgtccaggccaacaagttgcagcagcacatctttgccgtgcacgggcaggaggacaagatctacgactgctcgcagtgccctcagaagttcttcttccagactgagctgcagaaccacacgatgagccagcacgcacagtgagggatcgctcaacaggacacctctccgcagaaggcttgccggagacgccgtggggagggccatttgaacattacatccaatcaaagtgtcatttgcaacccagatgtaaaactctaatgatttggccatgaggcgctgctattataagcagctggaaatgaatattaatggcagagattaaaagtattccatgctcagtattttttattgtcctgctacagctagtgtgcttttagagtttccgccgcagactacatttctagagttagagaaacccgctttttaaggctattgtcctttgttccttcatgtattatattgatagtttaaaaaaaaaaattagtgtgattttttttctttgcttctttttttttctttcttgtttttctttctcccccttcagttaactactttttaattgcaattctaggtaattgtgcattgtgatgtgattgcttggctattgtctgaatatttccttttaattttttaattaaagactaatgctttgattggatttgccagttcaccggacagtgattaaaactatgtaatgaatataatcggtttcagtgcaactggatggtctgcttttaaatgtgacttaatctgactgcagtaactagtacagttcaataaagggaatccatgcgattagca

SEQ ID NO: 160 - DNA, 4563 bp, Macaca mulatta
  source 1..4563: mol_type = genomic DNA
tgctaatcgcatggattccctttattgaactgtactagttactgcagtcagattaagtcacatttaaaagcagaccatccagttgcactgaaaccgattatattcattacatagttttaatcactgtccggtgaactggcaaatccaatcaaagcattagtctttaattaaaaaattaaaaggaaatattcagacaatagccaagcaatcacatcacaatgcacaattacctagaattgcaattaaaaagtagttaactgaagggggagaaagaaaaacaagaaagaaaaaaaaagaagcaaagaaaaaaaatcacactaatttttttttttaaactatcaatataatacatgaaggaacaaaggacaatagccttaaaaagcgggtttctctaactctagaaatgtagtctgcggcggaaactctaaaagcacactagctgtagcaggacaataaaaaatactgagcatggaatacttttaatctctgccattaatattcatttccagctgcttataatagcagcgcctcatggccaaatcattagagttttacatctgggttgcaaatgacactttgattggatgtaatgttcaaatggccctccccacggcgtctccggcaagccttctgcggagaggtgtcctgttgagcgatccctcactgtgcgtgctggctcatcgtgtggttctgcagctcagtctggaagaagaacttctgagggcactgcgagcagtcgtagatcttgtcctcctgcccgtgcacggcaaagatgtgctgctgcaacttgttggcctggacaaagactgtgaaacacacagggcatttgaaggtgccgcccatgccctcgaagctgtgctcaatgaggtgacagaggagcttggccggggagtcgaacatctggttgcacagcttacactcgtggttgatgccttcctcaatcatgtggttggcaacatggatttggatctctctctcgttctcgaaggtcatctggcacttgatgcactggtatgtttttttccggggcactggcgacgtctgggtggctttccggggcccactggtctccggcgtgaggtcacggtggtccacctgcatgtggctctccaggtcttcggcactctcgaacttgacactgcactcggggcagcggaggccggcacagggccggtcggcgggctcgggcgggaccaggccacccacctgtccattggcgctgcgggccatgcagccggcgcagaggccatagggcagcccattgacgtcgagcttcaccaggtcctgcttgctgcggaactccttgaggcacagggcacacttgtagagcttctgcagtccctggccattcggggaggatgccgccgagctgcctgccagcttctgcatatggaaggtgccgtggatcttgagctcgagcgtggaggtgactgtctgcatgcagaccacacagcggaagcccgtgagcgagttgcgcaggtcggggtgcatctggcagtgctcaataaactcctcctcgctctgcaggggcatcttgcagatgcgacaggtgcccgtgtccaggctcttgctgtgggtcaccttgtgctcagtgagcgtcagcagcgaagggaaacgctcaccacagatgggacacatgtagtgcttggcagggccccggtgcgtctgcaggtgctcccgtagcccgttctccgagaagaaagtccgtgagcaaacgttgcatttgtggctgcccttgataaactcagccttcttgcgtgagccatcatcctcgcccggccggatgttgtggtcccgcagccggtggttctgcagcagcacctccatggtgtaggccgccccacagatgtcgcagccgtacatgggctccgatgcgtccacgtcatcctcgctggcctcgtggctgttaggcgcctcagggttcttaagcagcatgccctgtaggtcagcaggctcagctttcttggtggccgtggggggcaccccgttggccgtgccgttctcagttgcagcatcaaacacacagtgcttctcccgcaggtgcttctccagcaggatgatggcgtggaaggccttgctgcagaatttgcagttatacttcttgctgtgtgtggtgatatggcactgcagctccacctcggtgctgaaggtctccccacagaagatgcacttgtgagccttggctgggttgcccaggtggctgtgtttgacgtgcacctgcaggtcagcctccttgcggaagtcccagttgcaggccgtgcagcggtacatcttcttctcattgctgtgcttcactgccaagtgcacctggatagacaccttggagtcgaagacctcctgacacagggtacagtgatacagcacgaaggtgtgcatgtccagcaggtgcttctgcaggtcatccaccgaggaaaattgcttgtcgcagctctcgcacacatagtgggtcgacgtggtcatataatgcaccgtcaggtgctgcaggagggactcctgggagtcaaagtcctctttgcactgggggcacgcctgcttccgcagcagcagctccaggtgcagcttcaggtgggtctggaagctctcaaagttggaaaacttgaggtcgcactgattgcaaggatactcgccattggagatggagttggcgcttgctgagagccgctgccgcttcggggaagacacttccacgtcagatgagactgggctctgctcagccttggacttcttgctgtgggccagtggaatgttcttgtggttctccttgatgtgcttggtgagcttcaggatggagccaaagataggggagttggtgcagtaggggcaggaatagacctccatgaaggactgtgtgggctgcaccaccggagactctagtttggcactgcccacactgcagtgggcctgctggatgtgctcggtgagggaggactcagtgaggaaacccatggagcactggttgcagaagaaggcgttattgccgtcggaggggttggtattggggccgcagtgggagacacggatgtgctcctgcaggctattgatgtcggcgaacatctcggggcagtagttgcagtggaaggcggagatgttgccaaactgcatcatggggtaggcatggttcttgtgcagcttgcgaacgtgctcgttgaggttatagagggtgggcatggagtccaggcagatctgacatgtgtggctctgctggggcttgtctgcgtggatggtcttcaggtggatctccagcacggccaggctgttaaagtcccgcttggaacaataggggcagctatagaccaccttggtccagccctgcccgtcatcccgcatcttcttctgcccccgcagcggcttcaaggtggagtccggtgtggagccgcgttccacagaggcgctggagtcaggcgtggcgctactcatggaggccacgctgcccagtacggggtcgggactgacgctgtggttgctggagtcgggctgccggtggctgtccaggtggcagtagacaccttccaccgaggagaactgctcagggcacatggggcacttgtgtttctggttggcgtgggcttggtggatatgggtgagcagcgtgttctcgtcgacgaagacctcggggcagtggatacactgcaggtccgccttctcggacagctgtgggtggcgggtgagcacgtgcttctccagctcctccgtctggctgaaggtgtcctcgcagtagtcgcacatgaagtcgtccttcttggcttccttctctgacttggccagatgctccttgttctttttgtgggcctgcatgtggctctgcagcgagctggtggaggagaagccacgcttgcacacagtgcacttgaagggcttgctggagctgtgggtcttcaggtggatcttgaggtggtcgctgcgggagaaggctgcctcgcactcgtggcagtggtacttcttgtcgcccgtatgcagcttgatgtgccggtcgcggctcctcttgtgcttgaagaggcggctgcagtaggtacacttgaacggcagcttgtcgctgtggatctgctcgtgcctcttcaagtagctcaggcggatgaaggacttgtcgcagaactggcaagggtacggcaggcctgtgcccccttcctcctcaccgaggccgaggtcacaaccatctccgatcatctgcgtgggtgacgcaacatccttgctggagggagacgaggccacccaggagagttgtgggtcgtcatcaccatctccaggacagcggtgggcccggtggtccgtcaggtctgccagagactcgaagtcctgctgacagtgatcgcaggtgtaaattgattcatcctccatgtcttcatcatcctcatttctctcctcttgacttgtcacgctgttcctgtcttccagcgcacggctggttttccgatcgcactccggctctccttctaggcctcctgctgctgtcacggaggaatcccaggccagcgagaagtctgaggcctccccctcttcaaccctcttcttatgcatccatgtctttcttcttttacagggtaaaatccatccttctccaggaag

SEQ ID NO: 161 - DNA, 11654 bp, Homo sapiens
  source 1..11654: mol_type = genomic DNA
actgcgtcccgcgccgctcgctcatccccgaggggcccctgcaacctctccgcgcgaagacggcttcagccctgcagggaaagaaaagtgcaatgattctggactgagacgcgcttgggcagaggctatgtaatcgtgtctgtgttgaggacttcgcttcgaggagggaagaggagggatcggctcgctcctccggcggcggcggcggcggcgactctgcaggcggagtttcgcggcggcggcaccagggttacgccagccccgcggggaggtctctccatccagcttctgcagcggcgaaagccccagcgcccgagcgcctgagccggcggggagcaagtaaagctagaccgatctccggggagccccggagtaggcgagcggcggccgccagctagttgagcgcaccccccgcccgccccagcggcgccgcggcgggcggcgtccaggcggcatggagaaggacggcctgtgccgcgctgaccagcagtacgaatgcgtggcggagatcggggagggcgcctatgggaaggtgttcaaggcccgcgacttgaagaacggaggccgtttcgtggcgttgaagcgcgtgcgggtgcagaccggcgaggagggcatgccgctctccaccatccgcgaggtggcggtgctgaggcacctggagaccttcgagcaccccaacgtggtcaggttgtttgatgtgtgcacagtgtcacgaacagacagagaaaccaaactaactttagtgtttgaacatgtcgatcaagacttgaccacttacttggataaagttccagagcctggagtgcccactgaaaccataaaggatatgatgtttcagcttctccgaggtctggactttcttcattcacaccgagtagtgcatcgcgatctaaaaccacagaacattctggtgaccagcagcggacaaataaaactcgctgacttcggccttgcccgcatctatagtttccagatggctctaacctcagtggtcgtcacgctgtggtacagagcacccgaagtcttgctccagtccagctacgccacccccgtggatctctggagtgttggctgcatatttgcagaaatgtttcgtagaaagcctctttttcgtggaagttcagatgttgatcaactaggaaaaatcttggacgtgattggactcccaggagaagaagactggcctagagatgttgcccttcccaggcaggcttttcattcaaaatctgcccaaccaattgagaagtttgtaacagatatcgatgaactaggcaaagacctacttctgaagtgtttgacatttaacccagccaaaagaatatctgcctacagtgccctgtctcacccatacttccaggacctggaaaggtgcaaagaaaacctggattcccacctgccgcccagccagaacacctcggagctgaatacagcctgaggcctcagcagccgccttaagctgatcctgcggagaacacccttggtggcttatgggtccccctcagcaagccctacagagctgtggaggattgctatctggaggccttccagctgctgtcttctggacaggctctgcttctccaaggaaaccgcctagtttactgttttgaaatcaatgcaagagtgattgcagctttatgttcatttgtttgtttgtttgtctgtttgtttcaagaacctggaaaaattccagaagaagagaagctgctgaccaattgtgctgccatttgatttttctaaccttgaatgctgccagtgtggagtgggtaatccaggcacagctgagttatgatgtaatctctctgcagctgccgggcctgatttggtacttttgagtgtgtgtgtgcatgtgtgtgtgtgtgtgtgtgtgtgtgtgtgtgtatgtgagagattctgtgatcttttaaagtgttactttttgtaaacgacaagaataattcaattttaaagactcaaggtggtcagtaaataacaggcatttgttcactgaaggtgattcaccaaaatagtcttctcaaattagaaagttaaccccatgtcctcagcatttcttttctggccaaaagcagtaaatttgctagcagtaaaagatgaagttttatacacacagcaaaaaggagaaaaaattctagtatattttaagagatgtgcatgcattctatttagtcttcagaatgctgaatttacttgttgtaagtctattttaaccttctgtatgacatcatgctttatcatttcttttggaaaatagcctgtaagctttttattacttgctataggtttagggagtgtacctcagatagattttaaaaaaaagaatagaaagcctttatttcctggtttgaaattcctttcttccctttttttgttgttgttattgttgtttgttgttgttattttgtttttgtttttaggaatttgtcagaaactctttcctgttttggtttggagagtagttctctctaactagagacaggagtggccttgaaattttcctcatctattacactgtactttctgccacacactgccttgttggcaaagtatccatcttgtctatctcccggcacttctgaaatatattgctaccattgtataactaataacagattgcttaagctgttcccatgcaccacctgtttgcttgctttcaatgaacctttcataaattcgcagtctcagcttatggtttatggcctcgattctgcaaacctaacagggtcacatatgttctctaatgcagtccttctacctggtgtttacttttgttacctaaataatgagtaggatcttgttttgttttatcaccagcacacagattgctataaactgttactttgtgaattacatttttatagaagatattttcagtgtctttacctgagggtatgtctttagctatgttttagggccatacatttactctatcaaatgatcttttctccatcccccaggctgtgcttatttctagtgccttgtgctcactcctgctctctacagagccagcctggcctgggcattgtaaacagcttttcctttttctcttactgttttctctacagtcctttatatttcataccatctctgccttataagtggtttagtgctcagttggctctagtaaccagaggacacagaaagtatcttttggaaagtttagccacctgtgctttctgactcagagtgcatgcaacagttagatcatgcaacagttagattatgtttagggttaggattttcaaagaatggaggttgctgcactcagaaaataattcagatcatgtttatgcattattaagttgtactgaattctttgcagcttaatgtgatatatgactatcttgaacaagagaaaaaactaggagatgtttctcctgaagagcttttggggttgggaactattcttttttaattgctgtactacttaacattgttctaattcagtagcttgaggaacaggaacattgttttctagagcaagataataaaggagatgggccatacaaatgttttctactttcgttgtgacaacattgattaggtgttgtcagtactataaatgcttgagatataatgaatccacagcattcaaggtcaggtctactcaaagtctcacatggaaaagtgagttctgcctttcctttgatcgagggtcaaaatacaaagacatttttgctagggcctacaaattgaatttaaaaactcactgcactgattcatctgagctttttggttagtattcatggctagagtgaacatagctttagtttttgctgttgtaaaagtgttttcataagttcactcaagaaaaatgcagctgttctgaactggaatttttcagcattctttagaattttaaatgagtagagagctcaacttttattcctagcatctgcttttgactcatttctaggcagtgcttatgaagaaaaattaaagcacaaacattctggcattcaatcgttggcagattatcttctgatgacacagaatgaaagggcatctcagcctctctgaactttgtaaaaatctgtccccagttcttccatcggtgtagttgttgcatttgagtgaatactctcttgatttatgtattttatgtccagattcgccatttctgaaatccagatccaacacaagcagtcttgccgttagggcattttgaagcagatagtagagtaagaacttagtgactacagcttattcttctgtaacatatggtttcaaacatctttgccaaaagctaagcagtggtgaactgaaaagggcatattgccccaaggttacactgaagcagctcatagcaagttaaaatattgtgacagatttgaaatcatgtttgaatttcatagtaggaccagtacaagaatgtccctgctagtttctgtttgatgtttggttctggcggctcaggcattttgggaactgttgcacagggtggagtcaaaacaacctacatataaaaagagaaaaagagaaacttgtccatttagctttcataagaaatcccatggcaaagggtaataaaaaggacctaatcttaaaaatacaatttctaagcacttgtaagaacccagtgggttggagcctcccactttgtccctcctttgaagtggatgggaactcaaggtgcaaagaacctgttttggaagaaagcttggggccatttcagccccctgtattctcatgattttctctcaggaagcacacactgtgaatggcagacttttcatttagccccaggtgacttactaaaaatagttgaaaattattcacctaagaatagaatctcagcattgtgttaaataaaaatgaaagctttagaaggcatgagatgttcctatcttaaataaagcatgtttcttttctatagagaaatgtatagtttgactctccagaatgtactatccatcttgatgagaaaactcttaaatagtaccaaacattttgaactttaaattatgtatttaaagtgagtgtttaagaaactgtagctgcttcttttacaagtggtgcctattaaagtcagtaatggccattattgttccattgtggaaattaaattatgtaagcttcctaatatcataaacatattaaaattcttctaaaatattgcttttcttttaagtgacaatttgactattcttatgataagcacatgagagtgtcttacattttccaaaagcaggctttaattgcatagttgagtctaggaaaaaataatgttaaaagtgaatatgccaccataattacttaattatgttagtatagaaactacagaatatttaccctggaaagaaaatattggaatgttattataaactcttagatatttatataattcaaaagaatgcatgtttcacattgtgacagataaagatgtatgatttctaaggctttaaaaattattcataaaacagtgggcaatagataaaggaaattctggagaaaatgaaggtatttaaagggtagtttcaaagctatatatattttgaaggatatattctttatgaacaaatatattgtaaaaatttatactaaggtcatctggtaactgtgggattaatatggtcgaaaacaaatgttatggagaagctgtcccaagcaaactaaattacctgtacttttttcccatttcaagggaagaggcaaccacatgaagcaatacttcttacacatgcctaagaacgttcattgaaaaaataaatttttaaaaggcatgtgtttcctatgccaccaatacttttgaaaaattgtgaaccttacccaaaaccatttatcatgtccattaagtatatttgggtatataattaggaagatatttacatgttccatctccacagtggaaaaacttattgaggctaccaaagtgtgccaagaaatgtaagtccttagagtaattagaaatgctgttttcctcaaaagcatgagaaactagcattttcatttcttatttactccctttctatatcaatgcaattcacaacccaattttaatacatccctatatctcaagcatttctatcttgtactttttcagaaaataaaccaaaaataatcctttggtctctctatcttctgacctttgtaagcaacagaaatgtaaaaacagaaggggtccaatttttacacgtttttttctcaagtagcctttctggggatttttattttcttaatgaagtgccaatcagcttttcaaaatgttttctatttctcagcatttccaggaagtgataacgtttagctaaatgagtagaagtggacttccttcaacatattgttaccttgtctagccttaggaagaaaacaagagccacctgaaaataaatacaggctcttttcgagcatctgctgaaatactgttacagcaatttgaagttgatgtggtaggaaaggaaggtgacttttcttgcaaaagtctttctaaacattcacactgtcctaagagatgagctttcttgttttattccggtatattccacaaggtggcacttttagagaaaaacaaatctgatgaagactaaagaggtacttctaaaagagatttcattctaactttatttttctgcgcatatttaactctttcctagcacttgttttttgggatgattaatagtctctataatgttctgtaacttcaatattttacttgttacctaggttctgaacaattgtctgcaaataaattgttcttaaggatggataatacacccattttgatcatttaagtaaagaaagcctagtcattcattcagtcaagaaaaaatttttgaagtacccagttaccttacttttctagattaaaacaggcttagttactaaaaaggcagtcctcatctgtgaacaggatagtttcgttagaagtataaaactcctttagtggccccagttaaaacacacataccctctctgctgctttcaaattccctagcatggtggcctttcaacattgattaaattttaaaatcctaatttaaagatcaggtgagcaaaatgagtagcacatcagtaattcagtagacaaaacttttgtctgaaaaattgctgtattgaaacagagccctaaaataccaaaagaccaggtaattttaacatttgtggaatcacaaatgtaaattcataagaagctctaattaaaaaaaaaaagtctgaagtatatgagcataacaacttaggagtgtgtctacatacttaacttttgaagttttttggcaactttatatactttttttaaatttacaagtctacttaaagacttcttataccccaaatgattaagttaattttagaggtcacctttctcacagcagtgtcacttgaaatttagtagggaaggatattgcagtatttttcagtttccttagcacagcaccacagaaagcagcttattccttttgagtggcagacactcgacggtgcctgcccaactttcctcctgagtggcaagcagatgagtctcagtaattcatactgaaccaaaatgccacatacactaggggcagtcagaaactggctgagaaatcccccgcctcattcgcccctctgctcccaggaactagagtccagttaaagcccctatgcgaaaggccgaattccaccccagggtttgttataacagtggccagtctgaaccccatttgctcgtgctcaaaacttgattcccacttgaaagccttccgggcgcgctgcctcgttgccccgcccctttggcaggagagaggcagtgggcgaggccgggctggggccccgcctcccactcacctgccggtgcctgaaattatgtgcggccccgcgggctgctttccgaggtcagagtgccctgctgctgtctcagaggcatctgttctgcaaatcttaggaagaaaaatgtccctagtagcaaacgggtgtcttctgtgcataaataagtacaacacaattctccgaaagttcgggtaaaaagagatgcggtagcagctgccctgtgtgaagctgtctaccccgcatctctcaggcgctaagctcagtttttgtttttgtttttgtttttttaaagaaaagatgtataattgcaggaatttttttttatttttttattttccatcattctatatatgtgatggtgaaagatatgcctggaaaagttttgttttgaaaagtttattttctgcttcgtcttcagttggcaaaagctctcaattctttagcttccagtttcttttctctctttttctttgttaggtaattaaaggtatgtaaacaaattatctcatgtagcaggggattttcatgttgagaggaatcttccgtgtgagttgtttggtcacacaaataaccctttctcaattttaggagtttggattgtcaaatgtaggtttttctcaaagggggcatataactacatattgactgccaagaactatgactgtagcactaatcagcacacatagagccacacaattatttaatttctaactctctgtggtccctagaaaaattccgttgatgtgcttaggttaaagttctgaagatacccgttgtacccttacttgaaagtttctaatcttaagttttatgaaatgcaataatatgtatcagctagcaatatttctgtgatcaccaacaactctcagtttgatcttaaagtctgaataataaaacaaatcccagcagtaatacatttcttaaacctcacagtgcatgatatatcttttcattctgatcctgtgtttgcaaaaatatacacatgtatatcatagttcctcactttttattcatttgttttcctattacctgtagtaaatatattagttagtacatggaatttatagcatcagctacccccaggaacagcacctgacaggcgggggattttttttcaagttgttctacatttgcataaattatttctattattattcatgtatgttatttatttctgaatcacactagtcctgtgaaagtacaactgaaggcagaaagtgttaggattttgcatctaatgttcattatcatggtattgatggacctaagaaaataaaaattagactaagcccccaaataagctgcatgcatttgtaacatgattagtagatttgaatatatagatgtagtattttgggtatctaggtgttttatcattatgtaaaggaattaaagtaaaggactttgtagttgtttttattaaatatgcatatagtagagtgcaaaaatatagcaaaaataaaaactaaaggtagaaaagcattttagatatgccttaatttagaaactgtgccaggtggccctcggaatagatgccaggcagagaccagtgcctgggtggtgcctcctcttgtctgccctcatgaagaagcttccctcacgtgatgtagtgccctcgtaggtgtcatgtggagtagtgggaacaggcagtactgttgagaggagagcagtgtgagagtttttctgtagaagcagaactgtcagcttgtgccttgaggcttccagaacgtgtcagatggagaagtccaagtttccatgcttcaggcaacttagctgtgtacagaagcaatccagtgtggtaataaaaagcaaggattgcctgtataatttattataaaataaaagggattttaacaaccaacaattcccaacacctcaaaagcttgttgcattttttggtatttgaggtttttatctgaaggttaaagggcaagtgtttggtatagaagagcagtatgtgttaagaaaagaaaaatattggttcacgtagagtgcaaattagaactagaaagttttatacgattatcattttgagatgtgttaaagtaggttttcactgtaaaatgtattagtgtttctgcattgccatagggcctggttaaaactttctcttaggtttcaggaagactgtcacatacagtaagcttttttccttctgacttataatagaaaatgttttgaaagtaaaaaaaaaaaatctaatttggaaatttgacttgttagtttctgtgtttgaaatcatggttctagaaatgtagaaattgtgtatatcagatactcatctaggctgtgtgaaccagcccaagatgaccaacatccccacacctctacatctctgtcccctgtatctcttcctttctaccactaaagtgttccctgctaccatcctggcttgtccacatggtgctctccatcttcctccacatcatggaccacaggtgtgcctgtctaggcctggccaccactcccaacttgacctagccacattcatctagagatggttcctgatgctgggcacagactgtgctcatggcacccattagaaatgcctctagcatctttgtatgcatcttgatttttaaaccaagtcattgtacagagcattcagttttggctgtggtaccaagagaaaaactaatcaagaatataaaccacattccaggctgctgttttctctccatctacaggccacacttttactgtatttcttcatacttgaaattcattctgctattttcatatcagggtacagacttataagggtgcatgttccttaaaggtgcataattattcttattccgtttgcttatattgctacagaatgctctgttttggtgctttgagttctgcagacccaagaagcagtgtggaaattcactgcctgggacacagtcttataagaatgttggcaggtgactttgtatcagatgttgcttctcttttctctgtacacagattgagagttaccacagtggcctgtcgggtccaccctgtgggtgcagcacagctctctgaaagcaagaaccttcctacctattctaacgtttttgccctctaagaaaaatggcctcaggtatggtatagacatagcaagaggggaagggctgtctcactctagcaaccatccctccattacacacagaaagccctcttgaagcaaaagaagaagaaagaaagaaagcttatctctaaggctactgtcttcagaatgctctgagctgaatgctcttgctcctttcccaagaggcagatgaaaatatagccagtttatctatacccttcctatctgaggaggagaatagaaaagtagggtaaatatgtaacgtaaaatatgtcattcaaggaccaccaaaactttaagtaccctatcattaaaaatctggttttaaaagtagctcaagtaagggatgctttgtgacccagggtttctgaagtcagatagccattcttacctgccccttactctgacttattgggaaagggagaactgcagtggtgtttctgttgcagtggcaaaggtaacatgtcagaaaattcagagggttgcataccaataatcctttggaaactggatgtcttactgggtgctagaatgaaaatgtaggtatttattgtcagatgatgaagttcattgtttttttcaaaattggtgttgaaatatcactgtccaatgtgttcacttatgtgaaagctaaattgaatgaggcaaaaagagcaaatagtttgtatatttgtaataccttttgtatttcttacaataaaaatattggtagcaaataaaaataataaaaacaataactttaaactgctttctggagatgaattactctcctggctattttcttttttactttaatgtaaaatgagtataactgtagtgagtaaaattcattaaattccaagttttagcagaa

SEQ ID NO: 162 - DNA, 11654 bp, Homo sapiens
  source 1..11654: mol_type = genomic DNA
ttctgctaaaacttggaatttaatgaattttactcactacagttatactcattttacattaaagtaaaaaagaaaatagccaggagagtaattcatctccagaaagcagtttaaagttattgtttttattatttttatttgctaccaatatttttattgtaagaaatacaaaaggtattacaaatatacaaactatttgctctttttgcctcattcaatttagctttcacataagtgaacacattggacagtgatatttcaacaccaattttgaaaaaaacaatgaacttcatcatctgacaataaatacctacattttcattctagcacccagtaagacatccagtttccaaaggattattggtatgcaaccctctgaattttctgacatgttacctttgccactgcaacagaaacaccactgcagttctccctttcccaataagtcagagtaaggggcaggtaagaatggctatctgacttcagaaaccctgggtcacaaagcatcccttacttgagctacttttaaaaccagatttttaatgatagggtacttaaagttttggtggtccttgaatgacatattttacgttacatatttaccctacttttctattctcctcctcagataggaagggtatagataaactggctatattttcatctgcctcttgggaaaggagcaagagcattcagctcagagcattctgaagacagtagccttagagataagctttctttctttcttcttcttttgcttcaagagggctttctgtgtgtaatggagggatggttgctagagtgagacagcccttcccctcttgctatgtctataccatacctgaggccatttttcttagagggcaaaaacgttagaataggtaggaaggttcttgctttcagagagctgtgctgcacccacagggtggacccgacaggccactgtggtaactctcaatctgtgtacagagaaaagagaagcaacatctgatacaaagtcacctgccaacattcttataagactgtgtcccaggcagtgaatttccacactgcttcttgggtctgcagaactcaaagcaccaaaacagagcattctgtagcaatataagcaaacggaataagaataattatgcacctttaaggaacatgcacccttataagtctgtaccctgatatgaaaatagcagaatgaatttcaagtatgaagaaatacagtaaaagtgtggcctgtagatggagagaaaacagcagcctggaatgtggtttatattcttgattagtttttctcttggtaccacagccaaaactgaatgctctgtacaatgacttggtttaaaaatcaagatgcatacaaagatgctagaggcatttctaatgggtgccatgagcacagtctgtgcccagcatcaggaaccatctctagatgaatgtggctaggtcaagttgggagtggtggccaggcctagacaggcacacctgtggtccatgatgtggaggaagatggagagcaccatgtggacaagccaggatggtagcagggaacactttagtggtagaaaggaagagatacaggggacagagatgtagaggtgtggggatgttggtcatcttgggctggttcacacagcctagatgagtatctgatatacacaatttctacatttctagaaccatgatttcaaacacagaaactaacaagtcaaatttccaaattagattttttttttttactttcaaaacattttctattataagtcagaaggaaaaaagcttactgtatgtgacagtcttcctgaaacctaagagaaagttttaaccaggccctatggcaatgcagaaacactaatacattttacagtgaaaacctactttaacacatctcaaaatgataatcgtataaaactttctagttctaatttgcactctacgtgaaccaatatttttcttttcttaacacatactgctcttctataccaaacacttgccctttaaccttcagataaaaacctcaaataccaaaaaatgcaacaagcttttgaggtgttgggaattgttggttgttaaaatcccttttattttataataaattatacaggcaatccttgctttttattaccacactggattgcttctgtacacagctaagttgcctgaagcatggaaacttggacttctccatctgacacgttctggaagcctcaaggcacaagctgacagttctgcttctacagaaaaactctcacactgctctcctctcaacagtactgcctgttcccactactccacatgacacctacgagggcactacatcacgtgagggaagcttcttcatgagggcagacaagaggaggcaccacccaggcactggtctctgcctggcatctattccgagggccacctggcacagtttctaaattaaggcatatctaaaatgcttttctacctttagtttttatttttgctatatttttgcactctactatatgcatatttaataaaaacaactacaaagtcctttactttaattcctttacataatgataaaacacctagatacccaaaatactacatctatatattcaaatctactaatcatgttacaaatgcatgcagcttatttgggggcttagtctaatttttattttcttaggtccatcaataccatgataatgaacattagatgcaaaatcctaacactttctgccttcagttgtactttcacaggactagtgtgattcagaaataaataacatacatgaataataatagaaataatttatgcaaatgtagaacaacttgaaaaaaaatcccccgcctgtcaggtgctgttcctgggggtagctgatgctataaattccatgtactaactaatatatttactacaggtaataggaaaacaaatgaataaaaagtgaggaactatgatatacatgtgtatatttttgcaaacacaggatcagaatgaaaagatatatcatgcactgtgaggtttaagaaatgtattactgctgggatttgttttattattcagactttaagatcaaactgagagttgttggtgatcacagaaatattgctagctgatacatattattgcatttcataaaacttaagattagaaactttcaagtaagggtacaacgggtatcttcagaactttaacctaagcacatcaacggaatttttctagggaccacagagagttagaaattaaataattgtgtggctctatgtgtgctgattagtgctacagtcatagttcttggcagtcaatatgtagttatatgccccctttgagaaaaacctacatttgacaatccaaactcctaaaattgagaaagggttatttgtgtgaccaaacaactcacacggaagattcctctcaacatgaaaatcccctgctacatgagataatttgtttacatacctttaattacctaacaaagaaaaagagagaaaagaaactggaagctaaagaattgagagcttttgccaactgaagacgaagcagaaaataaacttttcaaaacaaaacttttccaggcatatctttcaccatcacatatatagaatgatggaaaataaaaaaataaaaaaaaattcctgcaattatacatcttttctttaaaaaaacaaaaacaaaaacaaaaactgagcttagcgcctgagagatgcggggtagacagcttcacacagggcagctgctaccgcatctctttttacccgaactttcggagaattgtgttgtacttatttatgcacagaagacacccgtttgctactagggacatttttcttcctaagatttgcagaacagatgcctctgagacagcagcagggcactctgacctcggaaagcagcccgcggggccgcacataatttcaggcaccggcaggtgagtgggaggcggggccccagcccggcctcgcccactgcctctctcctgccaaaggggcggggcaacgaggcagcgcgcccggaaggctttcaagtgggaatcaagttttgagcacgagcaaatggggttcagactggccactgttataacaaaccctggggtggaattcggcctttcgcataggggctttaactggactctagttcctgggagcagaggggcgaatgaggcgggggatttctcagccagtttctgactgcccctagtgtatgtggcattttggttcagtatgaattactgagactcatctgcttgccactcaggaggaaagttgggcaggcaccgtcgagtgtctgccactcaaaaggaataagctgctttctgtggtgctgtgctaaggaaactgaaaaatactgcaatatccttccctactaaatttcaagtgacactgctgtgagaaaggtgacctctaaaattaacttaatcatttggggtataagaagtctttaagtagacttgtaaatttaaaaaaagtatataaagttgccaaaaaacttcaaaagttaagtatgtagacacactcctaagttgttatgctcatatacttcagactttttttttttaattagagcttcttatgaatttacatttgtgattccacaaatgttaaaattacctggtcttttggtattttagggctctgtttcaatacagcaatttttcagacaaaagttttgtctactgaattactgatgtgctactcattttgctcacctgatctttaaattaggattttaaaatttaatcaatgttgaaaggccaccatgctagggaatttgaaagcagcagagagggtatgtgtgttttaactggggccactaaaggagttttatacttctaacgaaactatcctgttcacagatgaggactgcctttttagtaactaagcctgttttaatctagaaaagtaaggtaactgggtacttcaaaaattttttcttgactgaatgaatgactaggctttctttacttaaatgatcaaaatgggtgtattatccatccttaagaacaatttatttgcagacaattgttcagaacctaggtaacaagtaaaatattgaagttacagaacattatagagactattaatcatcccaaaaaacaagtgctaggaaagagttaaatatgcgcagaaaaataaagttagaatgaaatctcttttagaagtacctctttagtcttcatcagatttgtttttctctaaaagtgccaccttgtggaatataccggaataaaacaagaaagctcatctcttaggacagtgtgaatgtttagaaagacttttgcaagaaaagtcaccttcctttcctaccacatcaacttcaaattgctgtaacagtatttcagcagatgctcgaaaagagcctgtatttattttcaggtggctcttgttttcttcctaaggctagacaaggtaacaatatgttgaaggaagtccacttctactcatttagctaaacgttatcacttcctggaaatgctgagaaatagaaaacattttgaaaagctgattggcacttcattaagaaaataaaaatccccagaaaggctacttgagaaaaaaacgtgtaaaaattggaccccttctgtttttacatttctgttgcttacaaaggtcagaagatagagagaccaaaggattatttttggtttattttctgaaaaagtacaagatagaaatgcttgagatatagggatgtattaaaattgggttgtgaattgcattgatatagaaagggagtaaataagaaatgaaaatgctagtttctcatgcttttgaggaaaacagcatttctaattactctaaggacttacatttcttggcacactttggtagcctcaataagtttttccactgtggagatggaacatgtaaatatcttcctaattatatacccaaatatacttaatggacatgataaatggttttgggtaaggttcacaatttttcaaaagtattggtggcataggaaacacatgccttttaaaaatttattttttcaatgaacgttcttaggcatgtgtaagaagtattgcttcatgtggttgcctcttcccttgaaatgggaaaaaagtacaggtaatttagtttgcttgggacagcttctccataacatttgttttcgaccatattaatcccacagttaccagatgaccttagtataaatttttacaatatatttgttcataaagaatatatccttcaaaatatatatagctttgaaactaccctttaaataccttcattttctccagaatttcctttatctattgcccactgttttatgaataatttttaaagccttagaaatcatacatctttatctgtcacaatgtgaaacatgcattcttttgaattatataaatatctaagagtttataataacattccaatattttctttccagggtaaatattctgtagtttctatactaacataattaagtaattatggtggcatattcacttttaacattattttttcctagactcaactatgcaattaaagcctgcttttggaaaatgtaagacactctcatgtgcttatcataagaatagtcaaattgtcacttaaaagaaaagcaatattttagaagaattttaatatgtttatgatattaggaagcttacataatttaatttccacaatggaacaataatggccattactgactttaataggcaccacttgtaaaagaagcagctacagtttcttaaacactcactttaaatacataatttaaagttcaaaatgtttggtactatttaagagttttctcatcaagatggatagtacattctggagagtcaaactatacatttctctatagaaaagaaacatgctttatttaagataggaacatctcatgccttctaaagctttcatttttatttaacacaatgctgagattctattcttaggtgaataattttcaactatttttagtaagtcacctggggctaaatgaaaagtctgccattcacagtgtgtgcttcctgagagaaaatcatgagaatacagggggctgaaatggccccaagctttcttccaaaacaggttctttgcaccttgagttcccatccacttcaaaggagggacaaagtgggaggctccaacccactgggttcttacaagtgcttagaaattgtatttttaagattaggtcctttttattaccctttgccatgggatttcttatgaaagctaaatggacaagtttctctttttctctttttatatgtaggttgttttgactccaccctgtgcaacagttcccaaaatgcctgagccgccagaaccaaacatcaaacagaaactagcagggacattcttgtactggtcctactatgaaattcaaacatgatttcaaatctgtcacaatattttaacttgctatgagctgcttcagtgtaaccttggggcaatatgcccttttcagttcaccactgcttagcttttggcaaagatgtttgaaaccatatgttacagaagaataagctgtagtcactaagttcttactctactatctgcttcaaaatgccctaacggcaagactgcttgtgttggatctggatttcagaaatggcgaatctggacataaaatacataaatcaagagagtattcactcaaatgcaacaactacaccgatggaagaactggggacagatttttacaaagttcagagaggctgagatgccctttcattctgtgtcatcagaagataatctgccaacgattgaatgccagaatgtttgtgctttaatttttcttcataagcactgcctagaaatgagtcaaaagcagatgctaggaataaaagttgagctctctactcatttaaaattctaaagaatgctgaaaaattccagttcagaacagctgcatttttcttgagtgaacttatgaaaacacttttacaacagcaaaaactaaagctatgttcactctagccatgaatactaaccaaaaagctcagatgaatcagtgcagtgagtttttaaattcaatttgtaggccctagcaaaaatgtctttgtattttgaccctcgatcaaaggaaaggcagaactcacttttccatgtgagactttgagtagacctgaccttgaatgctgtggattcattatatctcaagcatttatagtactgacaacacctaatcaatgttgtcacaacgaaagtagaaaacatttgtatggcccatctcctttattatcttgctctagaaaacaatgttcctgttcctcaagctactgaattagaacaatgttaagtagtacagcaattaaaaaagaatagttcccaaccccaaaagctcttcaggagaaacatctcctagttttttctcttgttcaagatagtcatatatcacattaagctgcaaagaattcagtacaacttaataatgcataaacatgatctgaattattttctgagtgcagcaacctccattctttgaaaatcctaaccctaaacataatctaactgttgcatgatctaactgttgcatgcactctgagtcagaaagcacaggtggctaaactttccaaaagatactttctgtgtcctctggttactagagccaactgagcactaaaccacttataaggcagagatggtatgaaatataaaggactgtagagaaaacagtaagagaaaaaggaaaagctgtttacaatgcccaggccaggctggctctgtagagagcaggagtgagcacaaggcactagaaataagcacagcctgggggatggagaaaagatcatttgatagagtaaatgtatggccctaaaacatagctaaagacataccctcaggtaaagacactgaaaatatcttctataaaaatgtaattcacaaagtaacagtttatagcaatctgtgtgctggtgataaaacaaaacaagatcctactcattatttaggtaacaaaagtaaacaccaggtagaaggactgcattagagaacatatgtgaccctgttaggtttgcagaatcgaggccataaaccataagctgagactgcgaatttatgaaaggttcattgaaagcaagcaaacaggtggtgcatgggaacagcttaagcaatctgttattagttatacaatggtagcaatatatttcagaagtgccgggagatagacaagatggatactttgccaacaaggcagtgtgtggcagaaagtacagtgtaatagatgaggaaaatttcaaggccactcctgtctctagttagagagaactactctccaaaccaaaacaggaaagagtttctgacaaattcctaaaaacaaaaacaaaataacaacaacaaacaacaataacaacaacaaaaaaagggaagaaaggaatttcaaaccaggaaataaaggctttctattcttttttttaaaatctatctgaggtacactccctaaacctatagcaagtaataaaaagcttacaggctattttccaaaagaaatgataaagcatgatgtcatacagaaggttaaaatagacttacaacaagtaaattcagcattctgaagactaaatagaatgcatgcacatctcttaaaatatactagaattttttctcctttttgctgtgtgtataaaacttcatcttttactgctagcaaatttactgcttttggccagaaaagaaatgctgaggacatggggttaactttctaatttgagaagactattttggtgaatcaccttcagtgaacaaatgcctgttatttactgaccaccttgagtctttaaaattgaattattcttgtcgtttacaaaaagtaacactttaaaagatcacagaatctctcacatacacacacacacacacacacacacacacacacatgcacacacacactcaaaagtaccaaatcaggcccggcagctgcagagagattacatcataactcagctgtgcctggattacccactccacactggcagcattcaaggttagaaaaatcaaatggcagcacaattggtcagcagcttctcttcttctggaatttttccaggttcttgaaacaaacagacaaacaaacaaacaaatgaacataaagctgcaatcactcttgcattgatttcaaaacagtaaactaggcggtttccttggagaagcagagcctgtccagaagacagcagctggaaggcctccagatagcaatcctccacagctctgtagggcttgctgagggggacccataagccaccaagggtgttctccgcaggatcagcttaaggcggctgctgaggcctcaggctgtattcagctccgaggtgttctggctgggcggcaggtgggaatccaggttttctttgcacctttccaggtcctggaagtatgggtgagacagggcactgtaggcagatattcttttggctgggttaaatgtcaaacacttcagaagtaggtctttgcctagttcatcgatatctgttacaaacttctcaattggttgggcagattttgaatgaaaagcctgcctgggaagggcaacatctctaggccagtcttcttctcctgggagtccaatcacgtccaagatttttcctagttgatcaacatctgaacttccacgaaaaagaggctttctacgaaacatttctgcaaatatgcagccaacactccagagatccacgggggtggcgtagctggactggagcaagacttcgggtgctctgtaccacagcgtgacgaccactgaggttagagccatctggaaactatagatgcgggcaaggccgaagtcagcgagttttatttgtccgctgctggtcaccagaatgttctgtggttttagatcgcgatgcactactcggtgtgaatgaagaaagtccagacctcggagaagctgaaacatcatatcctttatggtttcagtgggcactccaggctctggaactttatccaagtaagtggtcaagtcttgatcgacatgttcaaacactaaagttagtttggtttctctgtctgttcgtgacactgtgcacacatcaaacaacctgaccacgttggggtgctcgaaggtctccaggtgcctcagcaccgccacctcgcggatggtggagagcggcatgccctcctcgccggtctgcacccgcacgcgcttcaacgccacgaaacggcctccgttcttcaagtcgcgggccttgaacaccttcccataggcgccctccccgatctccgccacgcattcgtactgctggtcagcgcggcacaggccgtccttctccatgccgcctggacgccgcccgccgcggcgccgctggggcgggcggggggtgcgctcaactagctggcggccgccgctcgcctactccggggctccccggagatcggtctagctttacttgctccccgccggctcaggcgctcgggcgctggggctttcgccgctgcagaagctggatggagagacctccccgcggggctggcgtaaccctggtgccgccgccgcgaaactccgcctgcagagtcgccgccgccgccgccgccggaggagcgagccgatccctcctcttccctcctcgaagcgaagtcctcaacacagacacgattacatagcctctgcccaagcgcgtctcagtccagaatcattgcacttttctttccctgcagggctgaagccgtcttcgcgcggagaggttgcaggggcccctcggggatgagcgagcggcgcgggacgcagt

SEQ ID NO: 163 - DNA, 11534 bp, Mus musculus
  source 1..11534: mol_type = genomic DNA
cccgcgctgcgctcatccccgaggggccccagcaacctctccttcgtgaagactgcacgagccctgctgtggaagaaaagtgcagagattgtgggcagactatgtaatcgctgcggagggggaagaggagggatcggcgctctcctgcggcggcggcgcggcgactcggctaggcggagtttcgcagcggctgcgcccggcttgcacccgcgggcgagaaggtcggtccgtctagcccggcggccgcgagtccgactccccgaggcgtgtaaggcagcgagtgagcaccccggttccactgtgccgcacccgcagcctgaagccagcatggagaaggacagcctgagtcgcgccgatcagcagtatgagtgcgtggcggagatcggcgaaggcgcctatgggaaggtgttcaaggcccgcgacctgaagaacggcggccgcttcgtggctctgaagcgcgtgcgagtgcagaccagtgaggagggcatgccgctctccaccatccgcgaggtggcggtgctgaggcacctggagaccttcgagcaccccaacgtggtcaggttgtttgatgtgtgcacagtgtcacggacggacagagaaaccaagcttacactagtgtttgagcatgttgatcaagacttgaccacttacttggataaagttccagagcccggcgtacccacagaaaccataaaggatatgatgtttcagcttctccgaggtctggactttcttcattctcacagagtagtgcatcgtgatctgaaaccgcagaacattctggtgaccagcagtggacagataaagctggctgactttggccttgcccgcatctatagttttcagatggcccttacctcggtggtcgtcacgctgtggtaccgagccccagaagtcctgctccagtccagctatgccacccctgtggacctctggagtgtcggttgcatctttgcagaaatgtttcgcagaaagcctctttttcgtggaagttcagacgtggatcaactaggaaaaatcttggacatcattggactcccaggagaggaagactggcctagggacgtggcccttccccggcaggcttttcattccaaatctgctcaacccatcgagaagtttgtgacagatattgacgaactaggcaaagacctacttctgaaatgcctgacgtttaatccagctaaaaggatatccgcctacggcgccctgaatcacccgtacttccaagatctggagagatacaaggacaacctgaactctcacctgccatccaaccagagcacctcggagctgaacacagcctgaggttccacggggatgcccatgagctcgtcatctgaacacattggcggctgcgagtcccctaagcaagcctctcagagcagttgaagattgctggctgccaaccttctggctgccagcttctgggtgggctctgccttaccaaggaaaccacctagtttactgttcagagatcaatgcaagggtgattgcagctttatgttcgtttgtacacttgtttgttttgtctgtttgtttcaagaacctggaaaacttccagaagaagagaagctgctgaccaattgtgctgccatttcgttttctaaccttgaatgctgccagtgtagggtgggaatccaggcccagctgagttatgatgtaatccgcctgcagctgctgggcctgctttggtacttgtgagtgtgtgtgcatgcgtatgtgtgtgtaagagagaagaggaggggagagaaagacccctgatctcgtcaagtgttactttttttttgtagaaaacaagaataattgagttttaaagagtagaggtgactgatagtaagaagggcttgttcagtgaaaggtgattcacaatggagtcttgttaggaaggttggacctaagtcctcagagttgccttcctgtccaaaagcttttgctagcagtaaacaataaaggtttagatgccacaaaaaatggggggaaccacaatattttttaagagactttttaaggcatacatcttctatttactctttggaaagctgaacttaatgtgtcccaggccctatatatagtacagtatgtacttaattgtttctttggggaaagatgctataagtatcttattacttgcaatacatttaaggagtgagtgtacctcagataggttttaaagatagagagcacctgttttctggtgtgagatgttatcattttcttcacgtctcttgataccttgataccttgtcaccttagggaatcacttcctgctctgactagaggcgggaataccatctagctgtctccaccacccaccatggcgcatctgccttgtgctgccttgtgtagtgcgaagctctcaaccaccagcacttctaattcattttcctgccactgcctggctaacgacagatggcccagctgccccaatcccacacccgcttgcacgcttaccgtctttcaccgaatgctttgggcgtaggctcccattccgaaaccctaacagtatccccttgtgcctttgtaatacagtcttccccctgccgcagctgaggtcacctaggcagtgaagagtgcttgttctgtgtgtgtatagactactaccgactgtcacttggtgtttcctatctttaagtgtatgttgtcagtgtaatgtctgaggaaatgtcttttcctctcttctagagataactacttactctctaaagtgatctctctgtctgtccgcaggatgtgtttctgggtttttgttctttttttttttttttttttttttttgtctgaggcctcatgtcagccctgctttctgcagagccagcctaccctgggcattataaacaactgtaccttactgttttctttcagtcctttacattctgtgccacctttgccttattatatccgtggcttagtgctaagctggcactactccatagaaggtgtagaaggcagctttcgggaagcgtagctgagttttgtttgaatcgtgtttgagcacatttaagtaaacgctagatgatgcttcactgtagagctttgaaagactgcctgatgtttcacacggcagtgtaggctccagatggtgtttgtatgttatggaccttactgtgtttctcgtagctgaacaatgcatgtggttatttgtttgtttgttttttggtttctctgtgtagccctggctgtcctggaactcactctgtagaccaggctggcctcgaattcagaaatgcgcctgcctctgcctcccaagtgctgggatcaaaggcgtgcgccaccacgcccggctttgcatatggttatctgtatggagaagaattagatgtctttcctgagagctttggaggttgggaatcatcttcttctgtttatttttatttttaacattacattacattcttctgattcagtatcgcaagaaaggattttttcttttttcaaaaacaaaactttaagaagccagaggctaggctgagaatgttctgcgctcgtcctcacagctctgctgccgacactgccaacgctcgagacagtcagcctggaacctctgggacaaggtctactcgaggtctcacttggacagcgagttctgccttgtcattgaacaaggtccaaaatacagacatttttgctagggcctagaaatcgaccataaaactcactgcattgaggcctaatccattctatattaacatccatgtgataaagtgaaaataattttgagggttttgctttcgccaaaaaaaaaaaagaaagaaagaaaaaaaaagaaaggaagaaaaagaaaaaagaaaggattgttttccttagctttgctcaagaaaaatacagctatcctaaactggaatcttcccgtattctttagagtcttaagtatagagtttaacttcacttttgtcagctgtcttgagcttatttctaagtagttttgttttggcttttggtgagtgaggtagtgggaggttaattttggggtcttttttttttttggctttgtttgtgtgtgtgtgtgtgtgtgtgtgtttatgtgtttggcttttgggtttggttggttagttgtttagtttgtttttttgttgttgtttaatttgctttttctaggcagggtttctctatgtggccctggctgtcctagaacttgctctgtagaccaggctagcctcaaactcagagatccacttgcctctgtctcgagtgtgcttgaactaaaggcatgagctaccctcctcagcccactccaaactttgagtaatatttttaaatcatagacatgttggtattagaaacatggcgtattgtggtggatggtagagaaagggcgccgcaacctctcaggacatcatatgtctggccagctcttcattcatataggtgctctctggatatgtctttacatcagactcacacctctgaaacccggttttcacacaaggagacttgccattggggtctttagtagcccagggaaacatagagtaaactgaagagcttactgtgtgccgcttatccttagatggcctcatccagtcacaggtctttgtcagaatctaaccattgattcactgaggagaccctactgccctgaggttccactgaagcagcttttagtgagactagggcaagaatataccgaatagcttctgttcaaggtttggttccagagactctaccatttacaggactggctggagttacaacaacctcttaaagagggtagggcgggttctccagttagaccccctaacctcacaggtgagtagtcctaacctgacagccttagaaacacagttgccgagtacctgagagcacccagtggcccgccgcctcctattcagcccctctttaaagacgacagacggttaagccatggagaagctgttcaggtagcacggggccatttctgcccccagcttgtcatgttttttctctcaggacccactctctgaccagtagacttgaatttagccccaagtgatttactaaactcagctcagaagctcacttaaaaataggacctccacatggtcgtgctaagtaaaaatgaagaccccaagttgcacagggtgctgctatctcaaagacaatactttcctttgaatagaaagctgtgccgtccaccctgcaatgggtgctagccaacttgcttgagaaagtcaggagcaagcattttgagttttaaagaatgtcctgaacttgtcttttaagtaaacatagctgctttattaaaagctgtgactactaaagccagtcacagccatcgtcactgtgggagttaaatcatgtcaactttcaaacatcacagttgtttcaatcttctgtccaaagaactcctcttctggagaaaacctgattttggttttggctttttgtcttgtcttgttttgtttttcctgagatggggtctctctgtgaagccctggctatcctggaactcagtgtgtagaccaggctggccttgaactcatgtagatctgcctgctaaaactaaagacatgcaccaccatgacagctgactattttttatgatgagcacagaagtggctcacattttcttaaagcacacttttgtcacatagtagagtctaggaaagaataacattgaaaatccccatcccagtgtgacacttgtgtaagcacatatggatagccattggaagaatacatgcttgcttgtaacatgaaattaaagacattgtataatttcttaatctttaaaaattaccaaaaaagtggcaacagtatgtttaaggttattttaatttttacataaattgttaaccatatttgtttgcctttaagtatattctaagaattataattaagtataattataagtcatcccgcacattcagcacttatggactaggtatgtcaaaatacacaaattctgtatttcttgtttcataggaagaaagcagccatctgaagctctactcatatatatgcctaagaatatctatacaaaattaaagtttaaaaggcctttgcctctcgtgcagctgagaatagacaacttataagccttatccaaaaaccatgataaagggatcatgtgcatccttacaaaaaccccttatcctgtgcatacttacatccaagtacatcctaaggaaggtgtccgtgcattcatctgccacagtggggaagctgcctggtgcaaggtgtgagtcctggaatgattagtgatagtggtctcaaatgaggacaccttcgtctcccaccagtttccttcctatggacaggctcagtccagttatacaggccaggaggggctggtgcccacagcctcccgcctctgcaaggtaggattgcatatctcaaacatctctaactcagtttcggctttgttggtcttgtttaaggaaataagccagtaagccaaaactatttttgttgttgttctcttgtcttctgaaagagaggggatatcaattttaaatgtttctctcaatttgatctttcaaatttttctaataaagtgccaaattgctgctgcttcttcttcttctttcttcttcttcttcttcttcttcttcttcttcttcttcttcttcttcttcttcttcttcttcttcttcttcatgttttctgctagggttttcttgttttgttttggtttcagtttgttttattttcagcaagttaggtaacttgagaggacttccactaggatgttcacacctctgtgctctggtcctctgacccctccaaaaaatagccacctgggaataaatgcaagctccccccctccagcatctaccaaaatactgttgcagcaattccaagttcaaatggtggggatggaaggtagtttggagttgggttgggttgggttgggttaggttggacagaagtcagttttaaaattcacagcgccctaaggtcagtgtggggtttattcctctatcccaatgtgtttcacaaggtggcgctttcagagaaaactctaaacctgaccaagactgagaggtattctagagacagtacttgtaactattttcctgcacatctgtaactatcacctagcatattccttcagacaattaacagccttcataatattctacagcttatatgttttgctttttagctaggttctgagtgactaagttaggcttgagagtgatgtttaagcaataaagaaggcctttacttaagagacatttttgatgtacccaaataacctgaaattctaggacatacaactaaaaacttccctgaagccggccctcgtctgtgagcagcacggtttcattagaaatggcaaaactccttgcggggttgggagtgggggacagtcctaactctcacagcccttgacatgtctgctgcggttcacccctcactatccatgaccttttgacactgtcatttctaaactcaagtgaacaaaggaagcactgcatctgtaactgagtatgcagaccattttctaaagaaccacagtgctcgacaaatactggaagaactggtatgttttacacgcacataaactacaagtgcaaactcttacattccaattcctaaattacagttatatagtacatatgaacattacagtttagacaggaacctgcataaggctttggtttttctactctcgaggtcacttttatactacattttaaattcacacttttctcagagacccagccccctgagccaatagtgacagtacactgggatgaacagacacagtaccacaccatggcagaaagcagtttattccttatgagtcacacacacacacacacacaccctgcctgacttcacacacacacacacacactgcctgacttcacacacacacaccctgcctgacttcactccagaaaggctggcagggaggtttcagtcatttacacagaccaggtgctcaagcattgagaaatcgattctttcaaccctctgctctcactgaagcagatctcaggttaagcccctcagtgaaaggccaagggtcccctgggtctgccaccattctggagttcctgagcctgaccccacccctactcctgctgaatgacagggggcggggcagcggagccaggccaagcaggatattgtgggaggaccagtgacctgctgcacctcagccatctgttgtgccatcttaggaagcagggtgctcgagaaacacagagctgtcctctgagctacaataactacagtttgctcactaggctagctagctctggtgtagagatgcaagccctatatgaaatgtctcccactcaaagttttgctggggggtgggggttgagatgtataattgcaggagaaattctgactttactgttttctatctgatacatccatggtggggaaaagatatgaaactgtctcagtttgaaaagctcttctacttcaattggcaaacgcatggagttcgttactttctactttcttcttttttctcctttagtgagcaaattattccttgaacagaaagaggattttcccatttagaggaagcttctgtgtgaattgtcaggtcacacaaataatgccattatattgttgagtgtagggctttggtttttcaggggacacatagccaagcagtgatggtcaggaattatgtctcactctatcatttcttactcaagcagggttccagccagattctattgtgagctgaggttagtcgggggaccctgtgctctacttgaagtttcataatctttagttctatgaaatgcaataacatatattagccagcaatattcctgtggtcgccagcatctctgagtttgaccttcagtctctggatggttaaaatagatcccagcagtaatccatttcttgacatcagtgcttaagtcaagtatctttccactctggtcctatttgcaacaatgtattcatgtatgtttcatttcctttattcattattttcctatgaacagtgataaatgtattagcacattgaattaatagcataatagaaagagcacttagcagatggggattttttatcaagtcccacatttacataagttatttctattattattcatgtatattatttattgctaagcctcacaccattcctgtgaaagtgcaactaaaggcagatattagggcttggatttaatgttccttatcatggtcttgaacaaaaaattcagtgatgcccccaaataagctgcctgcgtttttaacacgactgctagatttcagtaggttaagtgtaacacttttggtgtctaggtgtctttttacattaaaagaggcaaagcagcagaactctgtagctattgcttctggcagagatttgtttagcatagtgtggtattaattatagcaaatgttaaggtagcatgtagaggttgccttcaataagggactgtgccaggtggccagcaaagtggattctaggcagagcaggcgtctaggtgctgcctcctgtctggttgtgtgaagagagctgctccgagcaatgtagtgcccccgtgcccccgtaggtgtcctgggcagcggtgggaacacgtggtactgtagagaagggatcagcgtgaggggtgttctgtaggaacagaactggtagcgtatgccttgaggcttcctgcccgtgttttcagattccaggcatacattctgtatacagaagcagtccatcctagcaataaaacctaggaatccccaacaactcaaaaggcagttgccctgctgtggtttctgtcctgagctgaaggttaacgggcaagtgttaggcacagaagagcatcgtgtgctggggtgccgtgccacggcccagggtgcgtgttagcagtagagactgttacagggttgtcccttctaggtgcgtagaagtatatggcttcactgtaaagtgtgtattgtttctgtattcccacagggacttgttaaagcttctagaggcttcagcaaagctgtagaccacagtaagctgctttttgtttgacttattcttagactaggaaatgtttaaaggttaaaaaaaaaaaaaaaagaatcttcatttagacactgaactcgctattttctggactgaaatcatggtcctagaactgtagaaatcacacccattagatgctaatctaggttgtgtaagccagccccaagagtctagcatccccacactgtatctgcatcttcctgcatcttaccttccttcccgaaggtgctccctaccactaccctgacctgtccctttggtgcttcccatctccttggctgaaagttaggcatcaagcatgtgatgagaaatactttcagcaccaagtatgcctgcctaggcctagccaccgcccccactttgcctttggctagccatagtcaacaagagataatacctggtgctgggcacagaatgaacccatgatgtcagtcagaaaagccctcaagcatatttctcctgtacgtcctgatctttaaacccagtcattatgcagagcgttcgctgttggctatagtcccaggttaaaaaaaaaaaaaacattccaggctgctgtaggctgtccatatgcagtctctgcttttaccttgctttttcatacttgaaattcgttctgccattttgatttcacggtgcagacatcagggtacacgttccctctgggtgcataattgctctcattccgtttgctcacactgctacaggatgctctgttttggtgctttgggttcagcgggtcaaaaagcactgtgggaaatcactgcctagaacacagtcttaaaagcatttgggcaggagtcttggtgttgatgtcgcttctgctcttctctgtgccctccagatggagttaccaggttggcctgccaggtcccccactcccacccccaagacctttctctgaatggcctgtgaaccctgtgctgtatccaagggtgaatgtgacgtatctcctctggcgaccctacctttcctggttactcaccatcagaaacaacctaggttacatatagcaaactctacacagccttcctgagggaaagcataaaaggatatctctaaggttgctcttcaaagccctgagctgaaggcctttgctcccgtccttggagctgatgaaaatactggtcaatttatccaagcccttcccacttacaagaatgggaaagtagaggtttgtgtcgataccatctaaagaccacaacttctagccatagggtatttcatatatgtccattttcaaaagcagctcaggtgagtggtgactccaggctccatgcaggcatcttaacatgggacttccctagagagagctacagtgttcattctatgtcacagggcaggagaggagaccggcaggaaatttggagggtaacagatcaatactcctttggaaactggatgtcttactgggtgctagaatgcaaatttatgtatttattgtctggtcattgaattcattgcctttcaaaaccattgttcaaatgtcactatcattggcctcacttgtatgccagccgaattggttgaaagcaaaccagagaatggtttgtgcatttgccttaccatttgtacttcttacaataaaaatgtcagtagcaaataaaaaaaaaaaaaa

SEQ ID NO: 164 - DNA, 11534 bp, Mus musculus
  source 1..11534: mol_type = genomic DNA
ttttttttttttttatttgctactgacatttttattgtaagaagtacaaatggtaaggcaaatgcacaaaccattctctggtttgctttcaaccaattcggctggcatacaagtgaggccaatgatagtgacatttgaacaatggttttgaaaggcaatgaattcaatgaccagacaataaatacataaatttgcattctagcacccagtaagacatccagtttccaaaggagtattgatctgttaccctccaaatttcctgccggtctcctctcctgccctgtgacatagaatgaacactgtagctctctctagggaagtcccatgttaagatgcctgcatggagcctggagtcaccactcacctgagctgcttttgaaaatggacatatatgaaataccctatggctagaagttgtggtctttagatggtatcgacacaaacctctactttcccattcttgtaagtgggaagggcttggataaattgaccagtattttcatcagctccaaggacgggagcaaaggccttcagctcagggctttgaagagcaaccttagagatatccttttatgctttccctcaggaaggctgtgtagagtttgctatatgtaacctaggttgtttctgatggtgagtaaccaggaaaggtagggtcgccagaggagatacgtcacattcacccttggatacagcacagggttcacaggccattcagagaaaggtcttgggggtgggagtgggggacctggcaggccaacctggtaactccatctggagggcacagagaagagcagaagcgacatcaacaccaagactcctgcccaaatgcttttaagactgtgttctaggcagtgatttcccacagtgctttttgacccgctgaacccaaagcaccaaaacagagcatcctgtagcagtgtgagcaaacggaatgagagcaattatgcacccagagggaacgtgtaccctgatgtctgcaccgtgaaatcaaaatggcagaacgaatttcaagtatgaaaaagcaaggtaaaagcagagactgcatatggacagcctacagcagcctggaatgttttttttttttttaacctgggactatagccaacagcgaacgctctgcataatgactgggtttaaagatcaggacgtacaggagaaatatgcttgagggcttttctgactgacatcatgggttcattctgtgcccagcaccaggtattatctcttgttgactatggctagccaaaggcaaagtgggggcggtggctaggcctaggcaggcatacttggtgctgaaagtatttctcatcacatgcttgatgcctaactttcagccaaggagatgggaagcaccaaagggacaggtcagggtagtggtagggagcaccttcgggaaggaaggtaagatgcaggaagatgcagatacagtgtggggatgctagactcttggggctggcttacacaacctagattagcatctaatgggtgtgatttctacagttctaggaccatgatttcagtccagaaaatagcgagttcagtgtctaaatgaagattcttttttttttttttttaacctttaaacatttcctagtctaagaataagtcaaacaaaaagcagcttactgtggtctacagctttgctgaagcctctagaagctttaacaagtccctgtgggaatacagaaacaatacacactttacagtgaagccatatacttctacgcacctagaagggacaaccctgtaacagtctctactgctaacacgcaccctgggccgtggcacggcaccccagcacacgatgctcttctgtgcctaacacttgcccgttaaccttcagctcaggacagaaaccacagcagggcaactgccttttgagttgttggggattcctaggttttattgctaggatggactgcttctgtatacagaatgtatgcctggaatctgaaaacacgggcaggaagcctcaaggcatacgctaccagttctgttcctacagaacacccctcacgctgatcccttctctacagtaccacgtgttcccaccgctgcccaggacacctacgggggcacgggggcactacattgctcggagcagctctcttcacacaaccagacaggaggcagcacctagacgcctgctctgcctagaatccactttgctggccacctggcacagtcccttattgaaggcaacctctacatgctaccttaacatttgctataattaataccacactatgctaaacaaatctctgccagaagcaatagctacagagttctgctgctttgcctcttttaatgtaaaaagacacctagacaccaaaagtgttacacttaacctactgaaatctagcagtcgtgttaaaaacgcaggcagcttatttgggggcatcactgaattttttgttcaagaccatgataaggaacattaaatccaagccctaatatctgcctttagttgcactttcacaggaatggtgtgaggcttagcaataaataatatacatgaataataatagaaataacttatgtaaatgtgggacttgataaaaaatccccatctgctaagtgctctttctattatgctattaattcaatgtgctaatacatttatcactgttcataggaaaataatgaataaaggaaatgaaacatacatgaatacattgttgcaaataggaccagagtggaaagatacttgacttaagcactgatgtcaagaaatggattactgctgggatctattttaaccatccagagactgaaggtcaaactcagagatgctggcgaccacaggaatattgctggctaatatatgttattgcatttcatagaactaaagattatgaaacttcaagtagagcacagggtcccccgactaacctcagctcacaatagaatctggctggaaccctgcttgagtaagaaatgatagagtgagacataattcctgaccatcactgcttggctatgtgtcccctgaaaaaccaaagccctacactcaacaatataatggcattatttgtgtgacctgacaattcacacagaagcttcctctaaatgggaaaatcctctttctgttcaaggaataatttgctcactaaaggagaaaaaagaagaaagtagaaagtaacgaactccatgcgtttgccaattgaagtagaagagcttttcaaactgagacagtttcatatcttttccccaccatggatgtatcagatagaaaacagtaaagtcagaatttctcctgcaattatacatctcaacccccaccccccagcaaaactttgagtgggagacatttcatatagggcttgcatctctacaccagagctagctagcctagtgagcaaactgtagttattgtagctcagaggacagctctgtgtttctcgagcaccctgcttcctaagatggcacaacagatggctgaggtgcagcaggtcactggtcctcccacaatatcctgcttggcctggctccgctgccccgccccctgtcattcagcaggagtaggggtggggtcaggctcaggaactccagaatggtggcagacccaggggacccttggcctttcactgaggggcttaacctgagatctgcttcagtgagagcagagggttgaaagaatcgatttctcaatgcttgagcacctggtctgtgtaaatgactgaaacctccctgccagcctttctggagtgaagtcaggcagggtgtgtgtgtgtgaagtcaggcagtgtgtgtgtgtgtgtgtgaagtcaggcagggtgtgtgtgtgtgtgtgtgtgactcataaggaataaactgctttctgccatggtgtggtactgtgtctgttcatcccagtgtactgtcactattggctcagggggctgggtctctgagaaaagtgtgaatttaaaatgtagtataaaagtgacctcgagagtagaaaaaccaaagccttatgcaggttcctgtctaaactgtaatgttcatatgtactatataactgtaatttaggaattggaatgtaagagtttgcacttgtagtttatgtgcgtgtaaaacataccagttcttccagtatttgtcgagcactgtggttctttagaaaatggtctgcatactcagttacagatgcagtgcttcctttgttcacttgagtttagaaatgacagtgtcaaaaggtcatggatagtgaggggtgaaccgcagcagacatgtcaagggctgtgagagttaggactgtcccccactcccaaccccgcaaggagttttgccatttctaatgaaaccgtgctgctcacagacgagggccggcttcagggaagtttttagttgtatgtcctagaatttcaggttatttgggtacatcaaaaatgtctcttaagtaaaggccttctttattgcttaaacatcactctcaagcctaacttagtcactcagaacctagctaaaaagcaaaacatataagctgtagaatattatgaaggctgttaattgtctgaaggaatatgctaggtgatagttacagatgtgcaggaaaatagttacaagtactgtctctagaatacctctcagtcttggtcaggtttagagttttctctgaaagcgccaccttgtgaaacacattgggatagaggaataaaccccacactgaccttagggcgctgtgaattttaaaactgacttctgtccaacctaacccaacccaacccaacccaactccaaactaccttccatccccaccatttgaacttggaattgctgcaacagtattttggtagatgctggagggggggagcttgcatttattcccaggtggctattttttggaggggtcagaggaccagagcacagaggtgtgaacatcctagtggaagtcctctcaagttacctaacttgctgaaaataaaacaaactgaaaccaaaacaaaacaagaaaaccctagcagaaaacatgaagaagaagaagaagaagaagaagaagaagaagaagaagaagaagaagaagaagaagaagaagaagaagaaagaagaagaagaagcagcagcaatttggcactttattagaaaaatttgaaagatcaaattgagagaaacatttaaaattgatatcccctctctttcagaagacaagagaacaacaacaaaaatagttttggcttactggcttatttccttaaacaagaccaacaaagccgaaactgagttagagatgtttgagatatgcaatcctaccttgcagaggcgggaggctgtgggcaccagcccctcctggcctgtataactggactgagcctgtccataggaaggaaactggtgggagacgaaggtgtcctcatttgagaccactatcactaatcattccaggactcacaccttgcaccaggcagcttccccactgtggcagatgaatgcacggacaccttccttaggatgtacttggatgtaagtatgcacaggataaggggtttttgtaaggatgcacatgatccctttatcatggtttttggataaggcttataagttgtctattctcagctgcacgagaggcaaaggccttttaaactttaattttgtatagatattcttaggcatatatatgagtagagcttcagatggctgctttcttcctatgaaacaagaaatacagaatttgtgtattttgacatacctagtccataagtgctgaatgtgcgggatgacttataattatacttaattataattcttagaatatacttaaaggcaaacaaatatggttaacaatttatgtaaaaattaaaataaccttaaacatactgttgccacttttttggtaatttttaaagattaagaaattatacaatgtctttaatttcatgttacaagcaagcatgtattcttccaatggctatccatatgtgcttacacaagtgtcacactgggatggggattttcaatgttattctttcctagactctactatgtgacaaaagtgtgctttaagaaaatgtgagccacttctgtgctcatcataaaaaatagtcagctgtcatggtggtgcatgtctttagttttagcaggcagatctacatgagttcaaggccagcctggtctacacactgagttccaggatagccagggcttcacagagagaccccatctcaggaaaaacaaaacaagacaagacaaaaagccaaaaccaaaatcaggttttctccagaagaggagttctttggacagaagattgaaacaactgtgatgtttgaaagttgacatgatttaactcccacagtgacgatggctgtgactggctttagtagtcacagcttttaataaagcagctatgtttacttaaaagacaagttcaggacattctttaaaactcaaaatgcttgctcctgactttctcaagcaagttggctagcacccattgcagggtggacggcacagctttctattcaaaggaaagtattgtctttgagatagcagcaccctgtgcaacttggggtcttcatttttacttagcacgaccatgtggaggtcctatttttaagtgagcttctgagctgagtttagtaaatcacttggggctaaattcaagtctactggtcagagagtgggtcctgagagaaaaaacatgacaagctgggggcagaaatggccccgtgctacctgaacagcttctccatggcttaaccgtctgtcgtctttaaagaggggctgaataggaggcggcgggccactgggtgctctcaggtactcggcaactgtgtttctaaggctgtcaggttaggactactcacctgtgaggttagggggtctaactggagaacccgccctaccctctttaagaggttgttgtaactccagccagtcctgtaaatggtagagtctctggaaccaaaccttgaacagaagctattcggtatattcttgccctagtctcactaaaagctgcttcagtggaacctcagggcagtagggtctcctcagtgaatcaatggttagattctgacaaagacctgtgactggatgaggccatctaaggataagcggcacacagtaagctcttcagtttactctatgtttccctgggctactaaagaccccaatggcaagtctccttgtgtgaaaaccgggtttcagaggtgtgagtctgatgtaaagacatatccagagagcacctatatgaatgaagagctggccagacatatgatgtcctgagaggttgcggcgccctttctctaccatccaccacaatacgccatgtttctaataccaacatgtctatgatttaaaaatattactcaaagtttggagtgggctgaggagggtagctcatgcctttagttcaagcacactcgagacagaggcaagtggatctctgagtttgaggctagcctggtctacagagcaagttctaggacagccagggccacatagagaaaccctgcctagaaaaagcaaattaaacaacaacaaaaaaacaaactaaacaactaaccaaccaaacccaaaagccaaacacataaacacacacacacacacacacacacaaacaaagccaaaaaaaaaaaagaccccaaaattaacctcccactacctcactcaccaaaagccaaaacaaaactacttagaaataagctcaagacagctgacaaaagtgaagttaaactctatacttaagactctaaagaatacgggaagattccagtttaggatagctgtatttttcttgagcaaagctaaggaaaacaatcctttcttttttctttttcttcctttctttttttttctttctttcttttttttttttggcgaaagcaaaaccctcaaaattattttcactttatcacatggatgttaatatagaatggattaggcctcaatgcagtgagttttatggtcgatttctaggccctagcaaaaatgtctgtattttggaccttgttcaatgacaaggcagaactcgctgtccaagtgagacctcgagtagaccttgtcccagaggttccaggctgactgtctcgagcgttggcagtgtcggcagcagagctgtgaggacgagcgcagaacattctcagcctagcctctggcttcttaaagttttgtttttgaaaaaagaaaaaatcctttcttgcgatactgaatcagaagaatgtaatgtaatgttaaaaataaaaataaacagaagaagatgattcccaacctccaaagctctcaggaaagacatctaattcttctccatacagataaccatatgcaaagccgggcgtggtggcgcacgcctttgatcccagcacttgggaggcagaggcaggcgcatttctgaattcgaggccagcctggtctacagagtgagttccaggacagccagggctacacagagaaaccaaaaaacaaacaaacaaataaccacatgcattgttcagctacgagaaacacagtaaggtccataacatacaaacaccatctggagcctacactgccgtgtgaaacatcaggcagtctttcaaagctctacagtgaagcatcatctagcgtttacttaaatgtgctcaaacacgattcaaacaaaactcagctacgcttcccgaaagctgccttctacaccttctatggagtagtgccagcttagcactaagccacggatataataaggcaaaggtggcacagaatgtaaaggactgaaagaaaacagtaaggtacagttgtttataatgcccagggtaggctggctctgcagaaagcagggctgacatgaggcctcagacaaaaaaaaaaaaaaaaaaaaaaaaagaacaaaaacccagaaacacatcctgcggacagacagagagatcactttagagagtaagtagttatctctagaagagaggaaaagacatttcctcagacattacactgacaacatacacttaaagataggaaacaccaagtgacagtcggtagtagtctatacacacacagaacaagcactcttcactgcctaggtgacctcagctgcggcagggggaagactgtattacaaaggcacaaggggatactgttagggtttcggaatgggagcctacgcccaaagcattcggtgaaagacggtaagcgtgcaagcgggtgtgggattggggcagctgggccatctgtcgttagccaggcagtggcaggaaaatgaattagaagtgctggtggttgagagcttcgcactacacaaggcagcacaaggcagatgcgccatggtgggtggtggagacagctagatggtattcccgcctctagtcagagcaggaagtgattccctaaggtgacaaggtatcaaggtatcaagagacgtgaagaaaatgataacatctcacaccagaaaacaggtgctctctatctttaaaacctatctgaggtacactcactccttaaatgtattgcaagtaataagatacttatagcatctttccccaaagaaacaattaagtacatactgtactatatatagggcctgggacacattaagttcagctttccaaagagtaaatagaagatgtatgccttaaaaagtctcttaaaaaatattgtggttccccccattttttgtggcatctaaacctttattgtttactgctagcaaaagcttttggacaggaaggcaactctgaggacttaggtccaaccttcctaacaagactccattgtgaatcacctttcactgaacaagcccttcttactatcagtcacctctactctttaaaactcaattattcttgttttctacaaaaaaaaagtaacacttgacgagatcaggggtctttctctcccctcctcttctctcttacacacacatacgcatgcacacacactcacaagtaccaaagcaggcccagcagctgcaggcggattacatcataactcagctgggcctggattcccaccctacactggcagcattcaaggttagaaaacgaaatggcagcacaattggtcagcagcttctcttcttctggaagttttccaggttcttgaaacaaacagacaaaacaaacaagtgtacaaacgaacataaagctgcaatcacccttgcattgatctctgaacagtaaactaggtggtttccttggtaaggcagagcccacccagaagctggcagccagaaggttggcagccagcaatcttcaactgctctgagaggcttgcttaggggactcgcagccgccaatgtgttcagatgacgagctcatgggcatccccgtggaacctcaggctgtgttcagctccgaggtgctctggttggatggcaggtgagagttcaggttgtccttgtatctctccagatcttggaagtacgggtgattcagggcgccgtaggcggatatccttttagctggattaaacgtcaggcatttcagaagtaggtctttgcctagttcgtcaatatctgtcacaaacttctcgatgggttgagcagatttggaatgaaaagcctgccggggaagggccacgtccctaggccagtcttcctctcctgggagtccaatgatgtccaagatttttcctagttgatccacgtctgaacttccacgaaaaagaggctttctgcgaaacatttctgcaaagatgcaaccgacactccagaggtccacaggggtggcatagctggactggagcaggacttctggggctcggtaccacagcgtgacgaccaccgaggtaagggccatctgaaaactatagatgcgggcaaggccaaagtcagccagctttatctgtccactgctggtcaccagaatgttctgcggtttcagatcacgatgcactactctgtgagaatgaagaaagtccagacctcggagaagctgaaacatcatatcctttatggtttctgtgggtacgccgggctctggaactttatccaagtaagtggtcaagtcttgatcaacatgctcaaacactagtgtaagcttggtttctctgtccgtccgtgacactgtgcacacatcaaacaacctgaccacgttggggtgctcgaaggtctccaggtgcctcagcaccgccacctcgcggatggtggagagcggcatgccctcctcactggtctgcactcgcacgcgcttcagagccacgaagcggccgccgttcttcaggtcgcgggccttgaacaccttcccataggcgccttcgccgatctccgccacgcactcatactgctgatcggcgcgactcaggctgtccttctccatgctggcttcaggctgcgggtgcggcacagtggaaccggggtgctcactcgctgccttacacgcctcggggagtcggactcgcggccgccgggctagacggaccgaccttctcgcccgcgggtgcaagccgggcgcagccgctgcgaaactccgcctagccgagtcgccgcgccgccgccgcaggagagcgccgatccctcctcttccccctccgcagcgattacatagtctgcccacaatctctgcacttttcttccacagcagggctcgtgcagtcttcacgaaggagaggttgctggggcccctcggggatgagcgcagcgcggg

SEQ ID NO: 165 - DNA, 1505 bp, Rattus norvegicus
  source 1..1505: mol_type = genomic DNA
atggagaaggacagcctgagtcgcgccgaccagcagtatgagtgcgtggcggagatcggggaaggcgcctacgggaaggtgttcaaggcccgcgacctgaagaacggcggccgcttcgtggctctgaagcgcgtgcgagtgcagaccggagaggagggcatgccgctctccaccatccgcgaggtggcggtgctgaggcacctggagacctttgagcaccccaacgtggtcaggttgtttgacgtgtgcacagtgtcacggacagacagagaaactaaacttacgctagtgtttgagcatgttgatcaagacttgaccacttacttggataaagttccagaacccggtgtgcccacagagaccataaaggatatgatgtttcagcttctccgaggtctggacttcctccattctcacagagtagtgcatcgtgacctgaagccacagaacattctggtgaccagcagtggacaaataaaactggctgacttcggccttgcccgcatctacagttttcagatggcccttacctcggtggtcgtcacgctgtggtaccgagccccggaagtcctgctccagtccagctacgccacccccgtggacctctggagtgttggctgcatctttgcagaactgtttcgcagaaagcctctttttcgtggaagttcagacgtggatcaactagggaaaatcttggacgtcatcggactcccaggagaagaagactggcctagggatgttgctcttcccagacaggcttttcactccaaatctgcccaacccatcgagaagtttgtgacagacatcgacgagctaggcaaagacctccttctgaaatgcttgacgtttaatccagctaaaagaatatccgcttatggcgccctgaatcacccgtacttccaagacctggagagatacaaggacaacctgcattctcacctgtcgtccagccagagcacctcggagctgaacacagcctgaggctccccggggatgccgctagctcgtcatctgaacacactggtgtcccccaggcaagccttgcagagcagttacagactgctggctgaggacccttctagctgccagcttctgggtgggctctgcctcaccaaggaaaccacctagtttactgttcagagatcaatgcaagagcgattgcagctttacgttcatacacgtgtttgtttgtctgtctgtttcaagaacctggaagacttccagaagagaagctgctgaccaattgtgctgccatttcgttttctaaccttgaatgctgccagtgtagaatggggatccaggcccagcggagttatgatgtaatctgcctgcagctgctgggcctgctttggtacttgtgtgtgtgtgtgtgtgtgtgtgtgtgtgtgtgtgtgtgtgtgtgtgtgtgtgtgtgtaagagacgggggaagggagagagaaagatccctgatctcgtaaagtgttactttttcgtagacaagaagaataaatgaattttaaagaaa

SEQ ID NO: 166 - DNA, 1505 bp, Rattus norvegicus
  source 1..1505: mol_type = genomic DNA
tttctttaaaattcatttattcttcttgtctacgaaaaagtaacactttacgagatcagggatctttctctctcccttcccccgtctcttacacacacacacacacacacacacacacacacacacacacacacacacacacacacacaagtaccaaagcaggcccagcagctgcaggcagattacatcataactccgctgggcctggatccccattctacactggcagcattcaaggttagaaaacgaaatggcagcacaattggtcagcagcttctcttctggaagtcttccaggttcttgaaacagacagacaaacaaacacgtgtatgaacgtaaagctgcaatcgctcttgcattgatctctgaacagtaaactaggtggtttccttggtgaggcagagcccacccagaagctggcagctagaagggtcctcagccagcagtctgtaactgctctgcaaggcttgcctgggggacaccagtgtgttcagatgacgagctagcggcatccccggggagcctcaggctgtgttcagctccgaggtgctctggctggacgacaggtgagaatgcaggttgtccttgtatctctccaggtcttggaagtacgggtgattcagggcgccataagcggatattcttttagctggattaaacgtcaagcatttcagaaggaggtctttgcctagctcgtcgatgtctgtcacaaacttctcgatgggttgggcagatttggagtgaaaagcctgtctgggaagagcaacatccctaggccagtcttcttctcctgggagtccgatgacgtccaagattttccctagttgatccacgtctgaacttccacgaaaaagaggctttctgcgaaacagttctgcaaagatgcagccaacactccagaggtccacgggggtggcgtagctggactggagcaggacttccggggctcggtaccacagcgtgacgaccaccgaggtaagggccatctgaaaactgtagatgcgggcaaggccgaagtcagccagttttatttgtccactgctggtcaccagaatgttctgtggcttcaggtcacgatgcactactctgtgagaatggaggaagtccagacctcggagaagctgaaacatcatatcctttatggtctctgtgggcacaccgggttctggaactttatccaagtaagtggtcaagtcttgatcaacatgctcaaacactagcgtaagtttagtttctctgtctgtccgtgacactgtgcacacgtcaaacaacctgaccacgttggggtgctcaaaggtctccaggtgcctcagcaccgccacctcgcggatggtggagagcggcatgccctcctctccggtctgcactcgcacgcgcttcagagccacgaagcggccgccgttcttcaggtcgcgggccttgaacaccttcccgtaggcgccttccccgatctccgccacgcactcatactgctggtcggcgcgactcaggctgtccttctccat

SEQ ID NO: 167 - DNA, 2387 bp, Macaca fascicularis
  source 1..2387: mol_type = genomic DNA
ctgtgcccaccccctcgccggagagagtgctggtaactccttccccagagtctgattacctgctccgcgaggccgcggacacgtgcggagagccgactgacactcgcagccccctcaggaggcccgacgcgactgggcccctcaggtgcaatgattctggactgagacgcccttgggcagaggctatgtaatcgtctctgtctgtgctgaggacttcgcttcggggagggaagaggagggatcggctcgcttctcaggcggcggcagcagcgactctgcaggcggagtttcgcggcggcggcaccagagttacgccagccccgcggggaggtcgctccatccagcctccgcagccgcgagagccccagcgcccgagcgcctgagccagcagggagcaaggaaagctagaccaatctccggggagccccggagtaggctagcggcggccgccagctagttgagcgcaccccccgcccgccccagcggcgacgcgccgggcggcgtccaggcggcatggagaaggacggcctgtgccgcgctgaccagcagtacgaatgcgtggcggagatcggggagggcgcctatgggaaggtgttcaaggcccgcgacttgaagaacggaggccgtttcgtggcgttgaagcgcgtgcgggtgcagacgggcgaggagggcatgccgctctccaccatccgcgaggtggcggtgctgaggcacctggagaccttcgagcaccccaacgtggtcaggttgtttgatgtgtgcacagtgtcacgaacagacagagaaaccaaactaactttagtgtttgaacatgtcgatcaagacttgaccacttacttggataaagttccagagcctggagtgcccactgaaaccataaaggatatgatgtttcagcttctccgaggtctggactttcttcattcacaccgagtagtgcatcgcgatctaaaaccacagaacattctggtgaccagcagcggacaaataaaactcgctgacttcggccttgcccgcatctatagtttccagatggctctaacctcagtggtcgtcacgctgtggtacagagctcccgaagtcttgctccagtccagctacgccacccccgtggatctatggagtgttggctgcatatttgcagaaatgtttcgtagaaagcctctttttcgtggaagttcagatgtcgatcaactaggaaaaatcttggacgtaattggactcccaggagaagaagactggcctagagatgttgcccttcccaggcaggcttttcattcaaaatctgcccaaccaattgagaagtttgtaacagatatcgatgaactaggcaaagacctacttctgaagtgtttgacatttaacccagccaaaagaatatcagcctacagtgccctgtctcacccatacttccaggacctggagaggtgcaaagaaaacctggattcccacctgccgcccagccagaacacctcggagctgaatacagcctgaggcctcagcagctgccttaagctgatcctgcggagaacacccttggtggctcaagggtcccccttagcaagccctgcagagctgtggaggattgcctgtctggaggccttccagctgccgtcttctggacaggctctgcttctccaaggaaaccgccagtttactgttttgaaatcaatgcaagagtgattgcagctttatgttcgtttgtttgtttgtttgtctgtttgtttcaagaacctggaaaaattccagaagaagagaagctgctgaccaattgtgctgccatttcatttttctaaccttgaatgctgccagtgtggagtgggtaatccaggcacagctgagttatgatgtaatctctctgcagctgccgggcctgatttggtacttttgagtatgtgtgcgtgtgtgtgtgtgtgtgtgtgtgtgtgtgtgtgtgagagagagagattctgtgatctcttaaagtgttactttttgtaaacggcaagaacgattcagttttaaagactcaaggtgatcgataaataacaggcatttgttcactgaaggtgatccaccaaaatggtcttctcaaattagacagttaaccctagaaagttaaccccatgtcctcagcatttcttttctggccaaaagcagtaaatttgctagcagtaaaaggtgaagttttatacacacagcaaaaaggagaaaaaaattctagtatattttaagagatgtgcatgcattctatttagtcttcaaaacgctgaatttacttgttgtaagtctattttaacctgtatgatatcatgctttatcatttcttttggaaaataccctgtaagctttttattacttgccatagatttagggagtgtatctcagatagatttaaaaaaaaaaaa

SEQ ID NO: 168 - DNA, 2387 bp, Macaca fascicularis
  source 1..2387: mol_type = genomic DNA
ttttttttttttaaatctatctgagatacactccctaaatctatggcaagtaataaaaagcttacagggtattttccaaaagaaatgataaagcatgatatcatacaggttaaaatagacttacaacaagtaaattcagcgttttgaagactaaatagaatgcatgcacatctcttaaaatatactagaatttttttctcctttttgctgtgtgtataaaacttcaccttttactgctagcaaatttactgcttttggccagaaaagaaatgctgaggacatggggttaactttctagggttaactgtctaatttgagaagaccattttggtggatcaccttcagtgaacaaatgcctgttatttatcgatcaccttgagtctttaaaactgaatcgttcttgccgtttacaaaaagtaacactttaagagatcacagaatctctctctctcacacacacacacacacacacacacacacacacacgcacacatactcaaaagtaccaaatcaggcccggcagctgcagagagattacatcataactcagctgtgcctggattacccactccacactggcagcattcaaggttagaaaaatgaaatggcagcacaattggtcagcagcttctcttcttctggaatttttccaggttcttgaaacaaacagacaaacaaacaaacaaacgaacataaagctgcaatcactcttgcattgatttcaaaacagtaaactggcggtttccttggagaagcagagcctgtccagaagacggcagctggaaggcctccagacaggcaatcctccacagctctgcagggcttgctaagggggacccttgagccaccaagggtgttctccgcaggatcagcttaaggcagctgctgaggcctcaggctgtattcagctccgaggtgttctggctgggcggcaggtgggaatccaggttttctttgcacctctccaggtcctggaagtatgggtgagacagggcactgtaggctgatattcttttggctgggttaaatgtcaaacacttcagaagtaggtctttgcctagttcatcgatatctgttacaaacttctcaattggttgggcagattttgaatgaaaagcctgcctgggaagggcaacatctctaggccagtcttcttctcctgggagtccaattacgtccaagatttttcctagttgatcgacatctgaacttccacgaaaaagaggctttctacgaaacatttctgcaaatatgcagccaacactccatagatccacgggggtggcgtagctggactggagcaagacttcgggagctctgtaccacagcgtgacgaccactgaggttagagccatctggaaactatagatgcgggcaaggccgaagtcagcgagttttatttgtccgctgctggtcaccagaatgttctgtggttttagatcgcgatgcactactcggtgtgaatgaagaaagtccagacctcggagaagctgaaacatcatatcctttatggtttcagtgggcactccaggctctggaactttatccaagtaagtggtcaagtcttgatcgacatgttcaaacactaaagttagtttggtttctctgtctgttcgtgacactgtgcacacatcaaacaacctgaccacgttggggtgctcgaaggtctccaggtgcctcagcaccgccacctcgcggatggtggagagcggcatgccctcctcgcccgtctgcacccgcacgcgcttcaacgccacgaaacggcctccgttcttcaagtcgcgggccttgaacaccttcccataggcgccctccccgatctccgccacgcattcgtactgctggtcagcgcggcacaggccgtccttctccatgccgcctggacgccgcccggcgcgtcgccgctggggcgggcggggggtgcgctcaactagctggcggccgccgctagcctactccggggctccccggagattggtctagctttccttgctccctgctggctcaggcgctcgggcgctggggctctcgcggctgcggaggctggatggagcgacctccccgcggggctggcgtaactctggtgccgccgccgcgaaactccgcctgcagagtcgctgctgccgccgcctgagaagcgagccgatccctcctcttccctccccgaagcgaagtcctcagcacagacagagacgattacatagcctctgcccaagggcgtctcagtccagaatcattgcacctgaggggcccagtcgcgtcgggcctcctgagggggctgcgagtgtcagtcggctctccgcacgtgtccgcggcctcgcggagcaggtaatcagactctggggaaggagttaccagcactctctccggcgagggggtgggcacag

SEQ ID NO: 169 - DNA, 1878 bp, Macaca mulatta
  source 1..1878: mol_type = genomic DNA
ggagagagtgctggtaactccttccccagagtctgattacctgctccgcgaggccgcggacacgtgcggagagccgactgacactcgcagccccctcaggaggcccgacgcgactgggcccctcaggtgcaatgattctggactgagacgcccttgggcagaggctatgtaatcgtctctgtctgtgctgaggacttcgcttcggggagggaagaggagggatcggctcgcttctcaggcggcggcagcagcgactctgcaggcggagtttcgcggcggcggcaccagagttacgccagccccgcggggaggtcgctccatccagcctccgcagccgcgagagccccagcgcccgagcgcctgagccagcagggagcaaggaaagctagaccaatctccggggagccccggagtaggctagcggcggccgccagctagttgagcgcaccccccgcccgccccagcggcgacgcgccgggcggcgtccaggcggcatggagaaggacggcctgtgccgcgctgaccagcagtacgaatgcgtggcggagatcggggagggcgcctatgggaaggtgttcaaggcccgcgacttgaagaacggaggccgtttcgtggcgttgaagcgcgtgcgggtgcagacgggcgaggagggcatgccgctctccaccatccgcgaggtggcggtgctgaggcacctggagaccttcgagcaccccaacgtggtcaggttgtttgatgtgtgcacagtgtcacgaacagacagagaaaccaaactaactttagtgtttgaacatgtcgatcaagacttgaccacttacttggataaagttccagagcctggagtgcccactgaaaccataaaggatatgatgtttcagcttctccgaggtctggactttcttcattcacaccgagtagtgcatcgcgatctaaaaccacagaacattctggtgaccagcagcggacaaataaaactcgctgacttcggccttgcccgcatctatagtttccagatggctctaacctcagtggtcgtcacgctgtggtacagagctcccgaagtcttgctgcagtccagctacgccacccccgtggatctatggagtgttggctgcatatttgcagaaatgtttcgtagaaagcctctttttcgtggaagttcagatgtcgatcaactaggaaaaatcttggacgtaattggactcccaggagaagaagactggcctagagatgttgcccttcccaggcaggcttttcattcaaaatctgcccaaccaattgagaagtttgtaacagatatcgatgaactaggcaaagacctacttctgaagtgtttgacatttaacccagccaaaagaatatcagcctacagtgccctgtctcacccatacttccaggacctggagaggtgcaaagaaaacctggattcccacctgccgcccagccagaacacctcggagctgaatacagcctgaggcctcagcagctgccttaagctgatcctgcggagaacacccttggtggctcaagggtcccccttagcaagccctgcagagctgtggaggattgcctgtctggaggccttccagctgccgtcttctggacaggctctgcttctccaaggaaaccgccagtttactgttttgaaatcaatgcaagagtgattgcagctttatgttcgtttgtttgtttgtttgtctgtttgtttcaagaacctggaaaaattccagaagaagagaagctgctgaccaattgtgctgccatttcatttttctaaccttgaatgctgccagtgtggagtgggtaatccaggcacagctgagttatgatgtaatctctctgcagctgccgggcctgatttggtacttttgagtatgt

SEQ ID NO: 170 - DNA, 1878 bp, Macaca mulatta
  source 1..1878: mol_type = genomic DNA
acatactcaaaagtaccaaatcaggcccggcagctgcagagagattacatcataactcagctgtgcctggattacccactccacactggcagcattcaaggttagaaaaatgaaatggcagcacaattggtcagcagcttctcttcttctggaatttttccaggttcttgaaacaaacagacaaacaaacaaacaaacgaacataaagctgcaatcactcttgcattgatttcaaaacagtaaactggcggtttccttggagaagcagagcctgtccagaagacggcagctggaaggcctccagacaggcaatcctccacagctctgcagggcttgctaagggggacccttgagccaccaagggtgttctccgcaggatcagcttaaggcagctgctgaggcctcaggctgtattcagctccgaggtgttctggctgggcggcaggtgggaatccaggttttctttgcacctctccaggtcctggaagtatgggtgagacagggcactgtaggctgatattcttttggctgggttaaatgtcaaacacttcagaagtaggtctttgcctagttcatcgatatctgttacaaacttctcaattggttgggcagattttgaatgaaaagcctgcctgggaagggcaacatctctaggccagtcttcttctcctgggagtccaattacgtccaagatttttcctagttgatcgacatctgaacttccacgaaaaagaggctttctacgaaacatttctgcaaatatgcagccaacactccatagatccacgggggtggcgtagctggactgcagcaagacttcgggagctctgtaccacagcgtgacgaccactgaggttagagccatctggaaactatagatgcgggcaaggccgaagtcagcgagttttatttgtccgctgctggtcaccagaatgttctgtggttttagatcgcgatgcactactcggtgtgaatgaagaaagtccagacctcggagaagctgaaacatcatatcctttatggtttcagtgggcactccaggctctggaactttatccaagtaagtggtcaagtcttgatcgacatgttcaaacactaaagttagtttggtttctctgtctgttcgtgacactgtgcacacatcaaacaacctgaccacgttggggtgctcgaaggtctccaggtgcctcagcaccgccacctcgcggatggtggagagcggcatgccctcctcgcccgtctgcacccgcacgcgcttcaacgccacgaaacggcctccgttcttcaagtcgcgggccttgaacaccttcccataggcgccctccccgatctccgccacgcattcgtactgctggtcagcgcggcacaggccgtccttctccatgccgcctggacgccgcccggcgcgtcgccgctggggcgggcggggggtgcgctcaactagctggcggccgccgctagcctactccggggctccccggagattggtctagctttccttgctccctgctggctcaggcgctcgggcgctggggctctcgcggctgcggaggctggatggagcgacctccccgcggggctggcgtaactctggtgccgccgccgcgaaactccgcctgcagagtcgctgctgccgccgcctgagaagcgagccgatccctcctcttccctccccgaagcgaagtcctcagcacagacagagacgattacatagcctctgcccaagggcgtctcagtccagaatcattgcacctgaggggcccagtcgcgtcgggcctcctgagggggctgcgagtgtcagtcggctctccgcacgtgtccgcggcctcgcggagcaggtaatcagactctggggaaggagttaccagcactctctcc

SEQ ID NO: 171 - DNA, 6838 bp, Homo sapiens
  source 1..6838: mol_type = genomic DNA
gtcctggcaatatggcgtcctccttgatgggctgatgagatgagtttcactgtagctccaaaccagagggcaaagctcccatgacccaataagcccacattgtccctttcctccgtggttccgtgtcgcccgtttctcaggactcgttctcaggcaggagagagcctcggggctgaaggccaggaccagccaggccgcgcggacctgaggttgaggaaccgggtgcaggcgagcacgatgggccggtcgtggctctggttgcagcagctcagacgagtgcgggacccgcagggctgagagtggctggaggagacccagggccctttgaacccgatcccttggccggagacctcagcccagtcggcccagtgggcgaaccggcaccaagagcggcctgcctgtcttcggaactgctgaggcggtggaggccgagagcagggtcatcgtgaggcctgaagtctcttacgcttttggcagctcccctcgcagcccctctggaaacgtacagcctcaggagcagccagtggcttgggacctggggtggtgtgtgtctgcggagcttcttgggctgccccatttcctagcggcccccacctccccacttcccgctcagagttagagataaggatctcagacttttgcctgagtaagggtctccgcactctttatccatttggttttcgatttcccgtttttgtttcttatttcaccaattctggtacacgctagtttttaaggctggaggttctcgagcgcttgctgccaaggactcccccaccccctcccccactgatggagtccgaaatgctgcaatcgcctcttctgggcctgggggaggaagatgaggctgatcttacagactggaacctacctttggcttttatgaaaaagaggcactgtgagaaaattgaaggctccaaatccttagctcagagctggaggatgaaggatcggatgaagacagtcagtgttgccttagttttgtgcctgaatgttggtgtggaccctcccgatgtggtgaagaccacgccctgtgcacgcttggaatgctggatcgatcctctgtcgatgggtcctcagaaagctctggaaaccatcggtgcaaatttacagaagcagtacgagaactggcagccaagggcccggtacaagcagagccttgacccaactgtggatgaagtcaagaagctctgcacgtccttacgtcgcaacgccaaggaggagcgagtcctctttcactacaatggccacggggtgccccggcccacagtcaacggggaggtctgggtcttcaacaagaactacacgcagtacatccctctgtccatatatgacctgcagacgtggatgggcagcccgtcgatcttcgtctacgactgctccaatgctggcttgatcgtcaagtccttcaagcagttcgcactacagcgggagcaggagctggaggtagctgcaatcaacccaaatcaccctcttgctcagatgcctttgcctccgtcgatgaaaaactgcatccagctggcagcctgcgaggccaccgagctgctgcccatgatccccgacctcccggctgacctattcacctcctgcctcaccacccccatcaagatcgccctgcgctggttttgcatgcagaaatgtgtcagtctggtgcctggcgtcacactggatttgatagaaaagatccctggccgcctgaacgacaggaggacgcccctgggtgaactgaactggatcttcacagccatcacagacaccatcgcgtggaacgtgctcccccgggatctcttccaaaagctcttcagacaggacttgctggtggctagtctgtttcgaaattttttattggcggaaaggattatgaggtcgtataactgcactcccgtcagcagcccgcgtctgccgcccacgtacatgcacgccatgtggcaagcctgggacctggctgttgacatctgtctgtctcagctgccgacgatcatcgaggaaggcactgcgtttcggcacagcccgttcttcgccgagcagctgaccgcattccaggtgtggctcaccatgggcgtggagaaccgaaacccacccgaacagctgcccatcgtcctgcaggtgctgttaagccaagtgcaccggctgagagcattggacttgcttggaagatttttggacctgggtccctgggcagtgagcctggccttgtctgtcggcatcttcccctacgtgctgaagctgctccagagctcggcccgagagctgcggccacttctcgttttcatctgggccaagatcctcgcagtggacagctcgtgccaagcggacctcgtgaaggacaacggccacaagtacttcctgtcggtcctggcggacccctacatgccagctgaacaccggaccatgacggctttcattctcgccgtgatcgtcaacagctatcacacggggcaggaagcctgccttcagggaaacctcattgccatctgcctggagcagctcaacgacccgcaccccttgctgcgccagtgggtggccatctgcctcggcaggatctggcagaacttcgactcggcgaggtggtgcggcgtgagggacagcgctcatgagaagctctacagcctcctctccgaccccattcccgaggtccgctgcgcagcggtcttcgcccttggcacgttcgtgggcaactctgcagagaggacggaccactccaccaccatcgaccacaacgtggccatgatgctggcccagctggtcagcgacgggagccccatggtccggaaggagctggtggtggctctgagtcatcttgtggttcagtatgaaagcaatttctgcaccgtggccctgcagttcatagaagaggaaaagaactacgccttgccttctccagcaaccacagagggagggagtttgaccccagtgcgagacagcccgtgcacccccagacttcgttctgtgagctcctatggaaacatccgtgctgtcgccacagccaggagcctcaacaaatctttgcagaacctgagtttgacagaggaatctggtggcgcggtggcgttctcccccggaaacctcagcaccagcagcagcgccagcagcaccctgggcagccccgagaatgaggagcatatcctgtccttcgagaccatcgacaagatgcgccgcgccagctcctactcctccctcaactccctcatcggagtttcctttaacagtgtttacactcagatttggagagtcctgctgcacctggctgctgacccctatccagaggtctcggacgtggccatgaaagtactcaacagcatcgcctacaaggccaccgtgaacgcccggccgcagcgcgtcctggacacctcctccctcacgcagtcggcccccgccagccccaccaacaagggcgtgcacatccaccaggcggggggctcccctccggcgtccagcaccagcagctccagcctgaccaacgatgtggccaagcagccggtcagccgagacttgccttctggccggccgggcaccacaggccccgctggggcgcagtacacccctcactcccaccagttcccccggacacggaagatgttcgacaagggcccagagcagactgcggacgacgcggacgatgctgctggacacaaaagtttcatctccgccacggtgcagacggggttctgcgactggagcgcccgctattttgcccagcccgtcatgaagatcccagaagagcacgacctggagagtcagatccgcaaggagcgggagtggcggttcctgcgaaacagccgtgtcaggaggcaggcccagcaagtcattcagaagggcattacgagattggacgaccaaatatttctgaacaggaaccccggcgtcccctctgtggtgaaattccaccccttcacgccgtgcatcgccgtagccgacaaggacagcatctgcttttgggactgggagaaaggggagaagctggattatttccacaatgggaaccctcggtacacgagggtcactgccatggagtatctgaacggccaggactgctcgcttctgctgacggccacagacgatggtgccatcagggtctggaagaattttgctgatttggaaaagaacccagagatggtgaccgcgtggcaggggctctcggacatgctgccaacgacgcgaggagctgggatggtggtggactgggagcaggagaccggcctcctcatgagctcaggagacgtgcggatcgtccggatctgggacacagaccgtgagatgaaggtgcaggacatccctacgggcgcagacagctgtgtgacgagtctgtcctgtgattcccaccgctcactcatcgtggctggcctcggtgacggctccatccgcgtctacgacagaaggatggcactcagcgaatgccgcgtcatgacgtaccgggagcacacagcctgggtggtgaaggcctccctgcagaagcgtcccgacggccacatcgtgagtgtgagcgtcaatggagatgtgcgcatctttgatccccggatgcctgagtcggtaaatgtgcttcagatcgtgaaggggctgacggccctggacatccacccccaggcggacctgatcgcatgtggctccgtcaatcagttcaccgccatctacaacagcagcggagagctcatcaacaacatcaagtactacgacggcttcatgggccagcgggtcggcgccatcagctgcctggccttccacccgcactggcctcacctggccgtgggaagcaacgactactacatctccgtgtactcggtggagaagcgtgtcagatagcggcgtgacccgggcccaccaggccacggccgcctgctgtacatagtgaagctgtcactcgccggggcacggggcgtcggctgctgcggccccgcagtgtgaacgttggctgctgccttagctgctgatgacggcaggagggccctgctactcgcttttgtctgtcttcgctgtcgtgtctggaatgtcagggaaggggagggctcgggttgacggtggcttcccactgagcaccagcatccaggtgcacccccgcggccacggcgcctctgtccctctcctgttctgtgtttctctgagacgctgaaaggggaaacacctcactttatttccatgtaatcagagcattagctgcagaaaaaccccccgacagagccctggcggagaggcaggcgctggggctcctacgggtccctggggcagctgtccccatcaggccaagagcgagcgagaggcgctgccccagccaggcccaccacctctcacagtcagtgcacgcaagcagggacatttcctagccagctgggggacactggaaattcgggaaaccaagagagaggaagaaggagacgcccctccaactggcgggtgtgaaggaagccgcccaggggtccgggctgtccttggccgctggcagcatcactgagcaggaagcgcacagcccaccctccccgcacctccaggtctctggactccagttttggcccctctcacacagagctgtcagcaggggccgctgtggcggtgcacaggggaggcaggtccttggcgaggtagcccctgccttaatccacggggctcctttccctccgaagggctgctcttccccacaggcgcggggacagcagcccgacctgtggtctccatgcctgtgccctcacacaggtgtagcacacgcatgtgcagatggcaccacggccggcacctgggggcacacacatgcaggcggcgtggtctccctgctctgtccccacacgttcctcacatacaggcaagaggcactgccgggtcccggacggctccgggtgacaccagccccgtctccagccttgagccgcccatgctgatgcgacctcggctgacagctgggcctgtggtgcagacaggagctgtgtggacagtcccgcccaggaggggccgcagggcgtgtatgagcagttttgcaaacagaacacaaccacaatgatggtattttgaaaagtgttctttccgtgttcgtcgggaatcaggattattgagaggtgaaggagccaggtggcttcattctggcggtgagaggcccacgaccacgggagtgagagctggtgtggcgaggcccggctctcctgcggtgtggctggtggcctgccgtggccaagagcatcttctgggtggatggaaccctgcctggtcacatttggccagagacacacctggccctcagggggctgagctggagactgagctggggctggccgggacgtgacaaggcaggacagaggcggcccctccgctgctcctttttggaatgcgagctcccaccagaagaaggttccggcacgaatcccatccccacgtctgggccgagaaagcagcccgggtccggaaggtgtagagagtcccggcctcactcagctcacagggcgtgccaggcggcaacaccagaatcttccagaagcccagctccacccgcacacgcagcttcccatccagtccttcaactcaattcttacccaacacgcgtttctgtttgttttgagacaaaatcaccacctgtcaaaaggcaggtggctccagaggggtcaagacccccccccgcccccgctccaccctggagcccacccccatgggcaccgcgtgccgcctgcacgtgggctgtcttcacaggtctgatgtgaaaattcaatcacgacgttaaccggctcgagagagcgccggcctagaggctcattatctatttattttaccaaacgcgaattgagacggactttgacaaaacacgaaatggtaatgtgaagctaagagcagagagtgaccaacagtaaacaacacgcgcaga

SEQ ID NO: 172 - DNA, 6838 bp, Homo sapiens
  source 1..6838: mol_type = genomic DNA
tctgcgcgtgttgtttactgttggtcactctctgctcttagcttcacattaccatttcgtgttttgtcaaagtccgtctcaattcgcgtttggtaaaataaatagataatgagcctctaggccggcgctctctcgagccggttaacgtcgtgattgaattttcacatcagacctgtgaagacagcccacgtgcaggcggcacgcggtgcccatgggggtgggctccagggtggagcgggggcgggggggggtcttgacccctctggagccacctgccttttgacaggtggtgattttgtctcaaaacaaacagaaacgcgtgttgggtaagaattgagttgaaggactggatgggaagctgcgtgtgcgggtggagctgggcttctggaagattctggtgttgccgcctggcacgccctgtgagctgagtgaggccgggactctctacaccttccggacccgggctgctttctcggcccagacgtggggatgggattcgtgccggaaccttcttctggtgggagctcgcattccaaaaaggagcagcggaggggccgcctctgtcctgccttgtcacgtcccggccagccccagctcagtctccagctcagccccctgagggccaggtgtgtctctggccaaatgtgaccaggcagggttccatccacccagaagatgctcttggccacggcaggccaccagccacaccgcaggagagccgggcctcgccacaccagctctcactcccgtggtcgtgggcctctcaccgccagaatgaagccacctggctccttcacctctcaataatcctgattcccgacgaacacggaaagaacacttttcaaaataccatcattgtggttgtgttctgtttgcaaaactgctcatacacgccctgcggcccctcctgggcgggactgtccacacagctcctgtctgcaccacaggcccagctgtcagccgaggtcgcatcagcatgggcggctcaaggctggagacggggctggtgtcacccggagccgtccgggacccggcagtgcctcttgcctgtatgtgaggaacgtgtggggacagagcagggagaccacgccgcctgcatgtgtgtgcccccaggtgccggccgtggtgccatctgcacatgcgtgtgctacacctgtgtgagggcacaggcatggagaccacaggtcgggctgctgtccccgcgcctgtggggaagagcagcccttcggagggaaaggagccccgtggattaaggcaggggctacctcgccaaggacctgcctcccctgtgcaccgccacagcggcccctgctgacagctctgtgtgagaggggccaaaactggagtccagagacctggaggtgcggggagggtgggctgtgcgcttcctgctcagtgatgctgccagcggccaaggacagcccggacccctgggcggcttccttcacacccgccagttggaggggcgtctccttcttcctctctcttggtttcccgaatttccagtgtcccccagctggctaggaaatgtccctgcttgcgtgcactgactgtgagaggtggtgggcctggctggggcagcgcctctcgctcgctcttggcctgatggggacagctgccccagggacccgtaggagccccagcgcctgcctctccgccagggctctgtcggggggtttttctgcagctaatgctctgattacatggaaataaagtgaggtgtttcccctttcagcgtctcagagaaacacagaacaggagagggacagaggcgccgtggccgcgggggtgcacctggatgctggtgctcagtgggaagccaccgtcaacccgagccctccccttccctgacattccagacacgacagcgaagacagacaaaagcgagtagcagggccctcctgccgtcatcagcagctaaggcagcagccaacgttcacactgcggggccgcagcagccgacgccccgtgccccggcgagtgacagcttcactatgtacagcaggcggccgtggcctggtgggcccgggtcacgccgctatctgacacgcttctccaccgagtacacggagatgtagtagtcgttgcttcccacggccaggtgaggccagtgcgggtggaaggccaggcagctgatggcgccgacccgctggcccatgaagccgtcgtagtacttgatgttgttgatgagctctccgctgctgttgtagatggcggtgaactgattgacggagccacatgcgatcaggtccgcctgggggtggatgtccagggccgtcagccccttcacgatctgaagcacatttaccgactcaggcatccggggatcaaagatgcgcacatctccattgacgctcacactcacgatgtggccgtcgggacgcttctgcagggaggccttcaccacccaggctgtgtgctcccggtacgtcatgacgcggcattcgctgagtgccatccttctgtcgtagacgcggatggagccgtcaccgaggccagccacgatgagtgagcggtgggaatcacaggacagactcgtcacacagctgtctgcgcccgtagggatgtcctgcaccttcatctcacggtctgtgtcccagatccggacgatccgcacgtctcctgagctcatgaggaggccggtctcctgctcccagtccaccaccatcccagctcctcgcgtcgttggcagcatgtccgagagcccctgccacgcggtcaccatctctgggttcttttccaaatcagcaaaattcttccagaccctgatggcaccatcgtctgtggccgtcagcagaagcgagcagtcctggccgttcagatactccatggcagtgaccctcgtgtaccgagggttcccattgtggaaataatccagcttctcccctttctcccagtcccaaaagcagatgctgtccttgtcggctacggcgatgcacggcgtgaaggggtggaatttcaccacagaggggacgccggggttcctgttcagaaatatttggtcgtccaatctcgtaatgcccttctgaatgacttgctgggcctgcctcctgacacggctgtttcgcaggaaccgccactcccgctccttgcggatctgactctccaggtcgtgctcttctgggatcttcatgacgggctgggcaaaatagcgggcgctccagtcgcagaaccccgtctgcaccgtggcggagatgaaacttttgtgtccagcagcatcgtccgcgtcgtccgcagtctgctctgggcccttgtcgaacatcttccgtgtccgggggaactggtgggagtgaggggtgtactgcgccccagcggggcctgtggtgcccggccggccagaaggcaagtctcggctgaccggctgcttggccacatcgttggtcaggctggagctgctggtgctggacgccggaggggagccccccgcctggtggatgtgcacgcccttgttggtggggctggcgggggccgactgcgtgagggaggaggtgtccaggacgcgctgcggccgggcgttcacggtggccttgtaggcgatgctgttgagtactttcatggccacgtccgagacctctggataggggtcagcagccaggtgcagcaggactctccaaatctgagtgtaaacactgttaaaggaaactccgatgagggagttgagggaggagtaggagctggcgcggcgcatcttgtcgatggtctcgaaggacaggatatgctcctcattctcggggctgcccagggtgctgctggcgctgctgctggtgctgaggtttccgggggagaacgccaccgcgccaccagattcctctgtcaaactcaggttctgcaaagatttgttgaggctcctggctgtggcgacagcacggatgtttccataggagctcacagaacgaagtctgggggtgcacgggctgtctcgcactggggtcaaactccctccctctgtggttgctggagaaggcaaggcgtagttcttttcctcttctatgaactgcagggccacggtgcagaaattgctttcatactgaaccacaagatgactcagagccaccaccagctccttccggaccatggggctcccgtcgctgaccagctgggccagcatcatggccacgttgtggtcgatggtggtggagtggtccgtcctctctgcagagttgcccacgaacgtgccaagggcgaagaccgctgcgcagcggacctcgggaatggggtcggagaggaggctgtagagcttctcatgagcgctgtccctcacgccgcaccacctcgccgagtcgaagttctgccagatcctgccgaggcagatggccacccactggcgcagcaaggggtgcgggtcgttgagctgctccaggcagatggcaatgaggtttccctgaaggcaggcttcctgccccgtgtgatagctgttgacgatcacggcgagaatgaaagccgtcatggtccggtgttcagctggcatgtaggggtccgccaggaccgacaggaagtacttgtggccgttgtccttcacgaggtccgcttggcacgagctgtccactgcgaggatcttggcccagatgaaaacgagaagtggccgcagctctcgggccgagctctggagcagcttcagcacgtaggggaagatgccgacagacaaggccaggctcactgcccagggacccaggtccaaaaatcttccaagcaagtccaatgctctcagccggtgcacttggcttaacagcacctgcaggacgatgggcagctgttcgggtgggtttcggttctccacgcccatggtgagccacacctggaatgcggtcagctgctcggcgaagaacgggctgtgccgaaacgcagtgccttcctcgatgatcgtcggcagctgagacagacagatgtcaacagccaggtcccaggcttgccacatggcgtgcatgtacgtgggcggcagacgcgggctgctgacgggagtgcagttatacgacctcataatcctttccgccaataaaaaatttcgaaacagactagccaccagcaagtcctgtctgaagagcttttggaagagatcccgggggagcacgttccacgcgatggtgtctgtgatggctgtgaagatccagttcagttcacccaggggcgtcctcctgtcgttcaggcggccagggatcttttctatcaaatccagtgtgacgccaggcaccagactgacacatttctgcatgcaaaaccagcgcagggcgatcttgatgggggtggtgaggcaggaggtgaataggtcagccgggaggtcggggatcatgggcagcagctcggtggcctcgcaggctgccagctggatgcagtttttcatcgacggaggcaaaggcatctgagcaagagggtgatttgggttgattgcagctacctccagctcctgctcccgctgtagtgcgaactgcttgaaggacttgacgatcaagccagcattggagcagtcgtagacgaagatcgacgggctgcccatccacgtctgcaggtcatatatggacagagggatgtactgcgtgtagttcttgttgaagacccagacctccccgttgactgtgggccggggcaccccgtggccattgtagtgaaagaggactcgctcctccttggcgttgcgacgtaaggacgtgcagagcttcttgacttcatccacagttgggtcaaggctctgcttgtaccgggcccttggctgccagttctcgtactgcttctgtaaatttgcaccgatggtttccagagctttctgaggacccatcgacagaggatcgatccagcattccaagcgtgcacagggcgtggtcttcaccacatcgggagggtccacaccaacattcaggcacaaaactaaggcaacactgactgtcttcatccgatccttcatcctccagctctgagctaaggatttggagccttcaattttctcacagtgcctctttttcataaaagccaaaggtaggttccagtctgtaagatcagcctcatcttcctcccccaggcccagaagaggcgattgcagcatttcggactccatcagtgggggagggggtgggggagtccttggcagcaagcgctcgagaacctccagccttaaaaactagcgtgtaccagaattggtgaaataagaaacaaaaacgggaaatcgaaaaccaaatggataaagagtgcggagacccttactcaggcaaaagtctgagatccttatctctaactctgagcgggaagtggggaggtgggggccgctaggaaatggggcagcccaagaagctccgcagacacacaccaccccaggtcccaagccactggctgctcctgaggctgtacgtttccagaggggctgcgaggggagctgccaaaagcgtaagagacttcaggcctcacgatgaccctgctctcggcctccaccgcctcagcagttccgaagacaggcaggccgctcttggtgccggttcgcccactgggccgactgggctgaggtctccggccaagggatcgggttcaaagggccctgggtctcctccagccactctcagccctgcgggtcccgcactcgtctgagctgctgcaaccagagccacgaccggcccatcgtgctcgcctgcacccggttcctcaacctcaggtccgcgcggcctggctggtcctggccttcagccccgaggctctctcctgcctgagaacgagtcctgagaaacgggcgacacggaaccacggaggaaagggacaatgtgggcttattgggtcatgggagctttgccctctggtttggagctacagtgaaactcatctcatcagcccatcaaggaggacgccatattgccaggac

SEQ ID NO: 173 - DNA, 7046 bp, Mus musculus
  source 1..7046: mol_type = genomic DNA
aggacggaacaccgagctctacgccctagcaggggtagagcggtgagaacgctcgaagaggtttggcttattggacgcgccgtagatagcggtgcatgctgggccttggcaatatggcgtcctccttgatgtgctgatgagaggagttttcactgtggctccagagcagagggcaaaactcccctgacctaataagcccagtgtccctgtgctgtccgcgggcccgtgtcgcgtgtgtatcgggactcgttcctgggtaggagagagccacgaagcagaaggccagcacgggcctggccgcgcggcccggtggctgaggagcccggctgcggacgggcacgatgggccggtcctggctcaggttgcagcccctcaggcgagtgcgggacccgcagggctgagagccgctgggcgagccccgaagccccccgatcccgatcccttgaggcctcagccgggccagcacagtcggagaagccgccctgcgagcgggccggcctgcccgccgggagccactgaggcgttggaggccgagagccgggtcatcgccgggcctgaagtctctcccgcctccgccagtcccgcttgccgccctcctgacggcctgcagagctgcgggggccggcgaccgggcgcgcgtgtcgccgctcgtccgggtcctgcgggcttgggtacccacgggctcgccacccaccccgccccctccaacttcgcgctcagagttcgagataaagatctccgaggtttagcctcaataaggatcttcgaacgctctgccgccgtctctattcccagcttcccgttttcccgtattttattttaccagttctggtccacactagtttttaaggctggaggttctcgagcgcctgctgccaaggactccccctccccctcctcccctgatggagtcggagatgctgcagtcgcctcttatgggactcggggaggaagatgaggcggaccttacagattggaacttgcctttggcttttatgaagaaaagacattgtgagaaaatcgaaggctccaaatctttagcgcagagctggagaatgaaggatcggatgaagacggtgagtgtggccttggtcctgtgcctgaatgtgggtgtggatcctccggatgtggtgaagaccacaccctgtgctcggctggaatgctggatcgatcctctgtctatgggccctcagaaagctctggaaaccatcggtgcaaacctacagaagcagtatgagaactggcagccaagggctcggtacaagcagagcctcgaccctactgtggatgaagtcaagaaactttgcacatctctgcgccggaacgccaaggaggaacgggtccttttccactacaatggccacggggtgcccaggcctacagtgaatggagaggtctgggtcttcaacaagaactacactcagtacatccctctgtccatatacgacctgcagacgtggatgggcagcccatccatctttgtctacgactgttccaatgctggcctcatcgtcaagtccttcaaacagtttgcactgcagagggagcaggaactagaggtagctgcgattaacccaaaccatccacttgcccagatgcccttgcctccctcaatgaaaaactgcatccagttggcagcgtgtgaggcacacgagctgctgcccatgatccctgacctcccagccgacctgttcacatcctgcctcaccactcccatcaagattgctctgcgctggttttgcatgcagaagtgcgtgagtctggtgcctggagtcacactggatttgatagaaaagatccctggccggctgaatgaccggaggacccctctgggagagctgaactggatcttcacagccatcacagataccatcgcctggaatgtgctccctcgggatctcttccaaaagcttttccgacaggacctgctcgtggcaagtttgtttagaaattttttattggcagaaagaatcatgaggtcatataactgcaccccagtaagcagcccgcggctccccccgacatacatgcatgccatgtggcaggcctgggaccttgctgtggacatttgcctctctcagctgccaaccatcatcgaagagggtactgccttcaggcacagcccattctttgccgagcagctgacagcattccaggtgtggctcacaatgggtgtggaaaacaggagccccccagagcagctgcccatcgtcctgcaggtgctgctaagccaggtgcaccggctgagagcattggacttgctgggacggtttttggacttgggcccttgggcggtgagcttggccctgtcggtgggcatcttcccctatgtactgaagctgcttcagagctcagcccgagagcttcggccactccttgtcttcatctgggccaaaatcctcgctgtcgacagttcgtgccaagctgacctcgtgaaggacaacggtcacaagtacttcctatccgtcttggcagacccatacatgccagctgaacataggaccatgacagccttcattcttgctgtaatcgtcaacagctacacaacagggcaagaggcctgcctccagggaaacctgattgccatctgtctggagcagctcagcgacccacaccccttgctacgccagtgggtggccatttgcctgggaaggatctggcagaacttcgactctgcaagatggtgtggggtgagagacagtgcccacgaaaagctctatagcctcctctctgaccccatccctgaggtccgatgtgcagctgtatttgccctgggcacctttgtgggaaattctgctgagaggacagaccactctaccaccattgaccacaatgtggccatgatgctggctcagctgatcaatgatggaagccccatggtccggaaggagctggtggtggctctgagtcaccttgtagtccaatatgaaagcaatttctgcactgtggccctgcagttcatggaggaagaaaagaactaccctttgccttctccagcagccacagagggagggagcttgaccccagttcgagacagcccatgcacccccagactccgttcagtgagctcctatgggaacatccgagccgtcacgacagctaggaacctgaacaaatctttgcagaatctgagcttgacggaagaatcgggcagctcagtggccttctctcccgggaacctcagcaccagcagcagtgccagcagcaccttggggagccctgagaacgaggagtacatcctgtccttcgagaccatcgacaagatgcggcgtgtgagctcctactcagcgctcaactccctcataggagtttcttttaatagtgtttacactcaaatttggagagtcttactgcatctggctgctgatccctatccagatgtttctgatttagccatgaaagtcctcaacagcattgcttacaaggccacagtgaacgcccggccccaacgaatccttgacacatcctctctcacacagtcggccccagccagcccaaccaacaagggcatgcacatgcaccaggtgggaggctccccgccagcatctagcaccagcagctgcagcctgaccaatgatgtggccaagcagactgtcagccgtgacctgccttccagccgcccgggtactgccggccccacaggggcacagtacacccctcactcccaccagttccctcgaacacgaaagatgtttgacaaaggccctgatcagaccacagatgatgcagatgatgctgccggacacaagagcttcatttgtgcctctatgcagacagggttctgtgactggagtgcccgctactttgcccagccagtcatgaagatccccgaggagcatgacctagagagtcagatccgcaaggagcgtgagtggcggttcctgaggaacactcgagtcaggaagcaggctcagcaggtcatccagaagggcatcaccagactggacgatcagatctttctgaacaggaaccccggcgttccttctgtggtcaaattccatccctttacaccatgcatagctgtcgccgacaaggacagcatctgtttttgggactgggagaaaggagagaagctggactatttccacaatggcaaccctcggtacaccagggtcaccgccatggagtacctgaatggtcaggactgttccttgctgctgacagccacagatgatggtgccatcagggtctggaagaattttgctgatttggaaaagaatccagagatggtgactgcgtggcaagggctctcagacatgcttccaacaacacgaggagctgggatggtggtagactgggaacaagaaactggccttctcatgagctcaggggacgtgcgcattgtcaggatctgggatactgaccgggagacgaaggtgcaggacatccccacgggtgctgacagctgtgtgacaagtctgtcttgtgattcgcaccgttcgctcattgtggctggcctgggtgatggctcgatccgtgtctacgacaggaggatggcactcagtgaatgccgggtcatgacttaccgagagcacacagcgtgggtggtaaaggcctacctgcagaagcaccctgagggccacatcgtgagtgtgagtgtcaatggagatgtgcgcttcttcgaccctcggatgcccgagtctgtgaatgtaatgcagattgtgaaggggctgacagccctggacatccacccccaggcaaacctgatcgcctgtggctccatgaaccagttcacagccatctacaacggaaatggagagctgatcaacaacatcaaatactatgatggcttcatgggccagcgagtcggggccatcagctgcctggctttccacccacactggcctcatctggccgtaggaagcaatgactactacatttccgtgtattcggtggagaagcgtgtcagatagcggcacctaggaccactgccaggccgcagccacctctgctgtacatagtgagccagcctgcactgctcggatgcagtgcccacctacccacccacctgcaaaccccggctcctgacttggccgtggccagctgaggaggggcttgcacatccttccttctgtcttcactataacagcgtacaggtccagagcaggggaggggttggcctggcttcccatcaagaaccagcacccaggcaccaaggacctcctcagtgcagcatggtcctttcctgccctgttttcttctgaggttttacaaagggacacatttgatttttccatgtgatcaaagcattagttacagagcagacagcgccctgtagaatagccgtgctggggctcctaagggccatggcccagccccactgtcctctcagagtgtgctgccagtcctgggaaatggataagagcaattgggggaagagagagggtagaagagagggaaggcctctcctgctacaaggtatggaagtctgagcctggccctcctggagcaccgaggcagtccagcacattgtgtatgtcatggtgctatgaggaaagctagacctctgaggtccagcctggcgggcgccctcaagtgagctagctgcaggagagggtctggttcagggcagatgaggcagatctgtagttagcggctgcctccatctatcaggcatattctgaagtgcttctctcccatagggcagtaacagtggccacaggcctgtctcctgcttgtgccacacacaggtacacacgcatgcaggcacgcagcctccccatccataattacatggatgccctggtcttcctgcccatgtacacttaggtgtgcattcatgcaggcccatagtttcccctcctgcacatatatgggcactgtggccggccacatgcacgcacatgctggcctcaccatgcatagggctcagacacttcactgaactcagaggctggagggcagcatcagctctgttgatggtggaactgaggttacatgatgcagtatgtgctgagcacgagttccacagtgtcctggtgtgcctgacacgtgtctgcgtgcacaggcaagagaggaccatggacactgtagccctagatgtcagcactgtccccgtgtgtccgacatgtgtctgtgtgcacaggcaagtgaggaccttaggcactgcagccctggatggacccagcattgcagagcagttgcacacaaacaggacacaacacaatgatgttttgaaaagcattttccgttttccctgggaatcaggatctttcagaggacaagtgccaacaggagcccagggacacgggttgggacatctgtggcagaggctgggtccctgtgctgtgttcagtggacctgttttagccaagagcatcttccctgtgagaggatcctacaggctgagctgtcctgggcaagcagaacaggagaccctggcacggcccctggaaatgcattctcccaaccgggtggggctcaaggaagccagccccttggttgggccatagagcagtgtggcgacaggaaggccctagagccacctgacttacccctgctcagttctgcagagagcttcaggggctgagtgtgcgtcagctcagtccttgtccaactggtgactcagttttggccgcacagggccgcctgatgggctgggctgcttccctgccctggtggaaccagtgtttgcatcttgcccacaggctgggcctcacaagtctgatgcggaaattcaatcatgaagctaagcaaagctcgagagagcgctgacctagagcgcatttctctatttattttaccaaaatgagagttgaaaggactgacaggacacggaactgcagtggcgtccagagcagtgacagcaacagagtgttaataaagaataaagccgtgagatgtcgctgcccttgccagatgagaatggtggggtggggtggcccaaagggctgtgcccttgtggcttctgcagtccccgggtccctggggtgagacagtcttggccagagacaaggctactctatctacccctccaggcctgggtggaagtgaagacatgctggttgccatggagatcttgaaaaaaaaaaaaaaaaaaaaaaaaa

SEQ ID NO: 174 - DNA, 7046 bp, Mus musculus
  source 1..7046: mol_type = genomic DNA
tttttttttttttttttttttttttcaagatctccatggcaaccagcatgtcttcacttccacccaggcctggaggggtagatagagtagccttgtctctggccaagactgtctcaccccagggacccggggactgcagaagccacaagggcacagccctttgggccaccccaccccaccattctcatctggcaagggcagcgacatctcacggctttattctttattaacactctgttgctgtcactgctctggacgccactgcagttccgtgtcctgtcagtcctttcaactctcattttggtaaaataaatagagaaatgcgctctaggtcagcgctctctcgagctttgcttagcttcatgattgaatttccgcatcagacttgtgaggcccagcctgtgggcaagatgcaaacactggttccaccagggcagggaagcagcccagcccatcaggcggccctgtgcggccaaaactgagtcaccagttggacaaggactgagctgacgcacactcagcccctgaagctctctgcagaactgagcaggggtaagtcaggtggctctagggccttcctgtcgccacactgctctatggcccaaccaaggggctggcttccttgagccccacccggttgggagaatgcatttccaggggccgtgccagggtctcctgttctgcttgcccaggacagctcagcctgtaggatcctctcacagggaagatgctcttggctaaaacaggtccactgaacacagcacagggacccagcctctgccacagatgtcccaacccgtgtccctgggctcctgttggcacttgtcctctgaaagatcctgattcccagggaaaacggaaaatgcttttcaaaacatcattgtgttgtgtcctgtttgtgtgcaactgctctgcaatgctgggtccatccagggctgcagtgcctaaggtcctcacttgcctgtgcacacagacacatgtcggacacacggggacagtgctgacatctagggctacagtgtccatggtcctctcttgcctgtgcacgcagacacgtgtcaggcacaccaggacactgtggaactcgtgctcagcacatactgcatcatgtaacctcagttccaccatcaacagagctgatgctgccctccagcctctgagttcagtgaagtgtctgagccctatgcatggtgaggccagcatgtgcgtgcatgtggccggccacagtgcccatatatgtgcaggaggggaaactatgggcctgcatgaatgcacacctaagtgtacatgggcaggaagaccagggcatccatgtaattatggatggggaggctgcgtgcctgcatgcgtgtgtacctgtgtgtggcacaagcaggagacaggcctgtggccactgttactgccctatgggagagaagcacttcagaatatgcctgatagatggaggcagccgctaactacagatctgcctcatctgccctgaaccagaccctctcctgcagctagctcacttgagggcgcccgccaggctggacctcagaggtctagctttcctcatagcaccatgacatacacaatgtgctggactgcctcggtgctccaggagggccaggctcagacttccataccttgtagcaggagaggccttccctctcttctaccctctctcttcccccaattgctcttatccatttcccaggactggcagcacactctgagaggacagtggggctgggccatggcccttaggagccccagcacggctattctacagggcgctgtctgctctgtaactaatgctttgatcacatggaaaaatcaaatgtgtccctttgtaaaacctcagaagaaaacagggcaggaaaggaccatgctgcactgaggaggtccttggtgcctgggtgctggttcttgatgggaagccaggccaacccctcccctgctctggacctgtacgctgttatagtgaagacagaaggaaggatgtgcaagcccctcctcagctggccacggccaagtcaggagccggggtttgcaggtgggtgggtaggtgggcactgcatccgagcagtgcaggctggctcactatgtacagcagaggtggctgcggcctggcagtggtcctaggtgccgctatctgacacgcttctccaccgaatacacggaaatgtagtagtcattgcttcctacggccagatgaggccagtgtgggtggaaagccaggcagctgatggccccgactcgctggcccatgaagccatcatagtatttgatgttgttgatcagctctccatttccgttgtagatggctgtgaactggttcatggagccacaggcgatcaggtttgcctgggggtggatgtccagggctgtcagccccttcacaatctgcattacattcacagactcgggcatccgagggtcgaagaagcgcacatctccattgacactcacactcacgatgtggccctcagggtgcttctgcaggtaggcctttaccacccacgctgtgtgctctcggtaagtcatgacccggcattcactgagtgccatcctcctgtcgtagacacggatcgagccatcacccaggccagccacaatgagcgaacggtgcgaatcacaagacagacttgtcacacagctgtcagcacccgtggggatgtcctgcaccttcgtctcccggtcagtatcccagatcctgacaatgcgcacgtcccctgagctcatgagaaggccagtttcttgttcccagtctaccaccatcccagctcctcgtgttgttggaagcatgtctgagagcccttgccacgcagtcaccatctctggattcttttccaaatcagcaaaattcttccagaccctgatggcaccatcatctgtggctgtcagcagcaaggaacagtcctgaccattcaggtactccatggcggtgaccctggtgtaccgagggttgccattgtggaaatagtccagcttctctcctttctcccagtcccaaaaacagatgctgtccttgtcggcgacagctatgcatggtgtaaagggatggaatttgaccacagaaggaacgccggggttcctgttcagaaagatctgatcgtccagtctggtgatgcccttctggatgacctgctgagcctgcttcctgactcgagtgttcctcaggaaccgccactcacgctccttgcggatctgactctctaggtcatgctcctcggggatcttcatgactggctgggcaaagtagcgggcactccagtcacagaaccctgtctgcatagaggcacaaatgaagctcttgtgtccggcagcatcatctgcatcatctgtggtctgatcagggcctttgtcaaacatctttcgtgttcgagggaactggtgggagtgaggggtgtactgtgcccctgtggggccggcagtacccgggcggctggaaggcaggtcacggctgacagtctgcttggccacatcattggtcaggctgcagctgctggtgctagatgctggcggggagcctcccacctggtgcatgtgcatgcccttgttggttgggctggctggggccgactgtgtgagagaggatgtgtcaaggattcgttggggccgggcgttcactgtggccttgtaagcaatgctgttgaggactttcatggctaaatcagaaacatctggatagggatcagcagccagatgcagtaagactctccaaatttgagtgtaaacactattaaaagaaactcctatgagggagttgagcgctgagtaggagctcacacgccgcatcttgtcgatggtctcgaaggacaggatgtactcctcgttctcagggctccccaaggtgctgctggcactgctgctggtgctgaggttcccgggagagaaggccactgagctgcccgattcttccgtcaagctcagattctgcaaagatttgttcaggttcctagctgtcgtgacggctcggatgttcccataggagctcactgaacggagtctgggggtgcatgggctgtctcgaactggggtcaagctccctccctctgtggctgctggagaaggcaaagggtagttcttttcttcctccatgaactgcagggccacagtgcagaaattgctttcatattggactacaaggtgactcagagccaccaccagctccttccggaccatggggcttccatcattgatcagctgagccagcatcatggccacattgtggtcaatggtggtagagtggtctgtcctctcagcagaatttcccacaaaggtgcccagggcaaatacagctgcacatcggacctcagggatggggtcagagaggaggctatagagcttttcgtgggcactgtctctcaccccacaccatcttgcagagtcgaagttctgccagatccttcccaggcaaatggccacccactggcgtagcaaggggtgtgggtcgctgagctgctccagacagatggcaatcaggtttccctggaggcaggcctcttgccctgttgtgtagctgttgacgattacagcaagaatgaaggctgtcatggtcctatgttcagctggcatgtatgggtctgccaagacggataggaagtacttgtgaccgttgtccttcacgaggtcagcttggcacgaactgtcgacagcgaggattttggcccagatgaagacaaggagtggccgaagctctcgggctgagctctgaagcagcttcagtacataggggaagatgcccaccgacagggccaagctcaccgcccaagggcccaagtccaaaaaccgtcccagcaagtccaatgctctcagccggtgcacctggcttagcagcacctgcaggacgatgggcagctgctctggggggctcctgttttccacacccattgtgagccacacctggaatgctgtcagctgctcggcaaagaatgggctgtgcctgaaggcagtaccctcttcgatgatggttggcagctgagagaggcaaatgtccacagcaaggtcccaggcctgccacatggcatgcatgtatgtcggggggagccgcgggctgcttactggggtgcagttatatgacctcatgattctttctgccaataaaaaatttctaaacaaacttgccacgagcaggtcctgtcggaaaagcttttggaagagatcccgagggagcacattccaggcgatggtatctgtgatggctgtgaagatccagttcagctctcccagaggggtcctccggtcattcagccggccagggatcttttctatcaaatccagtgtgactccaggcaccagactcacgcacttctgcatgcaaaaccagcgcagagcaatcttgatgggagtggtgaggcaggatgtgaacaggtcggctgggaggtcagggatcatgggcagcagctcgtgtgcctcacacgctgccaactggatgcagtttttcattgagggaggcaagggcatctgggcaagtggatggtttgggttaatcgcagctacctctagttcctgctccctctgcagtgcaaactgtttgaaggacttgacgatgaggccagcattggaacagtcgtagacaaagatggatgggctgcccatccacgtctgcaggtcgtatatggacagagggatgtactgagtgtagttcttgttgaagacccagacctctccattcactgtaggcctgggcaccccgtggccattgtagtggaaaaggacccgttcctccttggcgttccggcgcagagatgtgcaaagtttcttgacttcatccacagtagggtcgaggctctgcttgtaccgagcccttggctgccagttctcatactgcttctgtaggtttgcaccgatggtttccagagctttctgagggcccatagacagaggatcgatccagcattccagccgagcacagggtgtggtcttcaccacatccggaggatccacacccacattcaggcacaggaccaaggccacactcaccgtcttcatccgatccttcattctccagctctgcgctaaagatttggagccttcgattttctcacaatgtcttttcttcataaaagccaaaggcaagttccaatctgtaaggtccgcctcatcttcctccccgagtcccataagaggcgactgcagcatctccgactccatcaggggaggagggggagggggagtccttggcagcaggcgctcgagaacctccagccttaaaaactagtgtggaccagaactggtaaaataaaatacgggaaaacgggaagctgggaatagagacggcggcagagcgttcgaagatccttattgaggctaaacctcggagatctttatctcgaactctgagcgcgaagttggagggggcggggtgggtggcgagcccgtgggtacccaagcccgcaggacccggacgagcggcgacacgcgcgcccggtcgccggcccccgcagctctgcaggccgtcaggagggcggcaagcgggactggcggaggcgggagagacttcaggcccggcgatgacccggctctcggcctccaacgcctcagtggctcccggcgggcaggccggcccgctcgcagggcggcttctccgactgtgctggcccggctgaggcctcaagggatcgggatcggggggcttcggggctcgcccagcggctctcagccctgcgggtcccgcactcgcctgaggggctgcaacctgagccaggaccggcccatcgtgcccgtccgcagccgggctcctcagccaccgggccgcgcggccaggcccgtgctggccttctgcttcgtggctctctcctacccaggaacgagtcccgatacacacgcgacacgggcccgcggacagcacagggacactgggcttattaggtcaggggagttttgccctctgctctggagccacagtgaaaactcctctcatcagcacatcaaggaggacgccatattgccaaggcccagcatgcaccgctatctacggcgcgtccaataagccaaacctcttcgagcgttctcaccgctctacccctgctagggcgtagagctcggtgttccgtcct

SEQ ID NO: 175 - DNA, 6699 bp, Rattus norvegicus
  source 1..6699: mol_type = genomic DNA
aggacggaacgccgaactctccgccctagcctgggtagagcggtgagaacgcttgaagaggtttggcttattggacacaccgtagacagcggtgcatgctgggccttggtaatatggcgtcctccttgatgtgctgatgagaggagttttcactgtggctccagagcagagggcaaaactcccctgacctaataagcccagtattcccgtgtggtccgctggcccgtgtcgcgcgtgtatcaggactcgttcccgggcaggagagagccacgaagccgaaggccagcaccggccaggccgcgcggacccggggctgaggagccgactgcggacgggcacgatgggccggtcctggctcaggttgcagcccctcaggcgagtgcgggacccgcagggctgagagccgctggacgagccccgaagccccctgagcgcgatcccctgacgcctcagccgagccagcgcaatcagagaacccgcactgcgagcgggacggcctgcctgccctgggatccactgaggcgttggaggccgagagcagggtcatccccgggcctgaagtctttcccgcctctgacagtccggcttgcagtcctccagacgacctcctgggctgcgggtggcttgcgactgggcgcgagtgtcggcgcagctcctggggctgcggggttggttacccaccgattcttcaccccaccccaccccgccctctccgacttcccgctcagagttcgagataaagatctccgagtttttacctgaataaggaccttcgtgcactctgccgtcatctctattcccaacttcccgctttcctgtatttccttttaccagttctggtacacactagtttttaaggctggaggttctcgagcgcttgctgccaaggactccccctccccctcctcccctgatggagtcggagatgctgcagtcgcctcttatgggactcggggaggaagatgaggcagaccttacagattggaacttgcctttggcgtttatgaaaaagagacattgtgagaaaattgaaggctccaaatctttagcacagagctggagaatgaaggatcggatgaagaccgtcagtgtggccttggtcctgtgcctgaatgtgggtgtggatcctccagatgtggtgaagaccacaccttgtgctcgattggaatgctggattgatcctctgtctatgggtcctcagaaagctctggaaaccatcggtgcaaatctacagaagcagtatgagaactggcagccaagggctcggtacaagcagagccttgaccccactgtggatgaagtcaagaaactttgcacatctctgcgtcggaacgccaaggaggaacgggtcctcttccactataatggccatggggtgcccaggcctacggtgaatggagaggtctgggtcttcaacaagaactacactcagtacatcccactgtccatatatgacctgcagacgtggatgggcagcccatccatctttgtctacgactgctccaatgctggcctcatcgtcaagtccttcaaacagttcgcactgcagagggagcaggaactagaggtagctgcaattaacccaaaccatccacttgcccagatgcccttgcctccctcaatgaaaaactgcatccagctggcagcctgtgaggcccacgagctcctgccgatgatccctgacctcccagccgacctgttcacatcctgcctcaccactcccatcaagattgctttgcgctggttttgcatgcagaagtgtgttagtctggtgcctggagtcacactggatttgatagaaaagatccctggccggctgaatgaccggagaacccctctgggtgaactgaactggatcttcacagccatcacagacaccatcgcctggaatgtgctccctcgggatctctttcaaaagcttttccgacaggacctgctggtggcaagtttgtttagaaattttttattggcagaaagaatcatgaggtcgtataactgcaccccagtaagcagcccacgacttcccccaacatacatgcatgccatgtggcaggcctgggaccttgctgtggacatttgcctctctcaactgccaaccatcatcgaagagggaactgccttcaggcacagcccattctttgctgagcagctgacggcattccaggtgtggctcaccatgggtgtggaaaacaggagcccccccgagcagctgcccatcgtcctacaggtgctgctaagccaggtgcaccggctgagagccttggacttgctgggacgatttttggacttgggcccttgggcggtgagcttggccctgtcggtgggcatcttcccctatgtactgaagctgcttcagagctcggcccgagagctgcggccactccttgtcttcatctgggccaaaatcctcgctgtggacagttcatgccaggctgacctcgtgaaggacaacggtcacaagtacttcctgtccgtcttggcagacccatacatgccagctgaacacaggaccatgacagccttcattcttgctgtaatcgtcaacagctacacaacagggcaagaagcctgcctgcaggggaacctgattgccatctgtttggagcagctcagtgacccacaccccttgctacgccagtgggtggccatttgcctgggaaggatctggcagaactttgattctgcaaggtggtgtggggtgagagacagcgcccacgaaaaactctatagcctcctctccgaccccatccctgaggtacgatgtgcagctgtgtttgcccttggtacctttgtgggaaactctgctgagaggacagaccactctactaccattgaccacaatgtggccatgatgctggctcagctgattaatgatggaagccccatggtccggaaggagctggtggtggctctgagtcaccttgtagtccaatatgagagcaatttctgcactgtggccctgcagttcatggaagaggaaaagaactaccccttgccttctccagcagccacagagggagggagcttgactccagttcgagacagcccgtgcacccccagactccggtcagtgagctcctatgggaacatccgagccgtcaccacagctaggaacctgaacaaatctttgcagaacctgagcttgacggaagaatcgggcagctcagtggccttctctcccgggaacctcagtacaagtagtagtgccagcagcaccttgggaagccctgagaacgaggagtatatcctgtccttcgagaccatcgacaagatgcggcgtgtgagctcctattcagcgctcaactccctcataggagtctcctttaatagtgtctacactcagatttggagagtcttactgcatttggccgctgatccctacccagatgtttctgacttagccatgaaagtcctcaacagcattgcttacaaggccacagtcaacgcccggccccagcgaatcctcgacacatcctctctcacacagtcggccccagccagcccaaccaacaagggcatgcacatccaccaggtgggaggctccccgccagcatctagcaccagcagctgcagcctgaccaatgatgtggccaagcagacggtcagccgtgacctgccctccagccgcccgggtactgccggccccacaggggcacagtacacccctcactcccaccagttccctcgtacacgaaagatgtttgacaaaggccctgatcagaccacagacgatgcagatgatgctgccggacacaagagcttcatttgtgccactatgcagacggggttctgtgactggagtgcccgctactttgcccagccggtcatgaagatccctgaagagcatgacctagagagtcagatccgcaaggagcgtgagtggcggttcctgaggaacactcgagtcaggaagcaggcacagcaggtcatccagaagggcatcaccagactggatgatcagatatttctgaacaggaaccccggcgttccctctgtggtcaaattccacccctttacaccatgcatagctgttgctgacaaggacagcatctgtttttgggactgggagaaaggagagaaactggactacttccacaatggtaaccctcggtacaccagagtcactgctatggagtacctgaatgggcaggactgctccttgctgctgacagccacagacgatggagccatcagggtctggaaaaattttgctgatttggaaaagaatccagagatggtgactgcgtggcaagggctctcagacatgcttccaacaacacgaggagctgggatggtggtggactgggaacaagaaactggcctcctcatgagctcaggggacgtgcgcattgtccggatctgggataccgaccgggagacgaaggtccaggacatccccacgggggccgacagctgtgtgacaagtttatcttgtgattcgcaccgctcactcattgtagctggcctgggtgatggctcgatccgtgtctacgacaggaggatggcactcagtgaatgccgggtcatgacttaccgagagcacacagcatgggtggtaaaggcctacctgcagaagcaccctgagggccacatcgtgagtgtgagtgtcaatggagatgtgcgattcttcgatcctcggatgcctgagtctgtgaatgtaatgcagattgtgaaggggctgacagccctcgacatccacccccaggcaaacctgatcgcctgtggctccatgaaccagttcacagccatctacaacggcaatggggagctgatcaacaacatcaaatactacgatggcttcatgggccagcgagtcggggccatcagctgcctggctttccacccacactggcctcatctggccgtcggaagcaatgactactacatttctgtatattcggtggagaagcgtgtcagatagcggcacctcggactcgtgccaggctgcagccaccctctgctgtacatagcgaaccagcctgcactgctcaggatcagtgcccacctcccacccacctgcaaaccctggctcctggcctggcgtggccagctgaggaggggcttgcacatcctcccttctgtcttcactgtaatgtgcaggtccagagcaggggagggtttgacatggcttcccatcgagaaccaggacccaggcaccaagggcctcctcagtacagcatggtcctttcctgccctgtttccttctgaggttttacaaaggaacacatttgatttttccatgcgatcaaagcattagtcacagaacagacagcaccctggagaaaagctatgttggggcttctgagggctgtggcccagcccctcagagtaggaaagtagatggaagcaattgagggaagaagaggggggaggcctctcctgctactcaaggtatggaagtgtgagcctggccctcctagagcactgaggcagtccaacacactggctatgtcatggtggtatgaggaaagggatccccgtcctgcacagctagaactctgaggtccagtctggttccctcacatgagctggtgcaggagagggtctggttctgggcagatgaggcagatctgtagtcagcggctgcctacctctgccaggcacattctgaagtgcttctctcccacaggccagtaacagtggccacagccctgtctcctgcttgtgccacacacaggcacacacacatgcaggcacacagcgttcctatccatgcttacatgggtgtcctggtcttcctgcctgtgcacacttgggtgtgcattcgtgcaggcccacagtctcccctcctgcacatatatgggcactgtggccggccatatgcacacgcatgctggcctcaccaggttcagagactacgctggacccagaggctcgagggcagcatcagctgtgttggtgtgactgaggttgcatgatgcagtctgtgttgtggaggagttcagcagtgtcctggtgtgcctgacacgtgtctgtgcacatgcaagtgagggacactgcattgctgagcagttgcacacaaacaggacacaacacaatgatgttttgaaaagcattttacgttttccctgggaatcaggatctttcagaggaggacaagcgcccacaggagcccgggacacaggttgggacagctgtggcagaggctgggtccctgtgctgtgcttggtggacctgttttagccaagagcatcttccctgtggaaggatccctacaggccaagcagggcaagcaggacgggtaggcgctggtgctgccctggagatgcactctcccaacatggaggagcttagaggaagtcatcccctcagttgggccagacagcagtgtggcgtcaggacggccctagaaccacctgacttgccaccttctcagttctgcagagtgctccagggggtgggtatccttgtccaactggtgattcagttcagcagcgaagggccctggtgggctgggtcgcttccctgcccagtggagccagcgtttgcatcttgcccagaggctgggccttcacaagcctgatgcgaaaattcaatcatgaagctaaccaaggctcgagagagcgctgacctagagttcattgtctctatttattttaccaaaatgagagttgaaaaggactgacaagacacaggactgcaatggtgtccagagcagtgacagcagcagagtgttaataaagaataaagccgtgagaa

SEQ ID NO: 176 - DNA, 6699 bp, Rattus norvegicus
  source 1..6699: mol_type = genomic DNA
ttctcacggctttattctttattaacactctgctgctgtcactgctctggacaccattgcagtcctgtgtcttgtcagtccttttcaactctcattttggtaaaataaatagagacaatgaactctaggtcagcgctctctcgagccttggttagcttcatgattgaattttcgcatcaggcttgtgaaggcccagcctctgggcaagatgcaaacgctggctccactgggcagggaagcgacccagcccaccagggcccttcgctgctgaactgaatcaccagttggacaaggatacccaccccctggagcactctgcagaactgagaaggtggcaagtcaggtggttctagggccgtcctgacgccacactgctgtctggcccaactgaggggatgacttcctctaagctcctccatgttgggagagtgcatctccagggcagcaccagcgcctacccgtcctgcttgccctgcttggcctgtagggatccttccacagggaagatgctcttggctaaaacaggtccaccaagcacagcacagggacccagcctctgccacagctgtcccaacctgtgtcccgggctcctgtgggcgcttgtcctcctctgaaagatcctgattcccagggaaaacgtaaaatgcttttcaaaacatcattgtgttgtgtcctgtttgtgtgcaactgctcagcaatgcagtgtccctcacttgcatgtgcacagacacgtgtcaggcacaccaggacactgctgaactcctccacaacacagactgcatcatgcaacctcagtcacaccaacacagctgatgctgccctcgagcctctgggtccagcgtagtctctgaacctggtgaggccagcatgcgtgtgcatatggccggccacagtgcccatatatgtgcaggaggggagactgtgggcctgcacgaatgcacacccaagtgtgcacaggcaggaagaccaggacacccatgtaagcatggataggaacgctgtgtgcctgcatgtgtgtgtgcctgtgtgtggcacaagcaggagacagggctgtggccactgttactggcctgtgggagagaagcacttcagaatgtgcctggcagaggtaggcagccgctgactacagatctgcctcatctgcccagaaccagaccctctcctgcaccagctcatgtgagggaaccagactggacctcagagttctagctgtgcaggacggggatccctttcctcataccaccatgacatagccagtgtgttggactgcctcagtgctctaggagggccaggctcacacttccataccttgagtagcaggagaggcctcccccctcttcttccctcaattgcttccatctactttcctactctgaggggctgggccacagccctcagaagccccaacatagcttttctccagggtgctgtctgttctgtgactaatgctttgatcgcatggaaaaatcaaatgtgttcctttgtaaaacctcagaaggaaacagggcaggaaaggaccatgctgtactgaggaggcccttggtgcctgggtcctggttctcgatgggaagccatgtcaaaccctcccctgctctggacctgcacattacagtgaagacagaagggaggatgtgcaagcccctcctcagctggccacgccaggccaggagccagggtttgcaggtgggtgggaggtgggcactgatcctgagcagtgcaggctggttcgctatgtacagcagagggtggctgcagcctggcacgagtccgaggtgccgctatctgacacgcttctccaccgaatatacagaaatgtagtagtcattgcttccgacggccagatgaggccagtgtgggtggaaagccaggcagctgatggccccgactcgctggcccatgaagccatcgtagtatttgatgttgttgatcagctccccattgccgttgtagatggctgtgaactggttcatggagccacaggcgatcaggtttgcctgggggtggatgtcgagggctgtcagccccttcacaatctgcattacattcacagactcaggcatccgaggatcgaagaatcgcacatctccattgacactcacactcacgatgtggccctcagggtgcttctgcaggtaggcctttaccacccatgctgtgtgctctcggtaagtcatgacccggcattcactgagtgccatcctcctgtcgtagacacggatcgagccatcacccaggccagctacaatgagtgagcggtgcgaatcacaagataaacttgtcacacagctgtcggcccccgtggggatgtcctggaccttcgtctcccggtcggtatcccagatccggacaatgcgcacgtcccctgagctcatgaggaggccagtttcttgttcccagtccaccaccatcccagctcctcgtgttgttggaagcatgtctgagagcccttgccacgcagtcaccatctctggattcttttccaaatcagcaaaatttttccagaccctgatggctccatcgtctgtggctgtcagcagcaaggagcagtcctgcccattcaggtactccatagcagtgactctggtgtaccgagggttaccattgtggaagtagtccagtttctctcctttctcccagtcccaaaaacagatgctgtccttgtcagcaacagctatgcatggtgtaaaggggtggaatttgaccacagagggaacgccggggttcctgttcagaaatatctgatcatccagtctggtgatgcccttctggatgacctgctgtgcctgcttcctgactcgagtgttcctcaggaaccgccactcacgctccttgcggatctgactctctaggtcatgctcttcagggatcttcatgaccggctgggcaaagtagcgggcactccagtcacagaaccccgtctgcatagtggcacaaatgaagctcttgtgtccggcagcatcatctgcatcgtctgtggtctgatcagggcctttgtcaaacatctttcgtgtacgagggaactggtgggagtgaggggtgtactgtgcccctgtggggccggcagtacccgggcggctggagggcaggtcacggctgaccgtctgcttggccacatcattggtcaggctgcagctgctggtgctagatgctggcggggagcctcccacctggtggatgtgcatgcccttgttggttgggctggctggggccgactgtgtgagagaggatgtgtcgaggattcgctggggccgggcgttgactgtggccttgtaagcaatgctgttgaggactttcatggctaagtcagaaacatctgggtagggatcagcggccaaatgcagtaagactctccaaatctgagtgtagacactattaaaggagactcctatgagggagttgagcgctgaataggagctcacacgccgcatcttgtcgatggtctcgaaggacaggatatactcctcgttctcagggcttcccaaggtgctgctggcactactacttgtactgaggttcccgggagagaaggccactgagctgcccgattcttccgtcaagctcaggttctgcaaagatttgttcaggttcctagctgtggtgacggctcggatgttcccataggagctcactgaccggagtctgggggtgcacgggctgtctcgaactggagtcaagctccctccctctgtggctgctggagaaggcaaggggtagttcttttcctcttccatgaactgcagggccacagtgcagaaattgctctcatattggactacaaggtgactcagagccaccaccagctccttccggaccatggggcttccatcattaatcagctgagccagcatcatggccacattgtggtcaatggtagtagagtggtctgtcctctcagcagagtttcccacaaaggtaccaagggcaaacacagctgcacatcgtacctcagggatggggtcggagaggaggctatagagtttttcgtgggcgctgtctctcaccccacaccaccttgcagaatcaaagttctgccagatccttcccaggcaaatggccacccactggcgtagcaaggggtgtgggtcactgagctgctccaaacagatggcaatcaggttcccctgcaggcaggcttcttgccctgttgtgtagctgttgacgattacagcaagaatgaaggctgtcatggtcctgtgttcagctggcatgtatgggtctgccaagacggacaggaagtacttgtgaccgttgtccttcacgaggtcagcctggcatgaactgtccacagcgaggattttggcccagatgaagacaaggagtggccgcagctctcgggccgagctctgaagcagcttcagtacataggggaagatgcccaccgacagggccaagctcaccgcccaagggcccaagtccaaaaatcgtcccagcaagtccaaggctctcagccggtgcacctggcttagcagcacctgtaggacgatgggcagctgctcgggggggctcctgttttccacacccatggtgagccacacctggaatgccgtcagctgctcagcaaagaatgggctgtgcctgaaggcagttccctcttcgatgatggttggcagttgagagaggcaaatgtccacagcaaggtcccaggcctgccacatggcatgcatgtatgttgggggaagtcgtgggctgcttactggggtgcagttatacgacctcatgattctttctgccaataaaaaatttctaaacaaacttgccaccagcaggtcctgtcggaaaagcttttgaaagagatcccgagggagcacattccaggcgatggtgtctgtgatggctgtgaagatccagttcagttcacccagaggggttctccggtcattcagccggccagggatcttttctatcaaatccagtgtgactccaggcaccagactaacacacttctgcatgcaaaaccagcgcaaagcaatcttgatgggagtggtgaggcaggatgtgaacaggtcggctgggaggtcagggatcatcggcaggagctcgtgggcctcacaggctgccagctggatgcagtttttcattgagggaggcaagggcatctgggcaagtggatggtttgggttaattgcagctacctctagttcctgctccctctgcagtgcgaactgtttgaaggacttgacgatgaggccagcattggagcagtcgtagacaaagatggatgggctgcccatccacgtctgcaggtcatatatggacagtgggatgtactgagtgtagttcttgttgaagacccagacctctccattcaccgtaggcctgggcaccccatggccattatagtggaagaggacccgttcctccttggcgttccgacgcagagatgtgcaaagtttcttgacttcatccacagtggggtcaaggctctgcttgtaccgagcccttggctgccagttctcatactgcttctgtagatttgcaccgatggtttccagagctttctgaggacccatagacagaggatcaatccagcattccaatcgagcacaaggtgtggtcttcaccacatctggaggatccacacccacattcaggcacaggaccaaggccacactgacggtcttcatccgatccttcattctccagctctgtgctaaagatttggagccttcaattttctcacaatgtctctttttcataaacgccaaaggcaagttccaatctgtaaggtctgcctcatcttcctccccgagtcccataagaggcgactgcagcatctccgactccatcaggggaggagggggagggggagtccttggcagcaagcgctcgagaacctccagccttaaaaactagtgtgtaccagaactggtaaaaggaaatacaggaaagcgggaagttgggaatagagatgacggcagagtgcacgaaggtccttattcaggtaaaaactcggagatctttatctcgaactctgagcgggaagtcggagagggcggggtggggtggggtgaagaatcggtgggtaaccaaccccgcagccccaggagctgcgccgacactcgcgcccagtcgcaagccacccgcagcccaggaggtcgtctggaggactgcaagccggactgtcagaggcgggaaagacttcaggcccggggatgaccctgctctcggcctccaacgcctcagtggatcccagggcaggcaggccgtcccgctcgcagtgcgggttctctgattgcgctggctcggctgaggcgtcaggggatcgcgctcagggggcttcggggctcgtccagcggctctcagccctgcgggtcccgcactcgcctgaggggctgcaacctgagccaggaccggcccatcgtgcccgtccgcagtcggctcctcagccccgggtccgcgcggcctggccggtgctggccttcggcttcgtggctctctcctgcccgggaacgagtcctgatacacgcgcgacacgggccagcggaccacacgggaatactgggcttattaggtcaggggagttttgccctctgctctggagccacagtgaaaactcctctcatcagcacatcaaggaggacgccatattaccaaggcccagcatgcaccgctgtctacggtgtgtccaataagccaaacctcttcaagcgttctcaccgctctacccaggctagggcggagagttcggcgttccgtcct

SEQ ID NO: 177 - DNA, 6866 bp, Macaca fascicularis
  source 1..6866: mol_type = genomic DNA
cacgccgtaggccgcggtgcattctgggtcctggcaatatggcgtcctccttgatgtgctgatgagatgagtttccctgtagctccaaaccagagggcaaagctcccctgacccaataagccctcattgtccgttttctctgtggttccgtgtcgcccgtttctcaggactcgttctcaggcaggagagagcctcggggctgaaggccaggaccagccaggccgcgcggacctgaggttgaggaaccgggtgcgggcgagcacgatgggccggtcctggctctggttgcggcagctcagacgagtgcgggacccgcagggctgagagtggctggaggagacccagggccctttgaacccgatcccttggctggagacctcggcccagtgggcgaaccggcaccaagagcggcctgcctgtcctcggaactgctgaggcgttggaggccgagagcagggtcatcgtgaggcctgaagtctcttacgcttttgacagctccgctcgcagcccctctggaaacgtgcagccccaggagcagccagtggcttgggacttgggctggtgtgtgtctgcggagcttcttgggctgccccatttcctagcggcccccacctccccacttcccgcccagagttggagataaggatctcagactttttgcctgagtaagggtctccgcactctccatccatttgtttttcgattccccgtttttctgtttcttatttcaccaattctggtacacgctagtttttaaggctggaggttcttgagcgcttgctgccaaggactcccccaccccctcccccactgatggagtccgaaatgctgcagtcgcctcttctgggcctgggggaggaagatgaggctgatcttacagactggaacctacctttggcttttatgaaaaagaggcactgtgagaaaattgaaggctccaaatccttagctcaaagctggaggatgaaggatcggatgaagacagtcagtgttgccttagttttgtgcctgaatgttggtgtggaccctcccgatgtggtgaagaccacgccctgtgcgcgcttggaatgctggatcgatcctctgtcgatgggtcctcagaaagctctggaaaccatcggtgcaaatttacagaagcagtacgagaactggcagccaagggcccggtacaagcagagccttgacccaactgtggatgaagtcaagaagctctgcacgtccctacgtcgcaacgccaaggaggagcgagtcctctttcactacaatggccacggggtgccccggcccacagtgaacggggaggtctgggtcttcaacaagaactacacgcagtacatccctctgtccatatatgacctgcagacatggatgggcagcccgtcgatcttcgtctatgactgctccaacgctggcttgatcgtcaagtccttcaagcagttcgcactacagcgggagcaggagctggaggtagctgcaatcaacccaaatcaccctcttgctcagatgcctttgcctccgtcgatgaaaaactgcatccagctggcagcctgcgaggccaccgagctgctgcccatgatccctgacctcccggctgacctgttcacctcctgcctcaccacccccatcaagatcgccctgcgctggttttgcatgcagaaatgtgtcagtctggtgcctggcgtcacactggatttgatagaaaagatccctggccgcctgaacgacaggaggacgcccctgggtgagctgaactggatcttcacagccatcacagacaccatcgcatggaacgtgctccctcgggatctcttccaaaagctcttcagacaggacttactggtggctagtctgttccgaaattttttattggcggaaaggattatgaggtcgtacaactgcactcccgtcagcagcccgcgtctgccgcccacgtacatgcatgcgatgtggcaagcctgggacctggctgtcgacatctgtctgtcccagctgccgacgatcattgaggaaggcactgcgtttcggcacagcccgttcttcgccgagcagctgaccgctttccaggtgtggctcaccatgggcgtggagaaccggaacccaccggaacagctgcccatcgtcctgcaggtgctgttaagccaagtgcaccggctgagagcattggacttgcttggaagatttttggacctgggtccctgggcagtgagcctggccttgtctgtcggcatcttcccctacgtgctgaagctgctccagagctcggcccgagagctgcggccacttctcgttttcatctgggccaagatcctcgcagtggacagctcgtgccaggcggacctcgtgaaggacaacggccacaagtacttcctgtcggtcctggcggacccctacatgccagccgaacacaggaccatgacggctttcattctcgccgtgattgtcaacagctataacacggggcaggaagcctgccttcagggaaacctcattgccatctgcctggagcagctcaacgacccgcaccccttgctgcgccagtgggtggccatctgcctcggcaggatctggcagaacttcgactcggcgaggtggtgcggcgtgagggacagcgctcacgagaagctctacagcctcctgtccgaccccattcccgaggtccgctgcgcggcggtctttgcccttggcacgttcgtgggcaactctgcagagaggacggaccactccaccaccattgaccacaacgtggccatgatgctggcccagctggtcagcgacgggagccccatggtccggaaggagctggtggtggctctgagtcatctcgtggttcagtacgaaagcaatttctgcactgtggccctgcagttcatagaagaggagaagaactaccccttgccttctccagcgaccacagagggagggagtctgaccccagtgcgagacagcccgtgcacccccagacttcgttccgtgagctcctatggaaacatccgtgctgtcgccacagccaggagcctcaacaaatctttgcagaacctgagcttgacagaggaatccggcggcgcggtggcgttctcccctggaaacctcagcaccagcagcagtgccagcagtaccctgggcagccccgagaatgaggagcacatcctgtccttcgagaccatcgacaagatgcgccgcgccagctcctactcctccctcaactccctcatcggagtttcctttaatagcgtttacactcagatttggagagtcctgctgcacctggctgctgacccctatccagaggtctcagacgtggccatgaaagtgctcaacagcatcgcctataaggccaccgtgaatgcccggccgcagcgcgtcctggacacctcctccctcacacagtcggcccctgccagccccaccaacaagggtgtgcacatccaccaggcagggggctcccctccagcgtccagcaccagcagctccagcctgaccaatgacgtggccaagcagccggtcagccgagacctgccttctggccggccgggcaccacaggccccgcgggggcgcaatacacccctcactcccaccagttcccccggacacggaagatgttcgacaagggcccagagcagactgcggacgatgcagacgatgctgctggacacaaaagcttcatctccgccacggtgcagacggggttctgcgactggagtgcccgctatttcgcccagcccgtcatgaagatcccggaagagcacgacctggagagtcagatccgcaaggagcgggagtggcggttcctgcgaaacagccgcgtcaggaggcaggcccagcaagtcatccagaagggcattacgagattggacgaccaaatatttctgaacaggaaccccggcgtcccctctgtggtgaaattccaccccttcacgccgtgcatcgccgtcgccgacaaggacagcatctgcttttgggactgggagaaaggggagaaactggactatttccacaatgggaaccctcggtacacaagggtcactgccatggagtatctgaacggccaggactgctcactcctgctgacggccacagacgatggtgccatcagggtctggaagaattttgctgatttggaaaagaacccagagatggtgaccgcgtggcaggggctctcggacatgctgccaacaacgcgaggagccgggatggtggtggactgggagcaggagaccggcctcctcatgagctcgggggacgtgcggatcgtccggatctgggacacagaccgtgagatgaaggtgcaggacatccccacgggcgcagacagctgcgtgacgagtctgtcctgtgattcccaccgctcactcatcgtggctggcctcggtgatggctccatccgcgtctatgacagaaggatggcactcagcgaatgccgcgtcatgacgtaccgcgagcacacggcctgggtggtgaaggcctctctgcagaagcgccccgacggccacatcgtgagcgtgagtgtcaatggagacgtgcgcatctttgatccccggatgcccgagtcggtgaatgtgcttcagatcgtgaaggggctgacagccctggacatccacccccaggcggacctgatcgcatgtggctccgtcaatcagttcactgccatctacaatgggggcggcgagctgatcaacaacatcaagtactacgacggcttcatgggtcagcgggtcggcgccatcagctgcctggccttccacccacactggcctcacctggccgtgggaagcaacgactactacatctccgtgtactcggtggagaagcgcgtcagatagcggcgcgacccggcccgccaggccacggccgcctgctgtacatagtgaagctgccacttgccggggcgcggggtgtcggctgctgcggccccgcggtgtgaacgttggctgctgccttagctgctgatgacggcaggagggccctgctactcgcttttgtctgtcttcgctgtcgtgtccggaacgtcagggacggggagggcttaggttgacggtggcttcccactgagcaccagcatccaggtgcacccccgcggccgcagcgcgtctgtccctctcctgttctgtgtttctctgagacgttgaaaggggaaacacctcattttatttccatgtaatcagagcattagctgcagcaaaacccccagacagccctggaggagaggcaggcgctggggctcctgcgggtccctggagcagccgtccccatcaggccaagagcgagcgagaggtgctgccccagccaggcccaccgcctctcacagtcagtgcacgcaagcagggacatttcctagccggctggggcacactggaaattcgggaaaccaagagagaggaagaaggagacgcccctctagctggcggtatgaagaaagccgcccagggggccgggctgtccttggccgctggccgcatcactgaacgggaggagcgcagcgcctcctccacagcccaccctccctgcacctccaggtctctagactctagttttggcccctcatgcagagctgtcagcaggggcctctgtggccgcgcaccgaagaggcaggtccttggcagtgtagcccctgccttagtccacagggctcctttccctccgaagggctgctcttccccgcacgcgcaggggcggcggcccggcctgtggtctccgtgcctgtgcccacacacgggtgtagcacacgcatgtgcgggcaccacggctggcaccctgggggcacacatgcaggcggcgtggtctccctgctctgtccgcacacgttcatcacacacaggtgagaggcactgccgggtcctagacggctctgggtgacaccagccccatctccagccctgagtcgcccatgctgatgcgaccttggcttgcagctgggcctgtggtgcagacaggagctgtgtggacagtcccgcccaggaggggcctcagggcagttttgcaaacagaacacaaccacaatgatggtattttgaaaagcattttttccatgttcgtcgggaatcaggattattgagaggtggaggagccaagtggcttcattgcggcagtaagaggcccacaaccacgggagtgagagcgggcacggcgaggcccgggctcccctgtggtgtgactggcgtcctgccgtggccaagagcatcttctgggtggatggaaccctgcctggctgcgtttggtcagagaaacacgtggtcttcagggggctgagctggagtctgagctggggctggccgggacatgacaaggtgagacagaggcggcccctccgctgctcttttttggaatgtgagctcccaccagaagaaggttccggcacgaatcccatccccacgtctgggccgagcgagcagaccaggtccggaaggtgtagagggccccaacccccacaagtcccggcctcactcagctcacagggcatgccaggcggcaacaccagaatcttccagaagcccagctccacccgcacacacagcttcccgtccagtccttcaactcgattcttacctaacacgcgtttctgtttgttttgagacaaaaccaccacctgtcaaaaggcaggtggctccagaggggacaagaccctcctgcgcccactccgccctggagccgcccccgcgggctccgcgtgccacctgcacgtgggctgtcttcacaggtccgatgcggaaattcaatcacgacgtcaaccagggctcgagagagcgccggcctaaaggctccttatctctatttattttaccaaatgcgaattgagaaagactttgacaaaacacaaaatggcaatgtgaagctaagagcaggacaaacagtaaacaacacgcgcaga

SEQ ID NO: 178 - DNA, 6866 bp, Macaca fascicularis
  source 1..6866: mol_type = genomic DNA
tctgcgcgtgttgtttactgtttgtcctgctcttagcttcacattgccattttgtgttttgtcaaagtctttctcaattcgcatttggtaaaataaatagagataaggagcctttaggccggcgctctctcgagccctggttgacgtcgtgattgaatttccgcatcggacctgtgaagacagcccacgtgcaggtggcacgcggagcccgcgggggcggctccagggcggagtgggcgcaggagggtcttgtcccctctggagccacctgccttttgacaggtggtggttttgtctcaaaacaaacagaaacgcgtgttaggtaagaatcgagttgaaggactggacgggaagctgtgtgtgcgggtggagctgggcttctggaagattctggtgttgccgcctggcatgccctgtgagctgagtgaggccgggacttgtgggggttggggccctctacaccttccggacctggtctgctcgctcggcccagacgtggggatgggattcgtgccggaaccttcttctggtgggagctcacattccaaaaaagagcagcggaggggccgcctctgtctcaccttgtcatgtcccggccagccccagctcagactccagctcagccccctgaagaccacgtgtttctctgaccaaacgcagccaggcagggttccatccacccagaagatgctcttggccacggcaggacgccagtcacaccacaggggagcccgggcctcgccgtgcccgctctcactcccgtggttgtgggcctcttactgccgcaatgaagccacttggctcctccacctctcaataatcctgattcccgacgaacatggaaaaaatgcttttcaaaataccatcattgtggttgtgttctgtttgcaaaactgccctgaggcccctcctgggcgggactgtccacacagctcctgtctgcaccacaggcccagctgcaagccaaggtcgcatcagcatgggcgactcagggctggagatggggctggtgtcacccagagccgtctaggacccggcagtgcctctcacctgtgtgtgatgaacgtgtgcggacagagcagggagaccacgccgcctgcatgtgtgcccccagggtgccagccgtggtgcccgcacatgcgtgtgctacacccgtgtgtgggcacaggcacggagaccacaggccgggccgccgcccctgcgcgtgcggggaagagcagcccttcggagggaaaggagccctgtggactaaggcaggggctacactgccaaggacctgcctcttcggtgcgcggccacagaggcccctgctgacagctctgcatgaggggccaaaactagagtctagagacctggaggtgcagggagggtgggctgtggaggaggcgctgcgctcctcccgttcagtgatgcggccagcggccaaggacagcccggccccctgggcggctttcttcataccgccagctagaggggcgtctccttcttcctctctcttggtttcccgaatttccagtgtgccccagccggctaggaaatgtccctgcttgcgtgcactgactgtgagaggcggtgggcctggctggggcagcacctctcgctcgctcttggcctgatggggacggctgctccagggacccgcaggagccccagcgcctgcctctcctccagggctgtctgggggttttgctgcagctaatgctctgattacatggaaataaaatgaggtgtttcccctttcaacgtctcagagaaacacagaacaggagagggacagacgcgctgcggccgcgggggtgcacctggatgctggtgctcagtgggaagccaccgtcaacctaagccctccccgtccctgacgttccggacacgacagcgaagacagacaaaagcgagtagcagggccctcctgccgtcatcagcagctaaggcagcagccaacgttcacaccgcggggccgcagcagccgacaccccgcgccccggcaagtggcagcttcactatgtacagcaggcggccgtggcctggcgggccgggtcgcgccgctatctgacgcgcttctccaccgagtacacggagatgtagtagtcgttgcttcccacggccaggtgaggccagtgtgggtggaaggccaggcagctgatggcgccgacccgctgacccatgaagccgtcgtagtacttgatgttgttgatcagctcgccgcccccattgtagatggcagtgaactgattgacggagccacatgcgatcaggtccgcctgggggtggatgtccagggctgtcagccccttcacgatctgaagcacattcaccgactcgggcatccggggatcaaagatgcgcacgtctccattgacactcacgctcacgatgtggccgtcggggcgcttctgcagagaggccttcaccacccaggccgtgtgctcgcggtacgtcatgacgcggcattcgctgagtgccatccttctgtcatagacgcggatggagccatcaccgaggccagccacgatgagtgagcggtgggaatcacaggacagactcgtcacgcagctgtctgcgcccgtggggatgtcctgcaccttcatctcacggtctgtgtcccagatccggacgatccgcacgtcccccgagctcatgaggaggccggtctcctgctcccagtccaccaccatcccggctcctcgcgttgttggcagcatgtccgagagcccctgccacgcggtcaccatctctgggttcttttccaaatcagcaaaattcttccagaccctgatggcaccatcgtctgtggccgtcagcaggagtgagcagtcctggccgttcagatactccatggcagtgacccttgtgtaccgagggttcccattgtggaaatagtccagtttctcccctttctcccagtcccaaaagcagatgctgtccttgtcggcgacggcgatgcacggcgtgaaggggtggaatttcaccacagaggggacgccggggttcctgttcagaaatatttggtcgtccaatctcgtaatgcccttctggatgacttgctgggcctgcctcctgacgcggctgtttcgcaggaaccgccactcccgctccttgcggatctgactctccaggtcgtgctcttccgggatcttcatgacgggctgggcgaaatagcgggcactccagtcgcagaaccccgtctgcaccgtggcggagatgaagcttttgtgtccagcagcatcgtctgcatcgtccgcagtctgctctgggcccttgtcgaacatcttccgtgtccgggggaactggtgggagtgaggggtgtattgcgcccccgcggggcctgtggtgcccggccggccagaaggcaggtctcggctgaccggctgcttggccacgtcattggtcaggctggagctgctggtgctggacgctggaggggagccccctgcctggtggatgtgcacacccttgttggtggggctggcaggggccgactgtgtgagggaggaggtgtccaggacgcgctgcggccgggcattcacggtggccttataggcgatgctgttgagcactttcatggccacgtctgagacctctggataggggtcagcagccaggtgcagcaggactctccaaatctgagtgtaaacgctattaaaggaaactccgatgagggagttgagggaggagtaggagctggcgcggcgcatcttgtcgatggtctcgaaggacaggatgtgctcctcattctcggggctgcccagggtactgctggcactgctgctggtgctgaggtttccaggggagaacgccaccgcgccgccggattcctctgtcaagctcaggttctgcaaagatttgttgaggctcctggctgtggcgacagcacggatgtttccataggagctcacggaacgaagtctgggggtgcacgggctgtctcgcactggggtcagactccctccctctgtggtcgctggagaaggcaaggggtagttcttctcctcttctatgaactgcagggccacagtgcagaaattgctttcgtactgaaccacgagatgactcagagccaccaccagctccttccggaccatggggctcccgtcgctgaccagctgggccagcatcatggccacgttgtggtcaatggtggtggagtggtccgtcctctctgcagagttgcccacgaacgtgccaagggcaaagaccgccgcgcagcggacctcgggaatggggtcggacaggaggctgtagagcttctcgtgagcgctgtccctcacgccgcaccacctcgccgagtcgaagttctgccagatcctgccgaggcagatggccacccactggcgcagcaaggggtgcgggtcgttgagctgctccaggcagatggcaatgaggtttccctgaaggcaggcttcctgccccgtgttatagctgttgacaatcacggcgagaatgaaagccgtcatggtcctgtgttcggctggcatgtaggggtccgccaggaccgacaggaagtacttgtggccgttgtccttcacgaggtccgcctggcacgagctgtccactgcgaggatcttggcccagatgaaaacgagaagtggccgcagctctcgggccgagctctggagcagcttcagcacgtaggggaagatgccgacagacaaggccaggctcactgcccagggacccaggtccaaaaatcttccaagcaagtccaatgctctcagccggtgcacttggcttaacagcacctgcaggacgatgggcagctgttccggtgggttccggttctccacgcccatggtgagccacacctggaaagcggtcagctgctcggcgaagaacgggctgtgccgaaacgcagtgccttcctcaatgatcgtcggcagctgggacagacagatgtcgacagccaggtcccaggcttgccacatcgcatgcatgtacgtgggcggcagacgcgggctgctgacgggagtgcagttgtacgacctcataatcctttccgccaataaaaaatttcggaacagactagccaccagtaagtcctgtctgaagagcttttggaagagatcccgagggagcacgttccatgcgatggtgtctgtgatggctgtgaagatccagttcagctcacccaggggcgtcctcctgtcgttcaggcggccagggatcttttctatcaaatccagtgtgacgccaggcaccagactgacacatttctgcatgcaaaaccagcgcagggcgatcttgatgggggtggtgaggcaggaggtgaacaggtcagccgggaggtcagggatcatgggcagcagctcggtggcctcgcaggctgccagctggatgcagtttttcatcgacggaggcaaaggcatctgagcaagagggtgatttgggttgattgcagctacctccagctcctgctcccgctgtagtgcgaactgcttgaaggacttgacgatcaagccagcgttggagcagtcatagacgaagatcgacgggctgcccatccatgtctgcaggtcatatatggacagagggatgtactgcgtgtagttcttgttgaagacccagacctccccgttcactgtgggccggggcaccccgtggccattgtagtgaaagaggactcgctcctccttggcgttgcgacgtagggacgtgcagagcttcttgacttcatccacagttgggtcaaggctctgcttgtaccgggcccttggctgccagttctcgtactgcttctgtaaatttgcaccgatggtttccagagctttctgaggacccatcgacagaggatcgatccagcattccaagcgcgcacagggcgtggtcttcaccacatcgggagggtccacaccaacattcaggcacaaaactaaggcaacactgactgtcttcatccgatccttcatcctccagctttgagctaaggatttggagccttcaattttctcacagtgcctctttttcataaaagccaaaggtaggttccagtctgtaagatcagcctcatcttcctcccccaggcccagaagaggcgactgcagcatttcggactccatcagtgggggagggggtgggggagtccttggcagcaagcgctcaagaacctccagccttaaaaactagcgtgtaccagaattggtgaaataagaaacagaaaaacggggaatcgaaaaacaaatggatggagagtgcggagacccttactcaggcaaaaagtctgagatccttatctccaactctgggcgggaagtggggaggtgggggccgctaggaaatggggcagcccaagaagctccgcagacacacaccagcccaagtcccaagccactggctgctcctggggctgcacgtttccagaggggctgcgagcggagctgtcaaaagcgtaagagacttcaggcctcacgatgaccctgctctcggcctccaacgcctcagcagttccgaggacaggcaggccgctcttggtgccggttcgcccactgggccgaggtctccagccaagggatcgggttcaaagggccctgggtctcctccagccactctcagccctgcgggtcccgcactcgtctgagctgccgcaaccagagccaggaccggcccatcgtgctcgcccgcacccggttcctcaacctcaggtccgcgcggcctggctggtcctggccttcagccccgaggctctctcctgcctgagaacgagtcctgagaaacgggcgacacggaaccacagagaaaacggacaatgagggcttattgggtcaggggagctttgccctctggtttggagctacagggaaactcatctcatcagcacatcaaggaggacgccatattgccaggacccagaatgcaccgcggcctacggcgtg

SEQ ID NO: 179 - DNA, 6828 bp, Macaca mulatta
  source 1..6828: mol_type = genomic DNA
gtcctggcaatatggcgtcctccttgatgtgctgatgagatgagtttccctgtagctccaaaccagagggcaaagctcccctgacccagtaagccctcattgtccgttttctccgtggttccgtgtcgcccgtttctcaggactcgttctcaggcaggagagagcctcggggctgaaggccaggaccagccaggccgcgcggacctgaggttgaggaaccgggtgcgggcgagcacgatgggccggtcctggctctggttgcggcagctcagacgagtgcgggacccgcagggctgagagtggctggaggagacccagggccctttgaacccgatcccttggccggagacctcggcccagtgggcgaaccggcaccaagagcggcctgcctgtcctcggaactgctgaggcgttggaggccgagagcagggtcatcgtgaggcctgaagtctcttacgcttttgacagctccgctcgcagcccctctggaaacgtgcagccccaggagcagccagtggcttgggacttgggctggtgtgtgtctgcggagcttcttgggctgccccatttcctagcggcccccacctccccacttcccgcccagagttagagataaggatctcagactttttgcctgagtaagggtctccgcactctccatccgtttgtttttcgattccccgtttttctgtttcttatttcaccaattctggtacacgctagtttttaaggctggaggttcttgagcgcttgctgccaaggactcccccaccccctcccccactgatggagtccgaaatgctgcagtcgcctcttctgggcctgggggaggaagatgaggctgatcttacagactggaacctacctttggcttttatgaaaaagaggcactgtgagaaaattgaaggctccaaatccttagctcaaagctggaggatgaaggatcggatgaagacagtcagtgttgccttagttttgtgcctgaatgttggtgtggaccctcccgatgtggtgaagaccacgccctgtgcgcgcttggaatgctggatcgatcctctgtcgatgggtcctcagaaagctctggaaaccatcggtgcaaatttacagaagcagtacgagaactggcagccaagggcccggtacaagcagagccttgacccaactgtggatgaagtcaagaagctctgcacgtccctacgtcgcaacgccaaggaggagcgagtcctctttcactacaatggccacggggtgccccggcccacagtgaacggggaggtctgggtcttcaacaagaactacacgcagtacatccctctgtccatatatgacctgcagacatggatgggcagcccgtcgatcttcgtctatgactgctccaacgctggcttgatcgtcaagtccttcaagcagttcgcactacagcgggagcaggagctggaggtagctgcaatcaacccaaatcaccctcttgctcagatgcctttgcctccgtcgatgaaaaactgcatccagctggcagcctgcgaggccactgagctgctgcccatgatccccgacctcccggctgacctgttcacctcctgcctcaccacccccatcaagatcgccctgcgctggttttgcatgcagaaatgtgtcagtctggtgcctggcgtcacactggatttgatagaaaagatccctggccgcctgaacgacaggaggacgcccctgggtgagctgaactggatcttcacagccatcacagacaccatcgcatggaacgtgctccctcgggatctcttccaaaagctcttcagacaggacttactggtggctagtctgttccgaaattttttattggcggaaaggattatgaggtcgtacaactgcactcccgtcagcagcccgcgtctgccgcccacgtacatgcatgcgatgtggcaagcctgggacctggctgtcgacatctgtctgtcccagctgccgacgatcattgaggaaggcactgcgtttcggcacagcccgttcttcgccgagcagctgaccgctttccaggtgtggctcaccatgggcgtggagaaccggaacccaccggaacagctgcccatcgtcctgcaggtgctgttaagccaagtgcaccggctgagagcattggacttgcttggaagatttttggacctgggtccctgggcagtgagcctggccttgtctgtcggcatcttcccctacgtgctgaagctgctccagagctcggcccgagagctgcggccacttctcgttttcatctgggccaagatcctcgcagtggacagctcgtgccaggcggacctcgtgaaggacaacggccacaagtacttcctgtcggtcctggcggacccctacatgccagccgaacacaggaccatgacggctttcattctcgccgtgattgtcaacagctataacacggggcaggaagcctgccttcagggaaacctcattgccatctgcctggagcagctcaacgacccgcaccccttgctgcgccagtgggtggccatctgcctcggcaggatctggcagaacttcgactcggcgaggtggtgcggcgtgagggacagcgctcacgagaagctctacagcctcctgtccgaccccattcccgaggtccgctgcgcggcggtctttgcccttggcacgttcgtgggcaactctgcagagaggacggaccactccaccaccattgaccacaacgtggccatgatgctggcccagctggtcagcgacgggagccccatggtccggaaggagctggtggtggctctgagtcatctcgtggttcagtacgaaagcaatttctgcactgtggccctgcagttcatagaagaggagaagaactaccccttgccttctccagcgaccacagagggagggagtctgaccccagtgcgagacagcccgtgcacccccagacttcgttccgtgagctcctatggaaacatccgtgctgtcgccacagccaggagcctcaacaaatctttgcagaacctgagcttgacagaggaatccggcggcgcggtggcgttctcccctggaaacctcagcaccagcagcagtgccagcagtaccctgggcagccccgagaatgaggagcacatcctgtccttcgagaccatcgacaagatgcgccgcgccagctcctactcctccctcaactccctcatcggagtttcctttaatagcgtttacactcagatttggagagtcctgctgcacctggctgctgacccctatccagaggtctcagacgtggccatgaaagtgctcaacagcatcgcctataaggccaccgtgaatgcccggccgcagcgcgtcctggacacctcctccctcacacagtcggcccctgccagccccaccaacaagggtgtgcacatccaccaggcggggggctcccctccagcgtccagcaccagcagctccagcctgaccaatgacgtggccaagcagccggtcagccgagacctgccttctggccggccgggcaccacaggccccgcgggggcgcaatacacccctcactcccaccagttcccccggacacggaagatgttcgacaagggcccagagcagactgcggacgatgcagacgatgctgctggacacaaaagcttcatctccgccacggtgcagacggggttctgcgactggagtgcccgctatttcgcccagcccgtcatgaagatcccggaagagcacgacctggagagtcagatccgcaaggagcgggagtggcggttcctgcgaaacagccgcgtcaggaggcaggcccagcaagtcatccagaagggcattacgagattggacgaccaaatatttctgaacaggaaccccggcgtcccctctgtggtgaaattccaccccttcacgccgtgcatcgccgtcgccgacaaggacagcatctgcttttgggactgggagaaaggggagaaactggactatttccacaatgggaaccctcggtacacaagggtcactgccatggagtatctgaacggccaggactgctcactcctgctgacggccacagacgatggtgccatcagggtctggaagaattttgctgatttggaaaagaacccagagatggtgaccgcgtggcaggggctctcggacatgctgccaacaacgcgaggagccgggatggtggtggactgggagcaggagaccggcctcctcatgagctcgggggacgtgcggatcgtccggatctgggacacagaccgtgagatgaaggtgcaggacatccccacgggcgcagacagctgcgtgacgagtctgtcctgtgattcccaccgctcactcatcgtggctggcctcggtgatggctccatccgcgtctacgacagaaggatggcactcagcgaatgccgcgtcatgacgtaccgcgagcacacggcctgggtggtgaaggcctctctgcagaagcgccccgacggccacatcgtgagcgtgagtgtcaatggagacgtgcgcatctttgatccccggatgcccgagtcggtgaatgtgcttcagatcgtgaaggggctgacagccctggacatccacccccaggcggacctgatcgcatgtggctccgtcaatcagttcaccgccatctacaatgggggcggcgagctgatcaacaacatcaagtactacgacggcttcatgggtcagcgggtcggcgccatcagctgcctggccttccacccacactggcctcacctggccgtgggaagcaacgactactacatctccgtgtactcggtggagaagcgcgtcagatagcggcgcgacccggcccgccaggccacggccgcctgctgtacatagtgaagctgccacttgccggggcgcggggtgtcggctgctgcggccccgcggtgtgaacgttggctgctgccttagctgctgatgacggcaggagggccctgctactcgcttttgtctgtcttcgctgtcgtgtccggaacgtcagggacggggagggcttaggttgacggtggcttcccactgagcaccagcatccaggtgcacccccgcggccgcagcgcgtctgtccctctcctgttctgtgtttctctgagacgttgaaaggggaaacacctcattttatttccatgtaatcagagcattagctgcagcaaaacccccagacagccctggaggagaggcaggcgctggggctcctgcgggtccctggagcagccgtccccatcaggccaagagcgagcgagaggtgctgccccagccaggcccaccgcctctcacagtcagtgcacgcaagcagggacatttcctagccggctggggcacactggaaattcgggaaaccaagagaaaggaagaaggagacgcccctctagctggcggtatgaagaaagccgcccagggggccgggctgtccttggccgctggccgcatcactgaacgggaggagcgcagcgcctcctccacagcccaccctccctgcacctccaggtctctagactctagttttggcccctcatgcagagctgtcagcaggggcctctgtggccgcgcaccgaagaggcaggtccttggcagtgtagcccctgccttagtccacagggctcctttccctccgaagggctgctcttccccgcacgcgcaggggcggcggcccggcctgtggtctccgtgcctgtgcccacacacgggtgtagcacacgcatgtgcgggcaccacggctggcaccctgggggcacacatgcaggcggcgtggtctccctgctctgtccgcacacgttcatcacacacaggtgagaggcactgccgggtcctagacggctctgggtgacaccagccccatctccagccctgagtcgcccatgctgatgtgaccttggcttgcagctgggcctgtggtgcagacaggagctgtgtggacagtcccgcccaggaggggcctcagggcagttttgcaaacagaacacaaccacaatgatggtattttgaaaagcattttttccatgttcgtcgggaatcaggattattgagaggtggaggagccaagtggcttcattgcggcagtaagaggcccacaaccacgggagtgagagcgggcacggcgaggcccgggctcccctgtggtgtgactggcatcctgccatggccaagagcatcttctgggtggatggaaccctgcctggctgcgtttggtcagagaaacacgtggtcttcagggggctgagctggagtctgagctggggctggccgggacatgacaaggtgggacagaggcggcccctccgctgctcttttttggaatgtgagctcccaccagaagaaggttccggcacgaatcccatccccacgtctgggccgagcgagcagaccaggtccggaaggtgtagagggccccaacccccacaagtcccggcctcactcagctcacagggcatgccaggcggcaacaccagaatcttccagaagcccagctccacccgcacacacagcttcccgtccagtccttcaactcgattcttacctaacacgcgtttctgtttgttttgagacaaaaccaccacctgtcaaaaggcaggtggctccagaggggacaagaccctcctgcgcccgctccgcccccgcgggctccgcgtgccacctgcacgtgggctgtcttcacaggtccgatgcggaaattcaatcacgacgtcaaccagggctcgagagagcgccggcctaaaggctccttatctctatttattttaccaaatgcgaattgagaaagactttgacaaaacacaaaatggcaatgtgaagctaagagcaggacaaacagtaaacaacacgcgcaga

SEQ ID NO: 180 - DNA, 6828 bp, Macaca mulatta
  source 1..6828: mol_type = genomic DNA
tctgcgcgtgttgtttactgtttgtcctgctcttagcttcacattgccattttgtgttttgtcaaagtctttctcaattcgcatttggtaaaataaatagagataaggagcctttaggccggcgctctctcgagccctggttgacgtcgtgattgaatttccgcatcggacctgtgaagacagcccacgtgcaggtggcacgcggagcccgcgggggcggagcgggcgcaggagggtcttgtcccctctggagccacctgccttttgacaggtggtggttttgtctcaaaacaaacagaaacgcgtgttaggtaagaatcgagttgaaggactggacgggaagctgtgtgtgcgggtggagctgggcttctggaagattctggtgttgccgcctggcatgccctgtgagctgagtgaggccgggacttgtgggggttggggccctctacaccttccggacctggtctgctcgctcggcccagacgtggggatgggattcgtgccggaaccttcttctggtgggagctcacattccaaaaaagagcagcggaggggccgcctctgtcccaccttgtcatgtcccggccagccccagctcagactccagctcagccccctgaagaccacgtgtttctctgaccaaacgcagccaggcagggttccatccacccagaagatgctcttggccatggcaggatgccagtcacaccacaggggagcccgggcctcgccgtgcccgctctcactcccgtggttgtgggcctcttactgccgcaatgaagccacttggctcctccacctctcaataatcctgattcccgacgaacatggaaaaaatgcttttcaaaataccatcattgtggttgtgttctgtttgcaaaactgccctgaggcccctcctgggcgggactgtccacacagctcctgtctgcaccacaggcccagctgcaagccaaggtcacatcagcatgggcgactcagggctggagatggggctggtgtcacccagagccgtctaggacccggcagtgcctctcacctgtgtgtgatgaacgtgtgcggacagagcagggagaccacgccgcctgcatgtgtgcccccagggtgccagccgtggtgcccgcacatgcgtgtgctacacccgtgtgtgggcacaggcacggagaccacaggccgggccgccgcccctgcgcgtgcggggaagagcagcccttcggagggaaaggagccctgtggactaaggcaggggctacactgccaaggacctgcctcttcggtgcgcggccacagaggcccctgctgacagctctgcatgaggggccaaaactagagtctagagacctggaggtgcagggagggtgggctgtggaggaggcgctgcgctcctcccgttcagtgatgcggccagcggccaaggacagcccggccccctgggcggctttcttcataccgccagctagaggggcgtctccttcttcctttctcttggtttcccgaatttccagtgtgccccagccggctaggaaatgtccctgcttgcgtgcactgactgtgagaggcggtgggcctggctggggcagcacctctcgctcgctcttggcctgatggggacggctgctccagggacccgcaggagccccagcgcctgcctctcctccagggctgtctgggggttttgctgcagctaatgctctgattacatggaaataaaatgaggtgtttcccctttcaacgtctcagagaaacacagaacaggagagggacagacgcgctgcggccgcgggggtgcacctggatgctggtgctcagtgggaagccaccgtcaacctaagccctccccgtccctgacgttccggacacgacagcgaagacagacaaaagcgagtagcagggccctcctgccgtcatcagcagctaaggcagcagccaacgttcacaccgcggggccgcagcagccgacaccccgcgccccggcaagtggcagcttcactatgtacagcaggcggccgtggcctggcgggccgggtcgcgccgctatctgacgcgcttctccaccgagtacacggagatgtagtagtcgttgcttcccacggccaggtgaggccagtgtgggtggaaggccaggcagctgatggcgccgacccgctgacccatgaagccgtcgtagtacttgatgttgttgatcagctcgccgcccccattgtagatggcggtgaactgattgacggagccacatgcgatcaggtccgcctgggggtggatgtccagggctgtcagccccttcacgatctgaagcacattcaccgactcgggcatccggggatcaaagatgcgcacgtctccattgacactcacgctcacgatgtggccgtcggggcgcttctgcagagaggccttcaccacccaggccgtgtgctcgcggtacgtcatgacgcggcattcgctgagtgccatccttctgtcgtagacgcggatggagccatcaccgaggccagccacgatgagtgagcggtgggaatcacaggacagactcgtcacgcagctgtctgcgcccgtggggatgtcctgcaccttcatctcacggtctgtgtcccagatccggacgatccgcacgtcccccgagctcatgaggaggccggtctcctgctcccagtccaccaccatcccggctcctcgcgttgttggcagcatgtccgagagcccctgccacgcggtcaccatctctgggttcttttccaaatcagcaaaattcttccagaccctgatggcaccatcgtctgtggccgtcagcaggagtgagcagtcctggccgttcagatactccatggcagtgacccttgtgtaccgagggttcccattgtggaaatagtccagtttctcccctttctcccagtcccaaaagcagatgctgtccttgtcggcgacggcgatgcacggcgtgaaggggtggaatttcaccacagaggggacgccggggttcctgttcagaaatatttggtcgtccaatctcgtaatgcccttctggatgacttgctgggcctgcctcctgacgcggctgtttcgcaggaaccgccactcccgctccttgcggatctgactctccaggtcgtgctcttccgggatcttcatgacgggctgggcgaaatagcgggcactccagtcgcagaaccccgtctgcaccgtggcggagatgaagcttttgtgtccagcagcatcgtctgcatcgtccgcagtctgctctgggcccttgtcgaacatcttccgtgtccgggggaactggtgggagtgaggggtgtattgcgcccccgcggggcctgtggtgcccggccggccagaaggcaggtctcggctgaccggctgcttggccacgtcattggtcaggctggagctgctggtgctggacgctggaggggagccccccgcctggtggatgtgcacacccttgttggtggggctggcaggggccgactgtgtgagggaggaggtgtccaggacgcgctgcggccgggcattcacggtggccttataggcgatgctgttgagcactttcatggccacgtctgagacctctggataggggtcagcagccaggtgcagcaggactctccaaatctgagtgtaaacgctattaaaggaaactccgatgagggagttgagggaggagtaggagctggcgcggcgcatcttgtcgatggtctcgaaggacaggatgtgctcctcattctcggggctgcccagggtactgctggcactgctgctggtgctgaggtttccaggggagaacgccaccgcgccgccggattcctctgtcaagctcaggttctgcaaagatttgttgaggctcctggctgtggcgacagcacggatgtttccataggagctcacggaacgaagtctgggggtgcacgggctgtctcgcactggggtcagactccctccctctgtggtcgctggagaaggcaaggggtagttcttctcctcttctatgaactgcagggccacagtgcagaaattgctttcgtactgaaccacgagatgactcagagccaccaccagctccttccggaccatggggctcccgtcgctgaccagctgggccagcatcatggccacgttgtggtcaatggtggtggagtggtccgtcctctctgcagagttgcccacgaacgtgccaagggcaaagaccgccgcgcagcggacctcgggaatggggtcggacaggaggctgtagagcttctcgtgagcgctgtccctcacgccgcaccacctcgccgagtcgaagttctgccagatcctgccgaggcagatggccacccactggcgcagcaaggggtgcgggtcgttgagctgctccaggcagatggcaatgaggtttccctgaaggcaggcttcctgccccgtgttatagctgttgacaatcacggcgagaatgaaagccgtcatggtcctgtgttcggctggcatgtaggggtccgccaggaccgacaggaagtacttgtggccgttgtccttcacgaggtccgcctggcacgagctgtccactgcgaggatcttggcccagatgaaaacgagaagtggccgcagctctcgggccgagctctggagcagcttcagcacgtaggggaagatgccgacagacaaggccaggctcactgcccagggacccaggtccaaaaatcttccaagcaagtccaatgctctcagccggtgcacttggcttaacagcacctgcaggacgatgggcagctgttccggtgggttccggttctccacgcccatggtgagccacacctggaaagcggtcagctgctcggcgaagaacgggctgtgccgaaacgcagtgccttcctcaatgatcgtcggcagctgggacagacagatgtcgacagccaggtcccaggcttgccacatcgcatgcatgtacgtgggcggcagacgcgggctgctgacgggagtgcagttgtacgacctcataatcctttccgccaataaaaaatttcggaacagactagccaccagtaagtcctgtctgaagagcttttggaagagatcccgagggagcacgttccatgcgatggtgtctgtgatggctgtgaagatccagttcagctcacccaggggcgtcctcctgtcgttcaggcggccagggatcttttctatcaaatccagtgtgacgccaggcaccagactgacacatttctgcatgcaaaaccagcgcagggcgatcttgatgggggtggtgaggcaggaggtgaacaggtcagccgggaggtcggggatcatgggcagcagctcagtggcctcgcaggctgccagctggatgcagtttttcatcgacggaggcaaaggcatctgagcaagagggtgatttgggttgattgcagctacctccagctcctgctcccgctgtagtgcgaactgcttgaaggacttgacgatcaagccagcgttggagcagtcatagacgaagatcgacgggctgcccatccatgtctgcaggtcatatatggacagagggatgtactgcgtgtagttcttgttgaagacccagacctccccgttcactgtgggccggggcaccccgtggccattgtagtgaaagaggactcgctcctccttggcgttgcgacgtagggacgtgcagagcttcttgacttcatccacagttgggtcaaggctctgcttgtaccgggcccttggctgccagttctcgtactgcttctgtaaatttgcaccgatggtttccagagctttctgaggacccatcgacagaggatcgatccagcattccaagcgcgcacagggcgtggtcttcaccacatcgggagggtccacaccaacattcaggcacaaaactaaggcaacactgactgtcttcatccgatccttcatcctccagctttgagctaaggatttggagccttcaattttctcacagtgcctctttttcataaaagccaaaggtaggttccagtctgtaagatcagcctcatcttcctcccccaggcccagaagaggcgactgcagcatttcggactccatcagtgggggagggggtgggggagtccttggcagcaagcgctcaagaacctccagccttaaaaactagcgtgtaccagaattggtgaaataagaaacagaaaaacggggaatcgaaaaacaaacggatggagagtgcggagacccttactcaggcaaaaagtctgagatccttatctctaactctgggcgggaagtggggaggtgggggccgctaggaaatggggcagcccaagaagctccgcagacacacaccagcccaagtcccaagccactggctgctcctggggctgcacgtttccagaggggctgcgagcggagctgtcaaaagcgtaagagacttcaggcctcacgatgaccctgctctcggcctccaacgcctcagcagttccgaggacaggcaggccgctcttggtgccggttcgcccactgggccgaggtctccggccaagggatcgggttcaaagggccctgggtctcctccagccactctcagccctgcgggtcccgcactcgtctgagctgccgcaaccagagccaggaccggcccatcgtgctcgcccgcacccggttcctcaacctcaggtccgcgcggcctggctggtcctggccttcagccccgaggctctctcctgcctgagaacgagtcctgagaaacgggcgacacggaaccacggagaaaacggacaatgagggcttactgggtcaggggagctttgccctctggtttggagctacagggaaactcatctcatcagcacatcaaggaggacgccatattgccaggac

SEQ ID NO: 181 - DNA, 8721 bp, Homo sapiens
  source 1..8721: mol_type = genomic DNA
gctcccggcttagaggacagcggggaaggcgggcggtggggcagggggcctgaagcggcggtaccggtgctggcggcggcagctgaggccttggccgaagccgcgcgaacctcagggcaagatgcttggaaccggacctgccgccgccaccaccgctgccaccacatctagcaatgtgagcgtcctgcagcagtttgccagtggcctaaagagccggaatgaggaaaccagggccaaagccgccaaggagctccagcactatgtcaccatggaactccgagagatgagtcaagaggagtctactcgcttctatgaccaactgaaccatcacatttttgaattggtttccagctcagatgccaatgagaggaaaggtggcatcttggccatagctagcctcataggagtggaaggtgggaatgccacccgaattggcagatttgccaactatcttcggaacctcctcccctccaatgacccagttgtcatggaaatggcatccaaggccattggccgtcttgccatggcaggggacacttttaccgctgagtacgtggaatttgaggtgaagcgagccctggaatggctgggtgctgaccgcaatgagggccggagacatgcagctgtcctggttctccgtgagctggccatcagcgtccctaccttcttcttccagcaagtgcaacccttctttgacaacatttttgtggccgtgtgggaccccaaacaggccatccgtgagggagctgtagccgcccttcgtgcctgtctgattctcacaacccagcgtgagccgaaggagatgcagaagcctcagtggtacaggcacacatttgaagaagcagagaagggatttgatgagaccttggccaaagagaagggcatgaatcgggatgatcggatccatggagccttgttgatccttaacgagctggtccgaatcagcagcatggagggagagcgtctgagagaagaaatggaagaaatcacacagcagcagctggtacacgacaagtactgcaaagatctcatgggcttcggaacaaaacctcgtcacattacccccttcaccagtttccaggctgtacagccccagcagtcaaatgccttggtggggctgctggggtacagctctcaccaaggcctcatgggatttgggacctcccccagtccagctaagtccaccctggtggagagccggtgttgcagagacttgatggaggagaaatttgatcaggtgtgccagtgggtgctgaaatgcaggaatagcaagaactcgctgatccaaatgacaatccttaatttgttgccccgcttggctgcattccgaccttctgccttcacagatacccagtatctccaagataccatgaaccatgtcctaagctgtgtcaagaaggagaaggaacgtacagcggccttccaagccctggggctactttctgtggctgtgaggtctgagtttaaggtctatttgcctcgcgtgctggacatcatccgagcggccctgcccccaaaggacttcgcccataagaggcagaaggcaatgcaggtggatgccacagtcttcacttgcatcagcatgctggctcgagcaatggggccaggcatccagcaggatatcaaggagctgctggagcccatgctggcagtgggactaagccctgccctcactgcagtgctctacgacctgagccgtcagattccacagctaaagaaggacattcaagatgggctactgaaaatgctgtccctggtccttatgcacaaaccccttcgccacccaggcatgcccaagggcctggcccatcagctggcctctcctggcctcacgaccctccctgaggccagcgatgtgggcagcatcactcttgccctccgaacgcttggcagctttgaatttgaaggccactctctgacccaatttgttcgccactgtgcggatcatttcctgaacagtgagcacaaggagatccgcatggaggctgcccgcacctgctcccgcctgctcacaccctccatccacctcatcagtggccatgctcatgtggttagccagaccgcagtgcaagtggtggcagatgtgcttagcaaactgctcgtagttgggataacagatcctgaccctgacattcgctactgtgtcttggcgtccctggacgagcgctttgatgcacacctggcccaggcggagaacttgcaggccttgtttgtggctctgaatgaccaggtgtttgagatccgggagctggccatctgcactgtgggccgactcagtagcatgaaccctgcctttgtcatgcctttcctgcgcaagatgctcatccagattttgacagagttggagcacagtgggattggaagaatcaaagagcagagtgcccgcatgctggggcacctggtctccaatgccccccgactcatccgcccctacatggagcctattctgaaggcattaattttgaaactgaaagatccagaccctgatccaaacccaggtgtgatcaataatgtcctggcaacaataggagaattggcacaggttagtggcctggaaatgaggaaatgggttgatgaactttttattatcatcatggacatgctccaggattcctctttgttggccaaaaggcaggtggctctgtggaccctgggacagttggtggccagcactggctatgtagtagagccctacaggaagtaccctactttgcttgaggtgctactgaattttctgaagactgagcagaaccagggtacacgcagagaggccatccgtgtgttagggcttttaggggctttggatccttacaagcacaaagtgaacattggcatgatagaccagtcccgggatgcctctgctgtcagcctgtcagaatccaagtcaagtcaggattcctctgactatagcactagtgaaatgctggtcaacatgggaaacttgcctctggatgagttctacccagctgtgtccatggtggccctgatgcggatcttccgagaccagtcactctctcatcatcacaccatggttgtccaggccatcaccttcatcttcaagtccctgggactcaaatgtgtgcagttcctgccccaggtcatgcccacgttccttaacgtcattcgagtctgtgatggggccatccgggaatttttgttccagcagctgggaatgttggtgtcctttgtgaagagccacatcagaccttatatggatgaaatagtcaccctcatgagagaattctgggtcatgaacacctcaattcagagcacgatcattcttctcattgagcaaattgtggtagctcttgggggtgaatttaagctctacctgccccagctgatcccacacatgctgcgtgtcttcatgcatgacaacagcccaggccgcattgtctctatcaagttactggctgcaatccagctgtttggcgccaacctggatgactacctgcatttactgctgcctcctattgttaagttgtttgatgcccctgaagctccactgccatctcgaaaggcagcgctagagactgtggaccgcctgacggagtccctggatttcactgactatgcctcccggatcattcaccctattgttcgaacactggaccagagcccagaactgcgctccacagccatggacacgctgtcttcacttgtttttcagctggggaagaagtaccaaattttcattccaatggtgaataaagttctggtgcgacaccgaatcaatcatcagcgctatgatgtgctcatctgcagaattgtcaagggatacacacttgctgatgaagaggaggatcctttgatttaccagcatcggatgcttaggagtggccaaggggatgcattggctagtggaccagtggaaacaggacccatgaagaaactgcacgtcagcaccatcaacctccaaaaggcctggggcgctgccaggagggtctccaaagatgactggctggaatggctgagacggctgagcctggagctgctgaaggactcatcatcgccctccctgcgctcctgctgggccctggcacaggcctacaacccgatggccagggatctcttcaatgctgcatttgtgtcctgctggtctgaactgaatgaagatcaacaggatgagctcatcagaagcatcgagttggccctcacctcacaagacatcgctgaagtcacacagaccctcttaaacttggctgaattcatggaacacagtgacaagggccccctgccactgagagatgacaatggcattgttctgctgggtgagagagctgccaagtgccgagcatatgccaaagcactacactacaaagaactggagttccagaaaggccccacccctgccattctagaatctctcatcagcattaataataagctacagcagccggaggcagcggccggagtgttagaatatgccatgaaacactttggagagctggagatccaggctacctggtatgagaaactgcacgagtgggaggatgcccttgtggcctatgacaagaaaatggacaccaacaaggacgacccagagctgatgctgggccgcatgcgctgcctcgaggccttgggggaatggggtcaactccaccagcagtgctgtgaaaagtggaccctggttaatgatgagacccaagccaagatggcccggatggctgctgcagctgcatggggtttaggtcagtgggacagcatggaagaatacacctgtatgatccctcgggacacccatgatggggcattttatagagctgtgctggcactgcatcaggacctcttctccttggcacaacagtgcattgacaaggccagggacctgctggatgctgaattaactgcgatggcaggagagagttacagtcgggcatatggggccatggtttcttgccacatgctgtccgagctggaggaggttatccagtacaaacttgtccccgagcgacgagagatcatccgccagatctggtgggagagactgcagggctgccagcgtatcgtagaggactggcagaaaatccttatggtgcggtcccttgtggtcagccctcatgaagacatgagaacctggctcaagtatgcaagcctgtgcggcaagagtggcaggctggctcttgctcataaaactttagtgttgctcctgggagttgatccgtctcggcaacttgaccatcctctgccaacagttcaccctcaggtgacctatgcctacatgaaaaacatgtggaagagtgcccgcaagatcgatgccttccagcacatgcagcattttgtccagaccatgcagcaacaggcccagcatgccatcgctactgaggaccagcagcataagcaggaactgcacaagctcatggcccgatgcttcctgaaacttggagagtggcagctgaatctacagggcatcaatgagagcacaatccccaaagtgctgcagtactacagcgccgccacagagcacgaccgcagctggtacaaggcctggcatgcgtgggcagtgatgaacttcgaagctgtgctacactacaaacatcagaaccaagcccgcgatgagaagaagaaactgcgtcatgccagcggggccaacatcaccaacgccaccactgccgccaccacggccgccactgccaccaccactgccagcaccgagggcagcaacagtgagagcgaggccgagagcaccgagaacagccccaccccatcgccgctgcagaagaaggtcactgaggatctgtccaaaaccctcctgatgtacacggtgcctgccgtccagggcttcttccgttccatctccttgtcacgaggcaacaacctccaggatacactcagagttctcaccttatggtttgattatggtcactggccagatgtcaatgaggccttagtggagggggtgaaagccatccagattgatacctggctacaggttatacctcagctcattgcaagaattgatacgcccagacccttggtgggacgtctcattcaccagcttctcacagacattggtcggtaccacccccaggccctcatctacccactgacagtggcttctaagtctaccacgacagcccggcacaatgcagccaacaagattctgaagaacatgtgtgagcacagcaacaccctggtccagcaggccatgatggtgagcgaggagctgatccgagtggccatcctctggcatgagatgtggcatgaaggcctggaagaggcatctcgtttgtactttggggaaaggaacgtgaaaggcatgtttgaggtgctggagcccttgcatgctatgatggaacggggcccccagactctgaaggaaacatcctttaatcaggcctatggtcgagatttaatggaggcccaagagtggtgcaggaagtacatgaaatcagggaatgtcaaggacctcacccaagcctgggacctctattatcatgtgttccgacgaatctcaaagcagctgcctcagctcacatccttagagctgcaatatgtttccccaaaacttctgatgtgccgggaccttgaattggctgtgccaggaacatatgaccccaaccagccaatcattcgcattcagtccatagcaccgtctttgcaagtcatcacatccaagcagaggccccggaaattgacacttatgggcagcaacggacatgagtttgttttccttctaaaaggccatgaagatctgcgccaggatgagcgtgtgatgcagctcttcggcctggttaacacccttctggccaatgacccaacatctcttcggaaaaacctcagcatccagagatacgctgtcatccctttatcgaccaactcgggcctcattggctgggttccccactgtgacacactgcacgccctcatccgggactacagggagaagaagaagatccttctcaacatcgagcatcgcatcatgttgcggatggctccggactatgaccacttgactctgatgcagaaggtggaggtgtttgagcatgccgtcaataatacagctggggacgacctggccaagctgctgtggctgaaaagccccagctccgaggtgtggtttgaccgaagaaccaattatacccgttctttagcggtcatgtcaatggttgggtatattttaggcctgggagatagacacccatccaacctgatgctggaccgtctgagtgggaagatcctgcacattgactttggggactgctttgaggttgctatgacccgagagaagtttccagagaagattccatttagactaacaagaatgttgaccaatgctatggaggttacaggcctggatggcaactacagaatcacatgccacacagtgatggaggtgctgcgagagcacaaggacagtgtcatggccgtgctggaagcctttgtctatgaccccttgctgaactggaggctgatggacacaaataccaaaggcaacaagcgatcccgaacgaggacggattcctactctgctggccagtcagtcgaaattttggacggtgtggaacttggagagccagcccataagaaaacggggaccacagtgccagaatctattcattctttcattggagacggtttggtgaaaccagaggccctaaataagaaagctatccagattattaacagggttcgagataagctcactggtcgggacttctctcatgatgacactttggatgttccaacgcaagttgagctgctcatcaaacaagcgacatcccatgaaaacctctgccagtgctatattggctggtgccctttctggtaactggaggcccagatgtgcccatcacgttttttctgaggcttttgtactttagtaaatgcttccactaaactgaaaccatggtgagaaagtttgactttgttaaatattttgaaatgtaaatgaaaagaactactgtatattaaaagttggtttgaaccaactttctagctgctgttgaagaatatattgtcagaaacacaaggcttgatttggttcccaggacagtgaaacatagtaataccacgtaaatcaagccattcattttggggaacagaagatccataactttagaaatacgggttttgacttaactcacaagagaactcatcataagtacttgctgatggaagaatgacctagttgctcctctcaacatgggtacagcaaactcagcacagccaagaagcctcaggtcgtggagaacatggattaggatcctagactgtaaagacacagaagatgctgacctcacccctgccacctatcccaagacctcactggtctgtggacagcagcagaaatgtttgcaagataggccaaaatgagtacaaaaggtctgtcttccatcagacccagtgatgctgcgactcacacgcttcaattcaagacctgaccgctagtagggaggtttattcagatcgctggcagcctcggctgagcagatgcacagaggggatcactgtgcagtgggaccaccctcactggccttctgcagcagggttctgggatgttttcagtggtcaaaatactctgtttagagcaagggctcagaaaacagaaatactgtcatggaggtgctgaacacagggaaggtctggtacatattggaaattatgagcagaacaaatactcaactaaatgcacaaagtataaagtgtagccatgtctagacaccatgttgtatcagaataatttttgtgccaataaatgacatcagaattttaaacata

SEQ ID NO: 182 - DNA, 8721 bp, Homo sapiens
  source 1..8721: mol_type = genomic DNA
tatgtttaaaattctgatgtcatttattggcacaaaaattattctgatacaacatggtgtctagacatggctacactttatactttgtgcatttagttgagtatttgttctgctcataatttccaatatgtaccagaccttccctgtgttcagcacctccatgacagtatttctgttttctgagcccttgctctaaacagagtattttgaccactgaaaacatcccagaaccctgctgcagaaggccagtgagggtggtcccactgcacagtgatcccctctgtgcatctgctcagccgaggctgccagcgatctgaataaacctccctactagcggtcaggtcttgaattgaagcgtgtgagtcgcagcatcactgggtctgatggaagacagaccttttgtactcattttggcctatcttgcaaacatttctgctgctgtccacagaccagtgaggtcttgggataggtggcaggggtgaggtcagcatcttctgtgtctttacagtctaggatcctaatccatgttctccacgacctgaggcttcttggctgtgctgagtttgctgtacccatgttgagaggagcaactaggtcattcttccatcagcaagtacttatgatgagttctcttgtgagttaagtcaaaacccgtatttctaaagttatggatcttctgttccccaaaatgaatggcttgatttacgtggtattactatgtttcactgtcctgggaaccaaatcaagccttgtgtttctgacaatatattcttcaacagcagctagaaagttggttcaaaccaacttttaatatacagtagttcttttcatttacatttcaaaatatttaacaaagtcaaactttctcaccatggtttcagtttagtggaagcatttactaaagtacaaaagcctcagaaaaaacgtgatgggcacatctgggcctccagttaccagaaagggcaccagccaatatagcactggcagaggttttcatgggatgtcgcttgtttgatgagcagctcaacttgcgttggaacatccaaagtgtcatcatgagagaagtcccgaccagtgagcttatctcgaaccctgttaataatctggatagctttcttatttagggcctctggtttcaccaaaccgtctccaatgaaagaatgaatagattctggcactgtggtccccgttttcttatgggctggctctccaagttccacaccgtccaaaatttcgactgactggccagcagagtaggaatccgtcctcgttcgggatcgcttgttgcctttggtatttgtgtccatcagcctccagttcagcaaggggtcatagacaaaggcttccagcacggccatgacactgtccttgtgctctcgcagcacctccatcactgtgtggcatgtgattctgtagttgccatccaggcctgtaacctccatagcattggtcaacattcttgttagtctaaatggaatcttctctggaaacttctctcgggtcatagcaacctcaaagcagtccccaaagtcaatgtgcaggatcttcccactcagacggtccagcatcaggttggatgggtgtctatctcccaggcctaaaatatacccaaccattgacatgaccgctaaagaacgggtataattggttcttcggtcaaaccacacctcggagctggggcttttcagccacagcagcttggccaggtcgtccccagctgtattattgacggcatgctcaaacacctccaccttctgcatcagagtcaagtggtcatagtccggagccatccgcaacatgatgcgatgctcgatgttgagaaggatcttcttcttctccctgtagtcccggatgagggcgtgcagtgtgtcacagtggggaacccagccaatgaggcccgagttggtcgataaagggatgacagcgtatctctggatgctgaggtttttccgaagagatgttgggtcattggccagaagggtgttaaccaggccgaagagctgcatcacacgctcatcctggcgcagatcttcatggccttttagaaggaaaacaaactcatgtccgttgctgcccataagtgtcaatttccggggcctctgcttggatgtgatgacttgcaaagacggtgctatggactgaatgcgaatgattggctggttggggtcatatgttcctggcacagccaattcaaggtcccggcacatcagaagttttggggaaacatattgcagctctaaggatgtgagctgaggcagctgctttgagattcgtcggaacacatgataatagaggtcccaggcttgggtgaggtccttgacattccctgatttcatgtacttcctgcaccactcttgggcctccattaaatctcgaccataggcctgattaaaggatgtttccttcagagtctgggggccccgttccatcatagcatgcaagggctccagcacctcaaacatgcctttcacgttcctttccccaaagtacaaacgagatgcctcttccaggccttcatgccacatctcatgccagaggatggccactcggatcagctcctcgctcaccatcatggcctgctggaccagggtgttgctgtgctcacacatgttcttcagaatcttgttggctgcattgtgccgggctgtcgtggtagacttagaagccactgtcagtgggtagatgagggcctgggggtggtaccgaccaatgtctgtgagaagctggtgaatgagacgtcccaccaagggtctgggcgtatcaattcttgcaatgagctgaggtataacctgtagccaggtatcaatctggatggctttcaccccctccactaaggcctcattgacatctggccagtgaccataatcaaaccataaggtgagaactctgagtgtatcctggaggttgttgcctcgtgacaaggagatggaacggaagaagccctggacggcaggcaccgtgtacatcaggagggttttggacagatcctcagtgaccttcttctgcagcggcgatggggtggggctgttctcggtgctctcggcctcgctctcactgttgctgccctcggtgctggcagtggtggtggcagtggcggccgtggtggcggcagtggtggcgttggtgatgttggccccgctggcatgacgcagtttcttcttctcatcgcgggcttggttctgatgtttgtagtgtagcacagcttcgaagttcatcactgcccacgcatgccaggccttgtaccagctgcggtcgtgctctgtggcggcgctgtagtactgcagcactttggggattgtgctctcattgatgccctgtagattcagctgccactctccaagtttcaggaagcatcgggccatgagcttgtgcagttcctgcttatgctgctggtcctcagtagcgatggcatgctgggcctgttgctgcatggtctggacaaaatgctgcatgtgctggaaggcatcgatcttgcgggcactcttccacatgtttttcatgtaggcataggtcacctgagggtgaactgttggcagaggatggtcaagttgccgagacggatcaactcccaggagcaacactaaagttttatgagcaagagccagcctgccactcttgccgcacaggcttgcatacttgagccaggttctcatgtcttcatgagggctgaccacaagggaccgcaccataaggattttctgccagtcctctacgatacgctggcagccctgcagtctctcccaccagatctggcggatgatctctcgtcgctcggggacaagtttgtactggataacctcctccagctcggacagcatgtggcaagaaaccatggccccatatgcccgactgtaactctctcctgccatcgcagttaattcagcatccagcaggtccctggccttgtcaatgcactgttgtgccaaggagaagaggtcctgatgcagtgccagcacagctctataaaatgccccatcatgggtgtcccgagggatcatacaggtgtattcttccatgctgtcccactgacctaaaccccatgcagctgcagcagccatccgggccatcttggcttgggtctcatcattaaccagggtccacttttcacagcactgctggtggagttgaccccattcccccaaggcctcgaggcagcgcatgcggcccagcatcagctctgggtcgtccttgttggtgtccattttcttgtcataggccacaagggcatcctcccactcgtgcagtttctcataccaggtagcctggatctccagctctccaaagtgtttcatggcatattctaacactccggccgctgcctccggctgctgtagcttattattaatgctgatgagagattctagaatggcaggggtggggcctttctggaactccagttctttgtagtgtagtgctttggcatatgctcggcacttggcagctctctcacccagcagaacaatgccattgtcatctctcagtggcagggggcccttgtcactgtgttccatgaattcagccaagtttaagagggtctgtgtgacttcagcgatgtcttgtgaggtgagggccaactcgatgcttctgatgagctcatcctgttgatcttcattcagttcagaccagcaggacacaaatgcagcattgaagagatccctggccatcgggttgtaggcctgtgccagggcccagcaggagcgcagggagggcgatgatgagtccttcagcagctccaggctcagccgtctcagccattccagccagtcatctttggagaccctcctggcagcgccccaggccttttggaggttgatggtgctgacgtgcagtttcttcatgggtcctgtttccactggtccactagccaatgcatccccttggccactcctaagcatccgatgctggtaaatcaaaggatcctcctcttcatcagcaagtgtgtatcccttgacaattctgcagatgagcacatcatagcgctgatgattgattcggtgtcgcaccagaactttattcaccattggaatgaaaatttggtacttcttccccagctgaaaaacaagtgaagacagcgtgtccatggctgtggagcgcagttctgggctctggtccagtgttcgaacaatagggtgaatgatccgggaggcatagtcagtgaaatccagggactccgtcaggcggtccacagtctctagcgctgcctttcgagatggcagtggagcttcaggggcatcaaacaacttaacaataggaggcagcagtaaatgcaggtagtcatccaggttggcgccaaacagctggattgcagccagtaacttgatagagacaatgcggcctgggctgttgtcatgcatgaagacacgcagcatgtgtgggatcagctggggcaggtagagcttaaattcacccccaagagctaccacaatttgctcaatgagaagaatgatcgtgctctgaattgaggtgttcatgacccagaattctctcatgagggtgactatttcatccatataaggtctgatgtggctcttcacaaaggacaccaacattcccagctgctggaacaaaaattcccggatggccccatcacagactcgaatgacgttaaggaacgtgggcatgacctggggcaggaactgcacacatttgagtcccagggacttgaagatgaaggtgatggcctggacaaccatggtgtgatgatgagagagtgactggtctcggaagatccgcatcagggccaccatggacacagctgggtagaactcatccagaggcaagtttcccatgttgaccagcatttcactagtgctatagtcagaggaatcctgacttgacttggattctgacaggctgacagcagaggcatcccgggactggtctatcatgccaatgttcactttgtgcttgtaaggatccaaagcccctaaaagccctaacacacggatggcctctctgcgtgtaccctggttctgctcagtcttcagaaaattcagtagcacctcaagcaaagtagggtacttcctgtagggctctactacatagccagtgctggccaccaactgtcccagggtccacagagccacctgccttttggccaacaaagaggaatcctggagcatgtccatgatgataataaaaagttcatcaacccatttcctcatttccaggccactaacctgtgccaattctcctattgttgccaggacattattgatcacacctgggtttggatcagggtctggatctttcagtttcaaaattaatgccttcagaataggctccatgtaggggcggatgagtcggggggcattggagaccaggtgccccagcatgcgggcactctgctctttgattcttccaatcccactgtgctccaactctgtcaaaatctggatgagcatcttgcgcaggaaaggcatgacaaaggcagggttcatgctactgagtcggcccacagtgcagatggccagctcccggatctcaaacacctggtcattcagagccacaaacaaggcctgcaagttctccgcctgggccaggtgtgcatcaaagcgctcgtccagggacgccaagacacagtagcgaatgtcagggtcaggatctgttatcccaactacgagcagtttgctaagcacatctgccaccacttgcactgcggtctggctaaccacatgagcatggccactgatgaggtggatggagggtgtgagcaggcgggagcaggtgcgggcagcctccatgcggatctccttgtgctcactgttcaggaaatgatccgcacagtggcgaacaaattgggtcagagagtggccttcaaattcaaagctgccaagcgttcggagggcaagagtgatgctgcccacatcgctggcctcagggagggtcgtgaggccaggagaggccagctgatgggccaggcccttgggcatgcctgggtggcgaaggggtttgtgcataaggaccagggacagcattttcagtagcccatcttgaatgtccttctttagctgtggaatctgacggctcaggtcgtagagcactgcagtgagggcagggcttagtcccactgccagcatgggctccagcagctccttgatatcctgctggatgcctggccccattgctcgagccagcatgctgatgcaagtgaagactgtggcatccacctgcattgccttctgcctcttatgggcgaagtcctttgggggcagggccgctcggatgatgtccagcacgcgaggcaaatagaccttaaactcagacctcacagccacagaaagtagccccagggcttggaaggccgctgtacgttccttctccttcttgacacagcttaggacatggttcatggtatcttggagatactgggtatctgtgaaggcagaaggtcggaatgcagccaagcggggcaacaaattaaggattgtcatttggatcagcgagttcttgctattcctgcatttcagcacccactggcacacctgatcaaatttctcctccatcaagtctctgcaacaccggctctccaccagggtggacttagctggactgggggaggtcccaaatcccatgaggccttggtgagagctgtaccccagcagccccaccaaggcatttgactgctggggctgtacagcctggaaactggtgaagggggtaatgtgacgaggttttgttccgaagcccatgagatctttgcagtacttgtcgtgtaccagctgctgctgtgtgatttcttccatttcttctctcagacgctctccctccatgctgctgattcggaccagctcgttaaggatcaacaaggctccatggatccgatcatcccgattcatgcccttctctttggccaaggtctcatcaaatcccttctctgcttcttcaaatgtgtgcctgtaccactgaggcttctgcatctccttcggctcacgctgggttgtgagaatcagacaggcacgaagggcggctacagctccctcacggatggcctgtttggggtcccacacggccacaaaaatgttgtcaaagaagggttgcacttgctggaagaagaaggtagggacgctgatggccagctcacggagaaccaggacagctgcatgtctccggccctcattgcggtcagcacccagccattccagggctcgcttcacctcaaattccacgtactcagcggtaaaagtgtcccctgccatggcaagacggccaatggccttggatgccatttccatgacaactgggtcattggaggggaggaggttccgaagatagttggcaaatctgccaattcgggtggcattcccaccttccactcctatgaggctagctatggccaagatgccacctttcctctcattggcatctgagctggaaaccaattcaaaaatgtgatggttcagttggtcatagaagcgagtagactcctcttgactcatctctcggagttccatggtgacatagtgctggagctccttggcggctttggccctggtttcctcattccggctctttaggccactggcaaactgctgcaggacgctcacattgctagatgtggtggcagcggtggtggcggcggcaggtccggttccaagcatcttgccctgaggttcgcgcggcttcggccaaggcctcagctgccgccgccagcaccggtaccgccgcttcaggccccctgccccaccgcccgccttccccgctgtcctctaagccgggagc

SEQ ID NO: 183 - DNA, 8612 bp, Mus musculus
  source 1..8612: mol_type = genomic DNA
tccctggcctagaagacagcggggaaggcgggtgttgaggctgggggcctgaagcggcggtaccggctccggcggcggcagctgaggcggtggccgaagccgcgcgaacctcagggcaagatgcttgggacgggtcctgccgtggccaccgccagtgccgccacatctagcaacgtgagcgtcctgcagcagttcgccagtggactgaagagccggaatgaggagaccagggccaaagcagccaaggagctccagcactacgtcaccatggagcttcgagagatgagtcaggaggagtctactcgcttctatgaccagctgaaccatcacatttttgaactggtttccagctcagatgccaatgagaggaagggtggcatcttggccatcgccagcctcataggagtggaaggtgggaattccaccagaattggcagatttgccaactaccttcgaaacctcctcccctcaagcgatccagttgtcatggaaatggcgtccaaggccattggccgcctggcgatggcaggggacactttcactgctgaatatgtggagtttgaagtgaagcgagccttggagtggctgggtgctgaccgaaatgagggccggagacatgccgctgtcctcgttctccgtgagctggccatcagtgtccccaccttcttcttccagcaagttcagcccttctttgacaacatttttgtggctgtgtgggaccccaagcaggccatccgggaaggcgctgtagcggcccttcgtgcctgtctgattctcaccacgcagcgggaaccaaaggaaatgcagaagcctcagtggtaccggcacacatttgaagaagcagagaaaggttttgatgagaccctggccaaagagaagggtatgaatcgagatgatcgaatccacggagccttgctgatcctcaacgagctagttcgtatcagcagcatggagggagagcgtctgagagaagagatggaggagatcacccagcagcagctggtgcatgacaagtactgcaaagacctcatgggcttcgggaccaagcctcggcacatcacgcccttcaccagtttccaggctgtgcagccccagcagccgaacgccttggtgggactgctggggtacagctcccctcaaggcctgatgggatttgggacgtcccccagccctgccaagtccactctggtggaaagccgctgttgcagagacttgatggaagagaaatttgatcaggtgtgccagtgggtgctgaagtgcaggagcagcaagaactcgctgatccagatgacaatccttaacctgctgccccgcctggctgcattccgaccgtccgccttcacagatacccagtacctccaggacaccatgaaccatgtcctgagctgtgtcaagaaggagaaggaacggactgcggcgttccaggccctggggctgctttctgtggccgtgaggtcggagtttaaggtctacttgccccgtgtacttgacatcatccgagcagcgcttcctccaaaggactttgcccacaagaggcagaaaaccgtgcaggtggatgccaccgtattcacgtgcatcagcatgttggcacgagcaatggggccgggcatccagcaggacatcaaggagctgctggagcccatgttggcagtgggcctgagccccgcgctcactgctgtgctctatgacctgagccggcagattccacagctgaagaaagatattcaggacggccttctgaagatgctgtccctggtccttatgcacaaacccctccggcacccaggcatgcccaaaggcctggctcaccagctggcttcccctggtctcaccaccctccctgaggccagcgacgtggccagcatcactcttgcccttcgaacccttggcagctttgaatttgaaggccactctctgacccagttcgtccgacactgcgcagatcacttcctgaacagcgagcacaaggagatccgcatggaagctgctcgcacctgctcccgcctgctcacaccctccatccacctcatcagcggccatgcccacgtggttagccagactgcagtgcaggtggtggcagatgtgctcagcaagctgcttgtggttggcataacagatcctgaccctgatatccgctactgtgtcttggcatccctggacgagcgctttgatgcccacctggcccaggcagaaaacttacaagctctgtttgtggctctgaatgaccaggtctttgagatccgcgagctggccatctgcactgtgggccgactaagcagcatgaacccagccttcgtcatgcctttcctgcgcaagatgctcatccagatcctgacagagctggagcacagcggcattgggagaatcaaggagcagagcgcccgcatgctggggcacctggtgtccaacgccccccggctcatccgcccctacatggagcctatcctgaaggctttaattttgaaactgaaagatccagaccctgacccaaacccgggcgtgatcaataacgtgttggccactataggagaactggctcaggtgagcggcctggaaatgcggaagtgggtggacgagctctttatcatcatcatggacatgctgcaggactcctccctgctggccaaaaggcaggtggctttgtggaccctgggacagttggtggccagcactggctatgtggtggagccctacaggaagtaccccactttgcttgaagtgctgctgaatttcctgaagacggagcagaaccagggcactcggagagaggctatccgagtgttggggctccttggggctttggatccctacaagcacaaagtgaacatcggcatgatcgaccagtcccgggacgcttccgctgtcagcctgtcagagtccaagtcaagtcaggattcctctgactacagcaccagtgaaatgctggtcaacatgggaaacctgcccctggacgagttctaccccgctgtgtccatggtggccttgatgcggatcttccgagatcaatccctctctcaccaccacaccatggtggtgcaggccatcaccttcatcttcaagtccctggggctcaagtgtgtgcagttcctgccccaggtcatgcccacattccttaatgtcatccgagtctgtgatggggccatccgggaatttctgttccagcagctggggatgctggtgtcctttgtgaagagccacatccgtccctacatggatgaaatagtcactctcatgagagagttttgggtcatgaacacgtcaatccagagcacaatcattcttctcattgagcagattgtggtggctctcggaggggaatttaagctttatctgccccagttgatcccacacatgctgcgggtcttcatgcatgacaacagccaaggccgaatcgtctccatcaagctgttagccgcgatccagctgtttggcgccaacctggatgactatctgcacttgttgttgcctccgattgtgaaattgtttgatgcccctgaagtcccgctgccatcaagaaaggcagcgctggagacggtggaccgcctgacagagtccctagacttcactgactacgcctcccgcatcattcacccaatagttcgtacgctagaccagagcccagagctgcgctccacagccatggacactctgtcttcgcttgtctttcaactggggaagaagtaccagatcttcattccaatggtgaataaagtcctcgtgcgacaccggatcaaccaccagcgctatgatgtgcttatctgcagaatcgtcaaggggtacacacttgctgatgaggaagaagaccctttgatttaccagcatcgaatgctaaggagcagccagggagatgccctggccagtggaccagttgagacaggacccatgaagaaactgcatgtcagcaccatcaacctccaaaaggcctggggagctgccagaagggtctccaaggacgactggctggagtggctgaggcgcttgagtctggagcttctgaaggactcctcatcgccctccctgcgctcatgctgggccctggcgcaggcctacaaccccatggccagggatctcttcaatgctgcctttgtgtcctgctggtctgagctgaatgaagaccagcaagatgagctcatcaggagtattgagttggctctcacttctcaagacattgctgaagtcacacaaaccctcctgaacttggctgagttcatggaacacagtgacaagggccccctgccgctgagagatgacaatggcatcgtgctcctgggtgagagagctgccaagtgccgggcatatgccaaagcactgcactacaaagaactggagttccagaaagggcccacgcctgccatacttgagtccctcatcagcattaacaacaagctccagcagcctgaggcagcttctggggtgttggaatacgccatgaaacacttcggagagctggagatccaggccacctggtatgagaagctgcatgagtgggaggatgctctcgtggcctacgacaagaagatggacacaaacaaggaagacccggagctgatgctgggccgaatgcgctgcctcgaggccttgggggaatggggccagcttcatcagcagtgctgtgaaaagtggactctggttaatgatgagacccaggctaagatggcccggatggctgctgctgcagcgtggggtttaggtcagtgggacagcatggaggagtacacctgcatgatcccacgggacacccacgatggagccttttacagggcagtgttggctctacatcaggatctcttctccttggcccagcagtgcattgacaaggccagggacctgctggatgcagagctgactgccatggcaggagagagctacagccgagcctatggggccatggtttcttgccacatgctgtccgagctggaagaggttatccagtacaaacttgtccctgagcgtcgggagatcatccggcagatctggtgggagagactgcagggctgccagcgtattgttgaggactggcagaaaatcctcatggtccggtcccttgtggtcagccctcatgaggacatgagaacctggctcaagtacgcaagcctgtgtggcaagagtggcagactggctcttgctcataaaaccttagtgttgctcttgggagttgatccatctcggcaacttgaccatcctctgccaaccgctcaccctcaagtgacctatgcctacatgaagaacatgtggaaaagtgctcggaagattgacgccttccagcacatgcaacactttgtgcagaccatgcagcagcaggcccagcatgccatcgccacagaggaccagcagcacaagcaggagctgcataagctcatggccaggtgttttctgaaacttggggagtggcagctgaacctccagggcatcaacgagagcaccatccccaaggtgctacagtactacagtgccgccacagagcatgaccgcagctggtacaaggcttggcatgcatgggcagtgatgaacttcgaagcagtgctacactacaaacatcagaaccaagcccgtgatgagaagaagaagctgcgtcatgccagcggggccaacatcaccaatgccaccactgcagccaccactgcagcctctgctgctgctgccaccagcacagagggcagcaacagtgagagtgaagctgagagcaatgagaacagccccaccccgtcccctctgcagaagaaggtcactgaggatttatccaaaactctcttgttgtacactgtccctgctgttcaaggcttcttccgttctatctccttgtcaagaggcaacaacctccaggatacactaagagtcctcaccctgtggtttgattatggtcactggccagatgtcaatgaagccttggtggaaggggtgaaggccatacagattgacacttggttacaggttatacctcagctcattgcaagaattgacacacccagacccttggtgggccggctcattcaccagcttctcacagatattggtcggtaccacccacaggccctcatctaccccctgacggtggcttctaagtctaccaccacagcccgtcacaatgcagccaacaagatcttgaagaacatgtgtgaacacagcaacacgctggtccagcaggccatgatggtgagtgaagagctgattcgggtagccatcctctggcatgagatgtggcatgaaggcctggaagaggcatctcgcttgtactttggggagaggaacgtgaaaggcatgtttgaggtgctggagcccctgcatgctatgatggaacggggtccccagactctgaaggaaacatcctttaatcaggcatatggccgagatttaatggaggcacaagaatggtgtcgaaagtacatgaagtcggggaacgtcaaggacctcacgcaagcctgggacctctactatcacgtgttcagacggatctcaaagcagctaccccagctcacatccctggagctgcagtatgtgtcccccaaacttctgatgtgccgagaccttgagttggctgtgccaggaacatacgaccccaaccagccaatcattcgcattcaatccatagccccgtctttgcaagtcatcacatccaagcagaggcctcggaagctgactctgatgggcagcaatgggcatgagtttgttttcctcctgaaaggccatgaagatctgcggcaggatgaacgagtgatgcagctctttggcctggtgaacacactcctagccaatgaccccacttctcttcgcaagaacctcagcatccagagatacgctgtcatccctctgtccaccaactcgggcctcattggctgggtgccccactgtgacacactgcatgccctcatccgggactacagagagaagaagaagatcctgttgaacatcgagcatcgcatcatgctgcggatggctcctgactatgaccacctgacgttgatgcagaaggtagaggtgtttgagcatgctgtcaacaacacagctggggacgacctggccaagctactgtggctaaaaagccccagctcggaggtgtggtttgaccgaagaaccaactatacccgctccctggccgttatgtcgatggtcggatacattttaggccttggagacaggcacccatccaatctgatgctggaccggctgagtgggaagatcctgcacattgactttggggactgctttgaggtcgctatgaccagagagaaatttccagaaaagattccatttagactaacaagaatgttgaccaatgctatggaggttacgggtctggatggcaactacagaaccacatgccacaccgtgatggaagtgctccgggaacacaaggacagtgtcatggctgtgctggaagcctttgtctatgacccactgctcaactggaggctgatggacacaaataccaaaggcaataagcggtcccggacaaggacagactcctactctgccggccagtcagtagaaattttggacggtgtagaacttggagaaccagcccataagaaagcagggaccactgtgccagaatccatccattcattcattggagacggtttggtgaaaccagaagccttaaacaagaaagctattcagattattaacagggttcgagataagctcactggtcgggatttctctcatgatgacactttggatgttccaacccaagtggagctgcttatcaagcaggcaacatctcacgagaacctctgccagtgctacattggctggtgtcccttctggtaactgaggcctggaaaaccacgtcgtctcctcccaggctttagtaccttgtctgtgcttccagtggactaaaaccatggacagacagttggacttgttaaatattttgaaatgtatatgaaaagaactactgtatattcaaagttggcttccgccaacctcctagctgctgttgaaaagacactgtcagaaacacaaggcttgattcagttcccaggacagtgaaacacagtaatccttcagaagccaagccttggattttgggagaacagaagatgggtaactgagaaatacgggttttgacttaacttacaagaaaactcatcataaacattgctgacagaataatccagttggtcctctcaaccaggggctccaacggcaaggacacagaggtcggcactccactatcctgttacctcacccgtccctggatgcagtggcgacatttgcaggatgggccaacatggctaagagagtctgtcttccgcctgaccccacgatgctgaaactcacaagacctgcccttccaggaggacatttgttcagaagcctggccaccgggcatgagcaggtgtgccaaggatctccatgcggggccacactggctctactgtgttcagtgagggagggatatgctgtatttgcagcagggactcagaacataaatgctgatcacagagggacacactagagcaggttgtgagttataagcaaagtaaatatccaactaaatacacaaagtataaagtaaagccacatctagacaccacgttgtatctgagtaaattttgtgccaataaatgacatcagaattttaaaagcataaaaaaaaaaaaaaaaaa

SEQ ID NO: 184 - DNA, 8612 bp, Mus musculus
  source 1..8612: mol_type = genomic DNA
ttttttttttttttttttatgcttttaaaattctgatgtcatttattggcacaaaatttactcagatacaacgtggtgtctagatgtggctttactttatactttgtgtatttagttggatatttactttgcttataactcacaacctgctctagtgtgtccctctgtgatcagcatttatgttctgagtccctgctgcaaatacagcatatccctccctcactgaacacagtagagccagtgtggccccgcatggagatccttggcacacctgctcatgcccggtggccaggcttctgaacaaatgtcctcctggaagggcaggtcttgtgagtttcagcatcgtggggtcaggcggaagacagactctcttagccatgttggcccatcctgcaaatgtcgccactgcatccagggacgggtgaggtaacaggatagtggagtgccgacctctgtgtccttgccgttggagcccctggttgagaggaccaactggattattctgtcagcaatgtttatgatgagttttcttgtaagttaagtcaaaacccgtatttctcagttacccatcttctgttctcccaaaatccaaggcttggcttctgaaggattactgtgtttcactgtcctgggaactgaatcaagccttgtgtttctgacagtgtcttttcaacagcagctaggaggttggcggaagccaactttgaatatacagtagttcttttcatatacatttcaaaatatttaacaagtccaactgtctgtccatggttttagtccactggaagcacagacaaggtactaaagcctgggaggagacgacgtggttttccaggcctcagttaccagaagggacaccagccaatgtagcactggcagaggttctcgtgagatgttgcctgcttgataagcagctccacttgggttggaacatccaaagtgtcatcatgagagaaatcccgaccagtgagcttatctcgaaccctgttaataatctgaatagctttcttgtttaaggcttctggtttcaccaaaccgtctccaatgaatgaatggatggattctggcacagtggtccctgctttcttatgggctggttctccaagttctacaccgtccaaaatttctactgactggccggcagagtaggagtctgtccttgtccgggaccgcttattgcctttggtatttgtgtccatcagcctccagttgagcagtgggtcatagacaaaggcttccagcacagccatgacactgtccttgtgttcccggagcacttccatcacggtgtggcatgtggttctgtagttgccatccagacccgtaacctccatagcattggtcaacattcttgttagtctaaatggaatcttttctggaaatttctctctggtcatagcgacctcaaagcagtccccaaagtcaatgtgcaggatcttcccactcagccggtccagcatcagattggatgggtgcctgtctccaaggcctaaaatgtatccgaccatcgacataacggccagggagcgggtatagttggttcttcggtcaaaccacacctccgagctggggctttttagccacagtagcttggccaggtcgtccccagctgtgttgttgacagcatgctcaaacacctctaccttctgcatcaacgtcaggtggtcatagtcaggagccatccgcagcatgatgcgatgctcgatgttcaacaggatcttcttcttctctctgtagtcccggatgagggcatgcagtgtgtcacagtggggcacccagccaatgaggcccgagttggtggacagagggatgacagcgtatctctggatgctgaggttcttgcgaagagaagtggggtcattggctaggagtgtgttcaccaggccaaagagctgcatcactcgttcatcctgccgcagatcttcatggcctttcaggaggaaaacaaactcatgcccattgctgcccatcagagtcagcttccgaggcctctgcttggatgtgatgacttgcaaagacggggctatggattgaatgcgaatgattggctggttggggtcgtatgttcctggcacagccaactcaaggtctcggcacatcagaagtttgggggacacatactgcagctccagggatgtgagctggggtagctgctttgagatccgtctgaacacgtgatagtagaggtcccaggcttgcgtgaggtccttgacgttccccgacttcatgtactttcgacaccattcttgtgcctccattaaatctcggccatatgcctgattaaaggatgtttccttcagagtctggggaccccgttccatcatagcatgcaggggctccagcacctcaaacatgcctttcacgttcctctccccaaagtacaagcgagatgcctcttccaggccttcatgccacatctcatgccagaggatggctacccgaatcagctcttcactcaccatcatggcctgctggaccagcgtgttgctgtgttcacacatgttcttcaagatcttgttggctgcattgtgacgggctgtggtggtagacttagaagccaccgtcagggggtagatgagggcctgtgggtggtaccgaccaatatctgtgagaagctggtgaatgagccggcccaccaagggtctgggtgtgtcaattcttgcaatgagctgaggtataacctgtaaccaagtgtcaatctgtatggccttcaccccttccaccaaggcttcattgacatctggccagtgaccataatcaaaccacagggtgaggactcttagtgtatcctggaggttgttgcctcttgacaaggagatagaacggaagaagccttgaacagcagggacagtgtacaacaagagagttttggataaatcctcagtgaccttcttctgcagaggggacggggtggggctgttctcattgctctcagcttcactctcactgttgctgccctctgtgctggtggcagcagcagcagaggctgcagtggtggctgcagtggtggcattggtgatgttggccccgctggcatgacgcagcttcttcttctcatcacgggcttggttctgatgtttgtagtgtagcactgcttcgaagttcatcactgcccatgcatgccaagccttgtaccagctgcggtcatgctctgtggcggcactgtagtactgtagcaccttggggatggtgctctcgttgatgccctggaggttcagctgccactccccaagtttcagaaaacacctggccatgagcttatgcagctcctgcttgtgctgctggtcctctgtggcgatggcatgctgggcctgctgctgcatggtctgcacaaagtgttgcatgtgctggaaggcgtcaatcttccgagcacttttccacatgttcttcatgtaggcataggtcacttgagggtgagcggttggcagaggatggtcaagttgccgagatggatcaactcccaagagcaacactaaggttttatgagcaagagccagtctgccactcttgccacacaggcttgcgtacttgagccaggttctcatgtcctcatgagggctgaccacaagggaccggaccatgaggattttctgccagtcctcaacaatacgctggcagccctgcagtctctcccaccagatctgccggatgatctcccgacgctcagggacaagtttgtactggataacctcttccagctcggacagcatgtggcaagaaaccatggccccataggctcggctgtagctctctcctgccatggcagtcagctctgcatccagcaggtccctggccttgtcaatgcactgctgggccaaggagaagagatcctgatgtagagccaacactgccctgtaaaaggctccatcgtgggtgtcccgtgggatcatgcaggtgtactcctccatgctgtcccactgacctaaaccccacgctgcagcagcagccatccgggccatcttagcctgggtctcatcattaaccagagtccacttttcacagcactgctgatgaagctggccccattcccccaaggcctcgaggcagcgcattcggcccagcatcagctccgggtcttccttgtttgtgtccatcttcttgtcgtaggccacgagagcatcctcccactcatgcagcttctcataccaggtggcctggatctccagctctccgaagtgtttcatggcgtattccaacaccccagaagctgcctcaggctgctggagcttgttgttaatgctgatgagggactcaagtatggcaggcgtgggccctttctggaactccagttctttgtagtgcagtgctttggcatatgcccggcacttggcagctctctcacccaggagcacgatgccattgtcatctctcagcggcagggggcccttgtcactgtgttccatgaactcagccaagttcaggagggtttgtgtgacttcagcaatgtcttgagaagtgagagccaactcaatactcctgatgagctcatcttgctggtcttcattcagctcagaccagcaggacacaaaggcagcattgaagagatccctggccatggggttgtaggcctgcgccagggcccagcatgagcgcagggagggcgatgaggagtccttcagaagctccagactcaagcgcctcagccactccagccagtcgtccttggagacccttctggcagctccccaggccttttggaggttgatggtgctgacatgcagtttcttcatgggtcctgtctcaactggtccactggccagggcatctccctggctgctccttagcattcgatgctggtaaatcaaagggtcttcttcctcatcagcaagtgtgtaccccttgacgattctgcagataagcacatcatagcgctggtggttgatccggtgtcgcacgaggactttattcaccattggaatgaagatctggtacttcttccccagttgaaagacaagcgaagacagagtgtccatggctgtggagcgcagctctgggctctggtctagcgtacgaactattgggtgaatgatgcgggaggcgtagtcagtgaagtctagggactctgtcaggcggtccaccgtctccagcgctgcctttcttgatggcagcgggacttcaggggcatcaaacaatttcacaatcggaggcaacaacaagtgcagatagtcatccaggttggcgccaaacagctggatcgcggctaacagcttgatggagacgattcggccttggctgttgtcatgcatgaagacccgcagcatgtgtgggatcaactggggcagataaagcttaaattcccctccgagagccaccacaatctgctcaatgagaagaatgattgtgctctggattgacgtgttcatgacccaaaactctctcatgagagtgactatttcatccatgtagggacggatgtggctcttcacaaaggacaccagcatccccagctgctggaacagaaattcccggatggccccatcacagactcggatgacattaaggaatgtgggcatgacctggggcaggaactgcacacacttgagccccagggacttgaagatgaaggtgatggcctgcaccaccatggtgtggtggtgagagagggattgatctcggaagatccgcatcaaggccaccatggacacagcggggtagaactcgtccaggggcaggtttcccatgttgaccagcatttcactggtgctgtagtcagaggaatcctgacttgacttggactctgacaggctgacagcggaagcgtcccgggactggtcgatcatgccgatgttcactttgtgcttgtagggatccaaagccccaaggagccccaacactcggatagcctctctccgagtgccctggttctgctccgtcttcaggaaattcagcagcacttcaagcaaagtggggtacttcctgtagggctccaccacatagccagtgctggccaccaactgtcccagggtccacaaagccacctgccttttggccagcagggaggagtcctgcagcatgtccatgatgatgataaagagctcgtccacccacttccgcatttccaggccgctcacctgagccagttctcctatagtggccaacacgttattgatcacgcccgggtttgggtcagggtctggatctttcagtttcaaaattaaagccttcaggataggctccatgtaggggcggatgagccggggggcgttggacaccaggtgccccagcatgcgggcgctctgctccttgattctcccaatgccgctgtgctccagctctgtcaggatctggatgagcatcttgcgcaggaaaggcatgacgaaggctgggttcatgctgcttagtcggcccacagtgcagatggccagctcgcggatctcaaagacctggtcattcagagccacaaacagagcttgtaagttttctgcctgggccaggtgggcatcaaagcgctcgtccagggatgccaagacacagtagcggatatcagggtcaggatctgttatgccaaccacaagcagcttgctgagcacatctgccaccacctgcactgcagtctggctaaccacgtgggcatggccgctgatgaggtggatggagggtgtgagcaggcgggagcaggtgcgagcagcttccatgcggatctccttgtgctcgctgttcaggaagtgatctgcgcagtgtcggacgaactgggtcagagagtggccttcaaattcaaagctgccaagggttcgaagggcaagagtgatgctggccacgtcgctggcctcagggagggtggtgagaccaggggaagccagctggtgagccaggcctttgggcatgcctgggtgccggaggggtttgtgcataaggaccagggacagcatcttcagaaggccgtcctgaatatctttcttcagctgtggaatctgccggctcaggtcatagagcacagcagtgagcgcggggctcaggcccactgccaacatgggctccagcagctccttgatgtcctgctggatgcccggccccattgctcgtgccaacatgctgatgcacgtgaatacggtggcatccacctgcacggttttctgcctcttgtgggcaaagtcctttggaggaagcgctgctcggatgatgtcaagtacacggggcaagtagaccttaaactccgacctcacggccacagaaagcagccccagggcctggaacgccgcagtccgttccttctccttcttgacacagctcaggacatggttcatggtgtcctggaggtactgggtatctgtgaaggcggacggtcggaatgcagccaggcggggcagcaggttaaggattgtcatctggatcagcgagttcttgctgctcctgcacttcagcacccactggcacacctgatcaaatttctcttccatcaagtctctgcaacagcggctttccaccagagtggacttggcagggctgggggacgtcccaaatcccatcaggccttgaggggagctgtaccccagcagtcccaccaaggcgttcggctgctggggctgcacagcctggaaactggtgaagggcgtgatgtgccgaggcttggtcccgaagcccatgaggtctttgcagtacttgtcatgcaccagctgctgctgggtgatctcctccatctcttctctcagacgctctccctccatgctgctgatacgaactagctcgttgaggatcagcaaggctccgtggattcgatcatctcgattcatacccttctctttggccagggtctcatcaaaacctttctctgcttcttcaaatgtgtgccggtaccactgaggcttctgcatttcctttggttcccgctgcgtggtgagaatcagacaggcacgaagggccgctacagcgccttcccggatggcctgcttggggtcccacacagccacaaaaatgttgtcaaagaagggctgaacttgctggaagaagaaggtggggacactgatggccagctcacggagaacgaggacagcggcatgtctccggccctcatttcggtcagcacccagccactccaaggctcgcttcacttcaaactccacatattcagcagtgaaagtgtcccctgccatcgccaggcggccaatggccttggacgccatttccatgacaactggatcgcttgaggggaggaggtttcgaaggtagttggcaaatctgccaattctggtggaattcccaccttccactcctatgaggctggcgatggccaagatgccacccttcctctcattggcatctgagctggaaaccagttcaaaaatgtgatggttcagctggtcatagaagcgagtagactcctcctgactcatctctcgaagctccatggtgacgtagtgctggagctccttggctgctttggccctggtctcctcattccggctcttcagtccactggcgaactgctgcaggacgctcacgttgctagatgtggcggcactggcggtggccacggcaggacccgtcccaagcatcttgccctgaggttcgcgcggcttcggccaccgcctcagctgccgccgccggagccggtaccgccgcttcaggcccccagcctcaacacccgccttccccgctgtcttctaggccaggga

SEQ ID NO: 185 - DNA, 8543 bp, Rattus norvegicus
  source 1..8543: mol_type = genomic DNA
caggcggcggtagctgaggcggtggccgaagccgcgcgaacctcagggcaagatgcttgggacaggccctgccacggccaccgccggtgccgccacatctagcaacgtgagcgttctgcagcagttcgccagtgggctgaagagccggaatgaggagaccagggccaaagcagccaaggagctccagcactatgtcaccatggaacttcgagagatgagtcaggaggagtctactcgcttctatgaccagctgaaccatcacatttttgaactggtttccagctcagacgccaatgagaggaagggtggcatcttggccattgccagcctcattggagtggaaggtgggaattccaccaggattggcagatttgccaactaccttcggaacctcctcccctcaagtgatccagttgtcatggagatggcatccaaggccattggccgccttgcaatggcaggggacactttcactgctgagtatgtggagtttgaagtgaagcgagccttggagtggctgggtgctgaccgaaatgagggccggagacatgcagctgtcctcgttctccgtgagctggccatcagcgtccccaccttcttcttccagcaagttcagcccttctttgacaacatttttgtggctgtgtgggaccccaagcaggccatccgtgaaggagctgtggctgcccttcgtgcctgtctgattcttaccacgcagcgggagccgaaggagatgcagaagcctcagtggtacaggcacacatttgaagaagcagagaaaggttttgatgagaccctggccaaagagaagggtatgaaccgagatgatcgaatccacggggccttgctgatcctcaacgagctcgtccgaatcagcagcatggagggagagcgtctgagagaggagatggaggaaatcacccagcagcagctggtacatgacaagtactgcaaagacctaatgggctttgggacaaagcctcggcacatcactcccttcaccagcttccaggctgtgcagccccagcagtcaaacgccttggtgggactgctggggtacagctcccaccaaggcctaatggggtttggggcttcccccagccctacaaagtccactctggtggaaagccgttgttgcagagacttgatggaagagaaatttgatcaggtgtgccagtgggtgctgaaatgtaggagcagcaagaactcactgatccaaatgacaatccttaatctgttgccccgcttggctgcattccgaccgtctgccttcacagatacccagtacctgcaagacaccatgaaccatgtcctgagctgtgtcaagaaggaaaaggaacggaccgcagcgttccaggccctagggctgctttctgtggcggtgaggtccgagtttaaggtctacctgccccgagtacttgacatcatccgagcagccctgcctccaaaggactttgcccacaagaggcagaaaactgtgcaggtggatgccacagtgttcacgtgcatcagcatgctggcgcgggccatggggccaggcatccagcaggacatcaaggagctgctggagcccatgttggcagtgggcctgagccctgcgctcactgctgtgctctatgacctgagccggcagattccgcagctgaagaaagatattcaggacgggcttctgaagatgctgtccctggtccttatgcacaaacccctgcggcacccgggcatgcccaaaggcctggcccaccagctggcctccccaggtcttaccaccctccctgaggccagcgacgtggccagcatcactcttgcccttcgaactctcggcagctttgaatttgaaggccactctctgacccagttcgtccgacactgcgcagatcatttcctgaacagtgagcacaaggagatccgcatggaagcagcccgcacctgctcccgcctgctcacaccctccatccacctcatcagcggccatgcccatgtggttagccagaccgcagtgcaagtggtagcagatgtgctcagcaagctgcttgtggtcggcataacagatcctgatcctgatatccgctactgtgtcttggcctccctggatgagcgcttcgatgcccacttggcccaggcagaaaacttacaagctctgtttgtggctctgaatgaccaggtctttgagatccgagagctggccatctgcactgtgggccgactcagtagcatgaacccagcctttgtcatgcctttcctgcgcaagatgctcatccagattttgacagagctggagcacagtggcattgggagaatcaaggagcagagtgcccgcatgctggggcacctggtctccaatgccccccgcctcatccgcccctatatggagcctattctgaaggctttaattttgaaactcaaagatccagaccctgacccaaacccgggcgtgatcaataacgtgttggccactataggagaactggctcaggttagcggcctggagatgaggaagtgggtggacgagctctttgtcatcatcatggacatgctgcaggactcctctcttctggccaaaagacaggtggctttgtggaccctgggacagttggtggccagtactggctacgtggtggagccctacaggaagtaccccactctgcttgaagtgctgctgaattttctgaagacggagcagaaccagggcactcggagagaggccatccgagtgttagggctcctcggggctttggacccctacaagcacaaagtgaacatcggcatgattgaccagtcccgagatgcttctgctgtcagcctgtcagaatccaagtcaagtcaagattcctctgactacagcaccagtgaaatgctggtcaacatgggaaacctgccactggacgagttctaccccgccgtgtccatggtggccttgatgcggatcttccgagaccagtccctctctcaccaccacaccatggtggttcaggccatcaccttcatcttcaagtccctggggctcaagtgtgtgcagttcctgccccaggtcatgcccacgttccttaacgtcatccgagtctgtgatggggccatccgggaatttctgttccagcagctgggaatgctggtgtcctttgtgaagagccacatccgtccctacatggatgaaatagtcaccctcatgagagaattttgggtcatgaacacctcaatccagagcacaatcattcttctcattgagcaaatcgtggtggctcttggaggtgaatttaagctctacctgccccagctgatcccacacatgctgcgtgtcttcatgcatgacaacagccagggccgcatagtctccatcaagctgttagcagcgatccagctgtttggcgccaacctggatgactatctgcacttgttgttgcctccgatcgtgaaattgtttgatgcccctgaagttccactgccgtcgagaaaggcagcgttggagacagtggaccgcctgacagagtccctggatttcactgactatgcctcccgcatcattcacccgattgttcgcacgctagaccagagcccagagctgcgctccacagccatggacaccctgtcttcacttgtgtttcaactagggaagaagtaccagatcttcattccaatggtgaataaagtccttgtgcgacaccggatcaatcaccagcgctacgacgtgctgatctgcagaatcgtcaaggggtacacgcttgctgatgaagaagaagaccctttgatttaccagcatcgaatgctaaggagcagccagggagatgccctggccagtggaccagttgaaacaggacccatgaagaaactgcatgtcagcaccatcaacctccaaaaggcctggggagctgccagaagggtctccaaggacgactggctggagtggctgcgacgcttgagtctggagctgctgaaggattcctcatcaccttccctgcgctcatgctgggccctggcccaggcctacaaccccatggccagggatctcttcaacgctgcgtttgtgtcctgctggtctgaactgaatgaagaccaacaagatgagctcatcaggagcattgagttggctctcacttctcaagacattgctgaagtcacacaaaccctcttgaacttggctgagttcatggagcacagtgacaagggccccctaccactgagagatgacaatggcatcgtgctgttgggtgagagagctgccaagtgccgggcatatgccaaagcactacactacaaagagctggagttccagaaggggcccacgcctgccatacttgagtccctcatcagcattaataataaactgcagcagcctgaggcagcgtccggggtgttagagtacgccatgaaacacttcggagagctggagatccaggccacctggtatgagaagttgcatgagtgggaggacgcccttgtggcctacgacaagaagatggacacgaacaaggatgacccagagctgatgctgggccgcatgcgctgtctcgaggccttgggagaatggggccagcttcatcagcagtgctgtgaaaagtggactctggttaatgacgagacccaggctaagatggcccggatggctgctgcagcagcatggggtttaggtcagtgggacagcatggaggagtacacctgtatgattcctcgggatactcacgatggagcattctacagagcagtgttggcactgcatcaggatctcttctccttggctcaacagtgcattgacaaggccagggacctgctggacgccgagctgactgccatggcaggggagagctacagccgagcctatggggccatggtttcttgccacatgctgtccgagctggaggaggttatccagtacaaactcgtcccggagcgacgggagatcatccgccagatctggtgggagagactgcagggctgccagcgtattgtagaggactggcagaaaatcctcatggtccggtcccttgtggtcagccctcacgaggacatgagaacctggctcaagtacgcaagcctgtgtggcaagagcggcagactggctcttgctcataaaaccttagtgttgctcttgggagttgatccatctcggcaacttgaccatcctctgccaacagttcaccctcaagtgacctatgcctacatgaaaaacatgtggaaaagcgctcggaagattgatgccttccagcacatgcagcactttgtgcagaccatgcagcagcaggcccagcacgccattgccacagaggaccagcagcacaagcaggagctgcataagctcatggccaggtgttttctgaaacttggggagtggcagctgaacctccagggcatcaacgagagcaccatccccaaggtgctacagtactacagtgctgccacagagcatgaccgcagctggtataaggcttggcacgcatgggcagtgatgaactttgaagccgtgctacactacaaacatcagaaccaagcccgcgatgagaagaagaaactgcgccatgccagcggggccaacatcaccaatgccaccaccactgccaccaccgctgcctccgctgccgctgccaccagcacagagggcagcaacagtgaaagtgaagccgagagcaatgagagcagccccaccccgtcccctctgcagaagaaggtcactgaggatttgtccaaaaccctcttgttgtacactgtccctgctgtccaaggcttcttccgttctatctccttgtcgagaggcaacaacctccaggatacactcagagtcctcaccttgtggtttgattatggtcactggccagatgtcaatgaagccctggtggaaggggtgaaggccatacagattgacacttggttacaggttatacctcagctcattgcaagaattgacacgcccagacccttggtgggccggctcattcaccagctcctcacagatattggtcggtaccacccacaggccctcatctaccccctgacggtggcttctaagtctaccaccacagcccgtcacaatgcagccaacaagatcctgaagaacatgtgcgagcacagcaacacgctagtccagcaggccatgatggtgagtgaagagctgattcgagtagccatcctctggcatgagatgtggcatgaaggcctagaagaggcctctcgcttgtactttggggagaggaacgtcaaaggcatgtttgaggtgctggagcccctgcatgctatgatggaacgcggtccccagaccctgaaggaaacgtcctttaatcaggcatatggtcgagatttaatggaggcacaagaatggtgccgaaagtacatgaaatcagggaacgtcaaggacctcacccaagcctgggacctctactatcacgtgttcagacggatctccaagcagctaccacagctcacatccctggagctgcagtatgtgtcccccaaacttttgatgtgcagagaccttgaattggctgtgccaggaacatatgaccccaaccagccaatcattcgcattcagtccatagccccgtctttgcaagtcatcacatccaagcagaggcctcggaagctgaccctgatgggcagcaatgggcacgagtttgttttcctcctgaaaggccatgaagatctgcggcaggacgagcgagtgatgcagctctttggcctggtgaacacactcctagccaatgacccaacttctcttcgaaagaacctcagcatccagagatacgccgtcattcctctgtccaccaactcgggcctgattggctgggtgccccactgtgacacgctgcatgccctcatccgggactacagagagaagaagaagatcctgctgaacatcgagcaccgcatcatgctgcggatggctcctgactatgaccacctgactctgatgcagaaggtggaggtgtttgagcatgctgtcaacaacacagccggggatgacctggccaagctgctgtggctgaaaagccccagctcagaggtgtggtttgaccgaagaaccaattatactcgctccctggctgtcatgtccatggttggatacattttaggccttggagacaggcacccatccaacctgatgctggaccggctgagtggaaagatcctgcacattgactttggggactgctttgaggttgctatgaccagagagaaatttccagaaaagattccatttagactaacaagaatgttgaccaatgctatggaggttaccggtctcgatggcaactatagaaccacatgccacacagtgatggaggtgcttcgggagcacaaggacagtgtcatggctgtgctagaagcctttgtctatgaccctctgctgaattggaggctgatggacacaaatgccaaaggcaacaagcggtcccgaaccaggacagactcctattctgcaggccagtcagtagaaattttggacggtgtagaacttggagaaccagcccataagaaaacagggaccactgtgccagaatccatccattctttcattggagatggtttggtgaaaccagaagccttaaacaagaaagctattcagattattaacagggttcgagataagctcactggtcgggatttctctcatgatgacactttggatgttccaacccaagtggaactgcttatcaagcaagcgacatctcatgagaacctctgccagtgctacattggctggtgtcctttctggtaaccaaggcctggcaaagaaaatcatctcctccgatgcttttgtaccttggtctgtgcttccagtggactgaaaccatggtcataaagttggactttgttaatattttgaaatgtatatgaaaagaactactgtatattcaaagttggcttatgccaacctcctagctgctgttgaaaagacactgtcagaaacacaaggcttgattcagttcccaggacagtgaaacacagtaatcctacagaaaccaagcctttgattttgggagaacagaagatgagtaactgactaagaaatacgggttttgacttaacttacagaagaactcatcatacgcatttgctgaccgaataatctagttgatcctctcaaccaggggcttcaacagcaaggacacagatgtcagcactccaccatcctgttacctcacccgtccctggatgcagtggcaacatctgcaggatgggccaccgtgtgtgtaagaagatctgtcttccacctgatcccatgatgctgaacctcacagagccggccttccaggaaggacgtttgctcagacgcctggccaccgaggatgagcaggtgtgccaggatctcagtgcagggtccacgctggccctgctgctgtgttcagtgagggatggatatgttgtgtttgcagcagggactcagaacacaaatgcttttgtggaagtgctgatctcagagggacactagcgcaggttgtgaattaagagcaaagtaaatatccaactaaacacaaagtataagtgaagccacatctagacaccattgtatctgagtaatttttgtgccaataaatgacatcagaattttaaaagta

SEQ ID NO: 186 - DNA, 8543 bp, Rattus norvegicus
  source 1..8543: mol_type = genomic DNA
tacttttaaaattctgatgtcatttattggcacaaaaattactcagatacaatggtgtctagatgtggcttcacttatactttgtgtttagttggatatttactttgctcttaattcacaacctgcgctagtgtccctctgagatcagcacttccacaaaagcatttgtgttctgagtccctgctgcaaacacaacatatccatccctcactgaacacagcagcagggccagcgtggaccctgcactgagatcctggcacacctgctcatcctcggtggccaggcgtctgagcaaacgtccttcctggaaggccggctctgtgaggttcagcatcatgggatcaggtggaagacagatcttcttacacacacggtggcccatcctgcagatgttgccactgcatccagggacgggtgaggtaacaggatggtggagtgctgacatctgtgtccttgctgttgaagcccctggttgagaggatcaactagattattcggtcagcaaatgcgtatgatgagttcttctgtaagttaagtcaaaacccgtatttcttagtcagttactcatcttctgttctcccaaaatcaaaggcttggtttctgtaggattactgtgtttcactgtcctgggaactgaatcaagccttgtgtttctgacagtgtcttttcaacagcagctaggaggttggcataagccaactttgaatatacagtagttcttttcatatacatttcaaaatattaacaaagtccaactttatgaccatggtttcagtccactggaagcacagaccaaggtacaaaagcatcggaggagatgattttctttgccaggccttggttaccagaaaggacaccagccaatgtagcactggcagaggttctcatgagatgtcgcttgcttgataagcagttccacttgggttggaacatccaaagtgtcatcatgagagaaatcccgaccagtgagcttatctcgaaccctgttaataatctgaatagctttcttgtttaaggcttctggtttcaccaaaccatctccaatgaaagaatggatggattctggcacagtggtccctgttttcttatgggctggttctccaagttctacaccgtccaaaatttctactgactggcctgcagaataggagtctgtcctggttcgggaccgcttgttgcctttggcatttgtgtccatcagcctccaattcagcagagggtcatagacaaaggcttctagcacagccatgacactgtccttgtgctcccgaagcacctccatcactgtgtggcatgtggttctatagttgccatcgagaccggtaacctccatagcattggtcaacattcttgttagtctaaatggaatcttttctggaaatttctctctggtcatagcaacctcaaagcagtccccaaagtcaatgtgcaggatctttccactcagccggtccagcatcaggttggatgggtgcctgtctccaaggcctaaaatgtatccaaccatggacatgacagccagggagcgagtataattggttcttcggtcaaaccacacctctgagctggggcttttcagccacagcagcttggccaggtcatccccggctgtgttgttgacagcatgctcaaacacctccaccttctgcatcagagtcaggtggtcatagtcaggagccatccgcagcatgatgcggtgctcgatgttcagcaggatcttcttcttctctctgtagtcccggatgagggcatgcagcgtgtcacagtggggcacccagccaatcaggcccgagttggtggacagaggaatgacggcgtatctctggatgctgaggttctttcgaagagaagttgggtcattggctaggagtgtgttcaccaggccaaagagctgcatcactcgctcgtcctgccgcagatcttcatggcctttcaggaggaaaacaaactcgtgcccattgctgcccatcagggtcagcttccgaggcctctgcttggatgtgatgacttgcaaagacggggctatggactgaatgcgaatgattggctggttggggtcatatgttcctggcacagccaattcaaggtctctgcacatcaaaagtttgggggacacatactgcagctccagggatgtgagctgtggtagctgcttggagatccgtctgaacacgtgatagtagaggtcccaggcttgggtgaggtccttgacgttccctgatttcatgtactttcggcaccattcttgtgcctccattaaatctcgaccatatgcctgattaaaggacgtttccttcagggtctggggaccgcgttccatcatagcatgcaggggctccagcacctcaaacatgcctttgacgttcctctccccaaagtacaagcgagaggcctcttctaggccttcatgccacatctcatgccagaggatggctactcgaatcagctcttcactcaccatcatggcctgctggactagcgtgttgctgtgctcgcacatgttcttcaggatcttgttggctgcattgtgacgggctgtggtggtagacttagaagccaccgtcagggggtagatgagggcctgtgggtggtaccgaccaatatctgtgaggagctggtgaatgagccggcccaccaagggtctgggcgtgtcaattcttgcaatgagctgaggtataacctgtaaccaagtgtcaatctgtatggccttcaccccttccaccagggcttcattgacatctggccagtgaccataatcaaaccacaaggtgaggactctgagtgtatcctggaggttgttgcctctcgacaaggagatagaacggaagaagccttggacagcagggacagtgtacaacaagagggttttggacaaatcctcagtgaccttcttctgcagaggggacggggtggggctgctctcattgctctcggcttcactttcactgttgctgccctctgtgctggtggcagcggcagcggaggcagcggtggtggcagtggtggtggcattggtgatgttggccccgctggcatggcgcagtttcttcttctcatcgcgggcttggttctgatgtttgtagtgtagcacggcttcaaagttcatcactgcccatgcgtgccaagccttataccagctgcggtcatgctctgtggcagcactgtagtactgtagcaccttggggatggtgctctcgttgatgccctggaggttcagctgccactccccaagtttcagaaaacacctggccatgagcttatgcagctcctgcttgtgctgctggtcctctgtggcaatggcgtgctgggcctgctgctgcatggtctgcacaaagtgctgcatgtgctggaaggcatcaatcttccgagcgcttttccacatgtttttcatgtaggcataggtcacttgagggtgaactgttggcagaggatggtcaagttgccgagatggatcaactcccaagagcaacactaaggttttatgagcaagagccagtctgccgctcttgccacacaggcttgcgtacttgagccaggttctcatgtcctcgtgagggctgaccacaagggaccggaccatgaggattttctgccagtcctctacaatacgctggcagccctgcagtctctcccaccagatctggcggatgatctcccgtcgctccgggacgagtttgtactggataacctcctccagctcggacagcatgtggcaagaaaccatggccccataggctcggctgtagctctcccctgccatggcagtcagctcggcgtccagcaggtccctggccttgtcaatgcactgttgagccaaggagaagagatcctgatgcagtgccaacactgctctgtagaatgctccatcgtgagtatcccgaggaatcatacaggtgtactcctccatgctgtcccactgacctaaaccccatgctgctgcagcagccatccgggccatcttagcctgggtctcgtcattaaccagagtccacttttcacagcactgctgatgaagctggccccattctcccaaggcctcgagacagcgcatgcggcccagcatcagctctgggtcatccttgttcgtgtccatcttcttgtcgtaggccacaagggcgtcctcccactcatgcaacttctcataccaggtggcctggatctccagctctccgaagtgtttcatggcgtactctaacaccccggacgctgcctcaggctgctgcagtttattattaatgctgatgagggactcaagtatggcaggcgtgggccccttctggaactccagctctttgtagtgtagtgctttggcatatgcccggcacttggcagctctctcacccaacagcacgatgccattgtcatctctcagtggtagggggcccttgtcactgtgctccatgaactcagccaagttcaagagggtttgtgtgacttcagcaatgtcttgagaagtgagagccaactcaatgctcctgatgagctcatcttgttggtcttcattcagttcagaccagcaggacacaaacgcagcgttgaagagatccctggccatggggttgtaggcctgggccagggcccagcatgagcgcagggaaggtgatgaggaatccttcagcagctccagactcaagcgtcgcagccactccagccagtcgtccttggagacccttctggcagctccccaggccttttggaggttgatggtgctgacatgcagtttcttcatgggtcctgtttcaactggtccactggccagggcatctccctggctgctccttagcattcgatgctggtaaatcaaagggtcttcttcttcatcagcaagcgtgtaccccttgacgattctgcagatcagcacgtcgtagcgctggtgattgatccggtgtcgcacaaggactttattcaccattggaatgaagatctggtacttcttccctagttgaaacacaagtgaagacagggtgtccatggctgtggagcgcagctctgggctctggtctagcgtgcgaacaatcgggtgaatgatgcgggaggcatagtcagtgaaatccagggactctgtcaggcggtccactgtctccaacgctgcctttctcgacggcagtggaacttcaggggcatcaaacaatttcacgatcggaggcaacaacaagtgcagatagtcatccaggttggcgccaaacagctggatcgctgctaacagcttgatggagactatgcggccctggctgttgtcatgcatgaagacacgcagcatgtgtgggatcagctggggcaggtagagcttaaattcacctccaagagccaccacgatttgctcaatgagaagaatgattgtgctctggattgaggtgttcatgacccaaaattctctcatgagggtgactatttcatccatgtagggacggatgtggctcttcacaaaggacaccagcattcccagctgctggaacagaaattcccggatggccccatcacagactcggatgacgttaaggaacgtgggcatgacctggggcaggaactgcacacacttgagccccagggacttgaagatgaaggtgatggcctgaaccaccatggtgtggtggtgagagagggactggtctcggaagatccgcatcaaggccaccatggacacggcggggtagaactcgtccagtggcaggtttcccatgttgaccagcatttcactggtgctgtagtcagaggaatcttgacttgacttggattctgacaggctgacagcagaagcatctcgggactggtcaatcatgccgatgttcactttgtgcttgtaggggtccaaagccccgaggagccctaacactcggatggcctctctccgagtgccctggttctgctccgtcttcagaaaattcagcagcacttcaagcagagtggggtacttcctgtagggctccaccacgtagccagtactggccaccaactgtcccagggtccacaaagccacctgtcttttggccagaagagaggagtcctgcagcatgtccatgatgatgacaaagagctcgtccacccacttcctcatctccaggccgctaacctgagccagttctcctatagtggccaacacgttattgatcacgcccgggtttgggtcagggtctggatctttgagtttcaaaattaaagccttcagaataggctccatataggggcggatgaggcggggggcattggagaccaggtgccccagcatgcgggcactctgctccttgattctcccaatgccactgtgctccagctctgtcaaaatctggatgagcatcttgcgcaggaaaggcatgacaaaggctgggttcatgctactgagtcggcccacagtgcagatggccagctctcggatctcaaagacctggtcattcagagccacaaacagagcttgtaagttttctgcctgggccaagtgggcatcgaagcgctcatccagggaggccaagacacagtagcggatatcaggatcaggatctgttatgccgaccacaagcagcttgctgagcacatctgctaccacttgcactgcggtctggctaaccacatgggcatggccgctgatgaggtggatggagggtgtgagcaggcgggagcaggtgcgggctgcttccatgcggatctccttgtgctcactgttcaggaaatgatctgcgcagtgtcggacgaactgggtcagagagtggccttcaaattcaaagctgccgagagttcgaagggcaagagtgatgctggccacgtcgctggcctcagggagggtggtaagacctggggaggccagctggtgggccaggcctttgggcatgcccgggtgccgcaggggtttgtgcataaggaccagggacagcatcttcagaagcccgtcctgaatatctttcttcagctgcggaatctgccggctcaggtcatagagcacagcagtgagcgcagggctcaggcccactgccaacatgggctccagcagctccttgatgtcctgctggatgcctggccccatggcccgcgccagcatgctgatgcacgtgaacactgtggcatccacctgcacagttttctgcctcttgtgggcaaagtcctttggaggcagggctgctcggatgatgtcaagtactcggggcaggtagaccttaaactcggacctcaccgccacagaaagcagccctagggcctggaacgctgcggtccgttccttttccttcttgacacagctcaggacatggttcatggtgtcttgcaggtactgggtatctgtgaaggcagacggtcggaatgcagccaagcggggcaacagattaaggattgtcatttggatcagtgagttcttgctgctcctacatttcagcacccactggcacacctgatcaaatttctcttccatcaagtctctgcaacaacggctttccaccagagtggactttgtagggctgggggaagccccaaaccccattaggccttggtgggagctgtaccccagcagtcccaccaaggcgtttgactgctggggctgcacagcctggaagctggtgaagggagtgatgtgccgaggctttgtcccaaagcccattaggtctttgcagtacttgtcatgtaccagctgctgctgggtgatttcctccatctcctctctcagacgctctccctccatgctgctgattcggacgagctcgttgaggatcagcaaggccccgtggattcgatcatctcggttcatacccttctctttggccagggtctcatcaaaacctttctctgcttcttcaaatgtgtgcctgtaccactgaggcttctgcatctccttcggctcccgctgcgtggtaagaatcagacaggcacgaagggcagccacagctccttcacggatggcctgcttggggtcccacacagccacaaaaatgttgtcaaagaagggctgaacttgctggaagaagaaggtggggacgctgatggccagctcacggagaacgaggacagctgcatgtctccggccctcatttcggtcagcacccagccactccaaggctcgcttcacttcaaactccacatactcagcagtgaaagtgtcccctgccattgcaaggcggccaatggccttggatgccatctccatgacaactggatcacttgaggggaggaggttccgaaggtagttggcaaatctgccaatcctggtggaattcccaccttccactccaatgaggctggcaatggccaagatgccacccttcctctcattggcgtctgagctggaaaccagttcaaaaatgtgatggttcagctggtcatagaagcgagtagactcctcctgactcatctctcgaagttccatggtgacatagtgctggagctccttggctgctttggccctggtctcctcattccggctcttcagcccactggcgaactgctgcagaacgctcacgttgctagatgtggcggcaccggcggtggccgtggcagggcctgtcccaagcatcttgccctgaggttcgcgcggcttcggccaccgcctcagctaccgccgcctg

SEQ ID NO: 187 - DNA, 8719 bp, Macaca fascicularis
  source 1..8719: mol_type = genomic DNA
gctcccggtttagaggacagcggggaaggcgggcggtggggcagggggcctgaggcggcggtagcggtgctggcggcggcagctgaggccttggccgaagccgcacgaacctcagggcaagatgcttggaaccggacctgccgccgccaccaccgctgccaccacatctagcaatgtgagtgttctacagcagtttgccagtggcctgaagagccggaatgaagagaccagggccaaagctgccaaggagctccagcactatgtcaccatggaactccgagagatgagtcaagaggagtctactcgcttctatgaccagctgaaccatcacatttttgaattggtttccagctcagatgccaatgagaggaaaggtggcatcttggccatagccagcctcataggagtggaaggtgggaatgccacccgaattggcagatttgccaactatcttcggaacctcctcccctccaatgacccagttgtcatggaaatggcatccaaggccatcggccgccttgccatggcaggagacactttcaccgctgagtatgtggaatttgaggtgaagcgagccctggaatggctgggtgctgaccgcaatgagggccggagacacgcagctgtcctggttctccgtgagctggccatcagcgtccctaccttcttcttccagcaagtgcagcccttctttgacaacatttttgtggctgtgtgggaccccaaacaagccatccgtgagggagctgtggccgcccttcgtgcctgtttgattctcaccacccagcgtgagccgaaggagatgcagaagcctcagtggtacaggcacacatttgaagaagcagagaaagggtttgatgagaccttggccaaagagaagggcatgaatcgggatgatcggatccatggagccttgctgatccttaacgagctggtccgaatcagcagcatggagggagagcgtctgagagaagaaatggaagaaatcacacagcagcagctggtacatgacaagtactgcaaagacctcatgggcttcggaacaaaacctcgtcacattacccccttcaccagcttccaggctgtacagccccagcagtcaaatgccttggtggggctgctggggtacagctctcaccaaggccttatgggatttggggcctcccccagcccagctaagtccaccctggtggagagccggtgttgcagagacttgatggaggagaaatttgatcaggtatgccagtgggtgctgaaatgcaggaatagcaagaactcgctgatccaaatgacaatccttaatttgttgccccgcttggctgcattccgaccttctgccttcacagatactcagtacctccaagatactatgaaccatgtcctaagctgtgtcaagaaggagaaggaacgtacagcagccttccaagccctggggctgctttctgtggctgtgaggtctgagtttaaggtctatttgcctcgcgtgctggacatcatccgagcggccctgcccccaaaggacttcgcccataagaggcagaaggcaatgcaggtggacgccacagtcttcacttgcatcagcatgctggctcgagcaatggggccaagcatccagcaggatatcaaggagctgctggagcccatgctggcagtaggactaagccctgccctcactgcagtgctctacgacctgagtcgtcagattccacagctaaagaaggacattcaagatgggctactgaaaatgctgtccctggtccttatgcacaaaccactccgccacccaggcatgcccaagggcctggcccatcagctggcctctcctggcctcacaaccctccctgaggccagcgatgtgggcagcatcactcttgccctccgaacgcttggcagctttgaatttgaaggccactctctgacccaatttgttcgccactgtgcggatcattttctaaacagtgagcacaaggagatccgcatggaggctgcccgtacctgttcccgcctgctcacgccctccatccacctcatcagtggccatgctcatgtggttagccagactgcagtgcaagtggtggcagacgtgcttagcaaactgctcgtggttgggataacagatcctgaccctgacattcgctattgtgtcttggcatccctggacgagcgctttgatgcacacctggcccaggcggagaacttgcaggccttgtttgtggctctgaatgaccaggtgtttgagatccgggagctggccatctgcactgtgggccgactcagtagcatgaacccggcgtttgtcatgcctttcctgcgcaagatgctcatccagattttgacagagctggagcacagtgggattggaagaatcaaagagcagagtgcccgcatgctggggcacctggtctccaatgcgcctcgactcatccgtccctacatggagcctattctgaaggcattaattttgaaactgaaagatccagaccctgatccaaacccaggtgtgatcaataatgtcctggcaacaataggagaattggcacaggttagtggcctggaaatgaggaaatgggttgatgaactttttattatcattatggacatgctccaggattcctctttgttggccaaaaggcaggtggctctgtggaccctgggacagttggtggccagcactggctatgtagtagagccctacaggaagtaccctactttgcttgaggtgctactgaattttctgaagactgagcagaaccagggtacacgcagagaggccatccgtgtgttagggcttttaggggctttggatccctacaagcacaaagtgaacattggcatgatagaccagtcccgggatgcctctgctgtcagcctgtcagaatctaagtcaagtcaggattcctctgactatagcactagtgaaatgctggttaacatgggaaacctgcctctggatgagttctacccagctgtgtccatggtggccctgatgcggatcttccgagaccagtcactctctcaccatcacaccatggttgtccaggccatcaccttcatcttcaagtccctgggactcaaatgtgtgcagttcctgccccaggtcatgcccacgttccttaatgtcattcgagtctgtgatggggccatccgggaatttttgttccagcagctgggaatgttggtgtcctttgtgaagagccacatcagaccttatatggatgaaatagtcaccctcatgagagaattctgggtcatgaatacctcaattcagagcacgatcattcttctcattgagcaaattgtggtagctcttgggggtgaatttaagctttacctgccccagctgatcccacacatgttgcgtgtcttcatgcatgacaacagcccaggccgcatcgtctctatcaagttattggctgcaatccagctgtttggcgccaacctggatgactacctacatttactgctgcctcctattgtgaagttgtttgatgcccctgaagctccactgccatctcgaaaggcagcgctagagactgtggaccgcctgacggagtccctggatttcactgactatgcctcccggatcattcaccctattgttcgaacactggaccagagcccagaactgcgctccacagccatggacacgctgtcttcacttgtttttcaactggggaagaagtaccaaattttcattccaatggtgaataaagttctggtgcgacaccgaatcaatcatcagcgctatgatgtgctcatctgcagaattgtcaagggatacacacttgctgatgaagaggaggatcctttgatttaccagcatcgaatgcttaggagtggccaaggggatgcattggctagtggaccagtggaaacaggacccatgaagaaactgcacgtcagcaccatcaacctccaaaaggcctggggtgctgccaggagggtctccaaagatgactggctggaatggctgagacggctgagcctggagctgctgaaggactcatcatcgccctccctgcgctcctgctgggccctggcacaggcctacaacccgatggccagggatctcttcaatgctgcatttgtgtcctgctggtctgaattgaatgaagatcaacaggatgagctcatcagaagcatcgagttggccctcacctcacaagacatcgctgaagtcacacaaaccctcttaaacttggctgaattcatggaacacagtgacaagggccccctgccactgagagatgacaatggcattgttctgctgggtgaaagagctgccaagtgccgagcatatgccaaagcactacactacaaagaactggagttccagaaaggccccacccctgccattctagaatctctcatcagcattaataataagctacagcagccggaggcagcggccggagtgttagaatatgccatgaaacactttggagagctggagatccaggctacctggtatgagaaactgcatgagtgggaggatgccctggtggcctatgacaagaaaatggacaccaacaaggatgacccagagctgatgctgggccgcatgcgctgcctcgaggccctgggggaatggggtcaactccaccagcagtgctgtgaaaagtggaccctggttaatgatgagacccaagccaagatggcccggatggctgctgcagctgcatggggtttaggtcagtgggacagcatggaagaatacacctgtatgatccctcgggacacccatgatggggcattttatagagctgtgctggcactgcatcaggacctcttctccttggcacaacagtgcattgacaaggccagggacctgctggatgctgaattaactgcgatggcaggagagagttacagtcgggcatatggggccatggtttcttgccacatgctgtccgagctggaggaggttatccagtacaaacttgtccccgagcgacgagagatcatccgccagatctggtgggagagactgcagggctgccagcgtatcgtagaggactggcagaaaatccttatggtgcggtcccttgtggtcagccctcatgaagacatgagaacctggctcaagtacgcaagcctgtgtggcaagagtggcagactggctcttgctcataaaaccttagtgttgctcctgggagttgatccatctcggcaacttgaccatcccctgccgacagttcaccctcaggtgacctatgcctacatgaaaaacatgtggaagagcgcccgcaagatcgatgccttccagcacatgcagcattttgtccagaccatgcagcaacaggcccagcatgccatcgctactgaggaccagcagcataagcaggaactgcacaagctcatggcccgatgcttcctgaaacttggagagtggcagctgaatctacagggcatcaacgagagcacaatccccaaagtgctgcagtactacagcgctgccaccgagcacgaccgcagctggtacaaggcctggcacgcgtgggcagtgatgaacttcgaagctgtgctacactacaaacatcagaaccaagcccgtgacgagaagaagaaactgcgtcatgccagcggggctaatatcaccaacaccaccactgccgccaccacggccgctactgccaccaccaccgccagcaccgagggcagcaacagtgagagcgaggccgagagcaccgagaacagccccaccccatcgccgctgcagaagaaggtcactgaggatctgtccaaaaccctcctgatgtacacggtgcctgccgtccagggcttcttccgttccatctcgttgtcacgaggcaacaacctccaggatacactcagagttctcaccttatggtttgattatggtcactggccagatgtcaatgaggccttagtggagggagtgaaagccatccagattgatacctggctacaggttatacctcagctcattgcaagaattgatactcccagacccttggtgggacgtctcattcaccagcttctcacagacattggtcggtaccacccccaggccctcatctaccccctaacagtggcttctaagtctaccacgacagcccggcacaacgcagccaacaagattctgaagaacatgtgtgagcacagcaacaccctggtccagcaggccatgatggtgagcgaggagctgatccgagtggccatcctgtggcatgagatgtggcacgaaggcctggaagaggcatctcgtttgtactttggggagaggaacgtgaaaggcatgtttgaggtgctggagcccttgcatgctatgatggaacggggcccccagactctgaaggagacatcctttaatcaggcctatggtcgagatttaatggaggcccaagagtggtgcaggaagtacatgaaatcagggaatgtcaaggacctcactcaagcctgggacctctattatcatgtgttccgacgaatctcaaagcagctgcctcagctcacatccttagagctgcaatatgtttccccaaaacttctgatgtgccgggaccttgaattggctgtgccaggaacatatgaccccaaccagccaatcattcgcattcagtccatagcaccgtctttgcaagtcatcacatccaagcagaggccccggaaattgacacttatgggcagcaacgggcatgagtttgttttccttctaaaaggccatgaagatctgcgccaggatgagcgtgtgatgcagctcttcggcctggttaacacccttctggccaatgacccaacatctcttcggaaaaacctcagcatccagagatatgccgtcatccctttatcgaccaactcgggcctcattggctgggtgccccattgtgacacactgcacgccctcatccgggactacagggagaagaagaagatccttctcaacatcgagcatcgcatcatgttgcggatggctccagactatgaccacttgactctgatgcagaaggtggaggtgtttgagcatgccgtcaataatacagctggggacgacctggccaagctgctgtggctgaaaagccccagctctgaggtgtggtttgaccgaagaaccaattatacccgttctttagcggtcatgtcaatggttgggtatattttaggcctgggagatagacacccatccaacctgatgctggaccgtctgagtgggaagatcctgcacattgactttggggactgctttgaggttgctatgacccgagagaagtttccagagaagattccatttagactaacaagaatgttgaccaatgctatggaggttacaggcctggatggcaactacagaatcacatgccacacagtgatggaggtgctgcgggagcacaaggacagtgtcatggctgtgctggaagcctttgtctatgaccccttgctgaactggaggctgatggacacaaataccaaaggcaacaagcgatcccgaacgaggacggattcctactctgccggccagtcagtcgaaattttggacggtgtggaacttggggagccagcccataagaaaacggggaccacagtgccagaatctattcattctttcattggagacggtttggtgaaaccagaggccctaaataagaaagctattcagattattaacagggttcgagataagctcactggtcgggacttctctcatgatgacactttggatgttccaacgcaagttgagctgctcatcaaacaagcgacatcccatgaaaacctctgccagtgctatattggctggtgccctttctggtaactggaggcccagatgtgactgtcacgttttttctgaggcttttttactttagtaaatgcttccactaaactgaaaccatggtgagaaagtttgactttgttaaatattttgaaatgtaaatgaaaagaactactgtatattaaaagttggtttgaaccaactttctagctgctgttgaagaatatattgtcagaaacacaaggcttgatttggttcccaggacagtgaaacacagtaataccacgtaaatcaagccattcattttggggaacagaagatccataactttagaaatacgggttttgacttaactcacaagagaactcatcacaagtacttgctgatggaagaatgacctagttgctcctctcaacatgggtacagcaaacagcacagccaagaagcctcaggtcatggaggacatggattaggatcctagaccgtaaagacacagaagatgccaacctcacccctgccacctatcccaagacctcactggtctgcggacagcagcagaaatgtttgcaagataggccaaatgagttttacaaaaggtctgtcttccatcagacccagtgatgctgcaactcacgcttcaatccaagacctgaccgctagtagggaggtttattcggatcactggtggcctcggctgagcagatgcacggaggggatcactgcacagtgggaccacccgcactggccttctgcagcagggttctgggatgatttcagtggtcagaatactctgtttagagcaagggctcagaaaacagaaatactgtcatggaggtgctgaacacagggaaggtctggtacatattgggaattatgagcagaacaaatactcaactaaatgcacaaagtataaagtgtagccatgtctagacaccaggttgtatcggaataatttttgtgccaataaatgacatcagaattttaaacata

SEQ ID NO: 188 - DNA, 8719 bp, Macaca fascicularis
  source 1..8719: mol_type = genomic DNA
tatgtttaaaattctgatgtcatttattggcacaaaaattattccgatacaacctggtgtctagacatggctacactttatactttgtgcatttagttgagtatttgttctgctcataattcccaatatgtaccagaccttccctgtgttcagcacctccatgacagtatttctgttttctgagcccttgctctaaacagagtattctgaccactgaaatcatcccagaaccctgctgcagaaggccagtgcgggtggtcccactgtgcagtgatcccctccgtgcatctgctcagccgaggccaccagtgatccgaataaacctccctactagcggtcaggtcttggattgaagcgtgagttgcagcatcactgggtctgatggaagacagaccttttgtaaaactcatttggcctatcttgcaaacatttctgctgctgtccgcagaccagtgaggtcttgggataggtggcaggggtgaggttggcatcttctgtgtctttacggtctaggatcctaatccatgtcctccatgacctgaggcttcttggctgtgctgtttgctgtacccatgttgagaggagcaactaggtcattcttccatcagcaagtacttgtgatgagttctcttgtgagttaagtcaaaacccgtatttctaaagttatggatcttctgttccccaaaatgaatggcttgatttacgtggtattactgtgtttcactgtcctgggaaccaaatcaagccttgtgtttctgacaatatattcttcaacagcagctagaaagttggttcaaaccaacttttaatatacagtagttcttttcatttacatttcaaaatatttaacaaagtcaaactttctcaccatggtttcagtttagtggaagcatttactaaagtaaaaaagcctcagaaaaaacgtgacagtcacatctgggcctccagttaccagaaagggcaccagccaatatagcactggcagaggttttcatgggatgtcgcttgtttgatgagcagctcaacttgcgttggaacatccaaagtgtcatcatgagagaagtcccgaccagtgagcttatctcgaaccctgttaataatctgaatagctttcttatttagggcctctggtttcaccaaaccgtctccaatgaaagaatgaatagattctggcactgtggtccccgttttcttatgggctggctccccaagttccacaccgtccaaaatttcgactgactggccggcagagtaggaatccgtcctcgttcgggatcgcttgttgcctttggtatttgtgtccatcagcctccagttcagcaaggggtcatagacaaaggcttccagcacagccatgacactgtccttgtgctcccgcagcacctccatcactgtgtggcatgtgattctgtagttgccatccaggcctgtaacctccatagcattggtcaacattcttgttagtctaaatggaatcttctctggaaacttctctcgggtcatagcaacctcaaagcagtccccaaagtcaatgtgcaggatcttcccactcagacggtccagcatcaggttggatgggtgtctatctcccaggcctaaaatatacccaaccattgacatgaccgctaaagaacgggtataattggttcttcggtcaaaccacacctcagagctggggcttttcagccacagcagcttggccaggtcgtccccagctgtattattgacggcatgctcaaacacctccaccttctgcatcagagtcaagtggtcatagtctggagccatccgcaacatgatgcgatgctcgatgttgagaaggatcttcttcttctccctgtagtcccggatgagggcgtgcagtgtgtcacaatggggcacccagccaatgaggcccgagttggtcgataaagggatgacggcatatctctggatgctgaggtttttccgaagagatgttgggtcattggccagaagggtgttaaccaggccgaagagctgcatcacacgctcatcctggcgcagatcttcatggccttttagaaggaaaacaaactcatgcccgttgctgcccataagtgtcaatttccggggcctctgcttggatgtgatgacttgcaaagacggtgctatggactgaatgcgaatgattggctggttggggtcatatgttcctggcacagccaattcaaggtcccggcacatcagaagttttggggaaacatattgcagctctaaggatgtgagctgaggcagctgctttgagattcgtcggaacacatgataatagaggtcccaggcttgagtgaggtccttgacattccctgatttcatgtacttcctgcaccactcttgggcctccattaaatctcgaccataggcctgattaaaggatgtctccttcagagtctgggggccccgttccatcatagcatgcaagggctccagcacctcaaacatgcctttcacgttcctctccccaaagtacaaacgagatgcctcttccaggccttcgtgccacatctcatgccacaggatggccactcggatcagctcctcgctcaccatcatggcctgctggaccagggtgttgctgtgctcacacatgttcttcagaatcttgttggctgcgttgtgccgggctgtcgtggtagacttagaagccactgttagggggtagatgagggcctgggggtggtaccgaccaatgtctgtgagaagctggtgaatgagacgtcccaccaagggtctgggagtatcaattcttgcaatgagctgaggtataacctgtagccaggtatcaatctggatggctttcactccctccactaaggcctcattgacatctggccagtgaccataatcaaaccataaggtgagaactctgagtgtatcctggaggttgttgcctcgtgacaacgagatggaacggaagaagccctggacggcaggcaccgtgtacatcaggagggttttggacagatcctcagtgaccttcttctgcagcggcgatggggtggggctgttctcggtgctctcggcctcgctctcactgttgctgccctcggtgctggcggtggtggtggcagtagcggccgtggtggcggcagtggtggtgttggtgatattagccccgctggcatgacgcagtttcttcttctcgtcacgggcttggttctgatgtttgtagtgtagcacagcttcgaagttcatcactgcccacgcgtgccaggccttgtaccagctgcggtcgtgctcggtggcagcgctgtagtactgcagcactttggggattgtgctctcgttgatgccctgtagattcagctgccactctccaagtttcaggaagcatcgggccatgagcttgtgcagttcctgcttatgctgctggtcctcagtagcgatggcatgctgggcctgttgctgcatggtctggacaaaatgctgcatgtgctggaaggcatcgatcttgcgggcgctcttccacatgtttttcatgtaggcataggtcacctgagggtgaactgtcggcaggggatggtcaagttgccgagatggatcaactcccaggagcaacactaaggttttatgagcaagagccagtctgccactcttgccacacaggcttgcgtacttgagccaggttctcatgtcttcatgagggctgaccacaagggaccgcaccataaggattttctgccagtcctctacgatacgctggcagccctgcagtctctcccaccagatctggcggatgatctctcgtcgctcggggacaagtttgtactggataacctcctccagctcggacagcatgtggcaagaaaccatggccccatatgcccgactgtaactctctcctgccatcgcagttaattcagcatccagcaggtccctggccttgtcaatgcactgttgtgccaaggagaagaggtcctgatgcagtgccagcacagctctataaaatgccccatcatgggtgtcccgagggatcatacaggtgtattcttccatgctgtcccactgacctaaaccccatgcagctgcagcagccatccgggccatcttggcttgggtctcatcattaaccagggtccacttttcacagcactgctggtggagttgaccccattcccccagggcctcgaggcagcgcatgcggcccagcatcagctctgggtcatccttgttggtgtccattttcttgtcataggccaccagggcatcctcccactcatgcagtttctcataccaggtagcctggatctccagctctccaaagtgtttcatggcatattctaacactccggccgctgcctccggctgctgtagcttattattaatgctgatgagagattctagaatggcaggggtggggcctttctggaactccagttctttgtagtgtagtgctttggcatatgctcggcacttggcagctctttcacccagcagaacaatgccattgtcatctctcagtggcagggggcccttgtcactgtgttccatgaattcagccaagtttaagagggtttgtgtgacttcagcgatgtcttgtgaggtgagggccaactcgatgcttctgatgagctcatcctgttgatcttcattcaattcagaccagcaggacacaaatgcagcattgaagagatccctggccatcgggttgtaggcctgtgccagggcccagcaggagcgcagggagggcgatgatgagtccttcagcagctccaggctcagccgtctcagccattccagccagtcatctttggagaccctcctggcagcaccccaggccttttggaggttgatggtgctgacgtgcagtttcttcatgggtcctgtttccactggtccactagccaatgcatccccttggccactcctaagcattcgatgctggtaaatcaaaggatcctcctcttcatcagcaagtgtgtatcccttgacaattctgcagatgagcacatcatagcgctgatgattgattcggtgtcgcaccagaactttattcaccattggaatgaaaatttggtacttcttccccagttgaaaaacaagtgaagacagcgtgtccatggctgtggagcgcagttctgggctctggtccagtgttcgaacaatagggtgaatgatccgggaggcatagtcagtgaaatccagggactccgtcaggcggtccacagtctctagcgctgcctttcgagatggcagtggagcttcaggggcatcaaacaacttcacaataggaggcagcagtaaatgtaggtagtcatccaggttggcgccaaacagctggattgcagccaataacttgatagagacgatgcggcctgggctgttgtcatgcatgaagacacgcaacatgtgtgggatcagctggggcaggtaaagcttaaattcacccccaagagctaccacaatttgctcaatgagaagaatgatcgtgctctgaattgaggtattcatgacccagaattctctcatgagggtgactatttcatccatataaggtctgatgtggctcttcacaaaggacaccaacattcccagctgctggaacaaaaattcccggatggccccatcacagactcgaatgacattaaggaacgtgggcatgacctggggcaggaactgcacacatttgagtcccagggacttgaagatgaaggtgatggcctggacaaccatggtgtgatggtgagagagtgactggtctcggaagatccgcatcagggccaccatggacacagctgggtagaactcatccagaggcaggtttcccatgttaaccagcatttcactagtgctatagtcagaggaatcctgacttgacttagattctgacaggctgacagcagaggcatcccgggactggtctatcatgccaatgttcactttgtgcttgtagggatccaaagcccctaaaagccctaacacacggatggcctctctgcgtgtaccctggttctgctcagtcttcagaaaattcagtagcacctcaagcaaagtagggtacttcctgtagggctctactacatagccagtgctggccaccaactgtcccagggtccacagagccacctgccttttggccaacaaagaggaatcctggagcatgtccataatgataataaaaagttcatcaacccatttcctcatttccaggccactaacctgtgccaattctcctattgttgccaggacattattgatcacacctgggtttggatcagggtctggatctttcagtttcaaaattaatgccttcagaataggctccatgtagggacggatgagtcgaggcgcattggagaccaggtgccccagcatgcgggcactctgctctttgattcttccaatcccactgtgctccagctctgtcaaaatctggatgagcatcttgcgcaggaaaggcatgacaaacgccgggttcatgctactgagtcggcccacagtgcagatggccagctcccggatctcaaacacctggtcattcagagccacaaacaaggcctgcaagttctccgcctgggccaggtgtgcatcaaagcgctcgtccagggatgccaagacacaatagcgaatgtcagggtcaggatctgttatcccaaccacgagcagtttgctaagcacgtctgccaccacttgcactgcagtctggctaaccacatgagcatggccactgatgaggtggatggagggcgtgagcaggcgggaacaggtacgggcagcctccatgcggatctccttgtgctcactgtttagaaaatgatccgcacagtggcgaacaaattgggtcagagagtggccttcaaattcaaagctgccaagcgttcggagggcaagagtgatgctgcccacatcgctggcctcagggagggttgtgaggccaggagaggccagctgatgggccaggcccttgggcatgcctgggtggcggagtggtttgtgcataaggaccagggacagcattttcagtagcccatcttgaatgtccttctttagctgtggaatctgacgactcaggtcgtagagcactgcagtgagggcagggcttagtcctactgccagcatgggctccagcagctccttgatatcctgctggatgcttggccccattgctcgagccagcatgctgatgcaagtgaagactgtggcgtccacctgcattgccttctgcctcttatgggcgaagtcctttgggggcagggccgctcggatgatgtccagcacgcgaggcaaatagaccttaaactcagacctcacagccacagaaagcagccccagggcttggaaggctgctgtacgttccttctccttcttgacacagcttaggacatggttcatagtatcttggaggtactgagtatctgtgaaggcagaaggtcggaatgcagccaagcggggcaacaaattaaggattgtcatttggatcagcgagttcttgctattcctgcatttcagcacccactggcatacctgatcaaatttctcctccatcaagtctctgcaacaccggctctccaccagggtggacttagctgggctgggggaggccccaaatcccataaggccttggtgagagctgtaccccagcagccccaccaaggcatttgactgctggggctgtacagcctggaagctggtgaagggggtaatgtgacgaggttttgttccgaagcccatgaggtctttgcagtacttgtcatgtaccagctgctgctgtgtgatttcttccatttcttctctcagacgctctccctccatgctgctgattcggaccagctcgttaaggatcagcaaggctccatggatccgatcatcccgattcatgcccttctctttggccaaggtctcatcaaaccctttctctgcttcttcaaatgtgtgcctgtaccactgaggcttctgcatctccttcggctcacgctgggtggtgagaatcaaacaggcacgaagggcggccacagctccctcacggatggcttgtttggggtcccacacagccacaaaaatgttgtcaaagaagggctgcacttgctggaagaagaaggtagggacgctgatggccagctcacggagaaccaggacagctgcgtgtctccggccctcattgcggtcagcacccagccattccagggctcgcttcacctcaaattccacatactcagcggtgaaagtgtctcctgccatggcaaggcggccgatggccttggatgccatttccatgacaactgggtcattggaggggaggaggttccgaagatagttggcaaatctgccaattcgggtggcattcccaccttccactcctatgaggctggctatggccaagatgccacctttcctctcattggcatctgagctggaaaccaattcaaaaatgtgatggttcagctggtcatagaagcgagtagactcctcttgactcatctctcggagttccatggtgacatagtgctggagctccttggcagctttggccctggtctcttcattccggctcttcaggccactggcaaactgctgtagaacactcacattgctagatgtggtggcagcggtggtggcggcggcaggtccggttccaagcatcttgccctgaggttcgtgcggcttcggccaaggcctcagctgccgccgccagcaccgctaccgccgcctcaggccccctgccccaccgcccgccttccccgctgtcctctaaaccgggagc

SEQ ID NO: 189 - DNA, 8251 bp, Macaca mulatta
  source 1..8251: mol_type = genomic DNA
tccctcgctcccggtttagaggacagcggggaaggcgggcggtggggcagggggcctgaggcggcggtagcggtgctggcggcggcagctgaggccttggccgaagccgcacgaatattaaaggaaacttctctaaagaacctcagggcaagatgcttggaaccggacctgccgccgccaccaccgctgccaccacatctagcaatgtgagtgttctacagcagtttgccagtggcctgaagagccggaatgaagagaccagggccaaagctgccaaggagctccagcactatgtcaccatggaactccgagagatgagtcaagaggagtctactcgcttctatgaccagctgaaccatcacatttttgaattggtttccagctcagatgccaatgagaggaaaggtggcatcttggccatagccagcctcataggagtggaaggtgggaatgccacccgaattggcagatttgccaactatcttcggaacctcctcccctccaatgacccagttgtcatggaaatggcatccaaggccatcggccgccttgccatggcaggagacactttcaccgctgagtatgtggaatttgaggtgaagcgagccctggaatggctgggtgctgaccgcaatgagggccggagacacgcagctgtcctggttctccgtgagctggccatcagcgtccctaccttcttcttccagcaagtgcagcccttctttgacaacatttttgtggccgtgtgggaccccaaacaagccatccgtgagggagctgtggccgcccttcgtgcctgtttgattctcaccacccagcgtgagccgaaggagatgcagaagcctcagtggtacaggcacacatttgaagaagcagagaaagggtttgatgagaccttggccaaagagaagggcatgaatcgggatgatcggatccatggagccttgctgatccttaacgagctggtccgaatcagcagcatggagggagagcgtctgagagaagaaatggaagaaatcacacagcagcagctggtacatgacaagtactgcaaagacctcatgggcttcggaacaaaacctcgtcacattacccccttcaccagcttccaggctgtacagccccagcagtcaaatgccttggtggggctgctggggtacagctctcaccaaggcctcatgggatttggggcctcccccagcccagctaagtccaccctggtggagagccggtgttgcagagacttgatggaggagaaatttgatcaggtatgccagtgggtgctgaaatgcaggaatagcaagaactcgctgatccaaatgacaatccttaatttgttgccccgcttggctgcattccgaccttctgccttcacagatactcagtacctccaagatactatgaaccatgtcctaagctgtgtcaagaaggagaaggaacgtacagcagccttccaagccctggggctgctttctgtggctgtgaggtctgagtttaaggtctatttgcctcgcgtgctggacatcatccgagcggccctgcccccaaaggacttcgcccataagaggcagaaggcaatgcaggtggacgccacagtcttcacttgcatcagcatgctggctcgagcaatggggccaagcatccagcaggatatcaaggagctgctggagcccatgctggcagtaggactaagccctgccctcactgcagtgctctatgacctgagtcgtcagattccacagctaaagaaggacattcaagatgggctactgaaaatgctgtccctggtccttatgcacaaaccactccgccacccaggcatgcccaagggcctggcccatcagctggcctctcctggcctcacaaccctccctgaggccagcgatgtgggcagcatcactcttgccctccgaacgcttggcagctttgaatttgaaggccactctctgacccaatttgttcgccactgtgcggatcattttctaaacagtgagcacaaggagatccgcatggaggctgcccgtacctgttcccgcctgctcacgccctccatccacctcatcagtggccatgctcatgtggttagccagactgcagtgcaagtggtggcagacgtgcttagcaaactgctcgtggttgggataacagatcctgaccctgacattcgctattgtgtcttggcatccctggacgagcgctttgatgcacacctggcccaggcggagaacttgcaggccttgtttgtggctctgaatgaccaggtgtttgagatccgggagctggccatctgcactgtgggccgactcagtagcatgaacccggcgtttgtcatgcctttcctgcgcaagatgctcatccagattttgacagagctggagcacagtgggattggaagaatcaaagagcagagtgcccgcatgctggggcacctagtctccaatgcgccccgactcatccgtccctacatggagcctattctgaaggcattaattttgaaactgaaagatccagaccctgatccaaacccaggtgtgatcaataatgtcctggcaacaataggagaattggcacaggttagtggcctggaaatgaggaaatgggttgatgaactttttattatcattatggacatgctccaggattcctctttgttggccaaaaggcaggtggctctatggaccctgggacagttggtggccagcactggctatgtagtagagccctacaggaagtaccctactttgcttgaggtgctactgaattttctgaagactgagcagaaccagggtacacgcagagaggccatccgtgtattagggcttttaggggctttggatccctacaagcacaaagtgaacattggcatgatagaccagtcccgggatgcctctgctgtcagcctgtcagaatccaagtcaagtcaggattcctctgactatagcactagtgaaatgctggttaacatgggaaacctgcctctggatgagttctacccagctgtgtccatggtggccctgatgcggatcttccgagaccagtcactctctcaccatcacaccatggttgtccaggccatcaccttcatcttcaagtccctgggactcaaatgtgtgcagttcctgccccaggtcatgcccacgttccttaatgtcattcgagtctgtgatggggccatccgggaatttttgttccagcagctgggaatgttggtgtcctttgtgaagagccacatcagaccttatatggatgaaatagtcaccctcatgagagaattctgggtcatgaatacctcaattcagagcacgatcattcttctcattgagcaaattgtggtagctcttgggggtgaatttaagctttacctgccccagctgatcccacacatgttgcgtgtcttcatgcatgacaacagcccaggccgcatcgtctctatcaagttattggctgcaatccagctgtttggcgccaacctggatgactacctacatttactgctgcctcctattgtgaagttgtttgatgcccctgaagctccactgccatctcgaaaggcagcgctagagactgtggaccgcctgacggagtccctggatttcactgactatgcctcccggatcattcaccctattgttcgaacactggaccagagcccagaactgcgctccacagccatggacacgctgtcttcacttgtttttcaactggggaagaagtaccaaattttcattccaatggtgaataaagttctggtgcgacaccgaatcaatcatcagcgctatgatgtgctcatctgcagaattgtcaagggatacacacttgctgatgaagaggaggatcctttgatttaccagcatcgaatgcttaggagtggccaaggggatgcattggctagtggaccagtggaaacaggacccatgaagaaactgcacgtcagcaccatcaacctccaaaaggcctggggtgctgccaggagggtctccaaagatgactggctggaatggctgagacggctgagcctggagctgctgaaggactcatcatcgccctccctgcgctcctgctgggccctggcacaggcctacaacccgatggccagggatctcttcaatgctgcgtttgtgtcctgctggtctgaattgaatgaagatcaacaggatgagctcatcagaagcatcgagttggccctcacctcacaagacatcgctgaagtcacacaaaccctcttaaacttggctgaattcatggaacacagtgacaagggccccctgccactgagagatgacaatggcattgttctgctgggtgaaagagctgccaagtgccgagcatatgccaaagcactacactacaaagaactggagttccagaaaggccccacccctgccattctagaatctctcatcagcattaataataagctacagcagccggaggcagcggccggagtgttagaatatgccatgaaacactttggagagctggagatccaggctacctggtatgagaaactgcatgagtgggaggatgccctggtggcctatgacaagaaaatggacaccaacaaggatgacccagagctgatgctgggccgcatgcgctgcctcgaggccctgggggaatggggtcagctccaccagcagtgctgtgaaaagtggaccctggttaatgatgagacccaagccaagatggcccggatggctgctgcagctgcatggggtttaggtcagtgggacagcatggaagaatacacctgtatgatccctcgggacacccatgatggggcattttatagagctgtgctggcactgcatcaggacctcttctccttggcacaacagtgcattgacaaggccagggacctgctggatgctgaattaactgcgatggcaggagagagttacagtcgggcatatggggccatggtttcttgccacatgctgtccgagctggaggaggttatccagtacaaacttgtccccgagcgacgagagatcatccgccagatctggtgggagagactgcagggctgccagcgtatcgtagaggactggcagaaaatccttatggtgcggtcccttgtggtcagccctcatgaagacatgagaacctggctcaagtacgcaagcctgtgtggcaagagtggcagactggctcttgctcataaaaccttagtgttgctcctgggagttgatccatctcggcaacttgaccatcccctgccgacagttcaccctcaggtgacctatgcctacatgaaaaacatgtggaagagcgcccgcaagatcgatgccttccagcacatgcagcattttgtccagaccatgcagcaacaggcccagcatgccatcgctactgaggaccagcagcataagcaggaactgcacaagctcatggcccgatgcttcctgaaacttggagagtggcagctgaatctacagggcatcaacgagagcacaatccccaaagtgctgcagtactacagcgctgccaccgagcacgaccgcagctggtacaaggcctggcacgcgtgggcagtgatgaacttcgaagctgtgctacactacaaacatcagaaccaagcccgcgacgagaagaagaaactgcgtcatgccagcggggctaatatcaccaacaccaccactgccgccaccacggccgctactgccaccaccaccgccagcaccgagggcagcaacagtgagagcgaggccgagagcaccgagaacagccccaccccatcgccgctgcagaagaaggtcactgaggatctgtccaaaaccctcctgatgtacacggtgcctgccgtccagggcttcttccgttccatctcgttgtcacgaggcaacaacctccaggatacactcagagttctcaccttatggtttgattatggtcactggccagatgtcaatgaggccttagtggaaggagtgaaagccatccagattgatacctggctacaggttatacctcagctcattgcaagaattgatactcccagacccttggtgggacgtctcattcaccagcttctcacagacattggtcggtaccacccccaggccctcatctaccccctaacagtggcttctaagtccaccacgacagcccggcacaacgcagccaacaagattctgaagaacatgtgtgagcacagcaacaccctggtccagcaggccatgatggtgagcgaggagctgatccgagtggccatcctgtggcatgagatgtggcacgaaggcctggaagaggcatctcgtttgtactttggggagaggaacgtgaaaggcatgtttgaggtgctggagcccttgcatgctatgatggaacggggcccccagactctgaaggagacatcctttaatcaggcctatggtcgagatttaatggaggcccaagagtggtgcaggaagtacatgaaatcagggaatgtcaaggacctcactcaagcctgggacctctattatcatgtgttccgacgaatctcaaagcagctgcctcagctcacatccttagagctgcaatatgtttccccaaaacttctgatgtgccgggaccttgaattggctgtgccaggaacatatgaccccaaccagccaatcattcgcattcagtccatagcaccgtctttgcaagtcatcacatccaagcagaggccccggaaattgacacttatgggcagcaacgggcatgaatttgttttccttctaaaaggccatgaagatctgcgccaggatgagcgtgtgatgcagctcttcggcctggttaacacccttctggccaatgacccaacatctcttcggaaaaacctcagcatccagagatatgccgtcatccctttatcgaccaactcgggcctcattggctgggtgccccattgtgacacactgcacgccctcatccgggactacagggagaagaagaagatccttctcaacatcgagcatcgcatcatgttgcggatggctccagactatgaccacttgactctgatgcagaaggtggaggtgtttgagcatgccgtcaataatacagctggggacgacctggccaagctgctgtggctgaaaagccccagctctgaggtgtggtttgaccgaagaaccaattatacccgttctttagcggtcatgtcaatggttgggtatattttaggcctgggagatagacacccatccaacctgatgctggaccgtctgagtgggaagatcctgcacattgactttggggactgctttgaggttgctatgacccgagagaagtttccagagaagattccatttagactaacaagaatgttgaccaatgctatggaggttacaggcctggatggcaactacagaatcacatgccacacagtgatggaggtgctgcgggagcacaaggacagtgtcatggctgtgctggaagcctttgtctatgaccccttgctgaactggaggctgatggacacaaataccaaaggcaacaagcgatcccgaacgaggacggattcctactctgccggccagtcagtcgaaattttggacggtgtggaacttggggagccagcccataagaaaacggggaccacagtgccagaatctattcattctttcattggagacggtttggtgaaaccagaggccctaaataagaaagctattcagattattaacagggttcgagataagctcactggtcgggacttctctcatgatgacactttggatgttccaacgcaagttgagctgctcatcaaacaagcgacatcccatgaaaacctctgccagtgctatattggctggtgccctttctggtaactggaggcccagatgtgactgtcacgttttttctgaggcttttttactttagtaaatgcttccactaaactgaaaccatggtgagaaagtttgactttgttaaatattttgaaatgtaaatgaaaagaactactgtatattaaaagttggtttgaaccaactttctagctgctgttgaagaatatattgtcagaaacacaaggcttgatttggttcccaggacagtgaaacacagtaataccacataaatcaagccattcattttggggaacagaagatccataactttagaaatacgggttttgacttaactcacaagagaactcatcacaagtacttgctgatggaagaatgacctagttgctcctctcaacatgggtacagcaaacagcacagccaagaagcctcaggtcatggaggacatggattaggatcctagaccgtaaaga

SEQ ID NO: 190 - DNA, 8251 bp, Macaca mulatta
  source 1..8251: mol_type = genomic DNA
tctttacggtctaggatcctaatccatgtcctccatgacctgaggcttcttggctgtgctgtttgctgtacccatgttgagaggagcaactaggtcattcttccatcagcaagtacttgtgatgagttctcttgtgagttaagtcaaaacccgtatttctaaagttatggatcttctgttccccaaaatgaatggcttgatttatgtggtattactgtgtttcactgtcctgggaaccaaatcaagccttgtgtttctgacaatatattcttcaacagcagctagaaagttggttcaaaccaacttttaatatacagtagttcttttcatttacatttcaaaatatttaacaaagtcaaactttctcaccatggtttcagtttagtggaagcatttactaaagtaaaaaagcctcagaaaaaacgtgacagtcacatctgggcctccagttaccagaaagggcaccagccaatatagcactggcagaggttttcatgggatgtcgcttgtttgatgagcagctcaacttgcgttggaacatccaaagtgtcatcatgagagaagtcccgaccagtgagcttatctcgaaccctgttaataatctgaatagctttcttatttagggcctctggtttcaccaaaccgtctccaatgaaagaatgaatagattctggcactgtggtccccgttttcttatgggctggctccccaagttccacaccgtccaaaatttcgactgactggccggcagagtaggaatccgtcctcgttcgggatcgcttgttgcctttggtatttgtgtccatcagcctccagttcagcaaggggtcatagacaaaggcttccagcacagccatgacactgtccttgtgctcccgcagcacctccatcactgtgtggcatgtgattctgtagttgccatccaggcctgtaacctccatagcattggtcaacattcttgttagtctaaatggaatcttctctggaaacttctctcgggtcatagcaacctcaaagcagtccccaaagtcaatgtgcaggatcttcccactcagacggtccagcatcaggttggatgggtgtctatctcccaggcctaaaatatacccaaccattgacatgaccgctaaagaacgggtataattggttcttcggtcaaaccacacctcagagctggggcttttcagccacagcagcttggccaggtcgtccccagctgtattattgacggcatgctcaaacacctccaccttctgcatcagagtcaagtggtcatagtctggagccatccgcaacatgatgcgatgctcgatgttgagaaggatcttcttcttctccctgtagtcccggatgagggcgtgcagtgtgtcacaatggggcacccagccaatgaggcccgagttggtcgataaagggatgacggcatatctctggatgctgaggtttttccgaagagatgttgggtcattggccagaagggtgttaaccaggccgaagagctgcatcacacgctcatcctggcgcagatcttcatggccttttagaaggaaaacaaattcatgcccgttgctgcccataagtgtcaatttccggggcctctgcttggatgtgatgacttgcaaagacggtgctatggactgaatgcgaatgattggctggttggggtcatatgttcctggcacagccaattcaaggtcccggcacatcagaagttttggggaaacatattgcagctctaaggatgtgagctgaggcagctgctttgagattcgtcggaacacatgataatagaggtcccaggcttgagtgaggtccttgacattccctgatttcatgtacttcctgcaccactcttgggcctccattaaatctcgaccataggcctgattaaaggatgtctccttcagagtctgggggccccgttccatcatagcatgcaagggctccagcacctcaaacatgcctttcacgttcctctccccaaagtacaaacgagatgcctcttccaggccttcgtgccacatctcatgccacaggatggccactcggatcagctcctcgctcaccatcatggcctgctggaccagggtgttgctgtgctcacacatgttcttcagaatcttgttggctgcgttgtgccgggctgtcgtggtggacttagaagccactgttagggggtagatgagggcctgggggtggtaccgaccaatgtctgtgagaagctggtgaatgagacgtcccaccaagggtctgggagtatcaattcttgcaatgagctgaggtataacctgtagccaggtatcaatctggatggctttcactccttccactaaggcctcattgacatctggccagtgaccataatcaaaccataaggtgagaactctgagtgtatcctggaggttgttgcctcgtgacaacgagatggaacggaagaagccctggacggcaggcaccgtgtacatcaggagggttttggacagatcctcagtgaccttcttctgcagcggcgatggggtggggctgttctcggtgctctcggcctcgctctcactgttgctgccctcggtgctggcggtggtggtggcagtagcggccgtggtggcggcagtggtggtgttggtgatattagccccgctggcatgacgcagtttcttcttctcgtcgcgggcttggttctgatgtttgtagtgtagcacagcttcgaagttcatcactgcccacgcgtgccaggccttgtaccagctgcggtcgtgctcggtggcagcgctgtagtactgcagcactttggggattgtgctctcgttgatgccctgtagattcagctgccactctccaagtttcaggaagcatcgggccatgagcttgtgcagttcctgcttatgctgctggtcctcagtagcgatggcatgctgggcctgttgctgcatggtctggacaaaatgctgcatgtgctggaaggcatcgatcttgcgggcgctcttccacatgtttttcatgtaggcataggtcacctgagggtgaactgtcggcaggggatggtcaagttgccgagatggatcaactcccaggagcaacactaaggttttatgagcaagagccagtctgccactcttgccacacaggcttgcgtacttgagccaggttctcatgtcttcatgagggctgaccacaagggaccgcaccataaggattttctgccagtcctctacgatacgctggcagccctgcagtctctcccaccagatctggcggatgatctctcgtcgctcggggacaagtttgtactggataacctcctccagctcggacagcatgtggcaagaaaccatggccccatatgcccgactgtaactctctcctgccatcgcagttaattcagcatccagcaggtccctggccttgtcaatgcactgttgtgccaaggagaagaggtcctgatgcagtgccagcacagctctataaaatgccccatcatgggtgtcccgagggatcatacaggtgtattcttccatgctgtcccactgacctaaaccccatgcagctgcagcagccatccgggccatcttggcttgggtctcatcattaaccagggtccacttttcacagcactgctggtggagctgaccccattcccccagggcctcgaggcagcgcatgcggcccagcatcagctctgggtcatccttgttggtgtccattttcttgtcataggccaccagggcatcctcccactcatgcagtttctcataccaggtagcctggatctccagctctccaaagtgtttcatggcatattctaacactccggccgctgcctccggctgctgtagcttattattaatgctgatgagagattctagaatggcaggggtggggcctttctggaactccagttctttgtagtgtagtgctttggcatatgctcggcacttggcagctctttcacccagcagaacaatgccattgtcatctctcagtggcagggggcccttgtcactgtgttccatgaattcagccaagtttaagagggtttgtgtgacttcagcgatgtcttgtgaggtgagggccaactcgatgcttctgatgagctcatcctgttgatcttcattcaattcagaccagcaggacacaaacgcagcattgaagagatccctggccatcgggttgtaggcctgtgccagggcccagcaggagcgcagggagggcgatgatgagtccttcagcagctccaggctcagccgtctcagccattccagccagtcatctttggagaccctcctggcagcaccccaggccttttggaggttgatggtgctgacgtgcagtttcttcatgggtcctgtttccactggtccactagccaatgcatccccttggccactcctaagcattcgatgctggtaaatcaaaggatcctcctcttcatcagcaagtgtgtatcccttgacaattctgcagatgagcacatcatagcgctgatgattgattcggtgtcgcaccagaactttattcaccattggaatgaaaatttggtacttcttccccagttgaaaaacaagtgaagacagcgtgtccatggctgtggagcgcagttctgggctctggtccagtgttcgaacaatagggtgaatgatccgggaggcatagtcagtgaaatccagggactccgtcaggcggtccacagtctctagcgctgcctttcgagatggcagtggagcttcaggggcatcaaacaacttcacaataggaggcagcagtaaatgtaggtagtcatccaggttggcgccaaacagctggattgcagccaataacttgatagagacgatgcggcctgggctgttgtcatgcatgaagacacgcaacatgtgtgggatcagctggggcaggtaaagcttaaattcacccccaagagctaccacaatttgctcaatgagaagaatgatcgtgctctgaattgaggtattcatgacccagaattctctcatgagggtgactatttcatccatataaggtctgatgtggctcttcacaaaggacaccaacattcccagctgctggaacaaaaattcccggatggccccatcacagactcgaatgacattaaggaacgtgggcatgacctggggcaggaactgcacacatttgagtcccagggacttgaagatgaaggtgatggcctggacaaccatggtgtgatggtgagagagtgactggtctcggaagatccgcatcagggccaccatggacacagctgggtagaactcatccagaggcaggtttcccatgttaaccagcatttcactagtgctatagtcagaggaatcctgacttgacttggattctgacaggctgacagcagaggcatcccgggactggtctatcatgccaatgttcactttgtgcttgtagggatccaaagcccctaaaagccctaatacacggatggcctctctgcgtgtaccctggttctgctcagtcttcagaaaattcagtagcacctcaagcaaagtagggtacttcctgtagggctctactacatagccagtgctggccaccaactgtcccagggtccatagagccacctgccttttggccaacaaagaggaatcctggagcatgtccataatgataataaaaagttcatcaacccatttcctcatttccaggccactaacctgtgccaattctcctattgttgccaggacattattgatcacacctgggtttggatcagggtctggatctttcagtttcaaaattaatgccttcagaataggctccatgtagggacggatgagtcggggcgcattggagactaggtgccccagcatgcgggcactctgctctttgattcttccaatcccactgtgctccagctctgtcaaaatctggatgagcatcttgcgcaggaaaggcatgacaaacgccgggttcatgctactgagtcggcccacagtgcagatggccagctcccggatctcaaacacctggtcattcagagccacaaacaaggcctgcaagttctccgcctgggccaggtgtgcatcaaagcgctcgtccagggatgccaagacacaatagcgaatgtcagggtcaggatctgttatcccaaccacgagcagtttgctaagcacgtctgccaccacttgcactgcagtctggctaaccacatgagcatggccactgatgaggtggatggagggcgtgagcaggcgggaacaggtacgggcagcctccatgcggatctccttgtgctcactgtttagaaaatgatccgcacagtggcgaacaaattgggtcagagagtggccttcaaattcaaagctgccaagcgttcggagggcaagagtgatgctgcccacatcgctggcctcagggagggttgtgaggccaggagaggccagctgatgggccaggcccttgggcatgcctgggtggcggagtggtttgtgcataaggaccagggacagcattttcagtagcccatcttgaatgtccttctttagctgtggaatctgacgactcaggtcatagagcactgcagtgagggcagggcttagtcctactgccagcatgggctccagcagctccttgatatcctgctggatgcttggccccattgctcgagccagcatgctgatgcaagtgaagactgtggcgtccacctgcattgccttctgcctcttatgggcgaagtcctttgggggcagggccgctcggatgatgtccagcacgcgaggcaaatagaccttaaactcagacctcacagccacagaaagcagccccagggcttggaaggctgctgtacgttccttctccttcttgacacagcttaggacatggttcatagtatcttggaggtactgagtatctgtgaaggcagaaggtcggaatgcagccaagcggggcaacaaattaaggattgtcatttggatcagcgagttcttgctattcctgcatttcagcacccactggcatacctgatcaaatttctcctccatcaagtctctgcaacaccggctctccaccagggtggacttagctgggctgggggaggccccaaatcccatgaggccttggtgagagctgtaccccagcagccccaccaaggcatttgactgctggggctgtacagcctggaagctggtgaagggggtaatgtgacgaggttttgttccgaagcccatgaggtctttgcagtacttgtcatgtaccagctgctgctgtgtgatttcttccatttcttctctcagacgctctccctccatgctgctgattcggaccagctcgttaaggatcagcaaggctccatggatccgatcatcccgattcatgcccttctctttggccaaggtctcatcaaaccctttctctgcttcttcaaatgtgtgcctgtaccactgaggcttctgcatctccttcggctcacgctgggtggtgagaatcaaacaggcacgaagggcggccacagctccctcacggatggcttgtttggggtcccacacggccacaaaaatgttgtcaaagaagggctgcacttgctggaagaagaaggtagggacgctgatggccagctcacggagaaccaggacagctgcgtgtctccggccctcattgcggtcagcacccagccattccagggctcgcttcacctcaaattccacatactcagcggtgaaagtgtctcctgccatggcaaggcggccgatggccttggatgccatttccatgacaactgggtcattggaggggaggaggttccgaagatagttggcaaatctgccaattcgggtggcattcccaccttccactcctatgaggctggctatggccaagatgccacctttcctctcattggcatctgagctggaaaccaattcaaaaatgtgatggttcagctggtcatagaagcgagtagactcctcttgactcatctctcggagttccatggtgacatagtgctggagctccttggcagctttggccctggtctcttcattccggctcttcaggccactggcaaactgctgtagaacactcacattgctagatgtggtggcagcggtggtggcggcggcaggtccggttccaagcatcttgccctgaggttctttagagaagtttcctttaatattcgtgcggcttcggccaaggcctcagctgccgccgccagcaccgctaccgccgcctcaggccccctgccccaccgcccgccttccccgctgtcctctaaaccgggagcgaggga

SEQ ID NO: 191 - DNA, 7088 bp, Homo sapiens
  source 1..7088: mol_type = genomic DNA
gccagcgccccggcgaacggcaaagagggagccgctcccgctcggggggccgctggagtgcccagcgggaacccgaaagtttgtaagaggaagagagcgcgcggcgagcgagcgagcgggccgggggcagcggcagcggcgccggggaccatggtgctgccggcgcctcctccgcgggcgtgaaggcggcgctcctactccctccccggactccgcggtgtcccagaagcttttgttgacaattccagtttccgaacaaaacatttcggcaatggtgagggcttcgatcccttctctgatttgctgtcagccatgaacggatggatgtgatgcctgctagccaaaaggcttccctctgtgtgttgcagtcctgtggcattatgcatgccccctcccagtgaccccaggctttttatggctgtgagacacgttaaaatttcaggggtaagacgtgaccttttgaggtgactataactgaagattgctttacagaagccaaaaaaggtttttgagtcatgatgcaagaatctgggactgagacaaaaagtaacggttcagccatccagaatgggtcgggcggcagcaaccacttactagagtgcggcggtcttcgggaggggcggtccaacggagagacgccggccgtggacatcggggcagctgacctcgcccacgcccagcagcagcagcaacaggcacttcaggtggcaagacagctccttcttcagcagcaacagcagcagcaagttagtggattaaaatctcccaagaggaatgacaaacaaccagctcttcaggttcccgtgtcagtggctatgatgacacctcaagttatcactccccagcaaatgcagcagatcctccagcaacaagtgctgagccctcagcagctccaggttctcctccagcagcagcaggccctcatgcttcaacagcagcagcttcaagagttttataaaaaacaacaggaacagttgcagcttcaacttttacaacaacaacatgctggaaaacagcctaaagagcaacagcaggtggctacccagcagttggcttttcagcagcagcttttacagatgcagcagttacagcagcagcacctcctgtctttgcagcgccaaggccttctgacaattcagcccgggcagcctgcccttccccttcaacctcttgctcaaggcatgattccaacagaactgcagcagctctggaaagaagtgacaagtgctcatactgcagaagaaaccacaggcaacaatcacagcagtttggatctgaccacgacatgtgtctcctcctctgcaccttccaagacctccttaataatgaacccacatgcctctaccaatggacagctctcagtccacactcccaaaagggaaagtttgtcccatgaggagcacccccatagccatcctctctatggacatggtgtatgcaagtggccaggctgtgaagcagtgtgcgaagatttccaatcatttctaaaacatctcaacagtgagcatgcgctggacgatagaagtacagcccaatgtagagtacaaatgcaggttgtacagcagttagagctacagcttgcaaaagacaaagaacgcctgcaagccatgatgacccacctgcatgtgaagtctacagaacccaaagccgcccctcagcccttgaatctggtatcaagtgtcactctctccaagtccgcatcggaggcttctccacagagcttacctcatactccaacgaccccaaccgcccccctgactcccgtcacccaaggcccctctgtcatcacaaccaccagcatgcacacggtgggacccatccgcaggcggtactcagacaaatacaacgtgcccatttcgtcagcagatattgcgcagaaccaagaattttataagaacgcagaagttagaccaccatttacatatgcatctttaattaggcaggccattctcgaatctccagaaaagcagctaacactaaatgagatctataactggttcacacgaatgtttgcttacttccgacgcaacgcggccacgtggaagaatgcagtgcgtcataatcttagtcttcacaagtgttttgtgcgagtagaaaacgttaaaggggcagtatggacagtggatgaagtagaattccaaaaacgaaggccacaaaagatcagtggtaacccttcccttattaaaaacatgcagagcagccacgcctactgcacacctctcaatgcagctttacaggcttcaatggctgagaatagtatacctctatacactaccgcttccatgggaaatcccactctgggcaacttagccagcgcaatacgggaagagctgaacggggcaatggagcataccaacagcaacgagagtgacagcagtccaggcagatctcctatgcaagccgtgcatcctgtacacgtcaaagaagagcccctcgatccagaggaagctgaagggcccctgtccttagtgacaacagccaaccacagtccagattttgaccatgacagagattacgaagatgaaccagtaaacgaggacatggagtgactatcggggcgggccaaccccgagaatgaagattggaaaaaggaaaaaaaaaaaaacacgtcaaaagttagcagtgaaattgttctccatttgttgtacagtctggaggattttcactacgttttgacaactctgaaatgtgttaactcttagtgccatcaagaaccccatttgggagtatttttgatttttctactttttgttgaaaaaaggaatttgtactctgtgcattggatggacttgtttggtacttgggattttcctctcttaaccgtcaacatcagtgttgtaaatttgctaaactgattcacttttagcagcagactttgaactgcagtcctgccaacgttggacactgaggacgcccgacagagcttgtgcacctaagctgcagaccaagcctttgcccagaatttaaggattccaatggacgacctatttgcacagtactgcatgttgattatcactgcctttactccttttttttttttttttttttttttttttttgcttccagttgggatggggaaggcctttgtgtgtgtattggggggaggggttaaaaaataattatcccaaactttttaatgtattgctttttttttttttttttttccttctactataccattttaagttctgacctcaggcctccatttgggccgatggcctcttggaggcttaaagttttctgtaccttgtgatgaatgttaataggtgtttttattatacaaagctgaatgtcatttctcgtttgtagctttctgtcactcattccatcttccttcagacatcaccacgtttctctaaagtcagaaaacattccgttttggtctttttcaaaaaggtcccaaatgctgcactctacacatgaaggccctctcacacagacgtgacgtcctgccagaaagagaatgaatgacagaaaaaaaaaagagagacaaactctaggaacaatgccgattcattccacgcagcagtattgggggtggttcgggggaggggtgtttcggattttctttttttcttttcttttctttttttttttttgcagcaaccattaataaatgccaccacattctaccagcacaaggaaacataggcagcactgaaaaaaaaaaaaaagctcatattaattagactgacaatatggccttggaaggctctcccttgtggaaccaagttgccatgggccttgggtgctctgcgataacgggtgtgggttggttttgtttgcaaaatggccaaaaaaaaaaaccggcttccccgagcagctgccctgaaagtaggggtggcggcggcggcgctgagtttatacattagttcagacctacttggtggcattaaactgtttgaatgcaaattcgatttcagattgaacttgttaagggagttaacgagggctgagttcagcaaatgctaaagtgttaatttcaaatatgcaaatttggtactgcagtttgttatgcaatattatatcaccaacccagtatcacaaaaactcatagaagatatcatgtaggccctgggctttgggggggtcccaaacatggtatgcagaaatgtgatggttacaggtcagtacaacctcagtccttagaacccctccacacttcagctctgcacccactttcctgtcatttatttatataggactgtagttttttttagttcgagagcctttcgaagcttaatttatattctttctttgtaccttttttctaaaattaccaaagatattacacaaaggtaaattatgttctctgttttatgctttatctgatgaagccaaatatcctcttattgttgatcaaaggaggcaaaagaatttagaggcaaatgacaagcgataggctattgcaacctgagaaagagaactgctccttcatcgtaaatttagaagaccaagtagataatggaaccaaagttgttacttttttctagtagttatttttcctttttctttttgtgtacctctacagagaccaaaactcattctcttaaagagattttatggggctactgcagataaaaataggacacaatattaaaggagctacagaaggaagggagtcccatctcaaaaaaaaaatgaatgtatgccactgcaattagagtatccaataaaggagacagtttagagtcaggacagaaaagcttccataattgaactagattacataatagtatttctagaaaaagagatatttttagattgtatgccacttttgtttaagaactgtgctgtgatcactgtattaattttggtttatcttggcatatatccttcagtttgtttttatttttaatttttcctttttttccgattaggctttggtcagcatttttcatttaaagaaaagtaacactcccatccactcataagcttggtacaaaaacttctctggcagttacttttgaagcttcactctgctttctgtataaagggcagtctgtggtcacgcaagactttaaaaaaaaaaaaaaaaaaaaaaaaaaaaaaaaaaaaaaaaacttttccaggcagcttcatgatgtgcaggcagtagccagacagggtcatgggaagggggccctgtgcttctaaactgagtggttgctggttagtttggtattcaaaagaggataaaaatctggtagattagttcattctcagcatgtgtagctagacatgagtaaagataacagcatgagaaactgttagtacgcatacctcagttcaaacctttagggaatgattaaaatttaaaaaaaaaacatttcactcagttgcacttagtcgtatgtcttgcatgcttagtctaaagactgtagcaaaaaaaaaaaaaaaagaaaaattagattttacatatctttgcaggtatcacagccttgcagaagaaccaactgaaaaaaaaattctcaggctttacagcaagcaaacttcactatgatttttacaattctgattctgtatcccctgggggttatcccagttgcttctttaggatggggtttattacgttgtacatatatcccgatgtgtctgtgtgaatctttgtcttttttgggggagggcagagggcggttctttttttagatattgttcctaaaaaggaataaatgcatacacctgtttgtcaaaacacctttgctttttgtgcaactgctttatattaacgatactaaaaaaaaatagctttggaaaaaaaactactgtatgtaacggaattgcagaatatgctgcacatgtattttatttagttatccttgctttaagaatattggatgacatttcctgacatgtgggagggagaaactccctaactttttttttctgcttttaaactgtaacatagttgaagatttcttttttctgttctcattgattggagcattttgtacaggttttgtgtgtgtgtgtgtgtgtgtgtgcgcgcgtgcgtgtgtgttaatctgttttttgatacattcctatcccttgtgtttatcctaccactgccttcctggctatcttaaacaagttcatacatttgaaaagaaaaaaaaatgttgtttaaaaaatgttttctcctgctgcagtaaatattttgcatgatgaaattccagggtcacacttttccaagtttatcagtgaagtagtgattaacaatggggagtgtcaaaactattgaacttttgtataaaaaaaaaaaaactttacaaggtgccaagatgtaaagaaaatctgttactttttttttctcaaagaaaagcatacattagggaggtagtcccgtgtgtcagacaaatgcactgtcaggaatgaggatccaacctacctgtccctagagtccgtcttgtaagatgagttaggctgccccttggaccagccacaaaatggaatatcaaggcttatgtacatacgtgaagagttaccaccagtcctgccacctttggacagctctaacaccatccccagcatccagtcagacctagtaaagaaaaccttggattcttaacccaagataggctgtaaatcactagcttttttttcctcatgaaaaaaaatagagttaaaaaatatttcctctcttttccatattccagctgaactccgtttccaaaggcacaaagaagagtgtgcttattcagattttgaatctttttggtaccttttggttaatgacatagcctcctgaaattctggatgtcttcaaagtcagttttgcttctttatcctgaaaatcagatttacaatgctgaaggcatttcttgggcccagtgtagctcacgcaatctctgctacccataagccttgatgaagatgatacagtccggactgtgagcatggtgcttcatgtatatgtgctgccagtaacaagaatttttttgttttgttttgttttgttttgataaggcataaaagaaactcattccttgacatcaactgtaattccatcattccatgtctgcggatacagacaataaaaaaaatgttgtgtagtcagtactaattactgacattataagcattctcaaatgcaataaaaatgctggttgttcacgctggtagtaaaa

SEQ ID NO: 192 - DNA, 7088 bp, Homo sapiens
  source 1..7088: mol_type = genomic DNA
ttttactaccagcgtgaacaaccagcatttttattgcatttgagaatgcttataatgtcagtaattagtactgactacacaacattttttttattgtctgtatccgcagacatggaatgatggaattacagttgatgtcaaggaatgagtttcttttatgccttatcaaaacaaaacaaaacaaaacaaaaaaattcttgttactggcagcacatatacatgaagcaccatgctcacagtccggactgtatcatcttcatcaaggcttatgggtagcagagattgcgtgagctacactgggcccaagaaatgccttcagcattgtaaatctgattttcaggataaagaagcaaaactgactttgaagacatccagaatttcaggaggctatgtcattaaccaaaaggtaccaaaaagattcaaaatctgaataagcacactcttctttgtgcctttggaaacggagttcagctggaatatggaaaagagaggaaatattttttaactctattttttttcatgaggaaaaaaaagctagtgatttacagcctatcttgggttaagaatccaaggttttctttactaggtctgactggatgctggggatggtgttagagctgtccaaaggtggcaggactggtggtaactcttcacgtatgtacataagccttgatattccattttgtggctggtccaaggggcagcctaactcatcttacaagacggactctagggacaggtaggttggatcctcattcctgacagtgcatttgtctgacacacgggactacctccctaatgtatgcttttctttgagaaaaaaaaagtaacagattttctttacatcttggcaccttgtaaagtttttttttttttatacaaaagttcaatagttttgacactccccattgttaatcactacttcactgataaacttggaaaagtgtgaccctggaatttcatcatgcaaaatatttactgcagcaggagaaaacattttttaaacaacatttttttttcttttcaaatgtatgaacttgtttaagatagccaggaaggcagtggtaggataaacacaagggataggaatgtatcaaaaaacagattaacacacacgcacgcgcgcacacacacacacacacacacacaaaacctgtacaaaatgctccaatcaatgagaacagaaaaaagaaatcttcaactatgttacagtttaaaagcagaaaaaaaaagttagggagtttctccctcccacatgtcaggaaatgtcatccaatattcttaaagcaaggataactaaataaaatacatgtgcagcatattctgcaattccgttacatacagtagttttttttccaaagctatttttttttagtatcgttaatataaagcagttgcacaaaaagcaaaggtgttttgacaaacaggtgtatgcatttattcctttttaggaacaatatctaaaaaaagaaccgccctctgccctcccccaaaaaagacaaagattcacacagacacatcgggatatatgtacaacgtaataaaccccatcctaaagaagcaactgggataacccccaggggatacagaatcagaattgtaaaaatcatagtgaagtttgcttgctgtaaagcctgagaatttttttttcagttggttcttctgcaaggctgtgatacctgcaaagatatgtaaaatctaatttttcttttttttttttttttgctacagtctttagactaagcatgcaagacatacgactaagtgcaactgagtgaaatgttttttttttaaattttaatcattccctaaaggtttgaactgaggtatgcgtactaacagtttctcatgctgttatctttactcatgtctagctacacatgctgagaatgaactaatctaccagatttttatcctcttttgaataccaaactaaccagcaaccactcagtttagaagcacagggcccccttcccatgaccctgtctggctactgcctgcacatcatgaagctgcctggaaaagtttttttttttttttttttttttttttttttttttttttttaaagtcttgcgtgaccacagactgccctttatacagaaagcagagtgaagcttcaaaagtaactgccagagaagtttttgtaccaagcttatgagtggatgggagtgttacttttctttaaatgaaaaatgctgaccaaagcctaatcggaaaaaaaggaaaaattaaaaataaaaacaaactgaaggatatatgccaagataaaccaaaattaatacagtgatcacagcacagttcttaaacaaaagtggcatacaatctaaaaatatctctttttctagaaatactattatgtaatctagttcaattatggaagcttttctgtcctgactctaaactgtctcctttattggatactctaattgcagtggcatacattcattttttttttgagatgggactcccttccttctgtagctcctttaatattgtgtcctatttttatctgcagtagccccataaaatctctttaagagaatgagttttggtctctgtagaggtacacaaaaagaaaaaggaaaaataactactagaaaaaagtaacaactttggttccattatctacttggtcttctaaatttacgatgaaggagcagttctctttctcaggttgcaatagcctatcgcttgtcatttgcctctaaattcttttgcctcctttgatcaacaataagaggatatttggcttcatcagataaagcataaaacagagaacataatttacctttgtgtaatatctttggtaattttagaaaaaaggtacaaagaaagaatataaattaagcttcgaaaggctctcgaactaaaaaaaactacagtcctatataaataaatgacaggaaagtgggtgcagagctgaagtgtggaggggttctaaggactgaggttgtactgacctgtaaccatcacatttctgcataccatgtttgggacccccccaaagcccagggcctacatgatatcttctatgagtttttgtgatactgggttggtgatataatattgcataacaaactgcagtaccaaatttgcatatttgaaattaacactttagcatttgctgaactcagccctcgttaactcccttaacaagttcaatctgaaatcgaatttgcattcaaacagtttaatgccaccaagtaggtctgaactaatgtataaactcagcgccgccgccgccacccctactttcagggcagctgctcggggaagccggtttttttttttggccattttgcaaacaaaaccaacccacacccgttatcgcagagcacccaaggcccatggcaacttggttccacaagggagagccttccaaggccatattgtcagtctaattaatatgagcttttttttttttttcagtgctgcctatgtttccttgtgctggtagaatgtggtggcatttattaatggttgctgcaaaaaaaaaaaaagaaaagaaaagaaaaaaagaaaatccgaaacacccctcccccgaaccacccccaatactgctgcgtggaatgaatcggcattgttcctagagtttgtctctcttttttttttctgtcattcattctctttctggcaggacgtcacgtctgtgtgagagggccttcatgtgtagagtgcagcatttgggacctttttgaaaaagaccaaaacggaatgttttctgactttagagaaacgtggtgatgtctgaaggaagatggaatgagtgacagaaagctacaaacgagaaatgacattcagctttgtataataaaaacacctattaacattcatcacaaggtacagaaaactttaagcctccaagaggccatcggcccaaatggaggcctgaggtcagaacttaaaatggtatagtagaaggaaaaaaaaaaaaaaaaaaagcaatacattaaaaagtttgggataattattttttaacccctccccccaatacacacacaaaggccttccccatcccaactggaagcaaaaaaaaaaaaaaaaaaaaaaaaaaaaaaggagtaaaggcagtgataatcaacatgcagtactgtgcaaataggtcgtccattggaatccttaaattctgggcaaaggcttggtctgcagcttaggtgcacaagctctgtcgggcgtcctcagtgtccaacgttggcaggactgcagttcaaagtctgctgctaaaagtgaatcagtttagcaaatttacaacactgatgttgacggttaagagaggaaaatcccaagtaccaaacaagtccatccaatgcacagagtacaaattccttttttcaacaaaaagtagaaaaatcaaaaatactcccaaatggggttcttgatggcactaagagttaacacatttcagagttgtcaaaacgtagtgaaaatcctccagactgtacaacaaatggagaacaatttcactgctaacttttgacgtgtttttttttttttcctttttccaatcttcattctcggggttggcccgccccgatagtcactccatgtcctcgtttactggttcatcttcgtaatctctgtcatggtcaaaatctggactgtggttggctgttgtcactaaggacaggggcccttcagcttcctctggatcgaggggctcttctttgacgtgtacaggatgcacggcttgcataggagatctgcctggactgctgtcactctcgttgctgttggtatgctccattgccccgttcagctcttcccgtattgcgctggctaagttgcccagagtgggatttcccatggaagcggtagtgtatagaggtatactattctcagccattgaagcctgtaaagctgcattgagaggtgtgcagtaggcgtggctgctctgcatgtttttaataagggaagggttaccactgatcttttgtggccttcgtttttggaattctacttcatccactgtccatactgcccctttaacgttttctactcgcacaaaacacttgtgaagactaagattatgacgcactgcattcttccacgtggccgcgttgcgtcggaagtaagcaaacattcgtgtgaaccagttatagatctcatttagtgttagctgcttttctggagattcgagaatggcctgcctaattaaagatgcatatgtaaatggtggtctaacttctgcgttcttataaaattcttggttctgcgcaatatctgctgacgaaatgggcacgttgtatttgtctgagtaccgcctgcggatgggtcccaccgtgtgcatgctggtggttgtgatgacagaggggccttgggtgacgggagtcaggggggcggttggggtcgttggagtatgaggtaagctctgtggagaagcctccgatgcggacttggagagagtgacacttgataccagattcaagggctgaggggcggctttgggttctgtagacttcacatgcaggtgggtcatcatggcttgcaggcgttctttgtcttttgcaagctgtagctctaactgctgtacaacctgcatttgtactctacattgggctgtacttctatcgtccagcgcatgctcactgttgagatgttttagaaatgattggaaatcttcgcacactgcttcacagcctggccacttgcatacaccatgtccatagagaggatggctatgggggtgctcctcatgggacaaactttcccttttgggagtgtggactgagagctgtccattggtagaggcatgtgggttcattattaaggaggtcttggaaggtgcagaggaggagacacatgtcgtggtcagatccaaactgctgtgattgttgcctgtggtttcttctgcagtatgagcacttgtcacttctttccagagctgctgcagttctgttggaatcatgccttgagcaagaggttgaaggggaagggcaggctgcccgggctgaattgtcagaaggccttggcgctgcaaagacaggaggtgctgctgctgtaactgctgcatctgtaaaagctgctgctgaaaagccaactgctgggtagccacctgctgttgctctttaggctgttttccagcatgttgttgttgtaaaagttgaagctgcaactgttcctgttgttttttataaaactcttgaagctgctgctgttgaagcatgagggcctgctgctgctggaggagaacctggagctgctgagggctcagcacttgttgctggaggatctgctgcatttgctggggagtgataacttgaggtgtcatcatagccactgacacgggaacctgaagagctggttgtttgtcattcctcttgggagattttaatccactaacttgctgctgctgttgctgctgaagaaggagctgtcttgccacctgaagtgcctgttgctgctgctgctgggcgtgggcgaggtcagctgccccgatgtccacggccggcgtctctccgttggaccgcccctcccgaagaccgccgcactctagtaagtggttgctgccgcccgacccattctggatggctgaaccgttactttttgtctcagtcccagattcttgcatcatgactcaaaaaccttttttggcttctgtaaagcaatcttcagttatagtcacctcaaaaggtcacgtcttacccctgaaattttaacgtgtctcacagccataaaaagcctggggtcactgggagggggcatgcataatgccacaggactgcaacacacagagggaagccttttggctagcaggcatcacatccatccgttcatggctgacagcaaatcagagaagggatcgaagccctcaccattgccgaaatgttttgttcggaaactggaattgtcaacaaaagcttctgggacaccgcggagtccggggagggagtaggagcgccgccttcacgcccgcggaggaggcgccggcagcaccatggtccccggcgccgctgccgctgcccccggcccgctcgctcgctcgccgcgcgctctcttcctcttacaaactttcgggttcccgctgggcactccagcggccccccgagcgggagcggctccctctttgccgttcgccggggcgctggc

SEQ ID NO: 193 - DNA, 7177 bp, Mus musculus
  source 1..7177: mol_type = genomic DNA
cgtcccaggagcttctgctgactctcctggtttccgagggaaccctttcggccatggtgagggctgcgctcccttctctgccttgcggtcaaccatgagcggatgggtgtgatgcctgctagcctaaagggctccttctgtgtgctgcagtcttgtggcgttctgcaggccccctgccagtgaccccaggctttttatggctgtgagactcattaaaagctcaggggtgagacgtgacctttggaggtgactataactgaagattgaattacagaagccaaaaaattaaataaataaaaggtttttgagtcatgatgcaagaatctgggtctgagacaaaaagtaacggatcagccatccagaacgggtccagcggtggcaaccacttactagagtgcggggcacttcgtgacactcggtccaacggagaggcaccagcggtggacctgggggcagccgaccttgcccacgtccagcagcagcaacagcaggccctgcaggtggcaaggcagctcctccttcagcagcagcaacagcagcagcagcaacagcagcagcagcagcagcagcaacagcagcaacagcagcagcaacaacagcagcagcagcaacagcagcagcagcagcagcaagttagtggattaaagtctcccaagaggaatgacaagcaaccagctcttcaggttcccgtgtcagtggctatgatgacacctcaggttatcactcctcaacaaatgcagcagatcctccagcagcaggtgctgagcccccagcagctccaggttctcctccagcagcagcaggccctcatgcttcaacagcagcttcaagaattttataaaaaacaacaggaacagttgcagcttcaacttctccaacagcaacatgctggaaaacagccgaaagagcagcaggtggctacccagcagttggctttccagcagcagcttctccagatgcagcagctgcagcagcagcacctcttgtctctccagcgccaaggcctcctaacaattcagccggggcagcctgcccttcccctccaacccctcgctcaaggcatgattccaacggaactgcagcagctctggaaagaagtgacaagtgcccacactgcagaggaaaccacaagcagcaaccacagcagcctagacctgaccagcacatgtgtctcgtcctcggcaccttccaagtcctccctaatcatgaacccgcatgcctctaccaatggacagctctcggtccacactcccaaaagggaaagcttgtcccacgaggagcacccccacagccaccctctctatggacatggcgtatgcaagtggccaggctgtgaggcggtttgtgacgacttcccagcctttctaaaacatctcaacagtgagcatgcgctggacgatagaagcacagctcaatgtagagtacaaatgcaggttgtacagcagttagagctacagcttgcaaaagacaaagagcgcctgcaagccatgatgacccacctgcatgtgaagtctacagaacccaaagctgcccctcagcccctgaatctggtatcaagtgtcaccctctccaagtctgcctcagaggcttctccacagagcttacctcatactccaacaacccccaccgcccccctgactcctgtcacccaaggcccctccgtcatcaccaccaccagcatgcacacggtgggacctatccgcaggcggtactcagacaaatacaacgtgcccatttcttcagcagatattgcgcagaaccaagaattttataagaacgcggaagttagaccaccatttacatatgcatctttaatcaggcaggccattctcgaatctccagaaaagcagctaacactaaacgaaatctataactggttcacacgaatgtttgcttacttccgacgcaatgcagccacgtggaagaatgcagtgcgtcataatcttagtctccacaagtgttttgtgcgagtagagaacgttaaaggggcagtatggacagtggatgaagtagagttccaaaaacggaggccacaaaagatcagtggtaacccttcccttattaaaaacatgcagagcagccacgcctactgcacacctctcaatgcagctttacaggcttccatggctgagaatagtatacctctgtacactaccgcttccatgggaaatcccactctgggcagcctggccagtgccatccgggaggagctgaacggggccatggagcacaccaacagcaacgagagtgacagcagtccaggcagatcccctatgcaagctgtgcaccccatacacgtcaaagaagaacccctcgaccccgaggaagctgaaggccctctgtccttagtgacaacagccaaccacagtccagattttgaccatgacagagattacgaagacgaaccagtaaatgaggacatggagtgaacctctgggcgggccgacccccgagaccgaagattggggaaaaaaaagcaaaacaaatttaaaaaaaaaataaaaaaagaaagaaaggaaaagaaaagaaaccacgtcaaaagttagcagtgaaacccgccctccgtttcttgtacagtctggaggattttcgctacattttgacaactctgaaacgtgttaactcttagtgccatcaagaatcccatttgggagtatttttgatttttctactttttgttgacaaaagggatttgtactctgtgcattggatggacctgtttggtacttgggattttcctctttgagtcaacatcagtgttgtaaattcgataaacggattcacttttagcagcagactttgaactgcagcttcgcccggctgatgctgggcgggcgccgaggacacccgactgagctcacgtacctgcgctgcagaccaagccttcgcccgagttcaagactccagtggacgacctttttgcacagcgctgcatgttgataccactgcctttactcactttggtttgttttgtttttgtttttcgcttccagttgggatgggggaaggcctttgtgtgtgtattggggggaggggttaaaaataattatcccaaattttttaatgtattgcttttttttttttcttttactgtttttttttctttctttctttttttttttggcttctttaccattttaagttctgacctcaggcctccatttgggcccagggcctcttggaggcttcgcgttttctgtaccttgtgatgaatgttaataggcgtttttattatacagagctgaatgtcatttctcgtctgtagttttctggcactcattccattttcctatagacatcaccatgtttctctcaagtttaaaacaaaacaaaacaaaacattccgttttggtctttttccaaaaaaaaaaaaagagaaaagaaaagaaaaaaaaagatcccaaaggctgcaccttacacctgaaggtccccacacggggacatgacatcctgccagtaagagaatgaatgacagaaaaggaaagagagaaacgcacgcgcgcacactctagggacatggcagattcatttcacaaaaacagtattgggggtgggatgggggactgttggaggtttttcttttttttctttttcatagcacccaccattgtgagtaactgccaccacattctctcagcatcaggaaacacagccacgaaagaaacagaagagaataaacaatcctcaatagttagactgtcacagtggccatggaagatcttccctcctataatcaggtgaccaggaccacaggccctgtgccatcctcacccgcacaggttgctctgtttgcaaaatgaccaaaaagccagcatggtgacagggctaagtttgtacagtagttcagacctgctcggtggcattcatctgttttaatgcaaatgagacttcacattgaacttgttatgggagttaatgaggactgagctcagcagacgctaatgtgtcaggttccagtgtgctaagtcggtactgcagcttggtctgcaatgtgagcaccacacccaccaccccagtagcacagacttcacggaagaggacaccaggtagacagaccagggcccacagaatgagatggctctaggtcaatatgccctcggcccttcaaacccctccacatttccgtctgcacccgcttccctggcatgtatttatctggggctgtagcttttgtttgggtttagtttgagagcctttcggagcttaatttatatactttgtacctttttttatttctaaaattaccaaagatattacgcaaaggtaaattattttcttttatactttatctgatgaagccaaatatcctcttattgttgatcaaaggaggcgaaaggattcagaggcaaatgatgaggtccaggctatttgccaacctgagggaaattactgcccgtcagcagagttcatttagcagactatgtaggcaatggaaccaaagttttttactttttttttcctgttttttttttttttctctttccttcttttctctacctgtagagagaccaaaactaactcctataaggagaaaatccggggctactgcagagaaaagaaatcaagacaacagtattatagctcctgtggaaagaatgggctagcatctcaaagaaaaagaaatgaatgtatgatgctgaaaattagtatataatcgaggagacacttaggatgaattcagagagaacggagaagtgtctggccgctcgaggccacttctagaataaagagatttttagaacattcgtacgccacttttgtttaagggctgtgctctgatcactgcgttaatcttggtttatcctggcatttatcctctggtttccttctgctttttgttgatgttttgttttatttttttcctatttcagattatgatttggtcagtgtttttcatttacacacaaaaaaagctaacattcccacccactcataagcttagagtagaacacctttggcaatgacttctgaaggtttgctctgctttctatagaggggcggtctgtggttattcatgccccctccaccaccaccccacccatcttttccaggcagcttcacagtgtgcaggcagtagccaggccgggtcatgggaagggggccctgtgcttctaaactgagtggttgctggttagatatacaaaagaggataaaactctggtaggttagttcattctcagcatgtgtagctagacaagagtaaagataacagcatggggactgttagtacgcacacctcagttcaaacctttagggaatgagtttaaaaaaaaaattaaaaatatacctttcactcagtcgtacttagtcgtatgtcttgcatgcttagtctaaagactgtagcaaagaaaataaataaaagagaaaaaattagattttatgtatcttttcaggtgtcatagcctggcagaagaaccaactgaaaaaaaaaaaaaaagttctcaggctttacagcaagcaatcttcactctgatttttagaattctgattctgtccctcggggggttcccgcttcgtttgaatggggttgattcggttgtacatatatcccgatgtgtctgtgtgcatctttgtcttttgcgggggagggccgaggggagggtttttttggtttcgttttgttttgttttgttttaattattttattttttaggtattgttcctaaaaaggaataaatgcatacacctgtttgtcaaaacatctttgctttttgtgcaactgcattttattaataatacatttaaaaaaagaagaggaagaaggaaaagaaaatagtatctttgagggaaaaaagtctactgtctgtaatggctttgcagttaatgctgcgtgtgtacttcattttattgcccttgatttacaaacattggatgacatgttgataatgggaagaaagaaaaactccacacacacatctctttctttccctccccctcctctctctctcaaattgtaacatagttgacaaaatgtgtttcctatcctcattatttggaacattttgtacaggtttgtggaatgggggtgagagagtgagtgtgtgagtgagtgtgtgttactgtttttgatacattcctagtccttgtgttttatcataccactgcctccttgactatcttaagttcctaagtttgaaaaaaggaaaaaaaaaaagttgtttaaaaaaaaaaatgttctctcttgctgcagtcaatatttttgcatgatgaaattccaggctcatactttcaaagttttatgagtaaagtagtgattaataatggggagtgttgaaatattgaactttttgtataaaaaaaatttttttacaaggtcccaaggtgtaaagacaatttgttacctttttctttctcttcttagtaaatattagcaaacgtgagggaggtcagcctgtgtcagacacacacagtcactgatgaggacccaccctccatgagcttaggggtctattcatgtgagaaggcttacagccatctcagggtgaacagcctaggcttacctgcatggtgacctagctgacaatcccctccccacatcaaaagacagttgagttcatattcctagcatctcatcagccataataagagaaagccttggtttaaaaaaataaaacaaaatgatagagccaaaagcattataaatcactagctctttttatttatttatttttttcagttacaatattgaagtctctcctctcttttccacattctagctgagctctctgtctccaagggcataaagcaaactctgctatttgaatcttgttggtacctgttggccagtgccataccctcctgacagtctggaagtgttttgcaacttggttttcctttattatcatgagaagcaaatggacaattctaacggcgtcttgtgggtccactgtaactcgaagcggtccctgctacccaggagcctgggtggagacggtgcggtctgggttgtgagtgtggtgctctttgtatctgtgctgccgctaacagggatcgttttgttttgttttgataagacataaaagaatctcattccttgatatcaactgtaattccaccattccatgtctgtggacacagacaataaaaaaaaatgttgtgtagtcagtagtaattactgacatgagcgcattcttaaatgcaataaaagtgctggtggttcacactggtagacaaagtt

SEQ ID NO: 194 - DNA, 7177 bp, Mus musculus
  source 1..7177: mol_type = genomic DNA
aactttgtctaccagtgtgaaccaccagcacttttattgcatttaagaatgcgctcatgtcagtaattactactgactacacaacatttttttttattgtctgtgtccacagacatggaatggtggaattacagttgatatcaaggaatgagattcttttatgtcttatcaaaacaaaacaaaacgatccctgttagcggcagcacagatacaaagagcaccacactcacaacccagaccgcaccgtctccacccaggctcctgggtagcagggaccgcttcgagttacagtggacccacaagacgccgttagaattgtccatttgcttctcatgataataaaggaaaaccaagttgcaaaacacttccagactgtcaggagggtatggcactggccaacaggtaccaacaagattcaaatagcagagtttgctttatgcccttggagacagagagctcagctagaatgtggaaaagagaggagagacttcaatattgtaactgaaaaaaataaataaataaaaagagctagtgatttataatgcttttggctctatcattttgttttatttttttaaaccaaggctttctcttattatggctgatgagatgctaggaatatgaactcaactgtcttttgatgtggggaggggattgtcagctaggtcaccatgcaggtaagcctaggctgttcaccctgagatggctgtaagccttctcacatgaatagacccctaagctcatggagggtgggtcctcatcagtgactgtgtgtgtctgacacaggctgacctccctcacgtttgctaatatttactaagaagagaaagaaaaaggtaacaaattgtctttacaccttgggaccttgtaaaaaaattttttttatacaaaaagttcaatatttcaacactccccattattaatcactactttactcataaaactttgaaagtatgagcctggaatttcatcatgcaaaaatattgactgcagcaagagagaacatttttttttttaaacaactttttttttttccttttttcaaacttaggaacttaagatagtcaaggaggcagtggtatgataaaacacaaggactaggaatgtatcaaaaacagtaacacacactcactcacacactcactctctcacccccattccacaaacctgtacaaaatgttccaaataatgaggataggaaacacattttgtcaactatgttacaatttgagagagagaggagggggagggaaagaaagagatgtgtgtgtggagtttttctttcttcccattatcaacatgtcatccaatgtttgtaaatcaagggcaataaaatgaagtacacacgcagcattaactgcaaagccattacagacagtagacttttttccctcaaagatactattttcttttccttcttcctcttctttttttaaatgtattattaataaaatgcagttgcacaaaaagcaaagatgttttgacaaacaggtgtatgcatttattcctttttaggaacaatacctaaaaaataaaataattaaaacaaaacaaaacaaaacgaaaccaaaaaaaccctcccctcggccctcccccgcaaaagacaaagatgcacacagacacatcgggatatatgtacaaccgaatcaaccccattcaaacgaagcgggaaccccccgagggacagaatcagaattctaaaaatcagagtgaagattgcttgctgtaaagcctgagaactttttttttttttttcagttggttcttctgccaggctatgacacctgaaaagatacataaaatctaattttttctcttttatttattttctttgctacagtctttagactaagcatgcaagacatacgactaagtacgactgagtgaaaggtatatttttaattttttttttaaactcattccctaaaggtttgaactgaggtgtgcgtactaacagtccccatgctgttatctttactcttgtctagctacacatgctgagaatgaactaacctaccagagttttatcctcttttgtatatctaaccagcaaccactcagtttagaagcacagggcccccttcccatgacccggcctggctactgcctgcacactgtgaagctgcctggaaaagatgggtggggtggtggtggagggggcatgaataaccacagaccgcccctctatagaaagcagagcaaaccttcagaagtcattgccaaaggtgttctactctaagcttatgagtgggtgggaatgttagctttttttgtgtgtaaatgaaaaacactgaccaaatcataatctgaaataggaaaaaaataaaacaaaacatcaacaaaaagcagaaggaaaccagaggataaatgccaggataaaccaagattaacgcagtgatcagagcacagcccttaaacaaaagtggcgtacgaatgttctaaaaatctctttattctagaagtggcctcgagcggccagacacttctccgttctctctgaattcatcctaagtgtctcctcgattatatactaattttcagcatcatacattcatttctttttctttgagatgctagcccattctttccacaggagctataatactgttgtcttgatttcttttctctgcagtagccccggattttctccttataggagttagttttggtctctctacaggtagagaaaagaaggaaagagaaaaaaaaaaaaaacaggaaaaaaaaagtaaaaaactttggttccattgcctacatagtctgctaaatgaactctgctgacgggcagtaatttccctcaggttggcaaatagcctggacctcatcatttgcctctgaatcctttcgcctcctttgatcaacaataagaggatatttggcttcatcagataaagtataaaagaaaataatttacctttgcgtaatatctttggtaattttagaaataaaaaaaggtacaaagtatataaattaagctccgaaaggctctcaaactaaacccaaacaaaagctacagccccagataaatacatgccagggaagcgggtgcagacggaaatgtggaggggtttgaagggccgagggcatattgacctagagccatctcattctgtgggccctggtctgtctacctggtgtcctcttccgtgaagtctgtgctactggggtggtgggtgtggtgctcacattgcagaccaagctgcagtaccgacttagcacactggaacctgacacattagcgtctgctgagctcagtcctcattaactcccataacaagttcaatgtgaagtctcatttgcattaaaacagatgaatgccaccgagcaggtctgaactactgtacaaacttagccctgtcaccatgctggctttttggtcattttgcaaacagagcaacctgtgcgggtgaggatggcacagggcctgtggtcctggtcacctgattataggagggaagatcttccatggccactgtgacagtctaactattgaggattgtttattctcttctgtttctttcgtggctgtgtttcctgatgctgagagaatgtggtggcagttactcacaatggtgggtgctatgaaaaagaaaaaaaagaaaaacctccaacagtcccccatcccacccccaatactgtttttgtgaaatgaatctgccatgtccctagagtgtgcgcgcgtgcgtttctctctttccttttctgtcattcattctcttactggcaggatgtcatgtccccgtgtggggaccttcaggtgtaaggtgcagcctttgggatctttttttttcttttcttttctctttttttttttttggaaaaagaccaaaacggaatgttttgttttgttttgttttaaacttgagagaaacatggtgatgtctataggaaaatggaatgagtgccagaaaactacagacgagaaatgacattcagctctgtataataaaaacgcctattaacattcatcacaaggtacagaaaacgcgaagcctccaagaggccctgggcccaaatggaggcctgaggtcagaacttaaaatggtaaagaagccaaaaaaaaaaagaaagaaagaaaaaaaaacagtaaaagaaaaaaaaaaaagcaatacattaaaaaatttgggataattatttttaacccctccccccaatacacacacaaaggccttcccccatcccaactggaagcgaaaaacaaaaacaaaacaaaccaaagtgagtaaaggcagtggtatcaacatgcagcgctgtgcaaaaaggtcgtccactggagtcttgaactcgggcgaaggcttggtctgcagcgcaggtacgtgagctcagtcgggtgtcctcggcgcccgcccagcatcagccgggcgaagctgcagttcaaagtctgctgctaaaagtgaatccgtttatcgaatttacaacactgatgttgactcaaagaggaaaatcccaagtaccaaacaggtccatccaatgcacagagtacaaatcccttttgtcaacaaaaagtagaaaaatcaaaaatactcccaaatgggattcttgatggcactaagagttaacacgtttcagagttgtcaaaatgtagcgaaaatcctccagactgtacaagaaacggagggcgggtttcactgctaacttttgacgtggtttcttttcttttcctttctttctttttttattttttttttaaatttgttttgcttttttttccccaatcttcggtctcgggggtcggcccgcccagaggttcactccatgtcctcatttactggttcgtcttcgtaatctctgtcatggtcaaaatctggactgtggttggctgttgtcactaaggacagagggccttcagcttcctcggggtcgaggggttcttctttgacgtgtatggggtgcacagcttgcataggggatctgcctggactgctgtcactctcgttgctgttggtgtgctccatggccccgttcagctcctcccggatggcactggccaggctgcccagagtgggatttcccatggaagcggtagtgtacagaggtatactattctcagccatggaagcctgtaaagctgcattgagaggtgtgcagtaggcgtggctgctctgcatgtttttaataagggaagggttaccactgatcttttgtggcctccgtttttggaactctacttcatccactgtccatactgcccctttaacgttctctactcgcacaaaacacttgtggagactaagattatgacgcactgcattcttccacgtggctgcattgcgtcggaagtaagcaaacattcgtgtgaaccagttatagatttcgtttagtgttagctgcttttctggagattcgagaatggcctgcctgattaaagatgcatatgtaaatggtggtctaacttccgcgttcttataaaattcttggttctgcgcaatatctgctgaagaaatgggcacgttgtatttgtctgagtaccgcctgcggataggtcccaccgtgtgcatgctggtggtggtgatgacggaggggccttgggtgacaggagtcaggggggcggtgggggttgttggagtatgaggtaagctctgtggagaagcctctgaggcagacttggagagggtgacacttgataccagattcaggggctgaggggcagctttgggttctgtagacttcacatgcaggtgggtcatcatggcttgcaggcgctctttgtcttttgcaagctgtagctctaactgctgtacaacctgcatttgtactctacattgagctgtgcttctatcgtccagcgcatgctcactgttgagatgttttagaaaggctgggaagtcgtcacaaaccgcctcacagcctggccacttgcatacgccatgtccatagagagggtggctgtgggggtgctcctcgtgggacaagctttcccttttgggagtgtggaccgagagctgtccattggtagaggcatgcgggttcatgattagggaggacttggaaggtgccgaggacgagacacatgtgctggtcaggtctaggctgctgtggttgctgcttgtggtttcctctgcagtgtgggcacttgtcacttctttccagagctgctgcagttccgttggaatcatgccttgagcgaggggttggaggggaagggcaggctgccccggctgaattgttaggaggccttggcgctggagagacaagaggtgctgctgctgcagctgctgcatctggagaagctgctgctggaaagccaactgctgggtagccacctgctgctctttcggctgttttccagcatgttgctgttggagaagttgaagctgcaactgttcctgttgttttttataaaattcttgaagctgctgttgaagcatgagggcctgctgctgctggaggagaacctggagctgctgggggctcagcacctgctgctggaggatctgctgcatttgttgaggagtgataacctgaggtgtcatcatagccactgacacgggaacctgaagagctggttgcttgtcattcctcttgggagactttaatccactaacttgctgctgctgctgctgctgttgctgctgctgctgttgttgctgctgctgttgctgctgttgctgctgctgctgctgctgctgttgctgctgctgctgttgctgctgctgaaggaggagctgccttgccacctgcagggcctgctgttgctgctgctggacgtgggcaaggtcggctgcccccaggtccaccgctggtgcctctccgttggaccgagtgtcacgaagtgccccgcactctagtaagtggttgccaccgctggacccgttctggatggctgatccgttactttttgtctcagacccagattcttgcatcatgactcaaaaaccttttatttatttaattttttggcttctgtaattcaatcttcagttatagtcacctccaaaggtcacgtctcacccctgagcttttaatgagtctcacagccataaaaagcctggggtcactggcagggggcctgcagaacgccacaagactgcagcacacagaaggagccctttaggctagcaggcatcacacccatccgctcatggttgaccgcaaggcagagaagggagcgcagccctcaccatggccgaaagggttccctcggaaaccaggagagtcagcagaagctcctgggacg

SEQ ID NO: 195 - DNA, 2214 bp, Rattus norvegicus
  source 1..2214: mol_type = genomic DNA
aggtttttgagtcatgatgcaagaatctgggtctgaggcaaaaagtaacggatcaaccatccagaacgggtccagcggtggcaaccacttactagagtgcgggacacttcgtgacactcggtccaacggagaggcaccagcggtggacctgggagcagccgaccttgcccacgtccagcagcagcagcagcaggccctgcaggtggcaaggcagctcctccttcaacagcagcaacagcagcagcagcagcagcaacaacaacagcagcagcagcagcaacagcagcagcagcagcagcagcagcagcagcaacagcagcaacagcaacaacagcagcaagttagtggattaaagtctccgaagaggaatgacaagcaaccagctcttcaggttcccgtgtcagtggctatgatgacacctcaggttatcactcctcaacaaatgcagcagatcctccagcagcaagtgctgagcccacagcagctccaggttctcctccagcaacagcaggccctcatgcttcaacagcagcagcttcaagaattttacaagaaacaacaggaacagttgcagcttcaactcctccaacagcaacatgctggaaaacagccgaaagagcagcagcagcagcaggtggctacccagcagttggctttccagcagcagcttcttcagatgcagcagctgcagcagcagcacctcctgtctctccagcggcaaggccttctaacaattcagcccgggcagcctgcccttcccctccaacctcttgctcaaggcatgattccaacggaactgcagcagctctggaaagaagtgacaagtgcccacactgcagaggaaaccacaggcagcaaccacagcagcctagacctgaccagcacatgcgtctcgtcctccgcaccttccaagacctccctaatcatgaacccacacgcctctaccaatggacagctctcggtccacacccccaaaagggaaagcttgtcccacgaggagcacccccacagccaccctctctacggacatggtgtctgcaagtggccaggctgtgaagcagtttgtgacgacttcccggcctttctaaaacatctcaacagtgagcatgcgctggacgatagaagcacagctcaatgtagagtacaaatgcaggttgtacagcagttagagctacagcttgcaaaagacaaagagcgcctgcaagccatgatgacccacctgcatgtgaagtctacagaacccaaagctgcccctcagcccctgaatctggtatcaagtgtcaccctctccaagtccgcctcagaggcttctccacagagcttacctcatactccaacaaccccaaccgcccccctgactcccgtcacccaaggcccctctgtcatcaccaccaccagcatgcacacggtgggacctatccgcaggcggtactcagacaaatacaacgtgcccatttcttcagcagatattgcgcagaaccaagaattttataagaacgcggaagttagaccaccatttacatatgcatctttaattaggcaggccattcttgaatctccagaaaagcagctaacactaaacgaaatctataactggttcacacgaatgtttgcttacttccgacgcaatgcagccacgtggaagaatgcagtgcgtcataatcttagtctccacaagtgttttgtgcgagtagagaacgttaaaggggcagtatggacagtggatgaagtagagttccaaaaacggaggccacaaaagatcagtggtaacccttcccttattaaaaacatgcagagcggccacgcctactgcacacctctcaatgcagctttacaggcttccatggctgagaacagtatacctctgtacactaccgcctccatggggaaccccacgctgggcagcctggccagcgccatccgggaggagctgaacggggccatggagcacaccaacagcaacgagagtgacagcagtccaggcagatcccctatgcaagctgtgcaccccatacacgtcaaggaggaacccctcgaccccgaggaagctgaagggcctctgtccttagtgacaacagccaaccacagtccagattttgaccacgacagagattacgaagacgaacctgtaaacgaggacatggagtgaacccttgggcgggccgacccccgagaccgaagattgggaaagaagcaaaacaaattaaaaaaaaa

SEQ ID NO: 196 - DNA, 2214 bp, Rattus norvegicus
  source 1..2214: mol_type = genomic DNA
tttttttttaatttgttttgcttctttcccaatcttcggtctcgggggtcggcccgcccaagggttcactccatgtcctcgtttacaggttcgtcttcgtaatctctgtcgtggtcaaaatctggactgtggttggctgttgtcactaaggacagaggcccttcagcttcctcggggtcgaggggttcctccttgacgtgtatggggtgcacagcttgcataggggatctgcctggactgctgtcactctcgttgctgttggtgtgctccatggccccgttcagctcctcccggatggcgctggccaggctgcccagcgtggggttccccatggaggcggtagtgtacagaggtatactgttctcagccatggaagcctgtaaagctgcattgagaggtgtgcagtaggcgtggccgctctgcatgtttttaataagggaagggttaccactgatcttttgtggcctccgtttttggaactctacttcatccactgtccatactgcccctttaacgttctctactcgcacaaaacacttgtggagactaagattatgacgcactgcattcttccacgtggctgcattgcgtcggaagtaagcaaacattcgtgtgaaccagttatagatttcgtttagtgttagctgcttttctggagattcaagaatggcctgcctaattaaagatgcatatgtaaatggtggtctaacttccgcgttcttataaaattcttggttctgcgcaatatctgctgaagaaatgggcacgttgtatttgtctgagtaccgcctgcggataggtcccaccgtgtgcatgctggtggtggtgatgacagaggggccttgggtgacgggagtcaggggggcggttggggttgttggagtatgaggtaagctctgtggagaagcctctgaggcggacttggagagggtgacacttgataccagattcaggggctgaggggcagctttgggttctgtagacttcacatgcaggtgggtcatcatggcttgcaggcgctctttgtcttttgcaagctgtagctctaactgctgtacaacctgcatttgtactctacattgagctgtgcttctatcgtccagcgcatgctcactgttgagatgttttagaaaggccgggaagtcgtcacaaactgcttcacagcctggccacttgcagacaccatgtccgtagagagggtggctgtgggggtgctcctcgtgggacaagctttcccttttgggggtgtggaccgagagctgtccattggtagaggcgtgtgggttcatgattagggaggtcttggaaggtgcggaggacgagacgcatgtgctggtcaggtctaggctgctgtggttgctgcctgtggtttcctctgcagtgtgggcacttgtcacttctttccagagctgctgcagttccgttggaatcatgccttgagcaagaggttggaggggaagggcaggctgcccgggctgaattgttagaaggccttgccgctggagagacaggaggtgctgctgctgcagctgctgcatctgaagaagctgctgctggaaagccaactgctgggtagccacctgctgctgctgctgctctttcggctgttttccagcatgttgctgttggaggagttgaagctgcaactgttcctgttgtttcttgtaaaattcttgaagctgctgctgttgaagcatgagggcctgctgttgctggaggagaacctggagctgctgtgggctcagcacttgctgctggaggatctgctgcatttgttgaggagtgataacctgaggtgtcatcatagccactgacacgggaacctgaagagctggttgcttgtcattcctcttcggagactttaatccactaacttgctgctgttgttgctgttgctgctgttgctgctgctgctgctgctgctgctgctgctgttgctgctgctgctgctgttgttgttgctgctgctgctgctgctgttgctgctgttgaaggaggagctgccttgccacctgcagggcctgctgctgctgctgctggacgtgggcaaggtcggctgctcccaggtccaccgctggtgcctctccgttggaccgagtgtcacgaagtgtcccgcactctagtaagtggttgccaccgctggacccgttctggatggttgatccgttactttttgcctcagacccagattcttgcatcatgactcaaaaacct

SEQ ID NO: 197 - DNA, 6288 bp, Macaca fascicularis
  source 1..6288: mol_type = genomic DNA
tgccccttgaaaatggattgctaggaaatcatttcctggtctctaactggaccagctgagttagagaggaacatttgcattggatactccaccccttcccaaagtggagaaggcaggcgtggaagcactgtgaggctcagaagggagatgaggcagtaaaccagatctttcccattttttccccctagcctagtcctctgtttctatgatctgccttttgaactgtttttgtggctgatcagttccacctaatatgtctcttgatttctgctattgtaatactcaggcgacatgctgttctcttcatttttataagctttagatgcttctgcctgtcattttctggcggtttatcttcagcgtctggatttgctttcagacttgaatgtctatcaagctgccgttgctttgaatgtgagatcaaaagaagatgaattccagtaaaaaatttccttctatgaagaaaagattggggcctatgtaaacatcccactgacagctcccaatgagttattttagccgagtattagcacctggatgacagacagtccagcattccactctaaataacaaatcagtagcttccgtggcagaagaacattgccacaagagcaatacattatcagaaggaatccttttcttcctttttttttttttttttttttgttattgaatatggctgttcaactcttcctcttatttttcaagctgacttgctgtgcctttaccagtttacttttctttacagtatctgttgaattactccggtgacggaagacaggactgtgataatcattttggggcgggttaaggagtgttccagtaggcaagctaggcatctggaaataaacaggtagtttggttgatggtggagaaagaaaatataaaggacagccagtcaaagccagatccagggcatatctctggaatacgggacgatatgttctttaaaaatacatgtgacaaaatcctctaaagtctgcaaaatctgaattttcttcttctttttttttttttttttttaaagcatcctgcctatgtaaatgtcaccacaaaaatatctcaagagcaggtttcccgaaaccctgttggtgtgtatttgtctgcgtgaatgagctgtgtttggctagggcttggtctagccagggcacactgcgtgtgctgtgtcgctgcttgcagacctggagcggtttagatacgtgtggcattaatagatttctttaagtgctaaatgcaactttgaaaattacctgcaagctccaactgatctttcaactttgaaagtgaagaattacttgaggaattcttgtggtttctttgtcatttagtgagagcccagccagctactgtggaggcaaacctccctgaggttgcctacaaagggcaatgttccagtgtgttttctcttcgagtgtgcttcagccgcacagtacttcctgtttattcaaacatcttttttaccactcggcaacccccgcttcgcagaaacagccagaacccatctacagcaagaagacggaaatccaaaggcagacagtacgggctcccttcgccaaactcttcattttctctgcacttcaggtggcaagacagctcctccttcagcagcaacagcagcagcaagttagtggattaaaatctcccaagaggaatgacaaacaaccagctcttcaggttcccgtgtcagtggctatgatgacacctcaagttatcactccccagcaaatgcagcagatcctccagcaacaagtgctgagccctcagcagctccaggttctccttcagcagcagcaggccctcatgcttcaacagcagcagcttcaagagttttataaaaaacaacaggaacagttgcagcttcaacttttacaacaacaacatgctggaaaacagcctaaagagcaacagcaggtggctacccagcagttggcttttcagcagcagcttttacagatgcagcagttacagcagcagcacctcctgtcgttgcagcgccaaggccttctgacaattcagcccgggcagcctgcccttccccttcaacctcttgctcaaggcatgattccaacagaactgcagcagctctggaaagaagtgacaagtgctcatactgcagaagaaaccacaggcaacaatcacagcagtttggatctgaccacgacatgtgtctcctcctctgcaccttccaagacctccttaataatgaacccacatgcctctactaatggacagctctcagtccacactcccaaaagggaaagtttgtcccatgaggagcacccccatagccatcctctctatggacatggtgtatgcaagtggccaggctgtgaagcagtgtgcgaagatttccaatcatttctaaaacatctcaacagtgagcatgcgctggacgatagaagtacagcccaatgtagagtacaaatgcaggttgtacagcagttagagctacagcttgcgaaagacaaagagcgcctgcaagccatgatgacccacctgcatgtgaagtctacagaacccaaagccgcccctcagcccttgaatctggtatcaagtgtcactctctccaagtccgcgtcagaggcttctccacagagcttacctcatactccaacgaccccaaccgcccccctgactcccgtcacccaaggcccctccgtcatcaccaccaccagcatgcacacggtgggacccatccgcaggcggtactcagacaaatacaacgtgcccatttcgtcagcagatattgcgcagaaccaagaattttataagaacgcagaagttagaccaccatttacatatgcatctttaattaggcaggccattctcgaatctccagaaaagcagctaacactaaatgaaatctataactggttcacacgaatgtttgcttacttccggcgcaacgcggccacgtggaagaatgcagtgcgtcataatcttagtcttcacaagtgttttgtgcgagtagaaaacgttaaaggggcagtatggacagtggatgaagtagaattccaaaaacgaaggccacaaaagatcagtggtaacccttcccttattaaaaacatgcagagcagccacgcctactgcacacctctcaatgcagctttacaggcttcaatggctgagaatagtatacctctatacactaccgcttccatgggaaatcccactctgggcaacttagccagcgcaatacgggaagagctgaatggggcaatggagcataccaacagcaacgagagtgacagcagtccaggcagatctcctatgcaagccgtgcatcctgtacacgtcaaagaagagcccctcgatccagaggaagctgaagggcccctgtccttagtgacaacagccaaccacagtccagattttgaccatgacagagattacgaagatgaaccagtaaacgaggacatggagtgaatatcggggcgggccaaccccgagagtgaagattggaaaaaggaaaaaacaaaacaaaacaaaacacgtcaaaagttagcagtgaaattgttctccatttgttgtacagtctggaggattttcactacattttgacaactctgaaatgtgttaactcttagtgccatcaagaaccccatttgggagtatttttgatttttctactttttgttgaaaaaaggaatttgtactctgtgcattggatggacttgtttggtacttgggattttcctctcttaaccgtcaacatcagtgttgtaaatttgctaaactgattcacttttagcagcagactttgaactgcagtcctgccaacgttggacactgaggacgcccgacggagcttgtgcacctaagctgcagaccaagcctttgcccaggatttaaggattccaatggacgacctatttgcacagtactgcatgttgattatcactgcctttactccatttttttttttttttttttttttttttttttgcttccagttgggatggggaaggcctttgtgtgtgtattgggggaaggggttaaaaaataattatcccaaactttttaatgtattgctttttttttttttcttctactataccattttaagttctgacctcaggcctccatttgggccgatggcctcttggaggcttaaagttttctgtaccttgtgatgaatgttaataggtgtttttattatacaaagctgaatgtcatttctcgtttgtagctttctgtcactcattccatcttccttcagacatcaccatgtttctctaaagtcagaaaacattccgttttggtctttttcaaaaaggtcccaaatgctgcactctacacatgaaggccctctcacacagacgtgacgtcctgccagaaagagaatgaatgacagaaaaaaaaaaacagagagagacatactctaggaacaatgccgattcattccacgcagcagtattgggggtggctgggggaggggtgttttggaattttttttttttttttgcagcaaccatcattcttaataaatgccaccacattctaccagcacaaggaaacataggcagcactgaaaaaaaaaattaaaaaaactaatagtaattagactgacaatatggccttggaaggctctcccttgtggaaccaagttgccatgggccttgggccctctgtgataacgagtgtgggttggttttgtttgcaaaatggccaaaacctcggtttccctgagcagctgccctgaaagtaggggtggcagcggcactgagtttatacattagttcaaacctacttggtggcattaaacggtttgaatgcaaattcgatttcagattgaacttgttaagggagttaatgaggactgaattcagcaaatgctaaagtgtcaatttcaaatatgcaaatttggtactgcagtttgttatgcaatattatgtcaccaacccagtatcacaaaaactcatagaagatatcattaggccctgggctttgggggtcccaaacatggtatgcagaatgtgatggttacaggtcagtacaacctcagtccttagaacccctccacacttccactctgcacccactttcctgtcatttatttatataggactatagttttttttttagtttgagagcctttcgaagcttaatttatattctttgtacctttttttctaaaattaccaaagatattacacaaaggtaaattatgttctctgttttatgctttatctgatgaagccaaatatcctcttattgttgatcaaaggaggcaaaagaatttagaggcaaatgacaagcgataggctattgcaacctgagaaagagaactgctccttcatcgcaaatttagaagaccaagtagataatcgaaccaaagttgttacttttttctagtatttttcctttttctttttgtgtacctctacagagaccaaaactcattctcttaaagagattttatgggactactgcagataaaaataggacacaatattaaaggagctacagaaggaaggcagtcccatctcaaaaaaaatgaatgtatgccactgcaatttagaggatccaataaaggagacagtttagagtcagaacagaaaagcttccataattgaactagatcacataataatatttctagaagaagagacgtttttagattgtatgccacttttgtttaagaactgtgctgtgatcactgtattaattttggtttatcttggcatatatccttcagtttgtttttttaatttttccttttttttccgattaggctttggtcagcatttttcatttcaagaaaagtaacactcccatccactcataagcttggtacaaaaacttctctggcagttacttttgaagcttcactctgctttctgtataaagggcagtctgtggtcacgcaagacttttaaaaaaaaaaaaaaaaaaaaaaaaaaaaaaacttttccaggcagcttcatgatgtgcaggcagtagccagacagggtcatgggaagggggccctgtgcttctaaactgagtggttgctggttagtttggtattcaaaagaggataaaaatctggtagattagttcattctcagcatgtgtagctagacatgagtaaagataacagcatgagaaactgttagtacgcatacctcagttcaaacctttagggaatgattaaaattaaaaaaaaaaaaaacatttcactcagttgcacttagtcgtatgtcttgcatgcttagtctaaagactgtagcaaaaaaaaaaaaaaaaaaagaaaaattagattttacatatctttgcaggtatcacagccttgcagaagaaccaact

SEQ ID NO: 198 - DNA, 6288 bp, Macaca fascicularis
  source 1..6288: mol_type = genomic DNA
agttggttcttctgcaaggctgtgatacctgcaaagatatgtaaaatctaatttttctttttttttttttttttttgctacagtctttagactaagcatgcaagacatacgactaagtgcaactgagtgaaatgttttttttttttttaattttaatcattccctaaaggtttgaactgaggtatgcgtactaacagtttctcatgctgttatctttactcatgtctagctacacatgctgagaatgaactaatctaccagatttttatcctcttttgaataccaaactaaccagcaaccactcagtttagaagcacagggcccccttcccatgaccctgtctggctactgcctgcacatcatgaagctgcctggaaaagtttttttttttttttttttttttttttttttaaaagtcttgcgtgaccacagactgccctttatacagaaagcagagtgaagcttcaaaagtaactgccagagaagtttttgtaccaagcttatgagtggatgggagtgttacttttcttgaaatgaaaaatgctgaccaaagcctaatcggaaaaaaaaggaaaaattaaaaaaacaaactgaaggatatatgccaagataaaccaaaattaatacagtgatcacagcacagttcttaaacaaaagtggcatacaatctaaaaacgtctcttcttctagaaatattattatgtgatctagttcaattatggaagcttttctgttctgactctaaactgtctcctttattggatcctctaaattgcagtggcatacattcattttttttgagatgggactgccttccttctgtagctcctttaatattgtgtcctatttttatctgcagtagtcccataaaatctctttaagagaatgagttttggtctctgtagaggtacacaaaaagaaaaaggaaaaatactagaaaaaagtaacaactttggttcgattatctacttggtcttctaaatttgcgatgaaggagcagttctctttctcaggttgcaatagcctatcgcttgtcatttgcctctaaattcttttgcctcctttgatcaacaataagaggatatttggcttcatcagataaagcataaaacagagaacataatttacctttgtgtaatatctttggtaattttagaaaaaaaggtacaaagaatataaattaagcttcgaaaggctctcaaactaaaaaaaaaactatagtcctatataaataaatgacaggaaagtgggtgcagagtggaagtgtggaggggttctaaggactgaggttgtactgacctgtaaccatcacattctgcataccatgtttgggacccccaaagcccagggcctaatgatatcttctatgagtttttgtgatactgggttggtgacataatattgcataacaaactgcagtaccaaatttgcatatttgaaattgacactttagcatttgctgaattcagtcctcattaactcccttaacaagttcaatctgaaatcgaatttgcattcaaaccgtttaatgccaccaagtaggtttgaactaatgtataaactcagtgccgctgccacccctactttcagggcagctgctcagggaaaccgaggttttggccattttgcaaacaaaaccaacccacactcgttatcacagagggcccaaggcccatggcaacttggttccacaagggagagccttccaaggccatattgtcagtctaattactattagtttttttaattttttttttcagtgctgcctatgtttccttgtgctggtagaatgtggtggcatttattaagaatgatggttgctgcaaaaaaaaaaaaaaaattccaaaacacccctcccccagccacccccaatactgctgcgtggaatgaatcggcattgttcctagagtatgtctctctctgtttttttttttctgtcattcattctctttctggcaggacgtcacgtctgtgtgagagggccttcatgtgtagagtgcagcatttgggacctttttgaaaaagaccaaaacggaatgttttctgactttagagaaacatggtgatgtctgaaggaagatggaatgagtgacagaaagctacaaacgagaaatgacattcagctttgtataataaaaacacctattaacattcatcacaaggtacagaaaactttaagcctccaagaggccatcggcccaaatggaggcctgaggtcagaacttaaaatggtatagtagaagaaaaaaaaaaaaagcaatacattaaaaagtttgggataattattttttaaccccttcccccaatacacacacaaaggccttccccatcccaactggaagcaaaaaaaaaaaaaaaaaaaaaaaaaaaaaaatggagtaaaggcagtgataatcaacatgcagtactgtgcaaataggtcgtccattggaatccttaaatcctgggcaaaggcttggtctgcagcttaggtgcacaagctccgtcgggcgtcctcagtgtccaacgttggcaggactgcagttcaaagtctgctgctaaaagtgaatcagtttagcaaatttacaacactgatgttgacggttaagagaggaaaatcccaagtaccaaacaagtccatccaatgcacagagtacaaattccttttttcaacaaaaagtagaaaaatcaaaaatactcccaaatggggttcttgatggcactaagagttaacacatttcagagttgtcaaaatgtagtgaaaatcctccagactgtacaacaaatggagaacaatttcactgctaacttttgacgtgttttgttttgttttgttttttcctttttccaatcttcactctcggggttggcccgccccgatattcactccatgtcctcgtttactggttcatcttcgtaatctctgtcatggtcaaaatctggactgtggttggctgttgtcactaaggacaggggcccttcagcttcctctggatcgaggggctcttctttgacgtgtacaggatgcacggcttgcataggagatctgcctggactgctgtcactctcgttgctgttggtatgctccattgccccattcagctcttcccgtattgcgctggctaagttgcccagagtgggatttcccatggaagcggtagtgtatagaggtatactattctcagccattgaagcctgtaaagctgcattgagaggtgtgcagtaggcgtggctgctctgcatgtttttaataagggaagggttaccactgatcttttgtggccttcgtttttggaattctacttcatccactgtccatactgcccctttaacgttttctactcgcacaaaacacttgtgaagactaagattatgacgcactgcattcttccacgtggccgcgttgcgccggaagtaagcaaacattcgtgtgaaccagttatagatttcatttagtgttagctgcttttctggagattcgagaatggcctgcctaattaaagatgcatatgtaaatggtggtctaacttctgcgttcttataaaattcttggttctgcgcaatatctgctgacgaaatgggcacgttgtatttgtctgagtaccgcctgcggatgggtcccaccgtgtgcatgctggtggtggtgatgacggaggggccttgggtgacgggagtcaggggggcggttggggtcgttggagtatgaggtaagctctgtggagaagcctctgacgcggacttggagagagtgacacttgataccagattcaagggctgaggggcggctttgggttctgtagacttcacatgcaggtgggtcatcatggcttgcaggcgctctttgtctttcgcaagctgtagctctaactgctgtacaacctgcatttgtactctacattgggctgtacttctatcgtccagcgcatgctcactgttgagatgttttagaaatgattggaaatcttcgcacactgcttcacagcctggccacttgcatacaccatgtccatagagaggatggctatgggggtgctcctcatgggacaaactttcccttttgggagtgtggactgagagctgtccattagtagaggcatgtgggttcattattaaggaggtcttggaaggtgcagaggaggagacacatgtcgtggtcagatccaaactgctgtgattgttgcctgtggtttcttctgcagtatgagcacttgtcacttctttccagagctgctgcagttctgttggaatcatgccttgagcaagaggttgaaggggaagggcaggctgcccgggctgaattgtcagaaggccttggcgctgcaacgacaggaggtgctgctgctgtaactgctgcatctgtaaaagctgctgctgaaaagccaactgctgggtagccacctgctgttgctctttaggctgttttccagcatgttgttgttgtaaaagttgaagctgcaactgttcctgttgttttttataaaactcttgaagctgctgctgttgaagcatgagggcctgctgctgctgaaggagaacctggagctgctgagggctcagcacttgttgctggaggatctgctgcatttgctggggagtgataacttgaggtgtcatcatagccactgacacgggaacctgaagagctggttgtttgtcattcctcttgggagattttaatccactaacttgctgctgctgttgctgctgaaggaggagctgtcttgccacctgaagtgcagagaaaatgaagagtttggcgaagggagcccgtactgtctgcctttggatttccgtcttcttgctgtagatgggttctggctgtttctgcgaagcgggggttgccgagtggtaaaaaagatgtttgaataaacaggaagtactgtgcggctgaagcacactcgaagagaaaacacactggaacattgccctttgtaggcaacctcagggaggtttgcctccacagtagctggctgggctctcactaaatgacaaagaaaccacaagaattcctcaagtaattcttcactttcaaagttgaaagatcagttggagcttgcaggtaattttcaaagttgcatttagcacttaaagaaatctattaatgccacacgtatctaaaccgctccaggtctgcaagcagcgacacagcacacgcagtgtgccctggctagaccaagccctagccaaacacagctcattcacgcagacaaatacacaccaacagggtttcgggaaacctgctcttgagatatttttgtggtgacatttacataggcaggatgctttaaaaaaaaaaaaaaaaaaagaagaagaaaattcagattttgcagactttagaggattttgtcacatgtatttttaaagaacatatcgtcccgtattccagagatatgccctggatctggctttgactggctgtcctttatattttctttctccaccatcaaccaaactacctgtttatttccagatgcctagcttgcctactggaacactccttaacccgccccaaaatgattatcacagtcctgtcttccgtcaccggagtaattcaacagatactgtaaagaaaagtaaactggtaaaggcacagcaagtcagcttgaaaaataagaggaagagttgaacagccatattcaataacaaaaaaaaaaaaaaaaaaaaaggaagaaaaggattccttctgataatgtattgctcttgtggcaatgttcttctgccacggaagctactgatttgttatttagagtggaatgctggactgtctgtcatccaggtgctaatactcggctaaaataactcattgggagctgtcagtgggatgtttacataggccccaatcttttcttcatagaaggaaattttttactggaattcatcttcttttgatctcacattcaaagcaacggcagcttgatagacattcaagtctgaaagcaaatccagacgctgaagataaaccgccagaaaatgacaggcagaagcatctaaagcttataaaaatgaagagaacagcatgtcgcctgagtattacaatagcagaaatcaagagacatattaggtggaactgatcagccacaaaaacagttcaaaaggcagatcatagaaacagaggactaggctagggggaaaaaatgggaaagatctggtttactgcctcatctcccttctgagcctcacagtgcttccacgcctgccttctccactttgggaaggggtggagtatccaatgcaaatgttcctctctaactcagctggtccagttagagaccaggaaatgatttcctagcaatccattttcaaggggca

SEQ ID NO: 199 - DNA, 2693 bp, Macaca mulatta
  source 1..2693: mol_type = genomic DNA
ctcctactccctccccggactccgcggtgtcccagaagcttttgttgacaattccagtttccgaacaaaacatttcggcaatggtgagggcttcgatcccttctctgatttgctgtcagccatgaacggatggatgtgatgcctgctagccaaaaggcttccctctgtgtattgcagtcctgtggcattatgcatgccccctcccagtgaccccaggctttttatggctgtgagacacgttaaattttcaggggtaagacgtgaccttttgaggtgactataactgaagattgctttacagaagccaaaaaaggtttttgagtcatgatgcaagaatctgggactgagacaaaaagtaacggttcagccatccagaatgggtcgggcggcagcaaccacttattagagtgcggcggtcttcgggaggggcggtccaacggagagacgccagcggtggacatcggggcagctgacctcgcccacgcccagcagcagcagcaacaggcacttcaggtggcaagacagctcctccttcagcagcaacagcagcagcaagttagtggattaaaatctcccaagaggaatgacaaacaaccagctcttcaggttcccgtgtcagtggctatgatgacacctcaagttatcactccccagcaaatgcagcagatcctccagcaacaagtgctgagccctcagcagctccaggttctccttcagcagcagcaggccctcatgcttcaacagcagcagcttcaagagttttataaaaaacaacaggaacagttgcagcttcaacttttacaacaacaacatgctggaaaacagcctaaagagcaacagcaggtggctacccagcagttggcttttcagcagcagcttttacagatgcagcagttacagcagcagcacctcctgtctttgcagcgccaaggccttctgacaattcagcccgggcagcctgcccttccccttcaacctcttgctcaaggcatgattccaacagaactgcagcagctctggaaagaagtgacaagtgctcatactgcagaagaaaccacaggcaacaatcacagcagtttggatctgaccacgacatgtgtctcctcctctgcaccttccaagacctccttaataatgaacccacatgcctctactaatggacagctctcagtccacactcccaaaagggaaagtttgtcccatgaggagcacccccatagccatcctctctatggacatggtgtatgcaagtggccaggctgtgaagcagtgtgcgaagatttccaatcatttctaaaacatctcaacagtgagcatgcgctggacgatagaagtacagcccaatgtagagtacaaatgcaggttgtacagcagttagagctacagcttgcgaaagacaaagagcgcctgcaagccatgatgacccacctgcatgtgaagtctacagaacccaaagccgcccctcagcccttgaatctggtatcaagtgtcactctctccaagtccgcgtcagaggcttctccacagagcttacctcatactccaacgaccccaaccgcccccctgactcccgtcacccaaggcccctccgtcatcaccaccaccagcatgcacacggtgggacccatccgcaggcggtactcagacaaatacaacgtgcccatttcgtcagcagatattgcgcagaaccaagaattttataagaacgcagaagttagaccaccatttacatatgcatctttaattaggcaggccattctcgaatctccagaaaagcagctaacactaaatgaaatctataactggttcacacgaatgtttgcttacttccggcgcaacgcggccacgtggaagaatgcagtgcgtcataatcttagtcttcacaagtgttttgtgcgagtagaaaacgttaaaggggcagtatggacagtggatgaagtagaattccaaaaacgaaggccacaaaagatcagtggtaacccttcccttattaaaaacatgcagagcagccacgcctactgcacacctctcaatgcagctttacaggcttcaatggctgagaatagtatacctctatacactaccgcttccatgggaaatcccactctgggcaacttagccagcgcaatacgggaagagctgaatggggcaatggagcataccaacagcaacgagagtgacagcagtccaggcagatctcctatgcaagccgtgcatcctgtacacgtcaaagaagagcccctcgatccagaggaagctgaagggcccctgtccttagtgacaacagccaaccacagtccagattttgaccatgacagagattacgaagatgaaccagtaaacgaggacatggagtgaatatcggggcgggccaaccccgagagtgaagattggaaaaaggaaaaaacaaaacaaaacaaaacacgtcaaaagttagcagtgaaattgttctccatttgttgtacagtctggaggattttcactacattttgacaactctgaaatgtgttaactcttagtgccatcaagaaccccatttgggagtatttttgatttttctactttttgttgaaaaaaggaatttgtactctgtgcattggatggacttgtttggtacttgggattttcctctcttaaccgtcaacatcagtgttgtaaatttgctaaactgattcacttttagcagcagactt

SEQ ID NO: 200 - DNA, 2693 bp, Macaca mulatta
  source 1..2693: mol_type = genomic DNA
aagtctgctgctaaaagtgaatcagtttagcaaatttacaacactgatgttgacggttaagagaggaaaatcccaagtaccaaacaagtccatccaatgcacagagtacaaattccttttttcaacaaaaagtagaaaaatcaaaaatactcccaaatggggttcttgatggcactaagagttaacacatttcagagttgtcaaaatgtagtgaaaatcctccagactgtacaacaaatggagaacaatttcactgctaacttttgacgtgttttgttttgttttgttttttcctttttccaatcttcactctcggggttggcccgccccgatattcactccatgtcctcgtttactggttcatcttcgtaatctctgtcatggtcaaaatctggactgtggttggctgttgtcactaaggacaggggcccttcagcttcctctggatcgaggggctcttctttgacgtgtacaggatgcacggcttgcataggagatctgcctggactgctgtcactctcgttgctgttggtatgctccattgccccattcagctcttcccgtattgcgctggctaagttgcccagagtgggatttcccatggaagcggtagtgtatagaggtatactattctcagccattgaagcctgtaaagctgcattgagaggtgtgcagtaggcgtggctgctctgcatgtttttaataagggaagggttaccactgatcttttgtggccttcgtttttggaattctacttcatccactgtccatactgcccctttaacgttttctactcgcacaaaacacttgtgaagactaagattatgacgcactgcattcttccacgtggccgcgttgcgccggaagtaagcaaacattcgtgtgaaccagttatagatttcatttagtgttagctgcttttctggagattcgagaatggcctgcctaattaaagatgcatatgtaaatggtggtctaacttctgcgttcttataaaattcttggttctgcgcaatatctgctgacgaaatgggcacgttgtatttgtctgagtaccgcctgcggatgggtcccaccgtgtgcatgctggtggtggtgatgacggaggggccttgggtgacgggagtcaggggggcggttggggtcgttggagtatgaggtaagctctgtggagaagcctctgacgcggacttggagagagtgacacttgataccagattcaagggctgaggggcggctttgggttctgtagacttcacatgcaggtgggtcatcatggcttgcaggcgctctttgtctttcgcaagctgtagctctaactgctgtacaacctgcatttgtactctacattgggctgtacttctatcgtccagcgcatgctcactgttgagatgttttagaaatgattggaaatcttcgcacactgcttcacagcctggccacttgcatacaccatgtccatagagaggatggctatgggggtgctcctcatgggacaaactttcccttttgggagtgtggactgagagctgtccattagtagaggcatgtgggttcattattaaggaggtcttggaaggtgcagaggaggagacacatgtcgtggtcagatccaaactgctgtgattgttgcctgtggtttcttctgcagtatgagcacttgtcacttctttccagagctgctgcagttctgttggaatcatgccttgagcaagaggttgaaggggaagggcaggctgcccgggctgaattgtcagaaggccttggcgctgcaaagacaggaggtgctgctgctgtaactgctgcatctgtaaaagctgctgctgaaaagccaactgctgggtagccacctgctgttgctctttaggctgttttccagcatgttgttgttgtaaaagttgaagctgcaactgttcctgttgttttttataaaactcttgaagctgctgctgttgaagcatgagggcctgctgctgctgaaggagaacctggagctgctgagggctcagcacttgttgctggaggatctgctgcatttgctggggagtgataacttgaggtgtcatcatagccactgacacgggaacctgaagagctggttgtttgtcattcctcttgggagattttaatccactaacttgctgctgctgttgctgctgaaggaggagctgtcttgccacctgaagtgcctgttgctgctgctgctgggcgtgggcgaggtcagctgccccgatgtccaccgctggcgtctctccgttggaccgcccctcccgaagaccgccgcactctaataagtggttgctgccgcccgacccattctggatggctgaaccgttactttttgtctcagtcccagattcttgcatcatgactcaaaaaccttttttggcttctgtaaagcaatcttcagttatagtcacctcaaaaggtcacgtcttacccctgaaaatttaacgtgtctcacagccataaaaagcctggggtcactgggagggggcatgcataatgccacaggactgcaatacacagagggaagccttttggctagcaggcatcacatccatccgttcatggctgacagcaaatcagagaagggatcgaagccctcaccattgccgaaatgttttgttcggaaactggaattgtcaacaaaagcttctgggacaccgcggagtccggggagggagtaggag

SEQ ID NO: 201 - DNA, 6229 bp, Homo sapiens
  source 1..6229: mol_type = genomic DNA
agtcccgagaggtgcccgagggaaaaggaggcggcagctaaactggtcctggagagaagccccttccgcccctctcctcagccagcatgtcccggactccgccgctcctcagtccgcgcggtggggaccccgggccgtggcggccggcgcagccctgacgggttgcgaaccagggggcgccccgaacgcgggggttggggtctgggagcgcgagcggccgctacggtacgagcggggtgtgctgagtcccgtggccacccccggccccagccatgaggagggacgagcgagacgccaaagccatgcggtccctgcagccgccggatggggccggctcgccccccgagagtctgaggaacggctacgtgaagagctgcgtgagccccttgcggcaggaccctccgcgcggcttcttcttccacctctgccgcttctgcaacgtggagctgcggccgccgccggcctctccccagcagccgcggcgctgctcccccttctgccgggcgcgcctctcgctgggcgccctggctgcctttgtcctcgccctgctgctgggcgcggaacccgagagctgggctgccggggccgcctggctgcggacgctgctgagcgtgtgttcgcacagcttgagccccctcttcagcatcgcctgtgccttcttcttcctcacctgcttcctcacccggaccaagcggggacccggcccgggccggagctgcggctcctggtggctgctggcgctgcccgcctgctgttacctgggggacttcttggtgtggcagtggtggtcttggccttggggggatggcgacgcagggtccgcggccccgcacacgcccccggaggcggcagcgggcaggttgctgctggtgctgagctgcgtagggctgctgctgacgctcgcgcacccgctgcggctccggcactgcgttctggtgctgctcctggccagcttcgtctggtgggtctccttcaccagcctcgggtcgctgccctccgccctcaggccgctgctctccggcctggtggggggcgctggctgcctgctggccctggggttggatcacttctttcaaatcagggaagcgcctcttcatcctcgactgtccagtgccgccgaagaaaaagtgcctgtgatccgaccccggaggaggtccagctgcgtgtcgttaggagaaactgcagccagttactatggcagttgcaaaatattcaggagaccgtcgttgccttgtatttccagagaacagatgattctttgggattgggacttaaaacaatggtataagcctcattatcaagctggagtgcagtggcatgatctcggctcaccgcaacctccagctccctggttcaagcgattctcctgcctcagcctccggagtagctgggattacaggcatgtgccaccacacctggctaattttgtatttttagtagagatgggatttctccatgttggtcaggctggtcttgaactcccgacctcaggtgatctgcccacctcggcctcccaaagtgctgggattacagggaattctggaggtggaaatggagttgatctttcagtgctaaatgaggctcgcaatatggtgtcagatcttctgactgatccaagccttccaccacaagtcatttcctctctacggagtattagtagcttaatgggtgctttctcaggttcctgtaggccaaagattaatcctctcacaccatttcctggattttacccctgttctgaaatagaggacccagctgagaaaggggatagaaaacttaacaagggactaaataggaatagtttgccaactccacagctgaggagaagctcaggaacttcaggattgctacctgttgaacagtcttcaaggtgggatcgtaataatggcaaaagacctcaccaagaatttggcatttcaagtcaaggatgctatctaaatgggccttttaattcaaatctactgactatcccgaagcaaaggtcatcttctgtatcactgactcaccatgtaggtctcagaagagctggtgttttgtccagtctgagtcctgtgaattcttccaaccatggaccagtgtctactggctctctaactaatcgatcacccatagaatttcctgatactgctgattttcttaataagccaagcgttatcttgcagagatctctgggcaatgcacctaatactccagatttttatcagcaacttagaaattctgatagcaatctgtgtaacagctgtggacatcaaatgctgaaatatgtttcaacatctgaatcagatggtacagattgctgcagtggaaaatcaggtgaagaagaaaacattttctcgaaagaatcattcaaacttatggaaactcaacaagaagaggaaacagagaagaaagacagcagaaaattatttcaggaaggtgataagtggctaacagaagaggcacagagtgaacagcaaacaaatattgaacaggaagtatcactggacctgattttagtagaagagtatgactcattaatagaaaagatgagcaactggaattttccaatttttgaacttgtagaaaagatgggagagaaatcaggaaggattctcagtcaggttatgtataccttatttcaagacactggtttattggaaatatttaaaattcccactcaacaatttatgaactattttcgtgcattagaaaatggctatcgagacattccttatcacaatcgtatacatgccacagatgtgctacatgcagtttggtatctgacaacacggccagttcctggcttacagcagatccacaatggttgtggaacaggaaatgaaacagattctgatggtagaattaaccatgggcgaattgcttatatttcttcgaagagctgctctaatcctgatgagagttatggctgcctgtcttcaaacattcctgcattagaattgatggctctatacgtggcagctgccatgcatgattatgatcacccagggaggacaaatgcatttctagtggctacaaatgcccctcaggcagttttatacaatgacagatctgttctggaaaatcatcatgctgcgtcagcttggaatctatatctttctcgcccagaatacaacttccttcttcatcttgatcatgtggaattcaagcgctttcgttttttagtcattgaagcaatccttgctacggatcttaaaaagcattttgattttctcgcagaattcaatgccaaggcaaatgatgtaaatagtaatggcatagaatggagtaatgaaaatgatcgcctcttggtatgccaggtgtgcatcaaactggcagatataaatggcccagcaaaagttcgagacttgcatttgaaatggacagaaggcattgtcaatgaattttatgagcagggagatgaagaagcaaatcttggtctgcccatcagtccattcatggatcgttcttctcctcaactagcaaaactccaagaatcttttatcacccacatagtgggtcccctgtgtaactcctatgatgctgctggtttgctaccaggtcagtggttagaagcagaagaggataatgatactgaaagtggtgatgatgaagacggtgaagaattagatacagaagatgaagaaatggaaaacaatctaaatccaaaaccaccaagaaggaaaagcagacggcgaatattttgtcagctaatgcaccacctcactgaaaaccacaagatatggaaggaaatcgtagaggaagaagaaaaatgtaaagctgatgggaataaactgcaggtggagaattcctccttacctcaagcagatgagattcaggtaattgaagaggcagatgaagaggaatagcgacagtttgagtaaaagaaaagtcatattgaagaagcccagagggttgtgcccaggggcagaaatcattgcctagtgttcaccggctgactctcaactgaccattcccatgtggacaggccttaatactgtgagaggatccttgctctgctggcagtttcccactcctatgcactttcacaggaactagaaaactattcttaaaccaaaaataccatccgtgttgacccatgttgcagagcccttacttaaatccttcactggtgtatgaatactttgtcataatgctgctttgctgggtagtgagctcttatttttcactgggggtcagctataactaaaaactcaagtgacatatttcagttaccaaagtggccaggaactttttgcttttatgaaaatagattcatattgtatttcccagtgtgtcttttatgtctttgaatgttttggagaaaagtctatgcctgtctaaaaatgaatccagtgttgcctttctgagggatttctgctcaatgcaatacactgttcagtgctattctcccagctaggtttatccatgaaggactgagtgacctttgttgtatttaacaaaatccaggtgcatcaatttctgatgctttttactattgtgtattatctactatgtgtgttttatttctgctgagagtattcaggtttgccatggacatcagaagtttgaattccagtcttatcttatgttccatggctgaattttaaagctgtttaggtttaacaatgaagggatttattctttagtcaaaattgttgtttttactctagctcaggattcgtatttttaaagatttagttaatatgaacacagcacagatttgttagaagaaaaaaaatttgctgtaataccaaaactaacctcatcaaagatacagaaaaaaagaaatatagtgagccctaaaggacacatacattgaataaataattggaacatgtggttatctttagatccacatcttagctgtcatttgttcactctaaaactgatgttcatctttctgttaatttccctctgcctaaagactacatgacagaaatgacctatcactacttattatttctgaagcctaactgcaagactgatttctgagaacaagtaaagaactggaatacttatttttcatataaaaatctaaatgtgttaataaatcatttcatacaaaagtacattattaaataaccacattattaaaataattgcaagaaaatggaccatatttacaatgttttgtaaacttgctagtgtgtggatatgtaccctacttgtgaaatacatttgaagatataaagagcagccaaaatgatggcaaaatggtaggctaatattttctattattattggagaacatatcatattttggaatcatgcaattttgcacacagtgaaaccattaattttccaaggtaattcctttagaatatggtattggcatgcagtttcttacttatctagaatatttggcttatctgaaagatatcaatttaagatctctggaagtgttagaatttttgatccttcacagtgtcaatatttaatgaatcactaagctttatttattagacgtgttgagtgagtgctgagttccttgctgccacttttgttaccattgtcacacactatgtgtaaaccagtcccaccacttattactaataaaattttgactgataatttatatttgcacttacaatatatatatcctgtccttatatttctctagagtacattttccatcatgtttaagtgtatttctgctattatttcctctcctgcagaatacatacaagtgtatgtgtataaagtcatacatgtacaagcatgcatattgagattgaatcacatttccatactgtctgttattttattgggttttatattgggtttctttagtttatgttgttttctcaaaagcagcattttaaattacgaatactggacttattggatttaattataaatccaattactactggaaactcatttttacataatatagtccttaaattatttaacccttgctaagtaattgacatatgtaacaataactagcctaaagaaacccaaaaaagtatctctcccgagctgaaacttaaaaattcgtaagtgtaagaaagaatgtgagaatatattaaatgcacactgtaccattagatgaaatcttacttgagaaattgccataagccatattacagatcttactttgttactgaatcagattaatttcttgttataataattttcatcataaattttctatttttaaagccgctggtactagaaatattcttttaatgctatatctatgtacctactgacacatttttctccataaaagtacttttaaaaatta

SEQ ID NO: 202 - DNA, 6229 bp, Homo sapiens
  source 1..6229: mol_type = genomic DNA
taatttttaaaagtacttttatggagaaaaatgtgtcagtaggtacatagatatagcattaaaagaatatttctagtaccagcggctttaaaaatagaaaatttatgatgaaaattattataacaagaaattaatctgattcagtaacaaagtaagatctgtaatatggcttatggcaatttctcaagtaagatttcatctaatggtacagtgtgcatttaatatattctcacattctttcttacacttacgaatttttaagtttcagctcgggagagatacttttttgggtttctttaggctagttattgttacatatgtcaattacttagcaagggttaaataatttaaggactatattatgtaaaaatgagtttccagtagtaattggatttataattaaatccaataagtccagtattcgtaatttaaaatgctgcttttgagaaaacaacataaactaaagaaacccaatataaaacccaataaaataacagacagtatggaaatgtgattcaatctcaatatgcatgcttgtacatgtatgactttatacacatacacttgtatgtattctgcaggagaggaaataatagcagaaatacacttaaacatgatggaaaatgtactctagagaaatataaggacaggatatatatattgtaagtgcaaatataaattatcagtcaaaattttattagtaataagtggtgggactggtttacacatagtgtgtgacaatggtaacaaaagtggcagcaaggaactcagcactcactcaacacgtctaataaataaagcttagtgattcattaaatattgacactgtgaaggatcaaaaattctaacacttccagagatcttaaattgatatctttcagataagccaaatattctagataagtaagaaactgcatgccaataccatattctaaaggaattaccttggaaaattaatggtttcactgtgtgcaaaattgcatgattccaaaatatgatatgttctccaataataatagaaaatattagcctaccattttgccatcattttggctgctctttatatcttcaaatgtatttcacaagtagggtacatatccacacactagcaagtttacaaaacattgtaaatatggtccattttcttgcaattattttaataatgtggttatttaataatgtacttttgtatgaaatgatttattaacacatttagatttttatatgaaaaataagtattccagttctttacttgttctcagaaatcagtcttgcagttaggcttcagaaataataagtagtgataggtcatttctgtcatgtagtctttaggcagagggaaattaacagaaagatgaacatcagttttagagtgaacaaatgacagctaagatgtggatctaaagataaccacatgttccaattatttattcaatgtatgtgtcctttagggctcactatatttctttttttctgtatctttgatgaggttagttttggtattacagcaaattttttttcttctaacaaatctgtgctgtgttcatattaactaaatctttaaaaatacgaatcctgagctagagtaaaaacaacaattttgactaaagaataaatcccttcattgttaaacctaaacagctttaaaattcagccatggaacataagataagactggaattcaaacttctgatgtccatggcaaacctgaatactctcagcagaaataaaacacacatagtagataatacacaatagtaaaaagcatcagaaattgatgcacctggattttgttaaatacaacaaaggtcactcagtccttcatggataaacctagctgggagaatagcactgaacagtgtattgcattgagcagaaatccctcagaaaggcaacactggattcatttttagacaggcatagacttttctccaaaacattcaaagacataaaagacacactgggaaatacaatatgaatctattttcataaaagcaaaaagttcctggccactttggtaactgaaatatgtcacttgagtttttagttatagctgacccccagtgaaaaataagagctcactacccagcaaagcagcattatgacaaagtattcatacaccagtgaaggatttaagtaagggctctgcaacatgggtcaacacggatggtatttttggtttaagaatagttttctagttcctgtgaaagtgcataggagtgggaaactgccagcagagcaaggatcctctcacagtattaaggcctgtccacatgggaatggtcagttgagagtcagccggtgaacactaggcaatgatttctgcccctgggcacaaccctctgggcttcttcaatatgacttttcttttactcaaactgtcgctattcctcttcatctgcctcttcaattacctgaatctcatctgcttgaggtaaggaggaattctccacctgcagtttattcccatcagctttacatttttcttcttcctctacgatttccttccatatcttgtggttttcagtgaggtggtgcattagctgacaaaatattcgccgtctgcttttccttcttggtggttttggatttagattgttttccatttcttcatcttctgtatctaattcttcaccgtcttcatcatcaccactttcagtatcattatcctcttctgcttctaaccactgacctggtagcaaaccagcagcatcataggagttacacaggggacccactatgtgggtgataaaagattcttggagttttgctagttgaggagaagaacgatccatgaatggactgatgggcagaccaagatttgcttcttcatctccctgctcataaaattcattgacaatgccttctgtccatttcaaatgcaagtctcgaacttttgctgggccatttatatctgccagtttgatgcacacctggcataccaagaggcgatcattttcattactccattctatgccattactatttacatcatttgccttggcattgaattctgcgagaaaatcaaaatgctttttaagatccgtagcaaggattgcttcaatgactaaaaaacgaaagcgcttgaattccacatgatcaagatgaagaaggaagttgtattctgggcgagaaagatatagattccaagctgacgcagcatgatgattttccagaacagatctgtcattgtataaaactgcctgaggggcatttgtagccactagaaatgcatttgtcctccctgggtgatcataatcatgcatggcagctgccacgtatagagccatcaattctaatgcaggaatgtttgaagacaggcagccataactctcatcaggattagagcagctcttcgaagaaatataagcaattcgcccatggttaattctaccatcagaatctgtttcatttcctgttccacaaccattgtggatctgctgtaagccaggaactggccgtgttgtcagataccaaactgcatgtagcacatctgtggcatgtatacgattgtgataaggaatgtctcgatagccattttctaatgcacgaaaatagttcataaattgttgagtgggaattttaaatatttccaataaaccagtgtcttgaaataaggtatacataacctgactgagaatccttcctgatttctctcccatcttttctacaagttcaaaaattggaaaattccagttgctcatcttttctattaatgagtcatactcttctactaaaatcaggtccagtgatacttcctgttcaatatttgtttgctgttcactctgtgcctcttctgttagccacttatcaccttcctgaaataattttctgctgtctttcttctctgtttcctcttcttgttgagtttccataagtttgaatgattctttcgagaaaatgttttcttcttcacctgattttccactgcagcaatctgtaccatctgattcagatgttgaaacatatttcagcatttgatgtccacagctgttacacagattgctatcagaatttctaagttgctgataaaaatctggagtattaggtgcattgcccagagatctctgcaagataacgcttggcttattaagaaaatcagcagtatcaggaaattctatgggtgatcgattagttagagagccagtagacactggtccatggttggaagaattcacaggactcagactggacaaaacaccagctcttctgagacctacatggtgagtcagtgatacagaagatgacctttgcttcgggatagtcagtagatttgaattaaaaggcccatttagatagcatccttgacttgaaatgccaaattcttggtgaggtcttttgccattattacgatcccaccttgaagactgttcaacaggtagcaatcctgaagttcctgagcttctcctcagctgtggagttggcaaactattcctatttagtcccttgttaagttttctatcccctttctcagctgggtcctctatttcagaacaggggtaaaatccaggaaatggtgtgagaggattaatctttggcctacaggaacctgagaaagcacccattaagctactaatactccgtagagaggaaatgacttgtggtggaaggcttggatcagtcagaagatctgacaccatattgcgagcctcatttagcactgaaagatcaactccatttccacctccagaattccctgtaatcccagcactttgggaggccgaggtgggcagatcacctgaggtcgggagttcaagaccagcctgaccaacatggagaaatcccatctctactaaaaatacaaaattagccaggtgtggtggcacatgcctgtaatcccagctactccggaggctgaggcaggagaatcgcttgaaccagggagctggaggttgcggtgagccgagatcatgccactgcactccagcttgataatgaggcttataccattgttttaagtcccaatcccaaagaatcatctgttctctggaaatacaaggcaacgacggtctcctgaatattttgcaactgccatagtaactggctgcagtttctcctaacgacacgcagctggacctcctccggggtcggatcacaggcactttttcttcggcggcactggacagtcgaggatgaagaggcgcttccctgatttgaaagaagtgatccaaccccagggccagcaggcagccagcgccccccaccaggccggagagcagcggcctgagggcggagggcagcgacccgaggctggtgaaggagacccaccagacgaagctggccaggagcagcaccagaacgcagtgccggagccgcagcgggtgcgcgagcgtcagcagcagccctacgcagctcagcaccagcagcaacctgcccgctgccgcctccgggggcgtgtgcggggccgcggaccctgcgtcgccatccccccaaggccaagaccaccactgccacaccaagaagtcccccaggtaacagcaggcgggcagcgccagcagccaccaggagccgcagctccggcccgggccgggtccccgcttggtccgggtgaggaagcaggtgaggaagaagaaggcacaggcgatgctgaagagggggctcaagctgtgcgaacacacgctcagcagcgtccgcagccaggcggccccggcagcccagctctcgggttccgcgcccagcagcagggcgaggacaaaggcagccagggcgcccagcgagaggcgcgcccggcagaagggggagcagcgccgcggctgctggggagaggccggcggcggccgcagctccacgttgcagaagcggcagaggtggaagaagaagccgcgcggagggtcctgccgcaaggggctcacgcagctcttcacgtagccgttcctcagactctcggggggcgagccggccccatccggcggctgcagggaccgcatggctttggcgtctcgctcgtccctcctcatggctggggccgggggtggccacgggactcagcacaccccgctcgtaccgtagcggccgctcgcgctcccagaccccaacccccgcgttcggggcgccccctggttcgcaacccgtcagggctgcgccggccgccacggcccggggtccccaccgcgcggactgaggagcggcggagtccgggacatgctggctgaggagaggggcggaaggggcttctctccaggaccagtttagctgccgcctccttttccctcgggcacctctcgggact

SEQ ID NO: 203 - DNA, 5314 bp, Mus musculus
  source 1..5314: mol_type = genomic DNA
aactgttgcagcgcgcgggagctgggaggcgacgccgccgtctcccgtcccgagccgcgcttgagggaaaagggaagaggcgtccgcggcggtcccgggacaccaagaagcccttctcgccgctctcagtggccggcatgaggcggacgccgccgcccctcagcccgcgcgccggggatcccggccggtggcggcggcgggcgcagccgtgaccgctctgcgaagctcggggcgcccagaacgcggagggcggcgcggggtcggcaagcgccagcggccccccggcggcccggggccatgaggaaagacgagcgcgagcgggacgcgccagccatgaggtccccgccgccgccgccagcctcggccgcctcgccccccgagagcctgcgcaacggctacgtgaagagctgcgtgagcccgctgcggcaggaccctccgcgcagcttcttcttccacctctgccgcttctgcaacgtggagccgccggcggcctcgctccgcgccggggcacgcctctcgctcggcgtcctggccgcctttgtcctggccgcgctgctgggcgcgaggcccgagcgctgggcggccgcggcagccgggctccggacgctgctgagcgcctgctcgctcagcctcagcccgctcttcagcatcgcctgtgccttcttcttcctcacctgtttcctgacgcgcgcgcagcgcggcccgggccgcggcgccggctcctggtggctgctggcgctgcccgcctgctgctacctgggcgacttcgcggcgtggcagtggtggtcgtggctgcgtggggagccggcggcggcgggccggctctgcctggtgctgagctgcgtggggctgctgacgctcgcgccccgcgtgaggctgcggcacggcgtcctggtgctgctcttcgccggcctggtgtggtgggtgtccttctccggcctcggggctctgccgcccgcgctcaggcctctgctgtcgtgcctggtcgggggcgcgggatgcctgctagccctgggcttggaccacttctttcacgtccggggagcctcccctccgccgcgctcggcgagtaccgcggaggaaaaagtgcctgtgatcagaccccggaggaggtccagctgcgtgtcgctgggagaaagcgcagccggttactatggcagtggcaagatgttcaggagaccgtcgttgccttgtatttcccgagaacagatgatcctctgggactgggacttgaagcagtggtgtaaacctcattaccagaattctggaggtggaaatggagttgatctttcagtgctaaatgaagctcgcaatatggtgtcagacctgctgattgacccaagccttcccccacaagtcatttcttctctgcggagtatcagtagcttgatgggtgctttctcaggttcctgtaggccaaagattaattcttttacaccatttcctggattttatccctgctctgaagtagaagatccagttgagaaaggagatcgaaaacttcacaagggattgagtggcagaaccagtttcccaactccacagctgaggaggagctctggagcctcatcgttgctgactaatgagcactgttcaaggtgggatcgcagcagtggtaagaggtcttaccaagaactcagtgtttcaagtcatggatgccacctaaatgggccttttagttcaaatctttttacaattccaaagcagaggtcatcgtctgtgtcactgacgcaccatgcaggtctgagaagagctggtgctttgcccagccacagtcttctgaattcttcaagccatgtaccagtgtctgctggctctctaactaatcgatcacccataggatttcctgataccactgattttcttactaagccaaatattattttacatagatcactgggcagtgtatcaagtgcagcagatttccatcagtaccttaggaactctgacagcaatctgtgtagcagctgtggacaccaaatactcaaatatgtttcaacatgtgaacccgatggtacagaccaccccagtgaaaaatcaggtgaagaagacagcagtgttttctcaaaagaaccattgaacattgtggaaacccaagaagaagagaccatgaagaaagcctgcagggagttatttttggaaggtgatagtcacctgatggaagaggcacagcaaccaaatatcgatcaggaagtgtcactggatccaatgttagtagaagattatgattcattaatagaaaagatgaacaactggaattttcagatttttgagcttgtagaaaagatgggagaaaaatcaggaaggattctcagtcaggttatgtatactttatttcaagatactggtttattggaaacatttaaaattcccactcaagaatttatgaattattttcgtgccttagaaaatggctaccgggacattccatatcacaatcgtgtgcatgccacagatgtcctacatgctgtttggtatttgacaacccgaccaattcctggcttacctcagatccataataaccatgaaacggaaaccaaagcagattcagatggtagacttggttctggacagattgcttacatttcttcgaagagttgctgtattccagatatgagttatggctgcctatcttcaaacatccctgcattagaattgatggctttgtatgtggcagctgccatgcacgattacgatcacccaggaagaacaaatgcgtttctagtggctacaaatgcacctcaggcagttttatacaatgacagatctgttctagagaatcatcatgctgcatcagcttggaatctgtatctttctcgcccagagtacaacttcctccttaaccttgatcacatggaattcaagcggtttcgatttttagttatagaagcaatccttgctacagatctcaaaaaacattttgatttccttgcagaattcaatgccaaggccaatgatgtaaatagtaacggtatagaatggagcagtgaaaacgatcgcctcttggtctgccaggtgtgcatcaaattagcagatatcaatggcccagcaaaagatcgggacctacatttgagatggacagaaggcattgtgaatgaattttatgagcagggagatgaagaagcaaccctgggtctacctattagtcccttcatggatcgttcttctcctcaactagcaaaactccaagaatcttttatcacccacattgtgggccccctgtgcaactcctatgatgctgctggcttgctgccgggtcagtggatagaaacagaagagggtgatgatacagaaagtgatgatgatgatgatgatgatgatggtggtggtgaagaattagattcagatgatgaagaaacagaagacaatctaaatcctaaaccacaaagaaggaaaggcaggcggcgaatattttgccaactaatgcaccacctcactgaaaaccacaagatatggaaggaaatcatagaagaagaagaagaaaaatgtaaagctgaggggaacaaactgcaggtggataatgcctccttacctcaggcagatgagattcaggttattgaagaagcagatgaagaggaagaacaaatgtttgaatgagaagagaactcatgctgaaggagcctggggtgctgttcccagggtcattacctaatgctcactgtactgattctcaactgaccattcccatgtgggcacgccttaatactgtgagaggatcctggctaccctggcagttctcactcctaagcactttcattacaaacaagaaactgattcttagagcttgctgcagttgactcatgctgcaaagccttcctcaaagccttcactggtgtgtaaatagtgtgtcataatgctgctttgctgggtagtgagctcttatttctcatgatgagggagggaaggctaaaactgaaaagtcaagtgacttcggtttttgaagtaaccatatttcttttatgaaaacaggattcatcttgtatttccaaatatatcttttatgtctttgtttgggggtggggtggtgcaagaaacagacctctatgcttaatacaaaaatgaattcatggtggcctttctgagtgatttctgctcgtggcagcacactgttcagtgtggttctcctggcttcatcgaggaaggactgaggacctttgttatacttagcaaaacccagatgcatcaatttctgatgctttttattgttgtgtataatctatttacttgttttatttctgcctaaagtattcaggtttgctgtggacatcagaggtctgaattctgttcttactgattttgttccatggttgaatttaaaagtatataataatgaaggagctttattctttattcaaatctgttcttattcttattctttctcaggataagtaattttaaacaattattataaatattgcatagatttgccagagaaaaaaacattgtcctgatattgatgttatcttttatgaaatgagcaccattttattttaattagagtcaagaaaaaggagctggccatcttttgccttaatggaaaatcaatgaaaccaatcccatcgaagatattgcctaaatatttagttatctttagatatatgtcttaggtgtctagtaaaattgacattttttattgttaatatctttctgcttcaagagtacatggcagagatgacacatcactatttagtaatattacagccccacagacagaattttgaagtaaagtacataatgggaatgcatattaatttttaataaagtgctataaaataaatatgctatgaatagttcaataaataattccataaatgcttataaataaataatttactaagaaaacaggacacatttatgtttatataatctcattagagtgtggctatgtgccccagttgtgaaaaattattgaagttatacaaagcaaccaaaataataccaaaatggtaaactggtttcttcttatcctttatacattattttgaagccattgaactttgtgcacagttaactgtcagtttccacagtatttcctatatagtgtgatgctggaatttcttacctacctaagatatttgggttgtctacaaggccacagttaaagattgattggagtactggtatttttgatcctgtaggtaccatatttaatgaatcactacactttatttattaaacatgttgagtgctgagttccttcctgtcacttttgctaccacaactacatcatttgtaaactggtcccaccatatattactaagtaataaaattttaactgataatctaaaaaaaaaaaaaaaaaaaaaaaaaaaaa

SEQ ID NO: 204 - DNA, 5314 bp, Mus musculus
  source 1..5314: mol_type = genomic DNA
tttttttttttttttttttttttttttttagattatcagttaaaattttattacttagtaatatatggtgggaccagtttacaaatgatgtagttgtggtagcaaaagtgacaggaaggaactcagcactcaacatgtttaataaataaagtgtagtgattcattaaatatggtacctacaggatcaaaaataccagtactccaatcaatctttaactgtggccttgtagacaacccaaatatcttaggtaggtaagaaattccagcatcacactatataggaaatactgtggaaactgacagttaactgtgcacaaagttcaatggcttcaaaataatgtataaaggataagaagaaaccagtttaccattttggtattattttggttgctttgtataacttcaataatttttcacaactggggcacatagccacactctaatgagattatataaacataaatgtgtcctgttttcttagtaaattatttatttataagcatttatggaattatttattgaactattcatagcatatttattttatagcactttattaaaaattaatatgcattcccattatgtactttacttcaaaattctgtctgtggggctgtaatattactaaatagtgatgtgtcatctctgccatgtactcttgaagcagaaagatattaacaataaaaaatgtcaattttactagacacctaagacatatatctaaagataactaaatatttaggcaatatcttcgatgggattggtttcattgattttccattaaggcaaaagatggccagctcctttttcttgactctaattaaaataaaatggtgctcatttcataaaagataacatcaatatcaggacaatgtttttttctctggcaaatctatgcaatatttataataattgtttaaaattacttatcctgagaaagaataagaataagaacagatttgaataaagaataaagctccttcattattatatacttttaaattcaaccatggaacaaaatcagtaagaacagaattcagacctctgatgtccacagcaaacctgaatactttaggcagaaataaaacaagtaaatagattatacacaacaataaaaagcatcagaaattgatgcatctgggttttgctaagtataacaaaggtcctcagtccttcctcgatgaagccaggagaaccacactgaacagtgtgctgccacgagcagaaatcactcagaaaggccaccatgaattcatttttgtattaagcatagaggtctgtttcttgcaccaccccacccccaaacaaagacataaaagatatatttggaaatacaagatgaatcctgttttcataaaagaaatatggttacttcaaaaaccgaagtcacttgacttttcagttttagccttccctccctcatcatgagaaataagagctcactacccagcaaagcagcattatgacacactatttacacaccagtgaaggctttgaggaaggctttgcagcatgagtcaactgcagcaagctctaagaatcagtttcttgtttgtaatgaaagtgcttaggagtgagaactgccagggtagccaggatcctctcacagtattaaggcgtgcccacatgggaatggtcagttgagaatcagtacagtgagcattaggtaatgaccctgggaacagcaccccaggctccttcagcatgagttctcttctcattcaaacatttgttcttcctcttcatctgcttcttcaataacctgaatctcatctgcctgaggtaaggaggcattatccacctgcagtttgttcccctcagctttacatttttcttcttcttcttctatgatttccttccatatcttgtggttttcagtgaggtggtgcattagttggcaaaatattcgccgcctgcctttccttctttgtggtttaggatttagattgtcttctgtttcttcatcatctgaatctaattcttcaccaccaccatcatcatcatcatcatcatcatcactttctgtatcatcaccctcttctgtttctatccactgacccggcagcaagccagcagcatcataggagttgcacagggggcccacaatgtgggtgataaaagattcttggagttttgctagttgaggagaagaacgatccatgaagggactaataggtagacccagggttgcttcttcatctccctgctcataaaattcattcacaatgccttctgtccatctcaaatgtaggtcccgatcttttgctgggccattgatatctgctaatttgatgcacacctggcagaccaagaggcgatcgttttcactgctccattctataccgttactatttacatcattggccttggcattgaattctgcaaggaaatcaaaatgttttttgagatctgtagcaaggattgcttctataactaaaaatcgaaaccgcttgaattccatgtgatcaaggttaaggaggaagttgtactctgggcgagaaagatacagattccaagctgatgcagcatgatgattctctagaacagatctgtcattgtataaaactgcctgaggtgcatttgtagccactagaaacgcatttgttcttcctgggtgatcgtaatcgtgcatggcagctgccacatacaaagccatcaattctaatgcagggatgtttgaagataggcagccataactcatatctggaatacagcaactcttcgaagaaatgtaagcaatctgtccagaaccaagtctaccatctgaatctgctttggtttccgtttcatggttattatggatctgaggtaagccaggaattggtcgggttgtcaaataccaaacagcatgtaggacatctgtggcatgcacacgattgtgatatggaatgtcccggtagccattttctaaggcacgaaaataattcataaattcttgagtgggaattttaaatgtttccaataaaccagtatcttgaaataaagtatacataacctgactgagaatccttcctgatttttctcccatcttttctacaagctcaaaaatctgaaaattccagttgttcatcttttctattaatgaatcataatcttctactaacattggatccagtgacacttcctgatcgatatttggttgctgtgcctcttccatcaggtgactatcaccttccaaaaataactccctgcaggctttcttcatggtctcttcttcttgggtttccacaatgttcaatggttcttttgagaaaacactgctgtcttcttcacctgatttttcactggggtggtctgtaccatcgggttcacatgttgaaacatatttgagtatttggtgtccacagctgctacacagattgctgtcagagttcctaaggtactgatggaaatctgctgcacttgatacactgcccagtgatctatgtaaaataatatttggcttagtaagaaaatcagtggtatcaggaaatcctatgggtgatcgattagttagagagccagcagacactggtacatggcttgaagaattcagaagactgtggctgggcaaagcaccagctcttctcagacctgcatggtgcgtcagtgacacagacgatgacctctgctttggaattgtaaaaagatttgaactaaaaggcccatttaggtggcatccatgacttgaaacactgagttcttggtaagacctcttaccactgctgcgatcccaccttgaacagtgctcattagtcagcaacgatgaggctccagagctcctcctcagctgtggagttgggaaactggttctgccactcaatcccttgtgaagttttcgatctcctttctcaactggatcttctacttcagagcagggataaaatccaggaaatggtgtaaaagaattaatctttggcctacaggaacctgagaaagcacccatcaagctactgatactccgcagagaagaaatgacttgtgggggaaggcttgggtcaatcagcaggtctgacaccatattgcgagcttcatttagcactgaaagatcaactccatttccacctccagaattctggtaatgaggtttacaccactgcttcaagtcccagtcccagaggatcatctgttctcgggaaatacaaggcaacgacggtctcctgaacatcttgccactgccatagtaaccggctgcgctttctcccagcgacacgcagctggacctcctccggggtctgatcacaggcactttttcctccgcggtactcgccgagcgcggcggaggggaggctccccggacgtgaaagaagtggtccaagcccagggctagcaggcatcccgcgcccccgaccaggcacgacagcagaggcctgagcgcgggcggcagagccccgaggccggagaaggacacccaccacaccaggccggcgaagagcagcaccaggacgccgtgccgcagcctcacgcggggcgcgagcgtcagcagccccacgcagctcagcaccaggcagagccggcccgccgccgccggctccccacgcagccacgaccaccactgccacgccgcgaagtcgcccaggtagcagcaggcgggcagcgccagcagccaccaggagccggcgccgcggcccgggccgcgctgcgcgcgcgtcaggaaacaggtgaggaagaagaaggcacaggcgatgctgaagagcgggctgaggctgagcgagcaggcgctcagcagcgtccggagcccggctgccgcggccgcccagcgctcgggcctcgcgcccagcagcgcggccaggacaaaggcggccaggacgccgagcgagaggcgtgccccggcgcggagcgaggccgccggcggctccacgttgcagaagcggcagaggtggaagaagaagctgcgcggagggtcctgccgcagcgggctcacgcagctcttcacgtagccgttgcgcaggctctcggggggcgaggcggccgaggctggcggcggcggcggggacctcatggctggcgcgtcccgctcgcgctcgtctttcctcatggccccgggccgccggggggccgctggcgcttgccgaccccgcgccgccctccgcgttctgggcgccccgagcttcgcagagcggtcacggctgcgcccgccgccgccaccggccgggatccccggcgcgcgggctgaggggcggcggcgtccgcctcatgccggccactgagagcggcgagaagggcttcttggtgtcccgggaccgccgcggacgcctcttcccttttccctcaagcgcggctcgggacgggagacggcggcgtcgcctcccagctcccgcgcgctgcaacagtt

SEQ ID NO: 205 - DNA, 5368 bp, Rattus norvegicus
  source 1..5368: mol_type = genomic DNA
aactgttgcagcgcgcgggagctgggaggcgacgcagccgtctcccgtcccgagccgtgcctgaggggaaagggaaaaggcgtccgcggcagccggccctgggacaccgagaatcccctctcgccgctctccactgcgggcatgaggcggacgccgccgcccctcagcccgcgcgccggggatccggggcggcggcggcggcaggcgcagccgtgaccgctctgcgaagctcggggcgcccggaacggggagggcgcggggtcggcgagcgccagcggcctcccggcagcccggggctatgaggaaggacgagcgcgagcgggacacgccagccatgaggtccccgccgccgccgccgccgccggccacggccacggccgcctcgccccccgagagcctgcgcaacggctacgtgaagagctgcgtgagcccgctgcggcaggaccctccgcgcagcttcttcttccacctctgccgcttctgcaacgtggagccgccggcggcctcgctccgcgccggggcacgcctctcgctcgccgctctggccgcctttgtcctggccgcgctgctgggcgcggggcccgagcgctgggcggccgcggcgaccgggcttcggacgctgctgagcgcttgctcgctcagcctcagcccgctcttcagcatcgcctgtgccttcttcttcctcacctgcttcctgacgcgcgcgcagcgcggcccggaccgcggcgccggctcctggtggctgctggcgctgcctgcctgctgctacctgggcgacttcgcggcgtggcagtggtggtcgtggctgcgcggggagccggcggcggcggcggccggccggctctgcctggtgctgagctgcgtggggctgctgacgctcgcgcctcgcgtgaggctgcggcacggagtcctggtgctgctcttcgccggcctggtgtggtgggtgtccttctccggcctcggggctctgccgcccgcgctcaggcctctgctgtcgtgcctggtcgggggcgcgggatgcctgctagccctgggcttggaccacttctttcacgtccggggagcctcacctcccccgcgctcggcgagtaccgcggatgaaaaagtgcctgtgatcagaccccggaggaggtccagctgcgtgtcgctgggagaaagcgcggccggttactatggcagtggcaagatgttcaggagaccgtcgttgccttgtatttctcgagaacagatgattctctgggactgggacttgaagcagtggtgtaaacctcattaccagaattctggaggtggaaatggagttgatctttcagtgctaaatgaagctcgcaatatggtgtcagaccttctgattgacccaagccttcccccacaagtcatttcttctttgcggagtatcagtagcttgatgggtgctttctcaggttcctgtaggccaaagattaattctttcacaccatttcctggattttatccctgttctgaagtagaagatccagtagagaaaggcgatcgaaaacttcacaaggggttgagtagcaaacccagtttcccgactgcacagctgaggaggagctcaggagcgtcaggattgctgaccagtgagcaccactcacggtgggatcgcagcggtggcaaaaggccttaccaagaactcagtgtttcaagtcatggatgccacctaaatgggccttttagttcaaatcttatgacaattccaaagcagaggtcatcatctgtgtcgctgacgcaccatgcaggtctgagaagagctggtgctttgcccagccccagtcttctgaattcttcaagccatgtacccgtgtctgctggctgtctaactaatcgatcacccgtaggatttcttgataccagtgattttcttactaagccaagtgttactttacatagatcactgggcagtgtatccagtgcagcagatttccatcagtaccttaggaactctgacagcagtctgtgtagcagctgtggacaccaaatactcaagtatgtttcgacatgtgaacctgatggtacagaccaccacaatgaaaaatcaggtgaagaagacagcactgttttctcaaaagaacgattgaacattgtggaaactcaagaagaagagacagtgaaggaagactgcagggaattatttttggaaggtgatgatcacctaatggaagaggcccagcaaccgaatattgaccaggaagtgttattggacccgatgttagtggaagattatgattcattaatagaaaagatgagcaactggaactttcagatttttgagcttgtagaaaaaatgggagaaaaatcaggaaggattctcagccaggttatgtatactttatttcaagatactggtttattggaaacatttaaaattcccactcaagaatttatgaattattttcgtgcactagaaaatggctaccgagatattccatatcacaatcgtgtgcatgccacagatgtcctacatgctgtttggtatttgacaacacgaccaattcctggcttacagcagctccataataaccatgaaacagaaaccaaagcagattcagatgctagacttagttctggacagattgcttacctttcttcgaagagttgctgtattccagataagagttatggctgcctgtcttcaaacattcctgcgttagaactgatggctttatatgtggcagctgccatgcacgattatgatcacccaggaagaacaaatgcattcctagtggctacaaatgcacctcaggcagttttatacaatgacagatctgttctagaaaatcatcatgccgcatcagcgtggaatctgtatctttctcgcccagaatacaacttcctccttaaccttgatcacatggaattcaagcgttttcgatttttagtcatagaagcaatccttgctacagatctcaaaaaacattttgagttccttgctgaattcaatgccaaggccaatgatgtaaatagtaacggtatagaatggagcagtgaaaacgatcgactcttagtctgccaggtgtgcatcaaattagcagacatcaacggcccagcaaaagatcgggatcttcatttgagatggacagaaggcattgtgaatgagttttatgagcagggagatgaagaagcaaccctgggtctacctattagtcccttcatggatcgttcttctcctcaactagcaaaactccaagagtcatttatcacccacattgtgggccccctgtgcaactcctatgatgctgctggcttgctgcctggtcagtggatagaagcagaagagggtgacgatacagaaagtgatgatgatgatgatgatgatgatgatgatgatgatgatgatgatgatgatgatgaagagttagattcagatgatgaagaaacagaagacaatctaaatcctaaaccacaaagaaggaaaggcaggcggcgaatattttgccaactaatgcaccacctcactgaaaaccacaagatctggaaggaaatcatagaagaggaagaaaaatgtaaagctgaggggaacaaactgcaggtggataatgcctccttacctcaggcagatgagattcaggtcattgaagaagcagatgaagaggaagaacaaatgtttgaatgagaagaaaactcatgctgaagaagcctggggtgctcttcccagggtcgttacctagtgctcaccgtactgattctcaactgaccattcccatgtggacaggccttaatactgtgaggggatccttgctaccttggtagttctcactcctaagcactttgattacagactagagactgaccttagagctttctgcagttgagtgatgctgcagagccttctccaagccttcactggtgtgtaaatagtgtgtcataatgctgctttgctgggtagtgagctctcgtttgtcatggtgagggagggaggtagggagggagggagggatggagggatggagggaaggagggagggctaacacagaaaagtcaagtgaccttggttttcaaagtgaccataattcttttatgaaaacaggatacctcgggtatttccaaatatatcttctatgtctttgtttgggggtgggatggggcaagaaacaaacttctatgcttaatccaaaaaggaatttatcacggcctttctgagtgatttctgctcgtggcagtacactgttccatgtggttctcctagcttcatccgtgaaggactgaggacctttgttatacttaacaaaacccagatgcatcaatttctgatgctttttactgttgtgtataatctacttaagtgttttatttctgccgaaagtattcaggtttgctgtggacatcaggagtctgaattctgttcttactgattttgttccatggttgaattttaaaagtgtttaacaatgaaggaactttattctttagtcaaaactgttatttttattcttgctcaggatacataattttaaacattaattattataaacgtggcatagatttgccagaaaaaaaacattgtcctaatattgatgttaccttttatgaaatgagcaccattttcttttaattaaagccaagaaaaaggagatgactatcttttgccttagtggaaaatcaaatgaaaacaaaacccattgaaggtattgcctaaataattagttatctttaaatatgtgtcttaggtgtcttgtattcttgtgtctggttatagtaaaactgacaatttttgttactacctttctgcttcaaggggacaatggcagagatgacacatcactatgtagtaatactacagccccacagaaagactgaattttgaagtaatgtatatgatgggaattcatattaatttttacattaaaatgctatgaatagttcaataaacaattccataaagtacatataaataatttactaagaaaaagacaacatttatgtttacataacctcattagagtacagcaattgtggaaaattactgaagttatacaaagcaaccaaaatgataccaagatggttaactgatttctcaagtgatactttaagaccatacaatattttggagccattgaactttgtgcacagttaactgttagtttctacagtggttcctatatagtatgatgctagaatttcttgcctgcctagttatttaggttgtctataagaccgcagttaaagttggattggaatactggtatttttgaccctgcaggtaccatatttaatgaatcactacactttatttattaaacatttgagggttgagttccttcatgtcacttttgctaccacaaccacatgatttgtaaactggttccagcatctattactaagtaataaaattttaactgataatcta

SEQ ID NO: 206 - DNA, 5368 bp, Rattus norvegicus
  source 1..5368: mol_type = genomic DNA
tagattatcagttaaaattttattacttagtaatagatgctggaaccagtttacaaatcatgtggttgtggtagcaaaagtgacatgaaggaactcaaccctcaaatgtttaataaataaagtgtagtgattcattaaatatggtacctgcagggtcaaaaataccagtattccaatccaactttaactgcggtcttatagacaacctaaataactaggcaggcaagaaattctagcatcatactatataggaaccactgtagaaactaacagttaactgtgcacaaagttcaatggctccaaaatattgtatggtcttaaagtatcacttgagaaatcagttaaccatcttggtatcattttggttgctttgtataacttcagtaattttccacaattgctgtactctaatgaggttatgtaaacataaatgttgtctttttcttagtaaattatttatatgtactttatggaattgtttattgaactattcatagcattttaatgtaaaaattaatatgaattcccatcatatacattacttcaaaattcagtctttctgtggggctgtagtattactacatagtgatgtgtcatctctgccattgtccccttgaagcagaaaggtagtaacaaaaattgtcagttttactataaccagacacaagaatacaagacacctaagacacatatttaaagataactaattatttaggcaataccttcaatgggttttgttttcatttgattttccactaaggcaaaagatagtcatctcctttttcttggctttaattaaaagaaaatggtgctcatttcataaaaggtaacatcaatattaggacaatgttttttttctggcaaatctatgccacgtttataataattaatgtttaaaattatgtatcctgagcaagaataaaaataacagttttgactaaagaataaagttccttcattgttaaacacttttaaaattcaaccatggaacaaaatcagtaagaacagaattcagactcctgatgtccacagcaaacctgaatactttcggcagaaataaaacacttaagtagattatacacaacagtaaaaagcatcagaaattgatgcatctgggttttgttaagtataacaaaggtcctcagtccttcacggatgaagctaggagaaccacatggaacagtgtactgccacgagcagaaatcactcagaaaggccgtgataaattcctttttggattaagcatagaagtttgtttcttgccccatcccacccccaaacaaagacatagaagatatatttggaaatacccgaggtatcctgttttcataaaagaattatggtcactttgaaaaccaaggtcacttgacttttctgtgttagccctccctccttccctccatccctccatccctccctccctccctacctccctccctcaccatgacaaacgagagctcactacccagcaaagcagcattatgacacactatttacacaccagtgaaggcttggagaaggctctgcagcatcactcaactgcagaaagctctaaggtcagtctctagtctgtaatcaaagtgcttaggagtgagaactaccaaggtagcaaggatcccctcacagtattaaggcctgtccacatgggaatggtcagttgagaatcagtacggtgagcactaggtaacgaccctgggaagagcaccccaggcttcttcagcatgagttttcttctcattcaaacatttgttcttcctcttcatctgcttcttcaatgacctgaatctcatctgcctgaggtaaggaggcattatccacctgcagtttgttcccctcagctttacatttttcttcctcttctatgatttccttccagatcttgtggttttcagtgaggtggtgcattagttggcaaaatattcgccgcctgcctttccttctttgtggtttaggatttagattgtcttctgtttcttcatcatctgaatctaactcttcatcatcatcatcatcatcatcatcatcatcatcatcatcatcatcatcatcatcactttctgtatcgtcaccctcttctgcttctatccactgaccaggcagcaagccagcagcatcataggagttgcacagggggcccacaatgtgggtgataaatgactcttggagttttgctagttgaggagaagaacgatccatgaagggactaataggtagacccagggttgcttcttcatctccctgctcataaaactcattcacaatgccttctgtccatctcaaatgaagatcccgatcttttgctgggccgttgatgtctgctaatttgatgcacacctggcagactaagagtcgatcgttttcactgctccattctataccgttactatttacatcattggccttggcattgaattcagcaaggaactcaaaatgttttttgagatctgtagcaaggattgcttctatgactaaaaatcgaaaacgcttgaattccatgtgatcaaggttaaggaggaagttgtattctgggcgagaaagatacagattccacgctgatgcggcatgatgattttctagaacagatctgtcattgtataaaactgcctgaggtgcatttgtagccactaggaatgcatttgttcttcctgggtgatcataatcgtgcatggcagctgccacatataaagccatcagttctaacgcaggaatgtttgaagacaggcagccataactcttatctggaatacagcaactcttcgaagaaaggtaagcaatctgtccagaactaagtctagcatctgaatctgctttggtttctgtttcatggttattatggagctgctgtaagccaggaattggtcgtgttgtcaaataccaaacagcatgtaggacatctgtggcatgcacacgattgtgatatggaatatctcggtagccattttctagtgcacgaaaataattcataaattcttgagtgggaattttaaatgtttccaataaaccagtatcttgaaataaagtatacataacctggctgagaatccttcctgatttttctcccattttttctacaagctcaaaaatctgaaagttccagttgctcatcttttctattaatgaatcataatcttccactaacatcgggtccaataacacttcctggtcaatattcggttgctgggcctcttccattaggtgatcatcaccttccaaaaataattccctgcagtcttccttcactgtctcttcttcttgagtttccacaatgttcaatcgttcttttgagaaaacagtgctgtcttcttcacctgatttttcattgtggtggtctgtaccatcaggttcacatgtcgaaacatacttgagtatttggtgtccacagctgctacacagactgctgtcagagttcctaaggtactgatggaaatctgctgcactggatacactgcccagtgatctatgtaaagtaacacttggcttagtaagaaaatcactggtatcaagaaatcctacgggtgatcgattagttagacagccagcagacacgggtacatggcttgaagaattcagaagactggggctgggcaaagcaccagctcttctcagacctgcatggtgcgtcagcgacacagatgatgacctctgctttggaattgtcataagatttgaactaaaaggcccatttaggtggcatccatgacttgaaacactgagttcttggtaaggccttttgccaccgctgcgatcccaccgtgagtggtgctcactggtcagcaatcctgacgctcctgagctcctcctcagctgtgcagtcgggaaactgggtttgctactcaaccccttgtgaagttttcgatcgcctttctctactggatcttctacttcagaacagggataaaatccaggaaatggtgtgaaagaattaatctttggcctacaggaacctgagaaagcacccatcaagctactgatactccgcaaagaagaaatgacttgtgggggaaggcttgggtcaatcagaaggtctgacaccatattgcgagcttcatttagcactgaaagatcaactccatttccacctccagaattctggtaatgaggtttacaccactgcttcaagtcccagtcccagagaatcatctgttctcgagaaatacaaggcaacgacggtctcctgaacatcttgccactgccatagtaaccggccgcgctttctcccagcgacacgcagctggacctcctccggggtctgatcacaggcactttttcatccgcggtactcgccgagcgcgggggaggtgaggctccccggacgtgaaagaagtggtccaagcccagggctagcaggcatcccgcgcccccgaccaggcacgacagcagaggcctgagcgcgggcggcagagccccgaggccggagaaggacacccaccacaccaggccggcgaagagcagcaccaggactccgtgccgcagcctcacgcgaggcgcgagcgtcagcagccccacgcagctcagcaccaggcagagccggccggccgccgccgccgccggctccccgcgcagccacgaccaccactgccacgccgcgaagtcgcccaggtagcagcaggcaggcagcgccagcagccaccaggagccggcgccgcggtccgggccgcgctgcgcgcgcgtcaggaagcaggtgaggaagaagaaggcacaggcgatgctgaagagcgggctgaggctgagcgagcaagcgctcagcagcgtccgaagcccggtcgccgcggccgcccagcgctcgggccccgcgcccagcagcgcggccaggacaaaggcggccagagcggcgagcgagaggcgtgccccggcgcggagcgaggccgccggcggctccacgttgcagaagcggcagaggtggaagaagaagctgcgcggagggtcctgccgcagcgggctcacgcagctcttcacgtagccgttgcgcaggctctcggggggcgaggcggccgtggccgtggccggcggcggcggcggcggcggggacctcatggctggcgtgtcccgctcgcgctcgtccttcctcatagccccgggctgccgggaggccgctggcgctcgccgaccccgcgccctccccgttccgggcgccccgagcttcgcagagcggtcacggctgcgcctgccgccgccgccgccccggatccccggcgcgcgggctgaggggcggcggcgtccgcctcatgcccgcagtggagagcggcgagaggggattctcggtgtcccagggccggctgccgcggacgccttttccctttcccctcaggcacggctcgggacgggagacggctgcgtcgcctcccagctcccgcgcgctgcaacagtt

SEQ ID NO: 207 - DNA, 8305 bp, Macaca fascicularis
  source 1..8305: mol_type = genomic DNA
cgacagccgcgggggaggagcgcccgcccgctgctcgcgcgcccaacggaccaggctggggccgtgaggtaactgttgcagccagcggagctgggaggcgacaccgagtctccagtcccgagaggtgcccaagggaaaaggaggcggcagccaaactggtcctggagagaagccccttctgcccctctcctcagccagcatgtcccggactccgccgctcctcagtccgcgaggtggggacctcgggccgtggcggcgggcgcagccctgacgggttgtgagtcggagggcgccccgaacgcaggggctggggtctgggaacgcgagcggccgctacggtaggagcggggtgtgctgagtcccgtggccacccccggcctcagccatgaggagggacgagcgagacgccaaagccatgcggtccctgcagcagccagatggggccggctcgccccccgagagtctgaggaacggctacgtgaagagttgcgtgagccccttgcggcaggaccctccgcgcggcttcttcttccacctctgccgcttctgcaacgtggagctgcggccgccgccggcctccccccagcagccgcggcgcggctcccccttctgccgggcgcgcctctcgctgggcgccctggctgcctttgtcctcgccctgctgctgggcgcggaacccgagagctgggctgccggggccgcctggctgcggacgctgctgagcgtgtgttcgcacagcctcagccccctctttagcatcgcctgtgccttcttcttcctcacctgcttcctcacccggaccaagcggggacccggcccgggccggagcggcggctcctggtggctgctggcgctgcccgcctgctgttacctgggggacttcttggtgtggcagtggtggtcctggccttggggggatggcgacgcagggtccccggccacgcacacgcccccggaggcggcggccggcaggttgctgctggtgctgagctgcgtggggctgctgctgacgctcgcgcaccctctgcggctccggcactgcctcctggtgctgctcctggccagcttcgtctggtgggtctccttcaccagcctcgggtcgctgccctccgccctcaggccgctgctctccggcctggtggggggcgctggctgcctgctggccctggcgttggatcacttctttcaaatcagggaagcgcctcttcatcctcggctgtccagtgccgccgaagaaaaagtgcctgtgattcgaccccggaggaggtccagctgcgtgtcgctaggagaaactgcagccagttactacggcagttgcaaaatattcaggagaccttcgttgccttgtatttcgagagagcagatgattctttgggattgggacttaaagcaatggtataagcctcattatcaaaattctggaggcggaaatggagttgatcttgcagtgctaaatgaggctcgcaatatggtttcagatcttctgattgatccaagccttcctccacaagtcatttcctctctacggagtatcagtagcttaatgggtgctttctcaggttcctgtaggccaaagattaatcctctcacaccatttcctggattttacccctgctctgaaatagaggacccagctgagaaaggggatagaaaacttaacaagggactaaataggaatagttcgccaactccacagctgaggaggagctcaggaacttcaggattgctacctgttgaacagtcttcaaggtgggaacgtaataatggcaaaaggcctcaccaagaatttggcatttcaagtcaaggatgctatctaaatgggccttttaattcaaatctactgactatcccgaagcaaaggtcatcttctgtatcactgactcaccatgtaggtctgagaagagctggtgttttatccagtctgagtcctgtgaattctcccaactatggaccaatggctgctggctctctaactaatcgatcacccatagaatttcctgatactgctgattttcttaataagccaagcattattttacagagatctctgggcaatgcacctaatacaccagatttttatcagcatcttagaaattctgatagcaatctgtgtaacaactgtggacatcaaatactgaaatatgtttcaacatctgaatcagacagtacagattgctgcagtggaaaatcaggtgaagaagaaaacattttctcaaaagaatcattcaaacttatggaaactcaacaagaagagaaaacagagaagaaagacagcagaaaattatttcaggaaggtgataattggctaacagaagaggcacagaatgaacagcaaacaaatattgaacaggaagtatcactggacctgattttagtagaagagtatgactcattaatagagaagatgagcaactggaattttccaatttttgaacttgtagaaaagatgggagagaaatcaggaaggattctcagtcaggttatgtataccttatttcaagacactggtttattggaaatatttaaaattcccactcaacaatttatgaactattttcgtgcattagaaaatggctatcgagacattccttatcacaatcgtatacatgccacagatgtcctacatgcagtttggtatctgacaacacggccagttcctggcttacagcagatccacaatggttgtggaacaggaaatgaaacagattctgatggtagaattaactgtgggcgaattgcttatatttcttcgaagagctgctctattccagatgagagttatggctgcctgtcttcaaacatccctgcattagaattgatggctctatacgtggcagctgccatgcatgattatgaccacccagggaggacaaatgcatttctagtggctacaaatgcccctcaggcagttttatacaatgacagatctgttctggaaaatcatcatgctgcatcagcttggaatctgtatctttctcgcccagaatacaacttccttcttcatcttgatcatgtggaattcaagcgctttcgttttttagtcatcgaagcaatccttgccacagatcttaaaaagcattttgattttcttgcagaattcaatgccaaggcaaatgatgtaaatagtaatggcatagaatggagtaatgaaaatgatcgcctcttggtatgccaggtgtgcatcaaactggcagatataaatggcccagcaaaagttcgagacttgcatttgaaatggacagaaggcattgtcaatgaattttatgagcagggagatgaagaagcaaatcttggtctgcccatcagtccattcatggatcgttcttctcctcaactagcaaaactccaagaatcttttatcacccacatagtgggtcccctgtgtaactcctatgatgctgctggtttgctaccaggtcagtggatagaagcagaagaggataatgatactgaaagtggtgatgatgaagatggtgaagaattagatacagatgatgaagaaatggaaaacaatctaaatccaaaaccaccaagaaggaaaagcagacggcaaatattttgtcagctaatgcaccacctcactgaaaaccacaagatatggaaggaaatcatagaggaagaagaaaaatgtaaagctgatgggaataaactgcaggtggagaactcctccttacctcaagcagatgagattcaggtcattgaagaagcagatgaagaggaagagcgacagtttgagtaaaagaaaagtcatattgaagaagcccagagggctgtgcccaggggcagaaatcattgcctagtgtccaccggctgactctcaactgaccattcccacatggacaagccttaatactgtgagaggatccttgctctgctggcagtttcccactcctatgcactttcacaggaactagaaaactattcttaaaccaagaataccatccatgttgacccatattgcagagcccttacttaaatccttcactattgtatgaatactttgtcataatgctgctttgctgggtagtgagctcttatttttcattgggggtcagctataactaaaaactcaagtgacttatttcagttaccaaagtggccagaactttcgcttttatgaaaatagattcatattgtatttcccaatgtgtcttttatgtctttgaatgttttggaaaaaagtctatgcctgtctaaaaatgaatccagtgttgcctttctgagggatttcttctcaatgcaatacactgttaagttctattctcccagctaggtttatccatgaaggactgagtgacctttgttatatttaacaaaatccaggtgcatcaatttctgatgctttttactattgtgtattatctactatgtgtgttttatttctgctgagagtattcaggtttgccatggacatcagaagtttgaattccagtcttaccttctttatgttccatggctgaattttaaagctgtttaggcttaacaatgaagggattattctttagtcaaaattgttatttttactctagctcaggatttgtatttttaaagatttagttaatataaacacagcacagatttgtcagaagaaaaaaaatttgccgtaataccaaggttcaccttttatgaaatgagcaacattttctcttcttagatgaatttgaaactaattaaaaccaaagaaaaggagatgtctgtcttttgccttaatgcaaaatcaaatgaaactaatctcattaaagataaagaaaaaaggaatatagtgagccctaaaggacacgtacattgaataaataattggaatatgtggttatctttagatccatatcttagttgtcatttgtttactctcaaactgatgttcatctttctgttaatttccctctgcctcaagactacatgacagaaatgacctatcactacttattatttctgaagcccaactgcaagactgatttctgagatcaagtaaagaattggaatacttatttttcatataaaaaatctaaatatgttaataaatcatttcatacaaaagtacattattaaataaccatattatcaaaataatcacaagaaaatggaccatatttacaatgttttgtaaacttgccagtgtgtggatatgtaccctacttgtgaaatacatttgaagatataaagatcagccaaaatgatggcaaaatggtaggctaatatcttctattattattggagaccatatcatattttggattcatgcaattttgcacacagtgaaaccattaattttccaaggtaattcctttagaatatggtattggcatgcagtttcttacttatctagaatatttggcttatctgaaagataccaatttaagatctctggaagtgttagaatttttgatccttcacagtatcaatatttaatcactaagctttatttattagacatgttgagtgagtgctgagttccttgctgccacttttgttaccattgccacacactatttgtaaaccagtcccaccacttattactgattaataaaattttaactgataattatttgcacttaaaatgtatatatcctgtccttatatttctctagagtacattttccatcatgtttacgtgtatttctgttattacttcctctcctgcagaatacatacaagtgtatgtgtataaattcatacatgtgcaagcatgcatattgagattcaatcacatttccatactgtcttttattgggttttatatatatatattttttttagtttatgttattttctcaaaagcagtatttttaattacaaatactggatttactggatttaattataaatccaattactattgggaactcatttttacataatatagtccttaaattatttaacccttgctaagtaattgacatatgtcaaaataactagcctaaagaaacccaaaaaagtatctctcccgagctgaaacttaaaaattcataagtgtaagaaagaatatgagagtatattaaatgcacaccgtactattagatgaaatcttacttgagaaattgccataagccatattgcagatcttattttgactgctactgaatcagattaatttcttgttaaaataattttcatcataaatctcctatttttaaagccactggtattagaaatattcttttagtgctgtatatatgtatctactgacacatttttctccataaaagtacttttagaaattatttcatgatttgaaagctgtttcctgctgttatttcattacttactttgttggtgctattggctttttctacttattttacaagaaacctggagtttctggcttacttaagtcatcagaaattccctgtatctagattgcatcatctcatagaaacaaacttcacaaaggagatgaatagatacaactctggttccttcattataattgccagattaatataagctcttctagtgtgtaggggataggagtggcaggtggagcagagatgcatcacttctcaaaggaatgtgacttttaagctcagaactgaagaattaagagttagctcagaaatgactgcttgtagagagagaataacagtgtgtacagaggccagaagagaaaggatccctacactggatgagccaaagagatttagggtggctggaagatagagcacaagaagagggagtggtagagagatggtggttaatgaagggccttgtaaaacatgacgtgccactttaaactttattcctaaaggaaatgggaaacaatgaaaaagtttcaatcggaagaataacatgattagatttacattttacgaggatcaaatagcatacttcagttgtcctttgttatatgtgggggattggttctaggacctcctcagctataaaaattgtcacatattcaagtctcacagtcaaccctgtggaacccgcagatacaaaaagttggccctctctatacgagggttacacatcccactaatactatattttcatctgcatttagttgcggatgcagaacctgccaatacaggaccaactatatttactgaaaaactccacatataagtggacccatggagttcgaacccatgttgttcaagggtcaactgtattttgaatggtttaaaactattgttttggactgagttcctgcacctaggccccaatagaccagaccaaagcaaaatggagtcattcatactaaatgccacacaatcaaactgaaactttaaggaaatacattgatccccagactagttttttctcaaaacaggagattccagtctatctgagcataatgaaggaagtccccgctgctttaacctgtacaaagaagacgtaatctgaagtaacctagtgataactgatcagtttttatttttctattattctgtttccttgttcccatccttacaaaacccactgttctgccattacccagtgggaatttcattctattttgtagaatgcaagttacctgatacatgaatctagaataaaagccaattatgtctgtaacaatttgttgttaattttgtcttttgacagaatggcagagcaagatttagacaaagggagtgcttggcgatattgactggaatagattgtggaccacagcgacgtgaacagagttatgatttaatatggagttggtatgggggtaagaaagattaggggtggctcccagatttcagatttagacagctgtcaatatcattcactgagttagggtatatcagaggaattgattttggatgtgttagagagtgaagagacaaattcagattagagcaaagtgagattaagaggcttgagacaaccaagtggatttcagtgtaggtatggaattcagaaaagtgatatgggctacaagtatggatctgggagtcaacagcaaatagttggaagtctattttgagtatcaagcttttctcaaaaactgtgtcatagtattggcttctggtacattggacaatgagccctttttgcttgctaacactgctgcattctgtatctttgtttcattatcctggacatctcaccatatcactacacagaaaaattccttattcttggttgggtgtggtggctcacactgtaatcccagcactttgggaggccgaggtgggtggatctcttaagctcaagagttcgagaccagcctgggtaacatggctctcagtattaaggtacttctacctatttgtttttgcatgtcttataatttctgccttatgaaagttgttatttggtgtggtattataactgttataaagtccttatgaattatagtacttagaattacaaa

SEQ ID NO: 208 - DNA, 8305 bp, Macaca fascicularis
  source 1..8305: mol_type = genomic DNA
tttgtaattctaagtactataattcataaggactttataacagttataataccacaccaaataacaactttcataaggcagaaattataagacatgcaaaaacaaataggtagaagtaccttaatactgagagccatgttacccaggctggtctcgaactcttgagcttaagagatccacccacctcggcctcccaaagtgctgggattacagtgtgagccaccacacccaaccaagaataaggaatttttctgtgtagtgatatggtgagatgtccaggataatgaaacaaagatacagaatgcagcagtgttagcaagcaaaaagggctcattgtccaatgtaccagaagccaatactatgacacagtttttgagaaaagcttgatactcaaaatagacttccaactatttgctgttgactcccagatccatacttgtagcccatatcacttttctgaattccatacctacactgaaatccacttggttgtctcaagcctcttaatctcactttgctctaatctgaatttgtctcttcactctctaacacatccaaaatcaattcctctgatataccctaactcagtgaatgatattgacagctgtctaaatctgaaatctgggagccacccctaatctttcttacccccataccaactccatattaaatcataactctgttcacgtcgctgtggtccacaatctattccagtcaatatcgccaagcactccctttgtctaaatcttgctctgccattctgtcaaaagacaaaattaacaacaaattgttacagacataattggcttttattctagattcatgtatcaggtaacttgcattctacaaaatagaatgaaattcccactgggtaatggcagaacagtgggttttgtaaggatgggaacaaggaaacagaataatagaaaaataaaaactgatcagttatcactaggttacttcagattacgtcttctttgtacaggttaaagcagcggggacttccttcattatgctcagatagactggaatctcctgttttgagaaaaaactagtctggggatcaatgtatttccttaaagtttcagtttgattgtgtggcatttagtatgaatgactccattttgctttggtctggtctattggggcctaggtgcaggaactcagtccaaaacaatagttttaaaccattcaaaatacagttgacccttgaacaacatgggttcgaactccatgggtccacttatatgtggagtttttcagtaaatatagttggtcctgtattggcaggttctgcatccgcaactaaatgcagatgaaaatatagtattagtgggatgtgtaaccctcgtatagagagggccaactttttgtatctgcgggttccacagggttgactgtgagacttgaatatgtgacaatttttatagctgaggaggtcctagaaccaatcccccacatataacaaaggacaactgaagtatgctatttgatcctcgtaaaatgtaaatctaatcatgttattcttccgattgaaactttttcattgtttcccatttcctttaggaataaagtttaaagtggcacgtcatgttttacaaggcccttcattaaccaccatctctctaccactccctcttcttgtgctctatcttccagccaccctaaatctctttggctcatccagtgtagggatcctttctcttctggcctctgtacacactgttattctctctctacaagcagtcatttctgagctaactcttaattcttcagttctgagcttaaaagtcacattcctttgagaagtgatgcatctctgctccacctgccactcctatcccctacacactagaagagcttatattaatctggcaattataatgaaggaaccagagttgtatctattcatctcctttgtgaagtttgtttctatgagatgatgcaatctagatacagggaatttctgatgacttaagtaagccagaaactccaggtttcttgtaaaataagtagaaaaagccaatagcaccaacaaagtaagtaatgaaataacagcaggaaacagctttcaaatcatgaaataatttctaaaagtacttttatggagaaaaatgtgtcagtagatacatatatacagcactaaaagaatatttctaataccagtggctttaaaaataggagatttatgatgaaaattattttaacaagaaattaatctgattcagtagcagtcaaaataagatctgcaatatggcttatggcaatttctcaagtaagatttcatctaatagtacggtgtgcatttaatatactctcatattctttcttacacttatgaatttttaagtttcagctcgggagagatacttttttgggtttctttaggctagttattttgacatatgtcaattacttagcaagggttaaataatttaaggactatattatgtaaaaatgagttcccaatagtaattggatttataattaaatccagtaaatccagtatttgtaattaaaaatactgcttttgagaaaataacataaactaaaaaaaatatatatatataaaacccaataaaagacagtatggaaatgtgattgaatctcaatatgcatgcttgcacatgtatgaatttatacacatacacttgtatgtattctgcaggagaggaagtaataacagaaatacacgtaaacatgatggaaaatgtactctagagaaatataaggacaggatatatacattttaagtgcaaataattatcagttaaaattttattaatcagtaataagtggtgggactggtttacaaatagtgtgtggcaatggtaacaaaagtggcagcaaggaactcagcactcactcaacatgtctaataaataaagcttagtgattaaatattgatactgtgaaggatcaaaaattctaacacttccagagatcttaaattggtatctttcagataagccaaatattctagataagtaagaaactgcatgccaataccatattctaaaggaattaccttggaaaattaatggtttcactgtgtgcaaaattgcatgaatccaaaatatgatatggtctccaataataatagaagatattagcctaccattttgccatcattttggctgatctttatatcttcaaatgtatttcacaagtagggtacatatccacacactggcaagtttacaaaacattgtaaatatggtccattttcttgtgattattttgataatatggttatttaataatgtacttttgtatgaaatgatttattaacatatttagattttttatatgaaaaataagtattccaattctttacttgatctcagaaatcagtcttgcagttgggcttcagaaataataagtagtgataggtcatttctgtcatgtagtcttgaggcagagggaaattaacagaaagatgaacatcagtttgagagtaaacaaatgacaactaagatatggatctaaagataaccacatattccaattatttattcaatgtacgtgtcctttagggctcactatattccttttttctttatctttaatgagattagtttcatttgattttgcattaaggcaaaagacagacatctccttttctttggttttaattagtttcaaattcatctaagaagagaaaatgttgctcatttcataaaaggtgaaccttggtattacggcaaattttttttcttctgacaaatctgtgctgtgtttatattaactaaatctttaaaaatacaaatcctgagctagagtaaaaataacaattttgactaaagaataatcccttcattgttaagcctaaacagctttaaaattcagccatggaacataaagaaggtaagactggaattcaaacttctgatgtccatggcaaacctgaatactctcagcagaaataaaacacacatagtagataatacacaatagtaaaaagcatcagaaattgatgcacctggattttgttaaatataacaaaggtcactcagtccttcatggataaacctagctgggagaatagaacttaacagtgtattgcattgagaagaaatccctcagaaaggcaacactggattcatttttagacaggcatagacttttttccaaaacattcaaagacataaaagacacattgggaaatacaatatgaatctattttcataaaagcgaaagttctggccactttggtaactgaaataagtcacttgagtttttagttatagctgacccccaatgaaaaataagagctcactacccagcaaagcagcattatgacaaagtattcatacaatagtgaaggatttaagtaagggctctgcaatatgggtcaacatggatggtattcttggtttaagaatagttttctagttcctgtgaaagtgcataggagtgggaaactgccagcagagcaaggatcctctcacagtattaaggcttgtccatgtgggaatggtcagttgagagtcagccggtggacactaggcaatgatttctgcccctgggcacagccctctgggcttcttcaatatgacttttcttttactcaaactgtcgctcttcctcttcatctgcttcttcaatgacctgaatctcatctgcttgaggtaaggaggagttctccacctgcagtttattcccatcagctttacatttttcttcttcctctatgatttccttccatatcttgtggttttcagtgaggtggtgcattagctgacaaaatatttgccgtctgcttttccttcttggtggttttggatttagattgttttccatttcttcatcatctgtatctaattcttcaccatcttcatcatcaccactttcagtatcattatcctcttctgcttctatccactgacctggtagcaaaccagcagcatcataggagttacacaggggacccactatgtgggtgataaaagattcttggagttttgctagttgaggagaagaacgatccatgaatggactgatgggcagaccaagatttgcttcttcatctccctgctcataaaattcattgacaatgccttctgtccatttcaaatgcaagtctcgaacttttgctgggccatttatatctgccagtttgatgcacacctggcataccaagaggcgatcattttcattactccattctatgccattactatttacatcatttgccttggcattgaattctgcaagaaaatcaaaatgctttttaagatctgtggcaaggattgcttcgatgactaaaaaacgaaagcgcttgaattccacatgatcaagatgaagaaggaagttgtattctgggcgagaaagatacagattccaagctgatgcagcatgatgattttccagaacagatctgtcattgtataaaactgcctgaggggcatttgtagccactagaaatgcatttgtcctccctgggtggtcataatcatgcatggcagctgccacgtatagagccatcaattctaatgcagggatgtttgaagacaggcagccataactctcatctggaatagagcagctcttcgaagaaatataagcaattcgcccacagttaattctaccatcagaatctgtttcatttcctgttccacaaccattgtggatctgctgtaagccaggaactggccgtgttgtcagataccaaactgcatgtaggacatctgtggcatgtatacgattgtgataaggaatgtctcgatagccattttctaatgcacgaaaatagttcataaattgttgagtgggaattttaaatatttccaataaaccagtgtcttgaaataaggtatacataacctgactgagaatccttcctgatttctctcccatcttttctacaagttcaaaaattggaaaattccagttgctcatcttctctattaatgagtcatactcttctactaaaatcaggtccagtgatacttcctgttcaatatttgtttgctgttcattctgtgcctcttctgttagccaattatcaccttcctgaaataattttctgctgtctttcttctctgttttctcttcttgttgagtttccataagtttgaatgattcttttgagaaaatgttttcttcttcacctgattttccactgcagcaatctgtactgtctgattcagatgttgaaacatatttcagtatttgatgtccacagttgttacacagattgctatcagaatttctaagatgctgataaaaatctggtgtattaggtgcattgcccagagatctctgtaaaataatgcttggcttattaagaaaatcagcagtatcaggaaattctatgggtgatcgattagttagagagccagcagccattggtccatagttgggagaattcacaggactcagactggataaaacaccagctcttctcagacctacatggtgagtcagtgatacagaagatgacctttgcttcgggatagtcagtagatttgaattaaaaggcccatttagatagcatccttgacttgaaatgccaaattcttggtgaggccttttgccattattacgttcccaccttgaagactgttcaacaggtagcaatcctgaagttcctgagctcctcctcagctgtggagttggcgaactattcctatttagtcccttgttaagttttctatcccctttctcagctgggtcctctatttcagagcaggggtaaaatccaggaaatggtgtgagaggattaatctttggcctacaggaacctgagaaagcacccattaagctactgatactccgtagagaggaaatgacttgtggaggaaggcttggatcaatcagaagatctgaaaccatattgcgagcctcatttagcactgcaagatcaactccatttccgcctccagaattttgataatgaggcttataccattgctttaagtcccaatcccaaagaatcatctgctctctcgaaatacaaggcaacgaaggtctcctgaatattttgcaactgccgtagtaactggctgcagtttctcctagcgacacgcagctggacctcctccggggtcgaatcacaggcactttttcttcggcggcactggacagccgaggatgaagaggcgcttccctgatttgaaagaagtgatccaacgccagggccagcaggcagccagcgccccccaccaggccggagagcagcggcctgagggcggagggcagcgacccgaggctggtgaaggagacccaccagacgaagctggccaggagcagcaccaggaggcagtgccggagccgcagagggtgcgcgagcgtcagcagcagccccacgcagctcagcaccagcagcaacctgccggccgccgcctccgggggcgtgtgcgtggccggggaccctgcgtcgccatccccccaaggccaggaccaccactgccacaccaagaagtcccccaggtaacagcaggcgggcagcgccagcagccaccaggagccgccgctccggcccgggccgggtccccgcttggtccgggtgaggaagcaggtgaggaagaagaaggcacaggcgatgctaaagagggggctgaggctgtgcgaacacacgctcagcagcgtccgcagccaggcggccccggcagcccagctctcgggttccgcgcccagcagcagggcgaggacaaaggcagccagggcgcccagcgagaggcgcgcccggcagaagggggagccgcgccgcggctgctggggggaggccggcggcggccgcagctccacgttgcagaagcggcagaggtggaagaagaagccgcgcggagggtcctgccgcaaggggctcacgcaactcttcacgtagccgttcctcagactctcggggggcgagccggccccatctggctgctgcagggaccgcatggctttggcgtctcgctcgtccctcctcatggctgaggccgggggtggccacgggactcagcacaccccgctcctaccgtagcggccgctcgcgttcccagaccccagcccctgcgttcggggcgccctccgactcacaacccgtcagggctgcgcccgccgccacggcccgaggtccccacctcgcggactgaggagcggcggagtccgggacatgctggctgaggagaggggcagaaggggcttctctccaggaccagtttggctgccgcctccttttcccttgggcacctctcgggactggagactcggtgtcgcctcccagctccgctggctgcaacagttacctcacggccccagcctggtccgttgggcgcgcgagcagcgggcgggcgctcctcccccgcggctgtcg

SEQ ID NO: 209 - DNA, 7484 bp, Macaca mulatta
  source 1..7484: mol_type = genomic DNA
gctcgcgcgcccaacggaccaggctggggccgtgaggtaactgttgcagccagcggagctgggaggcgacaccgagtctccagtcccgagaggtgcccaagggaaaaggaggcggcagccaaactggtcctggagagaagccccttctgcccctctcctcagccagcatgtcccggactccgccgctcctcagtccgcgaggtggggacctcaggccgtggcggcgggcgcagccctgacgggttgtgagtcggggggcgccccgaacgcaggggctggggtctgggaacgcgagcggccgctgcggtaggagcggggtgtgctgagtcccgtggccacccccggcctcagccatgaggagggacgagcgagacgccaaagccatgcggtccctgcagcagccagatggggccggctcgccccccgagagtctgaggaacggctacgtgaagagttgcgtgagccccttgcggcaggaccctccgcgcggcttcttcttccacctctgccgcttctgcaacgtggagctgcggccgccgccggcctccccccagcagccgcggcgcggctcccccttctgccgggcgcgcctctcgctgggcgccctggctgcctttgtcctcgccctgctgctgggcgcggaacccgagagctgggctgccggggccgcctggctgcggacgctgctgagcgtgtgttcgcacagcctcagccccctctttagcatcgcctgtgccttcttcttcctcacctgcttcctcacccggaccaagcggggacccggcccgggccggagcggcggctcctggtggctgctggcgctgcccgcctgctgttacctgggggacttcttggtgtggcagtggtggtcctggccttggggggatggcgacgcagggtccccggccacgcacacgcccccggaggcggcggccggcaggttgctgctggtgctgagctgcgtggggctgctgctgacgctcgcgcaccctctgcggctccggcactgcctcctggtgctgctcctggccagcttcgtctggtgggtctccttcaccagcctcgggtcgctgccctccgccctcaggccgctgctctccggcctggtggggggcgctggctgcctgctggccctggcgttggatcacttctttcaaatcagggaagcgcctcttcatcctcggctgtccagtgccgccgaagaaaaagtgcctgtgatccgaccccggaggaggtccagctgcgtgtcgctaggagaaactgcagccagttactacggcagttgcaaaatattcaggagaccttcgttgccttgtatttcgagagagcagatgattctttgggattgggacttaaagcaatggtataagcctcattatcaaaattctggaggcggaaatggagttgatcttgcagtgctaaatgaggctcgcaatatggtttcagatcttctgattgatccaagccttcctccacaagtcatttcctctctacggagtatcagtagcttaatgggtgctttctcaggttcctgtaggccaaagattaatcctctcacaccatttcctggattttacccctgctctgaaatagaggacccagctgagaaaggggatagaaaacttaacaagggactaaataggaatagttcgccaactccacagctgaggaggagctcaggaacttcaggattgctacctgttgaacagtcttcaaggtgggaacgtaataatggcaaaaggcctcaccaagaatttggcatttcaagtcaaggatgctatctaaatgggccttttaattcaaatctactgactatcccgaagcaaaggtcatcttctgtatcactgactcaccatgtaggtctgagaagagctggtgttttatccagtctgagtcctgtgaattctcccaactatggaccaatggctgctggctctctaactaatcgatcacccatagaatttcctgatactgctgattttcttaataagccaagcattattttacagagatctctgggcaatgcacctaatacaccagatttttatcagcatcttagaaattctgatagcaatctgtgtaacaactgtggacatcaaatactgaaatatgtttcaacatctgaatcagacagtacagattgctgcagtggaaaatcaggtgaagaagaaaacattttctcaaaagaatcattcaaacttatggaaactcaacaagaagagaaaacagagaagaaagacagcagaaaattatttcaggaaggtgataattggctaacagaagagtcacagaatgaacagcaaacaaatattgaacaggaagtatcactggacctgattttagtagaagagtatgactcattaatagagaagatgagcaactggaattttccaatttttgaacttgtagaaaagatgggagagaaatcaggaaggattctcagtcaggttatgtataccttatttcaagacactggtttattggaaatatttaaaattcccactcaacaatttatgaactattttcgtgcattagaaaatggctatcgagacattccttatcacaatcgtatacatgccacagatgtcctacatgcagtttggtatctgacaacacggccagttcctggcttacagcagatccacaatggttgtggaacaggaaatgaaacagattctgatggtagaattaaccgtgggcgaattgcttatatttcttcgaagagctgctctattccagatgagagttatggctgcctgtcttcaaacatccctgcattagaattgatggctctatacgtggcagctgccatgcatgattatgaccacccagggaggacaaatgcatttctagtggctacaaatgcccctcaggcagttttatacaatgacagatctgttctggaaaatcatcatgctgcgtcagcttggaatctgtatctttctcgcccagaatacaacttccttcttcatcttgatcatgtggaattcaagcgctttcgttttttagtcatcgaagcaatccttgccacagatcttaaaaaacattttgattttcttgcagaattcaatgccaaggcaaatgatgtaaatagtaatggcatagaatggagtaatgaaaatgatcgcctcttggtatgccaggtgtgcatcaaactggcagatataaatggcccagcaaaagttcgagacttgcatttgaaatggacagaaggcattgtcaatgaattttatgagcagggagatgaagaagcaaatcttggtctgcccatcagtccattcatggatcgttcttctcctcaactagcaaaactccaagaatcttttatcacccacatagtgggtcccctgtgtaactcctatgatgctgctggtttgctaccaggtcagtggatagaagcagaagaggataatgatactgaaagtggtgatgatgaagatggtgaagaattagatacagatgatgaagaaatggaaaacaatctaaatccaaaaccaccaagaaggaaaagcagacggcaaatattttgtcagctaatgcaccacctcaccgaaaaccacaagatatggaaggaaatcatagaggaagaagaaaaatgtaaagctgatgggaataaactgcaggtggagaactcctccttacctcaagcagatgagattcaggtcattgaagaagcagatgaagaggaagagcgacagtttgagtaaaagaaaagtcatattgaagaagcccagagggctgtgcccaggggcagaaatcattgcctagtgtccaccggctgactctcaactgaccattcccacatggacaagccttaatactgtgagaggatccttgctctgctggcagtttcccactcctatgcactttcacaggaactagaaaactattcttaaaccaagaataccatccatgttgacccatattgcagagcccttacttaaatccttcactattgtatgaatactttgtcataatgctgctttgctgggtagtgagctcttatttttcattgggggtcagctataactaaaaactcaagtgacttatttcagttaccaaagtggccagaactttcgcttttatgaaaatagattcatattgtatttcccaatgtgtcttttatgtctttgaatgttttggaaaaaagtctatgcctgtctaaaaatgaatccagtgttgcctttctgagggatttcttctcaatgcaatacactgttaagttctattctcccagctaggtttatccatgaaggactgagtgacctttgttatatttaacaaaatccaggtgcatcaatttctgatgctttttactattgtgtattatctactatgtgtgttttatttctgctgagagtattcaggtttgccatggacatcagaagtttgaattccagtcttaccttctttatgttccatggctgaattttaaagctgtttaggcttaacaatgaagggatttattctttagtcaaaattgttatttttactctagctcaggatttgtatttttaaagatttagttaatataaacacagcacagatttgtcagaagaaaaaaaatttgccgtaataccaaggttcaccttttatgaaatgagcaacattttctgttcttagatgaatttgaaactaattaaaaccaaagaaaaggagatgtctgtcttttgccttaatgcaaaatcaaatgaaactaatctcattaaagataaagaaaaaaggaatatagtgagccctaaaggacacgtacattgaataaataattggaatatgtggttatctttagatccatatcttagttgtcatttgtttactctcaaactgatgttcatctttctgttaatttccctctgcctcaagactacatgacagaaatgacctatcactacttattatttctgaagcccaactgcaagactgatttctgagatcaagtaaagaattggaatacttatttttcatataaaaaatctaaatatgttaataaatcatttcatacaaaagtacattattaaataaccatattatcaaaataatcacaagaaaatggaccatatttacaatgttttgtaaacttgccagtgtgtggatatgtaccctacttgtgaaatacatttgaagatataaagatcagccaaaatgatggcaaaatggtaggctaatatcttctattattattggagaccatatcatattttggattcatgcaattttgcacacagtgaaaccattaattttccaaggtaatttctttagaatatggtattggcatgcagtttcttacttatctagaatatttggcttatctgaaagataccaatttaagatctctggaagtgttagaatttttgatccttcacagtatcaatatttaatcactaagctttatttattagacatgttgagtgagtgctgagttccttgctgccacttttgttaccattgccacacactatttgtaaaccagtcccaccacttattactgattaataaaattttaactgataattatttgcacttaaaatgtatatatcctgtccttatatttctctagagtacattttccatcatgtttacgtgtatttctgttattacttcctctcctgcagaatacatacaagtgtatgtgtataaattcatacatgtgcaagcatgcatattgagattcaatcacatttccatactgtcttttattgggttttatatatatatattttttttagtttatgttattttctcaaaagcagcatttttaattacaaatactggatttactggatttaattataaatccaattactattgggaactcatttttacataatatagtccttaaattatttaacccttgctaagtaattgacatatgtcaaaataactagcctaaagaaacccaaaaaagtatctctcccgagctgaaacttaaaaattcataagtgtaagaaagaatgtgagagtatattaaatgcacaccgtactattagatgaaatcttacttgagaaattgccataagccatattgcagatcctattttgactgctactgaatcagattaatttcttgttaaaataattttcatcataaatctcctatttttaaagccactggtattagaaatattcttttagtgctgtatatatgtatctactgacacatttttctccataaaagtacttttagaaattatttcatgatttgaaagctgtttcctgctgttatttcattacttactttgttggtgctattggctttttctacttattttacaagaaacctggagtttctggcttacttaagtcatcagaaattccctgtatctagattgcatcatctcatagaaacaaacttcacaaaagagatgaatagatacaactctggttccttcattataattgccagattaatataagctcttctagtgtgtaggggataggagtggcaggtggagcagagatgcatcacttctcaaaggaatgtgacttttaagctcagaactgaagaattaagagttagctcagaaatgactgcttgtagagagagaataacagtgtgtacagaggccagaagacaaagcatccctacactggatgagccaaagagatttagggtggctggaagatagagcacaagaagagggagtggtagagagatggtggttaatgaagggccttgtaaaacatgacgtgccactttaaactttattcctaaaggaaatgggaaacaatgaaaaagtttcaatcggaagaataacatgattagatttacattttacgaggatcaaatagcatacttcagttgtcctttgttatatgtgggggattggttctaggacctcctcagctataaaaattgtcacatattcaagtctcacagtcaaccctgtggaacccgcagatacaaaaagttggccctttctatacgagggttacacatcccactaatactatattttcatctgcatttagttgcggatgcagaacctgccaatacagggccaactatatttactgaaaaactccacatataagtggacccatggagttcgaacccatgttgttcaagggtcaactgtattttgaatggtttaaaactattgttttggactgagttcctgcacctaggccccaatagaccagaccaaagcaaaatggagtcattcatactaaatgccacacaatcaaactgaaactttaaggaaatacattgatccccagactagttttttctcaaaacaggagattccagtctatctgagcataatgaaggaagtccccgctgctttaacctgtacaaagaagacgtaatctgaagtaacctagtgataactgatcagtttttatttttctattattctgtttccttgttcccatccttacaaaacccactgttctgccattacccagtgggaatttcattctattttgtagaatgcaagttacctgatacatgaatctagaataaaagccaattatatctgtaa

SEQ ID NO: 210 - DNA, 7484 bp, Macaca mulatta
  source 1..7484: mol_type = genomic DNA
ttacagatataattggcttttattctagattcatgtatcaggtaacttgcattctacaaaatagaatgaaattcccactgggtaatggcagaacagtgggttttgtaaggatgggaacaaggaaacagaataatagaaaaataaaaactgatcagttatcactaggttacttcagattacgtcttctttgtacaggttaaagcagcggggacttccttcattatgctcagatagactggaatctcctgttttgagaaaaaactagtctggggatcaatgtatttccttaaagtttcagtttgattgtgtggcatttagtatgaatgactccattttgctttggtctggtctattggggcctaggtgcaggaactcagtccaaaacaatagttttaaaccattcaaaatacagttgacccttgaacaacatgggttcgaactccatgggtccacttatatgtggagtttttcagtaaatatagttggccctgtattggcaggttctgcatccgcaactaaatgcagatgaaaatatagtattagtgggatgtgtaaccctcgtatagaaagggccaactttttgtatctgcgggttccacagggttgactgtgagacttgaatatgtgacaatttttatagctgaggaggtcctagaaccaatcccccacatataacaaaggacaactgaagtatgctatttgatcctcgtaaaatgtaaatctaatcatgttattcttccgattgaaactttttcattgtttcccatttcctttaggaataaagtttaaagtggcacgtcatgttttacaaggcccttcattaaccaccatctctctaccactccctcttcttgtgctctatcttccagccaccctaaatctctttggctcatccagtgtagggatgctttgtcttctggcctctgtacacactgttattctctctctacaagcagtcatttctgagctaactcttaattcttcagttctgagcttaaaagtcacattcctttgagaagtgatgcatctctgctccacctgccactcctatcccctacacactagaagagcttatattaatctggcaattataatgaaggaaccagagttgtatctattcatctcttttgtgaagtttgtttctatgagatgatgcaatctagatacagggaatttctgatgacttaagtaagccagaaactccaggtttcttgtaaaataagtagaaaaagccaatagcaccaacaaagtaagtaatgaaataacagcaggaaacagctttcaaatcatgaaataatttctaaaagtacttttatggagaaaaatgtgtcagtagatacatatatacagcactaaaagaatatttctaataccagtggctttaaaaataggagatttatgatgaaaattattttaacaagaaattaatctgattcagtagcagtcaaaataggatctgcaatatggcttatggcaatttctcaagtaagatttcatctaatagtacggtgtgcatttaatatactctcacattctttcttacacttatgaatttttaagtttcagctcgggagagatacttttttgggtttctttaggctagttattttgacatatgtcaattacttagcaagggttaaataatttaaggactatattatgtaaaaatgagttcccaatagtaattggatttataattaaatccagtaaatccagtatttgtaattaaaaatgctgcttttgagaaaataacataaactaaaaaaaatatatatatataaaacccaataaaagacagtatggaaatgtgattgaatctcaatatgcatgcttgcacatgtatgaatttatacacatacacttgtatgtattctgcaggagaggaagtaataacagaaatacacgtaaacatgatggaaaatgtactctagagaaatataaggacaggatatatacattttaagtgcaaataattatcagttaaaattttattaatcagtaataagtggtgggactggtttacaaatagtgtgtggcaatggtaacaaaagtggcagcaaggaactcagcactcactcaacatgtctaataaataaagcttagtgattaaatattgatactgtgaaggatcaaaaattctaacacttccagagatcttaaattggtatctttcagataagccaaatattctagataagtaagaaactgcatgccaataccatattctaaagaaattaccttggaaaattaatggtttcactgtgtgcaaaattgcatgaatccaaaatatgatatggtctccaataataatagaagatattagcctaccattttgccatcattttggctgatctttatatcttcaaatgtatttcacaagtagggtacatatccacacactggcaagtttacaaaacattgtaaatatggtccattttcttgtgattattttgataatatggttatttaataatgtacttttgtatgaaatgatttattaacatatttagattttttatatgaaaaataagtattccaattctttacttgatctcagaaatcagtcttgcagttgggcttcagaaataataagtagtgataggtcatttctgtcatgtagtcttgaggcagagggaaattaacagaaagatgaacatcagtttgagagtaaacaaatgacaactaagatatggatctaaagataaccacatattccaattatttattcaatgtacgtgtcctttagggctcactatattccttttttctttatctttaatgagattagtttcatttgattttgcattaaggcaaaagacagacatctccttttctttggttttaattagtttcaaattcatctaagaacagaaaatgttgctcatttcataaaaggtgaaccttggtattacggcaaattttttttcttctgacaaatctgtgctgtgtttatattaactaaatctttaaaaatacaaatcctgagctagagtaaaaataacaattttgactaaagaataaatcccttcattgttaagcctaaacagctttaaaattcagccatggaacataaagaaggtaagactggaattcaaacttctgatgtccatggcaaacctgaatactctcagcagaaataaaacacacatagtagataatacacaatagtaaaaagcatcagaaattgatgcacctggattttgttaaatataacaaaggtcactcagtccttcatggataaacctagctgggagaatagaacttaacagtgtattgcattgagaagaaatccctcagaaaggcaacactggattcatttttagacaggcatagacttttttccaaaacattcaaagacataaaagacacattgggaaatacaatatgaatctattttcataaaagcgaaagttctggccactttggtaactgaaataagtcacttgagtttttagttatagctgacccccaatgaaaaataagagctcactacccagcaaagcagcattatgacaaagtattcatacaatagtgaaggatttaagtaagggctctgcaatatgggtcaacatggatggtattcttggtttaagaatagttttctagttcctgtgaaagtgcataggagtgggaaactgccagcagagcaaggatcctctcacagtattaaggcttgtccatgtgggaatggtcagttgagagtcagccggtggacactaggcaatgatttctgcccctgggcacagccctctgggcttcttcaatatgacttttcttttactcaaactgtcgctcttcctcttcatctgcttcttcaatgacctgaatctcatctgcttgaggtaaggaggagttctccacctgcagtttattcccatcagctttacatttttcttcttcctctatgatttccttccatatcttgtggttttcggtgaggtggtgcattagctgacaaaatatttgccgtctgcttttccttcttggtggttttggatttagattgttttccatttcttcatcatctgtatctaattcttcaccatcttcatcatcaccactttcagtatcattatcctcttctgcttctatccactgacctggtagcaaaccagcagcatcataggagttacacaggggacccactatgtgggtgataaaagattcttggagttttgctagttgaggagaagaacgatccatgaatggactgatgggcagaccaagatttgcttcttcatctccctgctcataaaattcattgacaatgccttctgtccatttcaaatgcaagtctcgaacttttgctgggccatttatatctgccagtttgatgcacacctggcataccaagaggcgatcattttcattactccattctatgccattactatttacatcatttgccttggcattgaattctgcaagaaaatcaaaatgttttttaagatctgtggcaaggattgcttcgatgactaaaaaacgaaagcgcttgaattccacatgatcaagatgaagaaggaagttgtattctgggcgagaaagatacagattccaagctgacgcagcatgatgattttccagaacagatctgtcattgtataaaactgcctgaggggcatttgtagccactagaaatgcatttgtcctccctgggtggtcataatcatgcatggcagctgccacgtatagagccatcaattctaatgcagggatgtttgaagacaggcagccataactctcatctggaatagagcagctcttcgaagaaatataagcaattcgcccacggttaattctaccatcagaatctgtttcatttcctgttccacaaccattgtggatctgctgtaagccaggaactggccgtgttgtcagataccaaactgcatgtaggacatctgtggcatgtatacgattgtgataaggaatgtctcgatagccattttctaatgcacgaaaatagttcataaattgttgagtgggaattttaaatatttccaataaaccagtgtcttgaaataaggtatacataacctgactgagaatccttcctgatttctctcccatcttttctacaagttcaaaaattggaaaattccagttgctcatcttctctattaatgagtcatactcttctactaaaatcaggtccagtgatacttcctgttcaatatttgtttgctgttcattctgtgactcttctgttagccaattatcaccttcctgaaataattttctgctgtctttcttctctgttttctcttcttgttgagtttccataagtttgaatgattcttttgagaaaatgttttcttcttcacctgattttccactgcagcaatctgtactgtctgattcagatgttgaaacatatttcagtatttgatgtccacagttgttacacagattgctatcagaatttctaagatgctgataaaaatctggtgtattaggtgcattgcccagagatctctgtaaaataatgcttggcttattaagaaaatcagcagtatcaggaaattctatgggtgatcgattagttagagagccagcagccattggtccatagttgggagaattcacaggactcagactggataaaacaccagctcttctcagacctacatggtgagtcagtgatacagaagatgacctttgcttcgggatagtcagtagatttgaattaaaaggcccatttagatagcatccttgacttgaaatgccaaattcttggtgaggccttttgccattattacgttcccaccttgaagactgttcaacaggtagcaatcctgaagttcctgagctcctcctcagctgtggagttggcgaactattcctatttagtcccttgttaagttttctatcccctttctcagctgggtcctctatttcagagcaggggtaaaatccaggaaatggtgtgagaggattaatctttggcctacaggaacctgagaaagcacccattaagctactgatactccgtagagaggaaatgacttgtggaggaaggcttggatcaatcagaagatctgaaaccatattgcgagcctcatttagcactgcaagatcaactccatttccgcctccagaattttgataatgaggcttataccattgctttaagtcccaatcccaaagaatcatctgctctctcgaaatacaaggcaacgaaggtctcctgaatattttgcaactgccgtagtaactggctgcagtttctcctagcgacacgcagctggacctcctccggggtcggatcacaggcactttttcttcggcggcactggacagccgaggatgaagaggcgcttccctgatttgaaagaagtgatccaacgccagggccagcaggcagccagcgccccccaccaggccggagagcagcggcctgagggcggagggcagcgacccgaggctggtgaaggagacccaccagacgaagctggccaggagcagcaccaggaggcagtgccggagccgcagagggtgcgcgagcgtcagcagcagccccacgcagctcagcaccagcagcaacctgccggccgccgcctccgggggcgtgtgcgtggccggggaccctgcgtcgccatccccccaaggccaggaccaccactgccacaccaagaagtcccccaggtaacagcaggcgggcagcgccagcagccaccaggagccgccgctccggcccgggccgggtccccgcttggtccgggtgaggaagcaggtgaggaagaagaaggcacaggcgatgctaaagagggggctgaggctgtgcgaacacacgctcagcagcgtccgcagccaggcggccccggcagcccagctctcgggttccgcgcccagcagcagggcgaggacaaaggcagccagggcgcccagcgagaggcgcgcccggcagaagggggagccgcgccgcggctgctggggggaggccggcggcggccgcagctccacgttgcagaagcggcagaggtggaagaagaagccgcgcggagggtcctgccgcaaggggctcacgcaactcttcacgtagccgttcctcagactctcggggggcgagccggccccatctggctgctgcagggaccgcatggctttggcgtctcgctcgtccctcctcatggctgaggccgggggtggccacgggactcagcacaccccgctcctaccgcagcggccgctcgcgttcccagaccccagcccctgcgttcggggcgccccccgactcacaacccgtcagggctgcgcccgccgccacggcctgaggtccccacctcgcggactgaggagcggcggagtccgggacatgctggctgaggagaggggcagaaggggcttctctccaggaccagtttggctgccgcctccttttcccttgggcacctctcgggactggagactcggtgtcgcctcccagctccgctggctgcaacagttacctcacggccccagcctggtccgttgggcgcgcgagc

SEQ ID NO: 211 - DNA, 8853 bp, Homo sapiens
  source 1..8853: mol_type = genomic DNA
agtggcaggagcgccgcgcaccgccagccgcagggggcgtgggatgggggcggccggggaggggggcgcccacactgactagagccaaccgcgcacttcaaaagggtgtcggtgccgcgctcccctcccgcggcccgggaacttcaaagcgggccgtgctgccccggctgcctcgctctgctctggggcctcgcagccccggcgcggccgcctggtggcgatgacccgggcgctctgctcagcgctccgccaggctctcctgctgctcgcagcggccgccgagctctcgccaggactgaagtgtgtatgtcttttgtgtgattcttcaaacttcacctgccaaacagaaggagcatgttgggcatcagtcatgctaaccaatggaaaagagcaggtgatcaaatcctgtgtctcccttccagaactgaatgctcaagtcttctgtcatagttccaacaatgttaccaaaaccgaatgctgcttcacagatttttgcaacaacataacactgcaccttccaacagcatcaccaaatgccccaaaacttggacccatggagctggccatcattattactgtgcctgtttgcctcctgtccatagctgcgatgctgacagtatgggcatgccagggtcgacagtgctcctacaggaagaaaaagagaccaaatgtggaggaaccactctctgagtgcaatctggtaaatgctggaaaaactctgaaagatctgatttatgatgtgaccgcctctggatctggctctggtctacctctgttggttcaaaggacaattgcaaggacgattgtgcttcaggaaatagtaggaaaaggtagatttggtgaggtgtggcatggaagatggtgtggggaagatgtggctgtgaaaatattctcctccagagatgaaagatcttggtttcgtgaggcagaaatttaccagacggtcatgctgcgacatgaaaacatccttggtttcattgctgctgacaacaaagataatggaacttggactcaactttggctggtatctgaatatcatgaacagggctccttatatgactatttgaatagaaatatagtgaccgtggctggaatgatcaagctggcgctctcaattgctagtggtctggcacaccttcatatggagattgttggtacacaaggtaaacctgctattgctcatcgagacataaaatcaaagaatatcttagtgaaaaagtgtgaaacttgtgccatagcggacttagggttggctgtgaagcatgattcaatactgaacactatcgacatacctcagaatcctaaagtgggaaccaagaggtatatggctcctgaaatgcttgatgatacaatgaatgtgaatatctttgagtccttcaaacgagctgacatctattctgttggtctggtttactgggaaatagcccggaggtgttcagtcggaggaattgttgaggagtaccaattgccttattatgacatggtgccttcagatccctcgatagaggaaatgagaaaggttgtttgtgaccagaagtttcgaccaagtatcccaaaccagtggcaaagttgtgaagcactccgagtcatggggagaataatgcgtgagtgttggtatgccaacggagcggcccgcctaactgctcttcgtattaagaagactatatctcaactttgtgtcaaagaagactgcaaagcctaatgatgataattatgttaaaaagaaatctctcatagctttcttttccattttcccctttatgtgaatgtttttgccattttttttttgttctacctcaaagataagacagtacagtatttaagtgcccataaggcagcatgaaaagataactctaaagttaagcatgggcaggagttgacttcatccaatctctatgttatgtttaattttattttgaaagcaacacctcaactcatctttttatttaataaggaagaaatatattacaaaagtataaaataagctctataaaaatgttatagtcattaagtttttattttacttgaaccaagagcacatgaatgaacaggaaaagatgtaaaaacatttttttctgagatgaaaacatattaattaaacatgcaaattagagcatgctatctttaggtgatgcaatctatgtttccccctttttaagttagcaggactttttaaaaataaatattgctctaaactttaatatatcgaacgtgagagtggagctgcttagtggaagatgtaagtgaggtgggtgtcccatgtgcttggtctccccttctgctgttctcctgttcttcataatccactactgcagcagtccctgaaccactaaacttgttcctttcatttacaaaagagatacctgacatcctgagacactgagaaatgtcctgaagtcacacagctaatggcagaactggcactaggtccaaatcttgtgataatgaacaccgtaaggttagctagcttcctactttcccttgaatagtgcttttctccctatgtaatatcttttattatgatatttgtggtttagaaggcatattgagttattttgcagaatcataatggacccgcacaaaatctcagaaccatatctgttgacattttttctcatagaaatatcatggttaccccatttgttaatgagcattaatgttttctgaacacttccaaagattaatcaaacataaatattcattgtctgaaaatgtctttaagatacaattcagaggtccctatttcctttgtacatacacacttagaaagaaaagacagaaaaggaagaggaaggaaggaaatattttgagaatatattgagaagaattaagaaaactcttcaatgaagtgttaacaaccaaaccctacagacggtatcagaaacagcaaatagatattcctctaccctttcacagtgagtgagtgagtacagaagaatgctcatgatagttttgccttcattctactttctgtggacacagagtaatgaatatttaatgggacattaaatatgcccttcaaatctataattttactttggtaaacgagatttaacatgatgtcttttatgctcctaaaacatcttttttcaaactccattccttagaacattcttctactgagatgatccaagaccaaaagtgttctttggtacttgcttataaagtgatagtacatgttagcatataatgtattttgaagagtgaagtaaatgctattgataacagtaaaaaaaaaaaaaaaaactaataacagtaaagaaatgctacttgatttttttttaaactggattgctcagattacctgatcgtggtggaacccttttattaagaggaggggaaactttttactatcccatatttaactgttctataaagcaaagcacagcttgggtaatagcgttctgaaggatatacttctgtattttctcatagagtacaatttagtgattatgcttcatttcactatggaaatatgttactgaatctatcttcattttactgagttgaaataaggaaggcaaaaaactgacagctatggagtttgcgtgtacttccatactcgttaatgctctcatccacttattaaataatcatagagcacccatatcttgcttgccacaatatcgggtacaagagggaatacaaagatagataggtcctgccctcagggattttaaagtctaatttgggaatgggaatagggatgtgagtgtgtgggggaagagattaaattgacagataaaatacgaagtgggatgtcttgagttctgcatgacagtgggtttctaggataggtctgaaaattgctttcatttgcaacacatttagaaagtagctttatttggatattacagacaatctaaatatatcatcagtttttaaaagtgcctatgtgaagtgatttttaaaaagagcctatgtgaaggggtaatcttgcttgttcttgttactaatttctcatagattgtttttctgcatatataagaacgaaattatttatttactatggttgtacgtgcctcaaataaacaagaatgatatttcctgttttatttacttatgttgggtaaatatgcttattgaatttttaagagaggattttttaccatctccatttttcttgtcattatgttttgtagcttatttgagggtgtctaaatataatttcatattttattggttcaactttcactctgaagaaatccgtatgttagtacattttgaggtatttttcttgttcttgtgttgtttaactatgactcctaactgagtagtcttatatttcaattacaaaatacattttttaagaaagggaatagagcagcaaaaatgataaggaaaatgttaaaagttgtaatatttcctttactcttaacaggattatatatagaacatgctcacttacaaaaataggatgatgaagtttagagcataaggcaggcttcttgtatatacttatgctgtcaaatgttatattgtttttaatggagtcccattgtgtaatatttatttcttttacattttgttataagcaaaaaaaaaaaaaattctccttaggttatgttcagagtatcagtgttctttactccttacagatattttggctttggggtataatacaagacttgggaaaacactattatgaattttcagtactgtataaagtggtgatgggatttaaatgcagcatcactttctgaaaataagagaaacattatttgttgtcagtatttcagcatgaacttgttgccttgtaaattttgcctttaagtttgtaattggtacagattctgttgtatgctttcttctatgtctaaaatatttggcatgtcacatctagaattcttaatttatgttctgacttgagagttaagtgaaacatgactgtcgtgcactattttaggcatagcacttgcttttcatctttatactttcaattaactttgcattttaaatttccatgattgtatgaaaatagtaacctggttgcagtatctgaaaaaattaaaattagcttttatttaaaaatgaaaatctacaatagattcattaggttagaagttccagaataatttattattttattacacctactattgtagaattactaataaaacaaaacaaaactactcctattttcctggaattttgccaccatgtgacttattggggcagagaaaactcagggttgtctttgagtctgcacaaaagcaccagggaacctgcttagcaaatcgtctgaaaacagggagctgatgtttgccattatacaaagtttgagtaaacaacttaaaattgcttgttagggcatagtctttgattgaaataagtatgagaatgtatttggctaaataaatgtatttaaaatatacaaattttatttcccactggaaaattaagaaagtagcagtaccaaatgaataaaagctggcagttgatgtcttcaataatcattcctttaaaataaattcacaaacacatcattacaagctacttagaaatgtttagtattcgtatcttaaaatggcaccattgtggttttcaaagatattttaaacatcttttgtgaaacatactatttctgtttgacaatgctttgttctagctctgtgtgctgatacctacatggagtttttctgctattttagtgaaaacagtaattcttttatcttgagagctgcttctaaataacaaaaaagttaattggaatgtaagtttttaaaaaatgttaatattaaatagaatttttataatatgggcatttttcaaaacattttaatgaaaatatatagatatttgactttctttttttcatctagccttgctttatatttcattatttttctcactttttttcttaatattccctcactatctttcaacattatcattagttcctaattttaaaaataactcttatttaacttaaccgtctggaatttagccttctaatgaaagagaatcccttagtactctcagagattatataaagttattccaattttgtgtagatgacgaaaccaaggatcagagattaaatgactactagttactagcagaactcttatgaaagcctggtggtgacacccagcactgttccctgccatatccccaacttttactgattaaaaattaattcgcatgcatctaaacctaccttgaatgcacactaacgtaatgtgccattcaatgatgatgataaaatcccacttttctttgggtttctactaaaataatttactcactcagagtgaggtcaatgagaaaaactaaactaggctaagaaagagttgtagaatggttgttgagctaagtaggcaaccactggggtgctgataaaattaatggataaaatttaggaactgtgagagtatagaatttcttagtgcaagtaatgattagagaagcttcctgacatcccccaccctttctgtaaggactgttctttctctttgtaccttggaatgggggtgaaaggtgatttgatagctgaatttgggactatgtccagtgggatattatctaacttttctctctttctcttttttttcccctcagtttctcattagtttgtctttggcattcatcttcttttagtgcattaaaaaatgtttggcagatctcatcaatcccaagtcactctataattcctgtatttctttagttgtcgtttaacctgtccaaacttctacacaatgaacttcttaacaagattttaagttctctgtataagaggtttcacctcataacttctccagtaatccttcatttggcactatagagtatttgttaatggcagagatgatttttcttttaaaacctaaaaagactagctgttatttgtattctagcttttagctaacatataaagaatgtctacttttgctttaatgctaaattccgcttgagaaatagtaactgggaaagacaatttgaaatatatgccccataatgtgattgttaaatttatttctgctgttccataccattgctttgttttgcttttgacaaactaagccattatgctattagtttggaatataatactacagcaaaattaggtaacaatccctattttaaaattcccctaacaataatagaactgccagcatacttttctctttcagttgtagatgaatacattcgagagaatatgagctgtatttcatcctagattttaatattttcagatgtgactgtatttcctgatcattggtccaagttgtcctaaaagaaatttttctctccagacctaacagttttaactgcaagagtttactgtgggttatgttaatctgaattttaatagggccactaagaatctgagtgccttaggagattacccttatacccactgccatcacatccagtcaggcctgttgtgctctatataaatcttcccagctgaggggcaggtgcgggctaaaatccaactgcaattggctcccagacataattttatattttacagagaagcatcttattggcttatatgtgtttaaagaatggtctggcttatacatcttcagaaaatgagaattaaaaagtcaaaataattcttgacatctacagattgaacaaagaacttagaagaaataatactttatcttttcatcctggcattcctgagagaagagaaattgattgtttatcatgttggtttaatttttcaacccagacaatctgcagcaaggcacatggaccccaattttgatatcgtccatacagttttcattctatgcatggagctaattactgactttgcctgtaaagagaggattgtgtgcctaaattttgtctaacaaatgcaagcgtagaatgacatttactaatatttctatttcttccataggctaaataatagtaactaagtatttttaaggacacagccctttttttctctttatacaaaatgagagtatctgagccaaaatattaaattctagttcttttccgcaatgactagtgtcaagctcatgtactcttctgattctagactggagaagattattcaaacttgatctgtgtttcaggtttttaaatgtcctaaaaacagaaaattagattcagatctcaaaaaaggaattttggattgactttcaaagtactaatactaattatacttttcttttggtagcgtgactcttcttatacctaagaacatattacaaatgtcaaaaccattgcattttgacattgcaaaacatgccttgaactcttgaactactgtgaaaagaatcaccgttgtaaagactttttgtaagctagctgatactcttaagtatgtaaaaagattgtctttcagccgacaggcccaaaggaatgtatataaggaaggaatatgaaaaaataaattaggttttaaaataggaattgggcaataaactgtatcaaaaatatgtagatggattttagtagttgtaatttaaatgtggaaggtgaagagaatttcaaactccaaagagaaatgaatgatattcagatgtttcattaatttctagtctgtgaaaatatgcattttatagtaatatgtatagacttattttatttagaaataatagtgttttagaatttattaaaaactcagtgatagcctttataccaaaatgtttaactttaccaacagcaagtcataaaagtatttattttaaagctttttaatattatcgtgtaactttcatctgtcttcagatgtaaataattatctgcctaaatgttatatttttatgtatgcattttctgaaaatgtattgttttgtaaagtgggaaagataataaatcaagcacttcttgcacttgtttctgtgaagcatatagaactctattttaaataaaggaagatgtgtcgta

SEQ ID NO: 212 - DNA, 8853 bp, Homo sapiens
  source 1..8853: mol_type = genomic DNA
tacgacacatcttcctttatttaaaatagagttctatatgcttcacagaaacaagtgcaagaagtgcttgatttattatctttcccactttacaaaacaatacattttcagaaaatgcatacataaaaatataacatttaggcagataattatttacatctgaagacagatgaaagttacacgataatattaaaaagctttaaaataaatacttttatgacttgctgttggtaaagttaaacattttggtataaaggctatcactgagtttttaataaattctaaaacactattatttctaaataaaataagtctatacatattactataaaatgcatattttcacagactagaaattaatgaaacatctgaatatcattcatttctctttggagtttgaaattctcttcaccttccacatttaaattacaactactaaaatccatctacatatttttgatacagtttattgcccaattcctattttaaaacctaatttattttttcatattccttccttatatacattcctttgggcctgtcggctgaaagacaatctttttacatacttaagagtatcagctagcttacaaaaagtctttacaacggtgattcttttcacagtagttcaagagttcaaggcatgttttgcaatgtcaaaatgcaatggttttgacatttgtaatatgttcttaggtataagaagagtcacgctaccaaaagaaaagtataattagtattagtactttgaaagtcaatccaaaattccttttttgagatctgaatctaattttctgtttttaggacatttaaaaacctgaaacacagatcaagtttgaataatcttctccagtctagaatcagaagagtacatgagcttgacactagtcattgcggaaaagaactagaatttaatattttggctcagatactctcattttgtataaagagaaaaaaagggctgtgtccttaaaaatacttagttactattatttagcctatggaagaaatagaaatattagtaaatgtcattctacgcttgcatttgttagacaaaatttaggcacacaatcctctctttacaggcaaagtcagtaattagctccatgcatagaatgaaaactgtatggacgatatcaaaattggggtccatgtgccttgctgcagattgtctgggttgaaaaattaaaccaacatgataaacaatcaatttctcttctctcaggaatgccaggatgaaaagataaagtattatttcttctaagttctttgttcaatctgtagatgtcaagaattattttgactttttaattctcattttctgaagatgtataagccagaccattctttaaacacatataagccaataagatgcttctctgtaaaatataaaattatgtctgggagccaattgcagttggattttagcccgcacctgcccctcagctgggaagatttatatagagcacaacaggcctgactggatgtgatggcagtgggtataagggtaatctcctaaggcactcagattcttagtggccctattaaaattcagattaacataacccacagtaaactcttgcagttaaaactgttaggtctggagagaaaaatttcttttaggacaacttggaccaatgatcaggaaatacagtcacatctgaaaatattaaaatctaggatgaaatacagctcatattctctcgaatgtattcatctacaactgaaagagaaaagtatgctggcagttctattattgttaggggaattttaaaatagggattgttacctaattttgctgtagtattatattccaaactaatagcataatggcttagtttgtcaaaagcaaaacaaagcaatggtatggaacagcagaaataaatttaacaatcacattatggggcatatatttcaaattgtctttcccagttactatttctcaagcggaatttagcattaaagcaaaagtagacattctttatatgttagctaaaagctagaatacaaataacagctagtctttttaggttttaaaagaaaaatcatctctgccattaacaaatactctatagtgccaaatgaaggattactggagaagttatgaggtgaaacctcttatacagagaacttaaaatcttgttaagaagttcattgtgtagaagtttggacaggttaaacgacaactaaagaaatacaggaattatagagtgacttgggattgatgagatctgccaaacattttttaatgcactaaaagaagatgaatgccaaagacaaactaatgagaaactgaggggaaaaaaaagagaaagagagaaaagttagataatatcccactggacatagtcccaaattcagctatcaaatcacctttcacccccattccaaggtacaaagagaaagaacagtccttacagaaagggtgggggatgtcaggaagcttctctaatcattacttgcactaagaaattctatactctcacagttcctaaattttatccattaattttatcagcaccccagtggttgcctacttagctcaacaaccattctacaactctttcttagcctagtttagtttttctcattgacctcactctgagtgagtaaattattttagtagaaacccaaagaaaagtgggattttatcatcatcattgaatggcacattacgttagtgtgcattcaaggtaggtttagatgcatgcgaattaatttttaatcagtaaaagttggggatatggcagggaacagtgctgggtgtcaccaccaggctttcataagagttctgctagtaactagtagtcatttaatctctgatccttggtttcgtcatctacacaaaattggaataactttatataatctctgagagtactaagggattctctttcattagaaggctaaattccagacggttaagttaaataagagttatttttaaaattaggaactaatgataatgttgaaagatagtgagggaatattaagaaaaaaagtgagaaaaataatgaaatataaagcaaggctagatgaaaaaaagaaagtcaaatatctatatattttcattaaaatgttttgaaaaatgcccatattataaaaattctatttaatattaacattttttaaaaacttacattccaattaacttttttgttatttagaagcagctctcaagataaaagaattactgttttcactaaaatagcagaaaaactccatgtaggtatcagcacacagagctagaacaaagcattgtcaaacagaaatagtatgtttcacaaaagatgtttaaaatatctttgaaaaccacaatggtgccattttaagatacgaatactaaacatttctaagtagcttgtaatgatgtgtttgtgaatttattttaaaggaatgattattgaagacatcaactgccagcttttattcatttggtactgctactttcttaattttccagtgggaaataaaatttgtatattttaaatacatttatttagccaaatacattctcatacttatttcaatcaaagactatgccctaacaagcaattttaagttgtttactcaaactttgtataatggcaaacatcagctccctgttttcagacgatttgctaagcaggttccctggtgcttttgtgcagactcaaagacaaccctgagttttctctgccccaataagtcacatggtggcaaaattccaggaaaataggagtagttttgttttgttttattagtaattctacaatagtaggtgtaataaaataataaattattctggaacttctaacctaatgaatctattgtagattttcatttttaaataaaagctaattttaattttttcagatactgcaaccaggttactattttcatacaatcatggaaatttaaaatgcaaagttaattgaaagtataaagatgaaaagcaagtgctatgcctaaaatagtgcacgacagtcatgtttcacttaactctcaagtcagaacataaattaagaattctagatgtgacatgccaaatattttagacatagaagaaagcatacaacagaatctgtaccaattacaaacttaaaggcaaaatttacaaggcaacaagttcatgctgaaatactgacaacaaataatgtttctcttattttcagaaagtgatgctgcatttaaatcccatcaccactttatacagtactgaaaattcataatagtgttttcccaagtcttgtattataccccaaagccaaaatatctgtaaggagtaaagaacactgatactctgaacataacctaaggagaattttttttttttttgcttataacaaaatgtaaaagaaataaatattacacaatgggactccattaaaaacaatataacatttgacagcataagtatatacaagaagcctgccttatgctctaaacttcatcatcctatttttgtaagtgagcatgttctatatataatcctgttaagagtaaaggaaatattacaacttttaacattttccttatcatttttgctgctctattccctttcttaaaaaatgtattttgtaattgaaatataagactactcagttaggagtcatagttaaacaacacaagaacaagaaaaatacctcaaaatgtactaacatacggatttcttcagagtgaaagttgaaccaataaaatatgaaattatatttagacaccctcaaataagctacaaaacataatgacaagaaaaatggagatggtaaaaaatcctctcttaaaaattcaataagcatatttacccaacataagtaaataaaacaggaaatatcattcttgtttatttgaggcacgtacaaccatagtaaataaataatttcgttcttatatatgcagaaaaacaatctatgagaaattagtaacaagaacaagcaagattaccccttcacataggctctttttaaaaatcacttcacataggcacttttaaaaactgatgatatatttagattgtctgtaatatccaaataaagctactttctaaatgtgttgcaaatgaaagcaattttcagacctatcctagaaacccactgtcatgcagaactcaagacatcccacttcgtattttatctgtcaatttaatctcttcccccacacactcacatccctattcccattcccaaattagactttaaaatccctgagggcaggacctatctatctttgtattccctcttgtacccgatattgtggcaagcaagatatgggtgctctatgattatttaataagtggatgagagcattaacgagtatggaagtacacgcaaactccatagctgtcagttttttgccttccttatttcaactcagtaaaatgaagatagattcagtaacatatttccatagtgaaatgaagcataatcactaaattgtactctatgagaaaatacagaagtatatccttcagaacgctattacccaagctgtgctttgctttatagaacagttaaatatgggatagtaaaaagtttcccctcctcttaataaaagggttccaccacgatcaggtaatctgagcaatccagtttaaaaaaaaatcaagtagcatttctttactgttattagtttttttttttttttttactgttatcaatagcatttacttcactcttcaaaatacattatatgctaacatgtactatcactttataagcaagtaccaaagaacacttttggtcttggatcatctcagtagaagaatgttctaaggaatggagtttgaaaaaagatgttttaggagcataaaagacatcatgttaaatctcgtttaccaaagtaaaattatagatttgaagggcatatttaatgtcccattaaatattcattactctgtgtccacagaaagtagaatgaaggcaaaactatcatgagcattcttctgtactcactcactcactgtgaaagggtagaggaatatctatttgctgtttctgataccgtctgtagggtttggttgttaacacttcattgaagagttttcttaattcttctcaatatattctcaaaatatttccttccttcctcttccttttctgtcttttctttctaagtgtgtatgtacaaaggaaatagggacctctgaattgtatcttaaagacattttcagacaatgaatatttatgtttgattaatctttggaagtgttcagaaaacattaatgctcattaacaaatggggtaaccatgatatttctatgagaaaaaatgtcaacagatatggttctgagattttgtgcgggtccattatgattctgcaaaataactcaatatgccttctaaaccacaaatatcataataaaagatattacatagggagaaaagcactattcaagggaaagtaggaagctagctaaccttacggtgttcattatcacaagatttggacctagtgccagttctgccattagctgtgtgacttcaggacatttctcagtgtctcaggatgtcaggtatctcttttgtaaatgaaaggaacaagtttagtggttcagggactgctgcagtagtggattatgaagaacaggagaacagcagaaggggagaccaagcacatgggacacccacctcacttacatcttccactaagcagctccactctcacgttcgatatattaaagtttagagcaatatttatttttaaaaagtcctgctaacttaaaaagggggaaacatagattgcatcacctaaagatagcatgctctaatttgcatgtttaattaatatgttttcatctcagaaaaaaatgtttttacatcttttcctgttcattcatgtgctcttggttcaagtaaaataaaaacttaatgactataacatttttatagagcttattttatacttttgtaatatatttcttccttattaaataaaaagatgagttgaggtgttgctttcaaaataaaattaaacataacatagagattggatgaagtcaactcctgcccatgcttaactttagagttatcttttcatgctgccttatgggcacttaaatactgtactgtcttatctttgaggtagaacaaaaaaaaaatggcaaaaacattcacataaaggggaaaatggaaaagaaagctatgagagatttctttttaacataattatcatcattaggctttgcagtcttctttgacacaaagttgagatatagtcttcttaatacgaagagcagttaggcgggccgctccgttggcataccaacactcacgcattattctccccatgactcggagtgcttcacaactttgccactggtttgggatacttggtcgaaacttctggtcacaaacaacctttctcatttcctctatcgagggatctgaaggcaccatgtcataataaggcaattggtactcctcaacaattcctccgactgaacacctccgggctatttcccagtaaaccagaccaacagaatagatgtcagctcgtttgaaggactcaaagatattcacattcattgtatcatcaagcatttcaggagccatatacctcttggttcccactttaggattctgaggtatgtcgatagtgttcagtattgaatcatgcttcacagccaaccctaagtccgctatggcacaagtttcacactttttcactaagatattctttgattttatgtctcgatgagcaatagcaggtttaccttgtgtaccaacaatctccatatgaaggtgtgccagaccactagcaattgagagcgccagcttgatcattccagccacggtcactatatttctattcaaatagtcatataaggagccctgttcatgatattcagataccagccaaagttgagtccaagttccattatctttgttgtcagcagcaatgaaaccaaggatgttttcatgtcgcagcatgaccgtctggtaaatttctgcctcacgaaaccaagatctttcatctctggaggagaatattttcacagccacatcttccccacaccatcttccatgccacacctcaccaaatctaccttttcctactatttcctgaagcacaatcgtccttgcaattgtcctttgaaccaacagaggtagaccagagccagatccagaggcggtcacatcataaatcagatctttcagagtttttccagcatttaccagattgcactcagagagtggttcctccacatttggtctctttttcttcctgtaggagcactgtcgaccctggcatgcccatactgtcagcatcgcagctatggacaggaggcaaacaggcacagtaataatgatggccagctccatgggtccaagttttggggcatttggtgatgctgttggaaggtgcagtgttatgttgttgcaaaaatctgtgaagcagcattcggttttggtaacattgttggaactatgacagaagacttgagcattcagttctggaagggagacacaggatttgatcacctgctcttttccattggttagcatgactgatgcccaacatgctccttctgtttggcaggtgaagtttgaagaatcacacaaaagacatacacacttcagtcctggcgagagctcggcggccgctgcgagcagcaggagagcctggcggagcgctgagcagagcgcccgggtcatcgccaccaggcggccgcgccggggctgcgaggccccagagcagagcgaggcagccggggcagcacggcccgctttgaagttcccgggccgcgggaggggagcgcggcaccgacacccttttgaagtgcgcggttggctctagtcagtgtgggcgcccccctccccggccgcccccatcccacgccccctgcggctggcggtgcgcggcgctcctgccact

SEQ ID NO: 213 - DNA, 9033 bp, Mus musculus
  source 1..9033: mol_type = genomic DNA
gccccgggaacttcaaagcggcccgcgctgcgggctgcgctctgggaccccgaagccttgcaccgccgccgggtggccatgaccccagcgcgcggctccgcactgagcctggccctcctgctggtggccctggccgccgaccttgcggcaggactgaagtgtgtgtgtcttttgtgtgattcttcaaacttcacctgccaaacggaaggagcatgttgggcctccgtcatgctaaccaacgggaaagagcaggtgatcaaatcgtgtgtgtccctcccggaactaaatgctcaggtcttctgtcacagttccaacaacgtgaccaaaaccgaatgttgcttcacagacttctgcaacaatatcacactgcaccttcccacagcatcgccaaatgcccctcgacttggtcccacagagctgacggttgttatcaccgtgccggtttgcctcctgtccatagccgccatgctaacaatatgggcgtgccaggaccgccagtgcacatacaggaagactaagagacacaacgtggaggaagcgctggctgagtacagccttgtgaatgcaggaaaaacactcaaggatctgatctacgatgctactgcctctggctcaggctctggtctgcctctcttggttcaaagaacaatcgcaaggacaattgtacttcaagaaatcgtaggaaaaggtcggtttggggaagtgtggcacggaagatggtgtggagaagatgtggctgtgaaaatattctcctccagggatgagagatcttggttccgtgaggcggaaatttatcagacggtgatgctgagacacgagaacatcctcggtttcatcgcagctgacaacaaagataatggaacttggacacaactctggcttgtgtcagagtatcacgagcagggctccttgtatgactatttgaacagaaacatagtgactgtggctggaatggtcaagctggcgctttccatagcgagtggtctggctcacctgcacatggagatcgtgggtactcaaggtaagcctgctattgctcaccgagatataaagtcaaagaatatcctagtcaaaaaatgtgacacttgtgccatagctgacttagggctggctgtgaagcacgattctatcatgaacactatagacataccccagaatcctaaagtgggaaccaagaggtacatggctcccgaaatgcttgatgatacaatgaacctgagcatctttgagtccttcaagcgagctgacatctattcggtggggctggtttactgggaaatagctcgaaggtgttcagttggaggagttgttgaggagtaccagttgccttactatgacatggtgccttcagatccttcgatagaagaaatgaggaaggttgtctgtgatcagaaactccgaccaaatctcccaaaccagtggcaaagctgtgaagcgctgcgggtcatgggaagaataatgcgtgagtgctggtacgccaacggggcagcacgcctgacagccctgcgcgtgaagaagaccatctcccagctgtgtgtcaaggaagactgtaaagcttagctctgcgtacaggcaaaggaagagtgctcacagctttccttcccgtctcccgctttgtgtaaatgtttttgcttcttttctgctgtgttttattttagttctacctcaaggatgactcactacagtgttgaagtgtcccaaaggcagcatgtaaagataacgctaaagttaagcatgggcaggtcttgactttcccagtttccatgttgtccttagttttatgtttaaaggggacacgactcgttttttctttttatttaaggaggaagatgttatgagtataagataagctacatacaatggtaaaaaaaatattaaatttttgttgtacttgaaccaagagcatccacaaatgagatgaagacatatttaaaatgtgaactactgtatattatggtgaaatggaactgtaaaaattaactgggtccttaaaaagtaaattttgctcagaattttaacatctaaagagtggaaaggtggagtaacaaagtgacaccacgttctcaggacttgctttctctgcctatttgccactctgcatcactacgacagctgtccctaagtagttcgaaaaccacctgagccattactcctcctgatacataacagaggtccatatgtctcaaacactgtgaaatggcccagagtcacagagctcttgccagagctggttacgaaccctgtgacaactagcactgtgaagtttgctggccattatactcccttgaattcccatagagcgtttcttcccaagtgggaagatcaatcatcagttataatattttaaatttagtcacatagtgaatgcattgagtattttgtaagaccataatagattttctagaatttcagaaccaatctattagaatttcatcaaagaaatgtcatcattatcccattcgataatgaaaaaaaatgttttctgaacattgccaaatattgaccaattataaacatccattttctaaagatgtatgtcataagatgtcattgcttttgaggttcatggttggaaagaaaatgacagaaagataaacacggaaagaatttgaggagagttcagagaactctcccgaaggagtgtaaccccttactggtaacagaagatcacatcagtgattacaaggcattcctggccttttaacagggaccatgcatggaagggtttggaggatctacctctattctccatttttgaagttcagaatatttaacaggacaccagatatttctttcaaatgtcctataggctttagtgaagatggtttaactcaacgtctttcagtgttctgaaacagtttcccgaaccccattccttagaactttcatctacctagaagttgttagaatggatgtgcactctaacaaggtcttgaaaagtgatatgttaacatattctattctttgatagttctagcagcaaagacacattccatggatatttttaagggtaaatatttgattgtagcctttctattatgagtaaggtgaagttttactatctagcatcttctaaagcccaacatggtaaatgatgttgtgaagaatacgttatgtatcccataagagggtaacttgatgtctacatatcactatggagatatgctactcgatccatctcatttgactaagtggagataagagaaacaaaagctgacagctgtggagtttgcatgtacttccattctcagtcatgtcctcatccatttataagcacagggcaccccataacttacttgccacaatattgggtacaagagggaataacaagatagataggtcctgccctcggggattttaaagtctaatttgggagtggggaaagacatgtgagtatgagggaagcgagtaaattgacagataaaatatgcagtgggatgcctttgagttctatgtgacaatggcttctagaataggtcttaaaatcacttccaatttgcaacacatttagaagggatctttatttagatattacagcctaattatatcatcagcatcaaaaggtgcgcctacgtgaatggatgttaagaagaaccgtgcgaagggagagctggcttatgtctattatcttatttcacagtttctacatgacggcaatggaattatttacttcaatgattgtatccagatatccaatgaaaaaaacctactctatcctgttccattcaccactgttagggaagtatattttctagattttaaaagagggtgttgtaacatctttattttggtcattatgttttataatttatttcagggtatatacaaacataacttatattttcttggtttagatttcacagtggagaaatctgcacattggtacattttgagacttttgctcattattctgttgctgaactgtaatccctaagtgaataatcttaaagagcagagccacagaagtagtcagggaacaatagaagttgtagtttttgcttaactctcaacatagttctacatagatactgctcacttataaaaaatagagtaatttttagagcataaggcatatttactgtatatatctatgcagttcaattttgtattatgtgtttttgatggaatcttatgtaacacttggtccttgtaaattttgttacgagcaaaaatatcttcttaggttaggtgcaaagtgacaccattgctttgctccttatggatattttggctctgggtataacatagagcttaggaatgctattatgaatttttagtactgtatgcaaaaaatggtggggtttatatacagcatcacttcttgaaatacagaacgcattatttgttgtctacatttgagcatgaatttgttgccttataagtcctgcgttttgagtttgtaatcagtactgactctgttgtatgcatccttccacgtctaaaatatttggcatgtcacatctagaattcttaatttatgttctgccatgagagttaagtgaaacatgactgtcatgctctattttaagcgcagcacttgcttttcatctttatacttttcaattaactttgcattttaaatttccataattgtatgaaaatagtaacctgatcgcaatgtctgaagagtttcaaatcggcgtttattttaaaatgaaaaaaaaaaaactacaacacattcattagatcagaagttccacaatcacttattgttttgagtgcttcgtctattgcagaatgattaaataaaagaaatgtctactgtcctggaattttgccaccatgggacttactgagacagagcaaactcagggcaatcttggagtggaagcaaaagtcccagggaagaccgcagtgcactgcctgaaggcagggagcaggcatctgccatcatacaaggagcaagagaacaacttgaaattacttggcaggcaatgatttttgactgattcttgaaaggaaatatgaacatttacatggctaaattaattcatttaaaatgtggaaattttgatttctatcaagcagttagggaacaataacaaatgcatccaagttggttgctgaattcttcagtattcgtttcctttatgtaacttgaaaaactaatattatcaatcactcagaaatgtttatgcttagtgtcctaaaatggtgtcactgtagtttttgaagctcccctctctcttttttcacttgtggaatgtattatctccatgaataacaatactgtgttttaattccagatcctgatattcacttagattttattcactgtcttagtgaagacagtcatcattttaagggcttttaattttttttttttttgcaggattctttaaaactaaaccaaaaaagatagagaaacagatagatggacagaaagaaagaaagagagaaagaaaggaagaaaggaagaaggaagaaagaggcaaaggaagaaaatctagaaggcaaaacattcattaagtctagtattagtcagaatttctatagtgttcatgttcttctgaggatactgatgcaaactccctggtgcctggctttctctttaccctccaccttagcttcgtttcattatctttcttctactattaaacttgatgttctttcatcaccttccaaaattatagttacttcctaattatttttaaacatagctattatttaacttaatcattatagaattgcacatttataatggagaagaaatcccttagtgttctaaattcttttatatgtgccacagcacaaaatgaaaatgagaatgtaaaagttaaagggactctgagcctcagatcttggttctaatattttgtagacgaagaaactgaagaccggtcattagatggcagctaatggttgtagaaacacagtggtgacacctacttctgcagcctcgcccacgtttacaaattgaaaagtcaatcagcatggatttaacactgcttcatgcacatattaacatcacatgccattcagtgctggtggtcagaccctacttgttgatgcatttctattaaaatagatggcttaggccaaggtcactagggaaaaaatgaaaatagacaaagcaaaaacctaaaagttgttatcgagataggcagaaaagccatgaagcactgatgagtttggaaatgtaattgaagaaatttagtgtgtggagggttttagtgctggctggaggtgtagagcagaggccgagaggacttgcctcgaaagtgaaaagatttgggttcaattttcagcactggtaagagaaggaagataggaaggaggtaagaagggaaggaaggaagtgaggaaggaagaaaggaggaaaggaaggataaaagaaagcattcttagtatgaataatgattatcgaagcctctggaccttccttgctcccttcctgaatgcattgttcctttcccttgtgtgttggaatggtgaaaggtgatttggtacacgaactggagactatgtttagtgtcatttatagtctctctcttgtttgttttgtctttgacatcattgtctcccctggtggcagatttcctgagccctgcccccaccactctactcagctctgtcctttcatgtatttgagccctgtccagactgttacacacggaacgtcttaacaaggttttaatttccccactgtgtataagaggcctcggctcaccagttcattagtgatcgttctcctgacactgggaagagggctctgttaatggcagacatgactttctttctcttccattttagtcagactgtctggttatcttgtagcttttggctagtgcataaagaatgtccgcttctgctttcatgctgaactcagcttcaacagcgacttgaacaaagactgtgaaatacatatcccataatgtgattgctcatgttacgcctgtgataattgagccattggtttgttttattcctgccatcctttgaaatatttttatttatttatttttatgtgttatgggagttttgattgaatgtgggtctgtgtaccatatgcatatccggtgcttgggtaggccaaaagagtctgatcccctgaaactagaattacaggtagttgtaagctgccatgtgggtgctggaaaccagaacttggtcctctggaagagcatcagccagtgcttctaactgctaagccatctctcttctgcttctgccatgtttttagactaagccatgtgccatgctgcttagaatgcagattatgctgaaattaggtaacgatctccactttaaaatttgatattgatagctgccaggattctcctgcagttagtcatagatgaacacaacatttgggagaatatgagctccagctcatcctcattttaataatgccagaaatgtatttttctccttgttggtttatgttacactacaagaaaatttcctcctggacccaacactttcattggaatatgcaattcttccccgggttttaggaatctgactgttcacacagcctgagtgtggtaggaaattcacctttctttccagcatcccacatataaattctccacagggaactcaacagattggggcagctgaggactggggtgagcgctggaactagctcttccctatagagacagttctagaccttacagagaaagacattgtgtgtttctatatcaacataaaatgcccaggcttatccatcattatgaaatagatgctaaatttagaaatggttcttgacatatgcaaactgaacacagaatttggaagaatagaatactctgacttttcttctctgtattcccaagagtaacaagagtaacaaggtggactctttatcctggtgatgggtgtatcttttccccaacctaagtcattggctgcaaggcacagtaacctcaatttctatacatccaccaagttttcattctgtggatgaacctactcatttgcttcacctgtaaagggaggcttgagtgtcaggctctaagaaagttaaccatactaagagatttatcaatatgtttggtttttcattggcagaacagtagtatctaggcaattttaaagatgtagcagtttcctgttctctttaccaagtgagagaatctgagtaaaatattagactccagttcatttctagaatggcttatatcaagctcttgtactctcctgaccctgaactggataggattgtttacacttgattgttgtttcaggttttaaaagggtctcaaaagaaaaaattggattcaggtctataaaaaaaaaaaaggattttgtattaattttcaaagcactaatactaattatacttttcttggggtagtgattctcttcttatacctaagaacatattacacatgtcaaaaccattgcattttgacattgcgaaacacaccttgaactcttgaactactgtgagcagaatcactgttgtaaagatttttttttttttttttttttttggtaagcttgctggtattcttaagtatgtaaaaagatgtcggcttccacaggctcaaatgaatgtacataaggactgtgaaaaaaaaataaattgggttttaaaataagaactgggcgataaattgtatctaaactgcgcagatgggcatcgtcgtgcggctgtgttttcattgttgaaggttgaacagagttctacagagtcgtggatgacattcagatgtttcatgacttttggatctgcgaacatatgcattttatagtcatgtatacttatattgttaagaaataatcatattttagaatttagtaagaactcagtgatagccttcataccaaaatgtttaactttgccaacagctagtcataaaaaagtatttattttaaagctttttaatacaattgcataacttcttgccgcctccaggtgtacattcttctctgcctaaatgttatatttttatgtatgcattttcagaaagcatattgttttggaaagtggcaaagacaatgaattaagcactcgttgcacttgtttctgtaaagcataaagagctctattttaaataaaagaaaacgtgtcataaaaaaaaa

SEQ ID NO: 214 - DNA, 9033 bp, Mus musculus
  source 1..9033: mol_type = genomic DNA
tttttttttatgacacgttttcttttatttaaaatagagctctttatgctttacagaaacaagtgcaacgagtgcttaattcattgtctttgccactttccaaaacaatatgctttctgaaaatgcatacataaaaatataacatttaggcagagaagaatgtacacctggaggcggcaagaagttatgcaattgtattaaaaagctttaaaataaatacttttttatgactagctgttggcaaagttaaacattttggtatgaaggctatcactgagttcttactaaattctaaaatatgattatttcttaacaatataagtatacatgactataaaatgcatatgttcgcagatccaaaagtcatgaaacatctgaatgtcatccacgactctgtagaactctgttcaaccttcaacaatgaaaacacagccgcacgacgatgcccatctgcgcagtttagatacaatttatcgcccagttcttattttaaaacccaatttatttttttttcacagtccttatgtacattcatttgagcctgtggaagccgacatctttttacatacttaagaataccagcaagcttaccaaaaaaaaaaaaaaaaaaaaaaatctttacaacagtgattctgctcacagtagttcaagagttcaaggtgtgtttcgcaatgtcaaaatgcaatggttttgacatgtgtaatatgttcttaggtataagaagagaatcactaccccaagaaaagtataattagtattagtgctttgaaaattaatacaaaatccttttttttttttatagacctgaatccaattttttcttttgagacccttttaaaacctgaaacaacaatcaagtgtaaacaatcctatccagttcagggtcaggagagtacaagagcttgatataagccattctagaaatgaactggagtctaatattttactcagattctctcacttggtaaagagaacaggaaactgctacatctttaaaattgcctagatactactgttctgccaatgaaaaaccaaacatattgataaatctcttagtatggttaactttcttagagcctgacactcaagcctccctttacaggtgaagcaaatgagtaggttcatccacagaatgaaaacttggtggatgtatagaaattgaggttactgtgccttgcagccaatgacttaggttggggaaaagatacacccatcaccaggataaagagtccaccttgttactcttgttactcttgggaatacagagaagaaaagtcagagtattctattcttccaaattctgtgttcagtttgcatatgtcaagaaccatttctaaatttagcatctatttcataatgatggataagcctgggcattttatgttgatatagaaacacacaatgtctttctctgtaaggtctagaactgtctctatagggaagagctagttccagcgctcaccccagtcctcagctgccccaatctgttgagttccctgtggagaatttatatgtgggatgctggaaagaaaggtgaatttcctaccacactcaggctgtgtgaacagtcagattcctaaaacccggggaagaattgcatattccaatgaaagtgttgggtccaggaggaaattttcttgtagtgtaacataaaccaacaaggagaaaaatacatttctggcattattaaaatgaggatgagctggagctcatattctcccaaatgttgtgttcatctatgactaactgcaggagaatcctggcagctatcaatatcaaattttaaagtggagatcgttacctaatttcagcataatctgcattctaagcagcatggcacatggcttagtctaaaaacatggcagaagcagaagagagatggcttagcagttagaagcactggctgatgctcttccagaggaccaagttctggtttccagcacccacatggcagcttacaactacctgtaattctagtttcaggggatcagactcttttggcctacccaagcaccggatatgcatatggtacacagacccacattcaatcaaaactcccataacacataaaaataaataaataaaaatatttcaaaggatggcaggaataaaacaaaccaatggctcaattatcacaggcgtaacatgagcaatcacattatgggatatgtatttcacagtctttgttcaagtcgctgttgaagctgagttcagcatgaaagcagaagcggacattctttatgcactagccaaaagctacaagataaccagacagtctgactaaaatggaagagaaagaaagtcatgtctgccattaacagagccctcttcccagtgtcaggagaacgatcactaatgaactggtgagccgaggcctcttatacacagtggggaaattaaaaccttgttaagacgttccgtgtgtaacagtctggacagggctcaaatacatgaaaggacagagctgagtagagtggtgggggcagggctcaggaaatctgccaccaggggagacaatgatgtcaaagacaaaacaaacaagagagagactataaatgacactaaacatagtctccagttcgtgtaccaaatcacctttcaccattccaacacacaagggaaaggaacaatgcattcaggaagggagcaaggaaggtccagaggcttcgataatcattattcatactaagaatgctttcttttatccttcctttcctcctttcttccttcctcacttccttccttcccttcttacctccttcctatcttccttctcttaccagtgctgaaaattgaacccaaatcttttcactttcgaggcaagtcctctcggcctctgctctacacctccagccagcactaaaaccctccacacactaaatttcttcaattacatttccaaactcatcagtgcttcatggcttttctgcctatctcgataacaacttttaggtttttgctttgtctattttcattttttccctagtgaccttggcctaagccatctattttaatagaaatgcatcaacaagtagggtctgaccaccagcactgaatggcatgtgatgttaatatgtgcatgaagcagtgttaaatccatgctgattgacttttcaatttgtaaacgtgggcgaggctgcagaagtaggtgtcaccactgtgtttctacaaccattagctgccatctaatgaccggtcttcagtttcttcgtctacaaaatattagaaccaagatctgaggctcagagtccctttaacttttacattctcattttcattttgtgctgtggcacatataaaagaatttagaacactaagggatttcttctccattataaatgtgcaattctataatgattaagttaaataatagctatgtttaaaaataattaggaagtaactataattttggaaggtgatgaaagaacatcaagtttaatagtagaagaaagataatgaaacgaagctaaggtggagggtaaagagaaagccaggcaccagggagtttgcatcagtatcctcagaagaacatgaacactatagaaattctgactaatactagacttaatgaatgttttgccttctagattttcttcctttgcctctttcttccttcttcctttcttcctttctttctctctttctttctttctgtccatctatctgtttctctatcttttttggtttagttttaaagaatcctgcaaaaaaaaaaaaaattaaaagcccttaaaatgatgactgtcttcactaagacagtgaataaaatctaagtgaatatcaggatctggaattaaaacacagtattgttattcatggagataatacattccacaagtgaaaaaagagagaggggagcttcaaaaactacagtgacaccattttaggacactaagcataaacatttctgagtgattgataatattagtttttcaagttacataaaggaaacgaatactgaagaattcagcaaccaacttggatgcatttgttattgttccctaactgcttgatagaaatcaaaatttccacattttaaatgaattaatttagccatgtaaatgttcatatttcctttcaagaatcagtcaaaaatcattgcctgccaagtaatttcaagttgttctcttgctccttgtatgatggcagatgcctgctccctgccttcaggcagtgcactgcggtcttccctgggacttttgcttccactccaagattgccctgagtttgctctgtctcagtaagtcccatggtggcaaaattccaggacagtagacatttcttttatttaatcattctgcaatagacgaagcactcaaaacaataagtgattgtggaacttctgatctaatgaatgtgttgtagttttttttttttcattttaaaataaacgccgatttgaaactcttcagacattgcgatcaggttactattttcatacaattatggaaatttaaaatgcaaagttaattgaaaagtataaagatgaaaagcaagtgctgcgcttaaaatagagcatgacagtcatgtttcacttaactctcatggcagaacataaattaagaattctagatgtgacatgccaaatattttagacgtggaaggatgcatacaacagagtcagtactgattacaaactcaaaacgcaggacttataaggcaacaaattcatgctcaaatgtagacaacaaataatgcgttctgtatttcaagaagtgatgctgtatataaaccccaccattttttgcatacagtactaaaaattcataatagcattcctaagctctatgttatacccagagccaaaatatccataaggagcaaagcaatggtgtcactttgcacctaacctaagaagatatttttgctcgtaacaaaatttacaaggaccaagtgttacataagattccatcaaaaacacataatacaaaattgaactgcatagatatatacagtaaatatgccttatgctctaaaaattactctattttttataagtgagcagtatctatgtagaactatgttgagagttaagcaaaaactacaacttctattgttccctgactacttctgtggctctgctctttaagattattcacttagggattacagttcagcaacagaataatgagcaaaagtctcaaaatgtaccaatgtgcagatttctccactgtgaaatctaaaccaagaaaatataagttatgtttgtatataccctgaaataaattataaaacataatgaccaaaataaagatgttacaacaccctcttttaaaatctagaaaatatacttccctaacagtggtgaatggaacaggatagagtaggtttttttcattggatatctggatacaatcattgaagtaaataattccattgccgtcatgtagaaactgtgaaataagataatagacataagccagctctcccttcgcacggttcttcttaacatccattcacgtaggcgcaccttttgatgctgatgatataattaggctgtaatatctaaataaagatcccttctaaatgtgttgcaaattggaagtgattttaagacctattctagaagccattgtcacatagaactcaaaggcatcccactgcatattttatctgtcaatttactcgcttccctcatactcacatgtctttccccactcccaaattagactttaaaatccccgagggcaggacctatctatcttgttattccctcttgtacccaatattgtggcaagtaagttatggggtgccctgtgcttataaatggatgaggacatgactgagaatggaagtacatgcaaactccacagctgtcagcttttgtttctcttatctccacttagtcaaatgagatggatcgagtagcatatctccatagtgatatgtagacatcaagttaccctcttatgggatacataacgtattcttcacaacatcatttaccatgttgggctttagaagatgctagatagtaaaacttcaccttactcataatagaaaggctacaatcaaatatttacccttaaaaatatccatggaatgtgtctttgctgctagaactatcaaagaatagaatatgttaacatatcacttttcaagaccttgttagagtgcacatccattctaacaacttctaggtagatgaaagttctaaggaatggggttcgggaaactgtttcagaacactgaaagacgttgagttaaaccatcttcactaaagcctataggacatttgaaagaaatatctggtgtcctgttaaatattctgaacttcaaaaatggagaatagaggtagatcctccaaacccttccatgcatggtccctgttaaaaggccaggaatgccttgtaatcactgatgtgatcttctgttaccagtaaggggttacactccttcgggagagttctctgaactctcctcaaattctttccgtgtttatctttctgtcattttctttccaaccatgaacctcaaaagcaatgacatcttatgacatacatctttagaaaatggatgtttataattggtcaatatttggcaatgttcagaaaacattttttttcattatcgaatgggataatgatgacatttctttgatgaaattctaatagattggttctgaaattctagaaaatctattatggtcttacaaaatactcaatgcattcactatgtgactaaatttaaaatattataactgatgattgatcttcccacttgggaagaaacgctctatgggaattcaagggagtataatggccagcaaacttcacagtgctagttgtcacagggttcgtaaccagctctggcaagagctctgtgactctgggccatttcacagtgtttgagacatatggacctctgttatgtatcaggaggagtaatggctcaggtggttttcgaactacttagggacagctgtcgtagtgatgcagagtggcaaataggcagagaaagcaagtcctgagaacgtggtgtcactttgttactccacctttccactctttagatgttaaaattctgagcaaaatttactttttaaggacccagttaatttttacagttccatttcaccataatatacagtagttcacattttaaatatgtcttcatctcatttgtggatgctcttggttcaagtacaacaaaaatttaatattttttttaccattgtatgtagcttatcttatactcataacatcttcctccttaaataaaaagaaaaaacgagtcgtgtcccctttaaacataaaactaaggacaacatggaaactgggaaagtcaagacctgcccatgcttaactttagcgttatctttacatgctgcctttgggacacttcaacactgtagtgagtcatccttgaggtagaactaaaataaaacacagcagaaaagaagcaaaaacatttacacaaagcgggagacgggaaggaaagctgtgagcactcttcctttgcctgtacgcagagctaagctttacagtcttccttgacacacagctgggagatggtcttcttcacgcgcagggctgtcaggcgtgctgccccgttggcgtaccagcactcacgcattattcttcccatgacccgcagcgcttcacagctttgccactggtttgggagatttggtcggagtttctgatcacagacaaccttcctcatttcttctatcgaaggatctgaaggcaccatgtcatagtaaggcaactggtactcctcaacaactcctccaactgaacaccttcgagctatttcccagtaaaccagccccaccgaatagatgtcagctcgcttgaaggactcaaagatgctcaggttcattgtatcatcaagcatttcgggagccatgtacctcttggttcccactttaggattctggggtatgtctatagtgttcatgatagaatcgtgcttcacagccagccctaagtcagctatggcacaagtgtcacattttttgactaggatattctttgactttatatctcggtgagcaatagcaggcttaccttgagtacccacgatctccatgtgcaggtgagccagaccactcgctatggaaagcgccagcttgaccattccagccacagtcactatgtttctgttcaaatagtcatacaaggagccctgctcgtgatactctgacacaagccagagttgtgtccaagttccattatctttgttgtcagctgcgatgaaaccgaggatgttctcgtgtctcagcatcaccgtctgataaatttccgcctcacggaaccaagatctctcatccctggaggagaatattttcacagccacatcttctccacaccatcttccgtgccacacttccccaaaccgaccttttcctacgatttcttgaagtacaattgtccttgcgattgttctttgaaccaagagaggcagaccagagcctgagccagaggcagtagcatcgtagatcagatccttgagtgtttttcctgcattcacaaggctgtactcagccagcgcttcctccacgttgtgtctcttagtcttcctgtatgtgcactggcggtcctggcacgcccatattgttagcatggcggctatggacaggaggcaaaccggcacggtgataacaaccgtcagctctgtgggaccaagtcgaggggcatttggcgatgctgtgggaaggtgcagtgtgatattgttgcagaagtctgtgaagcaacattcggttttggtcacgttgttggaactgtgacagaagacctgagcatttagttccgggagggacacacacgatttgatcacctgctctttcccgttggttagcatgacggaggcccaacatgctccttccgtttggcaggtgaagtttgaagaatcacacaaaagacacacacacttcagtcctgccgcaaggtcggcggccagggccaccagcaggagggccaggctcagtgcggagccgcgcgctggggtcatggccacccggcggcggtgcaaggcttcggggtcccagagcgcagcccgcagcgcgggccgctttgaagttcccggggc

SEQ ID NO: 215 - DNA, 1899 bp, Rattus norvegicus
  source 1..1899: mol_type = genomic DNA
gggagcgcccgctgccactagagccaaccgcgcacttccgaagggtgtcgcggctgcgctcccctcccgcgccccgggaacttcaaagcggcccgcgctgcgggctgcgctctgggaccccgaagccttgcaccgccgcggggtggccatgaccccagcgcgccgctccgcactgagcctggccctcctgctggtggcactggcctccgaccttgcggcaggactgaagtgtgtgtgtcttttgtgtgattcctcaaactttacctgccaaaccgaaggagcatgctgggcctctgtcatgctaaccaacgggaaagaacaggtgatcaaatcgtgcgtgtccctcccggaactaaatgctcaggtcttctgtcacagttccaacaacgtgaccaagaccgaatgttgcttcacagacttctgcaacaacatcactctgcaccttcccacagcatctccagatgcccctagacttggccccacagagctgacggttgttatcactgtacctgtttgcctcctgtccatcgcagccatgctaacgatatgggcctgccaggaccgccagtgcacatacaggaagaccaagagacacaatgtggaggaaccactggcagagtacagccttgtcaatgctggaaaaaccctcaaagatctgatttatgatgccactgcctcgggctcaggatctggcctgcctcttttggttcaaagaaccatcgcaaggacaattgtacttcaagaaatcgtaggaaaaggtcggtttggggaagtgtggcacggaagatggtgtggagaagatgtggctgtgaaaatattctcctccagagatgagagatcttggttccgtgaggcagaaatttatcagacggtaatgctgagacatgagaatattctcggtttcatcgcggccgacaacaaagataatggaacctggactcagctttggcttgtgtcagagtatcacgagcagggctccttatatgactatttgaatagaaacatagtgaccgtggctggaatggtcaagttggcgctttcaatagcgagtggtctggctcacctacacatggagatcgtgggcactcaaggtaagcctgctattgctcaccgagatataaagtcaaagaatatcttagtcaaaaagtgtgacacttgtgccatagctgacttagggctggctgtgaaacatgattctatcatgaacactatagatataccccagaatcctaaagtgggaaccaagaggtatatggctcccgaaatgcttgatgatacaatgaacgtcaacatctttgagtccttcaagcgagctgacatctattcggtggggctggtttactgggaaatagctcgaaggtgttcagttggaggacttgttgaagagtaccagttgccttattatgacatggtgccttcagatccttccatagaggaaatgaggaaggtcgtttgtgatcagaaactccgaccaaatctcccaaaccagtggcaaagctgtgaggcgctccgggtcatgggaagaataatgcgtgagtgctggtatgccaacggggcagctcgcctgaccgccctgcgcgtgaagaagaccatttctcagctgtgtgtcaaggaagactgtaaggcctaaggccgcatacaggcgacgggaaagccctcaccactctctttcatgtctcctgctttgtgtaaatgttttcgtttcttttctgctgtgttttgttttagttctacctcaaagatgattcactacagtgttgaagtgtcccaaaggcagcatgaaaagataactctaagcatgggcaggtcttgactttcccagtttccatgttgtccgtacttttatttttaaaggtgacactattcatttttctttttatttaaggaggaagatgttat

SEQ ID NO: 216 - DNA, 1899 bp, Rattus norvegicus
  source 1..1899: mol_type = genomic DNA
ataacatcttcctccttaaataaaaagaaaaatgaatagtgtcacctttaaaaataaaagtacggacaacatggaaactgggaaagtcaagacctgcccatgcttagagttatcttttcatgctgcctttgggacacttcaacactgtagtgaatcatctttgaggtagaactaaaacaaaacacagcagaaaagaaacgaaaacatttacacaaagcaggagacatgaaagagagtggtgagggctttcccgtcgcctgtatgcggccttaggccttacagtcttccttgacacacagctgagaaatggtcttcttcacgcgcagggcggtcaggcgagctgccccgttggcataccagcactcacgcattattcttcccatgacccggagcgcctcacagctttgccactggtttgggagatttggtcggagtttctgatcacaaacgaccttcctcatttcctctatggaaggatctgaaggcaccatgtcataataaggcaactggtactcttcaacaagtcctccaactgaacaccttcgagctatttcccagtaaaccagccccaccgaatagatgtcagctcgcttgaaggactcaaagatgttgacgttcattgtatcatcaagcatttcgggagccatatacctcttggttcccactttaggattctggggtatatctatagtgttcatgatagaatcatgtttcacagccagccctaagtcagctatggcacaagtgtcacactttttgactaagatattctttgactttatatctcggtgagcaatagcaggcttaccttgagtgcccacgatctccatgtgtaggtgagccagaccactcgctattgaaagcgccaacttgaccattccagccacggtcactatgtttctattcaaatagtcatataaggagccctgctcgtgatactctgacacaagccaaagctgagtccaggttccattatctttgttgtcggccgcgatgaaaccgagaatattctcatgtctcagcattaccgtctgataaatttctgcctcacggaaccaagatctctcatctctggaggagaatattttcacagccacatcttctccacaccatcttccgtgccacacttccccaaaccgaccttttcctacgatttcttgaagtacaattgtccttgcgatggttctttgaaccaaaagaggcaggccagatcctgagcccgaggcagtggcatcataaatcagatctttgagggtttttccagcattgacaaggctgtactctgccagtggttcctccacattgtgtctcttggtcttcctgtatgtgcactggcggtcctggcaggcccatatcgttagcatggctgcgatggacaggaggcaaacaggtacagtgataacaaccgtcagctctgtggggccaagtctaggggcatctggagatgctgtgggaaggtgcagagtgatgttgttgcagaagtctgtgaagcaacattcggtcttggtcacgttgttggaactgtgacagaagacctgagcatttagttccgggagggacacgcacgatttgatcacctgttctttcccgttggttagcatgacagaggcccagcatgctccttcggtttggcaggtaaagtttgaggaatcacacaaaagacacacacacttcagtcctgccgcaaggtcggaggccagtgccaccagcaggagggccaggctcagtgcggagcggcgcgctggggtcatggccaccccgcggcggtgcaaggcttcggggtcccagagcgcagcccgcagcgcgggccgctttgaagttcccggggcgcgggaggggagcgcagccgcgacacccttcggaagtgcgcggttggctctagtggcagcgggcgctccc

SEQ ID NO: 217 - DNA, 8820 bp, Macaca fascicularis
  source 1..8820: mol_type = genomic DNA
ggggcgcccacactgactagagccaaccgcgcacttcaaaagggtgtcggtgccgcgctcccctcccgcggcccgggaacttcaaagcgggccgtgctgccccggctgcctcgctctgctctggggcctcgcagccccggcgcggccgcctggtggcgatgacccgggcgctccgctcagcgctccgccaggctctcctgctgctcgccgcggccgccgagctctcggcaggactgaagtgtgtatgtcttttgtgtgattcttcaaactttacctgccaaacagaaggagcatgttgggcatcagtcatgctaaccaatggaaaagaacaggtgatcaaatcctgtgtctcccttccagaactgaatgctcaagtgttctgtcatagttccaacaatgttaccaaaaccgaatgctgcttcacagatttttgcaacaacataacactgcaccttccaacagcatcaccaaatgccccaaaacttggacccatggagctggccatcattattactgtgcctgtttgcctcctgtccatagctgcgatgctgacaatatgggcatgccagggtcgacagtgctcctacaggaagaaaaagagaccgaatgtggaggaaccactctctgagtgcaatctggtaaatgctggaaaaaccctgaaagatctgatttatgatgtaactgcctctggatctggctctggtctacctctgttggttcaaaggacaattgcaaggacgattgtgcttcaggaaatagtaggaaaaggtagatttggtgaggtgtggcatggaagatggtgtggggaagatgtggctgtgaaaatattctcctccagagatgaaagatcttggtttcgtgaggcagaaatttaccagacggtcatgctgcgacatgaaaacatccttggtttcattgctgctgacaacaaagataatggaacctggactcagctttggctggtatctgaatatcatgaacagggctccttatatgactatttgaatagaaatatagtgacggtggctggaatgatcaagctggcgctctcaattgctagtggtctggcacaccttcatatggagattgttgggacacaaggtaaacctgctattgctcatcgagacataaaatcaaagaatatcttagtgaaaaaatgtgaaacttgtgccatagcggacttagggttggctgtgaagcatgattcaatactgaacactatcgacatacctcagaatcctaaagtgggaacgaagaggtatatggctcctgaaatgcttgatgatacaatgaatgtgaatatctttgagtccttcaaacgagctgacatctattctgttggtctggtttactgggaaatagcccggaggtgttcggtcggaggaattgttgaggagtaccaattgccttattatgacatggtgccttcagatccctcgatagaggaaatgagaaaggttgtttgtgaccagaagtttcgaccaagtatcccaaaccagtggcaaagttgtgaagcactccgagtcatggggagaataatgcgtgagtgttggtatgccaacggagcggcccgcctaactgctcttcgtattaagaagactatatctcaactttgtgtcaaagaagactgcaaagcctaatgatgataattatgttaaaaagaaatctctcacagctttcttttccattttcccctttatgtgaatgtttttgccattttttttgttctacctcaaagataagacagtacagtatttaagtgcccataaggccgcgtgaaaagataactctaaagttaagcatgggcaggagttgacttcatccaatctctctgttatgtttaattttattttgaaagcaacacctccactcatctttttatttaataagaaagaaatatattacaaaagtataaaataagctctataaaaatgatatagtcattaagtttttattttacttgaaccaagagcacatgagtgaacaggaaaagatgttgaaacttttttttttttctgagacgaaaacatattaattaaacatgcaaactagaccatgctatcttaaatagaaatttaggtcatgcaatctatgtttccccatttttaagttagcaggactttttaaaaataaatattgctctaaattttaatatatcaaacatgtgaaagtggagctgctcagtggaagatgtgagatcggtgtcccacgtgcttggtctccccttctgctgttctccttcataatccactactgcagcagtcgctgaaccactaaacttgttcctttcctttgcaaaagacatacctgatatcctgagacgctgagaaatgtcccaaagtcacacagctaatggcagaactggcactaggtccacatcttgtgataatgagcactgtagagtcaactagcttcctacttttccttgaatagtgcttttctccgtatgcaatcttttattatgatatttgtggtttagtcatgcagaaggcatattattttgcagaatcatgatggacctgcatgaaatctcagaaccatatctgttgacatttttttctcatagaaatatcatggttatcccattcgttaatgagtattaatgttttctgaacacttccaaagattaatcaaacttaaacattcattgtctgaaaatatctttaagatacaattcagaggtccctatttcctttgtacatatacacttagaaagaaaagacagaagaggaagaggaaagaaggaaatattttgagaatatattgagaagaattaagaaaactcttcaatgaagtgtaacaaccaaaccctacagaggtatgagaaacagcaaatacatattcctctaccctttcacaatgagcgagtgagtacagaagaatgctcatgatagttccgccttcattctactttctgtggacacagagtaatgaatatttaatgggacgttaaatatgcccttcaaatctataatgctattttggtaaaggaaatttaacatgatgtcttttattctcctaaaacatcttttgtcaaactccattccatagatctttcttctgctgagatgatccaagaccaaagtgttctttgatattgcttagaaagtgatagtacatgttagcatataatgtattttgaagagtgaaataaatgctattgataacagtaaaaacaaaaaacaaacaaacaaaaaaccccaaaactaataacagtaaagaaatgctacttgaattttttttttaaactggattgctcagattacctgatcgtggtggaacccttttattaagaggaggagaaactttttactatcccatatttaactgttctataaagcaaagcacagcttgggtaatagtgttctgaaggatatacttctgtattttctcatagaatacagtttagtgattatgcttcatttcactatgaaaatatgttactgaatatatcttcattttactgagctgaaataaggaaggcaaaacactgacagctatggaatttgcgtgtacttccatacttgttaatgctctcatccacttattaaataatcatagagtacccatatcttgcttgccacaatatcgggtacaagagggaatacaaagatagataggtcctgccctcagggattttaaagtctaatttgggaatgtgaatagggatgtgagtgtgtgggggaagaaaataaattgacagataaaatatgaagtgggatgtcttgagttctgcatgacagtgggtttctaggataggtctgaaaatcgctttcatttgcaacgcatttagaaagtagctttatttggatattacagacaatctaaatatatcatcagtttttaaaagtgcctatgtgaagtgattttttaaaaagagcctatgtaaaggggtaatcttgcttatgcttgttactaatttctcatagattgttgttctgcatatataagaatgaaattatttatttactatagttgtacgtgcctcaaataaacaagaatgatatttcctgttttatttacttatgttgggtaaatatgcttattgaatttttaagagaggattttttaacatctccattcttcttgtcattatgttttgtagcttatttgagggtgtctaaatataatttcatattttattggttcaactttcactctgaagaaatccgtatgttagtacattttgaggtatttttcttgttcttgtgttggttaactatgactcctagctgaatagtcttatatttcaattacaaaacacatttttaaagaaagggaatagagcagcaaaaatgatgaggaaaatgttaaaagttataatatttcctttactcttaacaggattatatatagaatatgctcacttacaaaaataggatgatgaagtatagagcataaggcaggcttcttgtatatacttatgctgtcaaatgttatattgtttttaatggagtccctttgtgtaatatttatttcatttaaattttgttataagcaaaaaaaaaaaaaaaaattcttcttaggttaggttcagagtatcagtgttctttactccttacagatattttggctttggggtataatacaagacttgggaaaacgctattatgaatttttagtactgtataaagtggtgatgggatttaaatgcagcatcactttctgaaaataagagaaacattatttgttgtcagtatttcagcatgaacttgttgccttgtaaattttgcctttaagtttgtaattggtacagattctgttgtatgctttcttctatgtctaaaatatttggcatgtcacatctagaattcttaatttatgttctgacttgagagttaagtgaaacatgactgtcgtgcactattttaggcatagcacttgcttttcatctttatactttcaattaactttgcattttaaatttccatgattgtatgaaaatagtaacctggttgcagtatctgaaaaaattaaaattagcttttatttaaaaatgaaaatctacaatagattcattaggttagaagttccacagtaatttattattttattacagctactattgtagaattattaataaaataaaacaaaactacttctattttcctggaattttgccaccatgtgactcattggggcagagaaaactcagggttatctttgagtctgcgcaaaagtaccaaggaacctgcttagcaaatcatctgaaaacagggagttgatgtttgccattatacaaagtttgagtaaacaacttaaaattgcttgttagggcatagtctttgattgaaataagtatgagagtgtatttggctaaataaatgtatttaaaatatagaaattttgtttcccactggaaaattaagaaaataacagtactaaatgaataaaagctggcagttgatgtcttcaataatcattcctttaaataaattcacaaacacattattacaagctacttaggaatgtttagtatgagtatcttaaaatggcaccattgtggttttcgaagatattttaagcatcttttgtgaaacataccatttctgtttgacaatgcttagttctagctctgcgtgctaatacctacatggagtttttctgctattttagtgaaaacagtaattgttttatcttgagagctgcttctaaataacaagtcaattggaatataagtttttaaaaaacgttaatattaagtagaatttttataatatgggcatttttcaaaacattttaatgaaaatatatagatatttgactttcttttttccatctagccttgctttatatttcattatttttctcactttttttcttaatattccctcactatctttcaacattatcattagtttctaatttaaaaaataactattatttaacttaaccatctggaatttagccttctaatgaaagagaatcccttagtactctcagagattatataacttgattccagttttgtttcgatgatgagaccaaggatcagagattaaatgactactagttattagcagaactctcatgaaagccaggtggtgacacccagcactgttccttgccatatccccaacttttactgattaaaaattaatttgcatgcatctaaacctaccttgaatgcacactaacgtaatgtgccattcaatgatgatgataaaatcccacttcttgtgtttctactaaaataatttactcactcagggtggggtcagtgagaaaaactaaactaggcaaagagagagttgtagaatggttgtcaagctaagtaggcaaccactggggtgctgataaaattaatggataaaatttagggacagagagagtatagaatttcttagtgccagtaataattagaaaagcttcctgacatcccccaccctttctgtaaggattgttctttctctttgtactttggaatgggggtgaaaggtgatttaatagctgaatttgggactatgtccagtggcatattatctgacttttctctctttctctttttttttcccccgtcagtttctcattagtttgtctttggcattcatcttcttttagtgcattaaaaaatgtttggcagatctcatcaatcccaagtcagtctataattcctataattctttagttatcttttaatctgtccaaactgctacacaatgaacttcttaacaagattttaagttccccactgatgtgtaagaggtttcacctcgtaacttctccagtaatccttcatttggcactatagagtatttgttaatggcagagatgattttttttttccaaaacctaaaaagactagctgttaattgtattctaacttttagctaacatgtaaagaatgtctacttttgctttaatgctaaatctcacttgagaaatagtgactgggaaagacaatttgaaatatatgccccataatgtggttgctaaatttatttctgctgttccataccattgctttgttttgcttttgacatctcttaaaactaagccattatgctattagtttggaatataatactacagcaaaattaggtaacaatctctattttaaaattcccctaacaataatagaactgccagcatacttttctctttcagttgtagatgaatacatttgagagaagagctctatttcatcctagatttcaatattttcagatgtgactgtatttcctgatcattggtccaggttatcctaaaagaaatttttctctccagacctaacagttttaactgcaagagtttactgtgggttacattaatctgaattttaatagggccactgagaatctgagtgctttaggggattacccttatacccactgccatcacatccagtcgggcctgttgtgctctatacaaatcttcccagctgaggggcagatgggggctaaaatccaactgcaattggctcccagacataattttatattttacagaaaagcatcttattggcttatatatgtttaaagaatggtctggcttatacatcttcagaaaatgagaattaaaaagccaaaataattcttgacgtctgcaaattgaacatagaacttagaagaagtaatactttatcttttcatcctggcattcctgagagaaaagaaattgtatgtttatcgtgttggtttaatttttcaacccagacaatctgcagcaaggcacatggaccctaattttgacatcttacacacagttttcattctatgcatggagctaattactgactttgcctgtaaagagaggattgtgtgcctaaattttgtctaggaaatgcaagcatagaatgaaatttactaatatttctatttcttccataggctaagtaatagcaactatttttgaagacccagccctttttttcctctttatacaaaataagagtatctgagccaaaatattaaattctagttcatttctgcaatgactagtgtcatgctcatgtactcttctaattctagactggagaagattattcaaacttgatctgtgtttcaggtttttaaatgtcctaaaaacagaaaattagattcagatctcaaaaaaggaattttggattgactttcaaagtactaatactaattatacttttcttttggtagcgtgactcttcttatacctaagaacatattacaaatgtcaaaaccattgcagtttgacattgcaaaacatgccttgaactcttgaactactgtgaaaagaatcaccgttgtaaagactttttgtaagctagctgatactcttaagtatgtaaaaagattgtctttcagccgacaggcccaaaggaatgtatataaggaaggaatatgaaaaaataaattaggttttaaaataagaattgggcaataaactgtatcgaaaatatgtagatggattttagtagttgtaatttaaatgtcgaaggtgaagagaatttcaaattccaaagagaagtgaatgatattcagatgtttcattaatttctagtctgtgaaaatatgcattttatagtaaatgtatagacttattttatttagaaataatagtgttttagaatttattaaaaactcagtgatagcctttataccaaaatgtttaactttaccaacagcaagtcataaaagtatttattttaaagctttttaatattatcgcgtaactttcatctgtcttcagatgtaaataattatctgcctaaatgttatatttttatgtatgcattttctgaaaatgtattgttttgtaaagtgggaaagataataaatcaagcacttgcacttgtttctgtgaagcatatagaactctattttaaataaaggaagatgtgtcgta

SEQ ID NO: 218 - DNA, 8820 bp, Macaca fascicularis
  source 1..8820: mol_type = genomic DNA
tacgacacatcttcctttatttaaaatagagttctatatgcttcacagaaacaagtgcaagtgcttgatttattatctttcccactttacaaaacaatacattttcagaaaatgcatacataaaaatataacatttaggcagataattatttacatctgaagacagatgaaagttacgcgataatattaaaaagctttaaaataaatacttttatgacttgctgttggtaaagttaaacattttggtataaaggctatcactgagtttttaataaattctaaaacactattatttctaaataaaataagtctatacatttactataaaatgcatattttcacagactagaaattaatgaaacatctgaatatcattcacttctctttggaatttgaaattctcttcaccttcgacatttaaattacaactactaaaatccatctacatattttcgatacagtttattgcccaattcttattttaaaacctaatttattttttcatattccttccttatatacattcctttgggcctgtcggctgaaagacaatctttttacatacttaagagtatcagctagcttacaaaaagtctttacaacggtgattcttttcacagtagttcaagagttcaaggcatgttttgcaatgtcaaactgcaatggttttgacatttgtaatatgttcttaggtataagaagagtcacgctaccaaaagaaaagtataattagtattagtactttgaaagtcaatccaaaattccttttttgagatctgaatctaattttctgtttttaggacatttaaaaacctgaaacacagatcaagtttgaataatcttctccagtctagaattagaagagtacatgagcatgacactagtcattgcagaaatgaactagaatttaatattttggctcagatactcttattttgtataaagaggaaaaaaagggctgggtcttcaaaaatagttgctattacttagcctatggaagaaatagaaatattagtaaatttcattctatgcttgcatttcctagacaaaatttaggcacacaatcctctctttacaggcaaagtcagtaattagctccatgcatagaatgaaaactgtgtgtaagatgtcaaaattagggtccatgtgccttgctgcagattgtctgggttgaaaaattaaaccaacacgataaacatacaatttcttttctctcaggaatgccaggatgaaaagataaagtattacttcttctaagttctatgttcaatttgcagacgtcaagaattattttggctttttaattctcattttctgaagatgtataagccagaccattctttaaacatatataagccaataagatgcttttctgtaaaatataaaattatgtctgggagccaattgcagttggattttagcccccatctgcccctcagctgggaagatttgtatagagcacaacaggcccgactggatgtgatggcagtgggtataagggtaatcccctaaagcactcagattctcagtggccctattaaaattcagattaatgtaacccacagtaaactcttgcagttaaaactgttaggtctggagagaaaaatttcttttaggataacctggaccaatgatcaggaaatacagtcacatctgaaaatattgaaatctaggatgaaatagagctcttctctcaaatgtattcatctacaactgaaagagaaaagtatgctggcagttctattattgttaggggaattttaaaatagagattgttacctaattttgctgtagtattatattccaaactaatagcataatggcttagttttaagagatgtcaaaagcaaaacaaagcaatggtatggaacagcagaaataaatttagcaaccacattatggggcatatatttcaaattgtctttcccagtcactatttctcaagtgagatttagcattaaagcaaaagtagacattctttacatgttagctaaaagttagaatacaattaacagctagtctttttaggttttggaaaaaaaaaatcatctctgccattaacaaatactctatagtgccaaatgaaggattactggagaagttacgaggtgaaacctcttacacatcagtggggaacttaaaatcttgttaagaagttcattgtgtagcagtttggacagattaaaagataactaaagaattataggaattatagactgacttgggattgatgagatctgccaaacattttttaatgcactaaaagaagatgaatgccaaagacaaactaatgagaaactgacgggggaaaaaaaaagagaaagagagaaaagtcagataatatgccactggacatagtcccaaattcagctattaaatcacctttcacccccattccaaagtacaaagagaaagaacaatccttacagaaagggtgggggatgtcaggaagcttttctaattattactggcactaagaaattctatactctctctgtccctaaattttatccattaattttatcagcaccccagtggttgcctacttagcttgacaaccattctacaactctctctttgcctagtttagtttttctcactgaccccaccctgagtgagtaaattattttagtagaaacacaagaagtgggattttatcatcatcattgaatggcacattacgttagtgtgcattcaaggtaggtttagatgcatgcaaattaatttttaatcagtaaaagttggggatatggcaaggaacagtgctgggtgtcaccacctggctttcatgagagttctgctaataactagtagtcatttaatctctgatccttggtctcatcatcgaaacaaaactggaatcaagttatataatctctgagagtactaagggattctctttcattagaaggctaaattccagatggttaagttaaataatagttattttttaaattagaaactaatgataatgttgaaagatagtgagggaatattaagaaaaaaagtgagaaaaataatgaaatataaagcaaggctagatggaaaaaagaaagtcaaatatctatatattttcattaaaatgttttgaaaaatgcccatattataaaaattctacttaatattaacgttttttaaaaacttatattccaattgacttgttatttagaagcagctctcaagataaaacaattactgttttcactaaaatagcagaaaaactccatgtaggtattagcacgcagagctagaactaagcattgtcaaacagaaatggtatgtttcacaaaagatgcttaaaatatcttcgaaaaccacaatggtgccattttaagatactcatactaaacattcctaagtagcttgtaataatgtgtttgtgaatttatttaaaggaatgattattgaagacatcaactgccagcttttattcatttagtactgttattttcttaattttccagtgggaaacaaaatttctatattttaaatacatttatttagccaaatacactctcatacttatttcaatcaaagactatgccctaacaagcaattttaagttgtttactcaaactttgtataatggcaaacatcaactccctgttttcagatgatttgctaagcaggttccttggtacttttgcgcagactcaaagataaccctgagttttctctgccccaatgagtcacatggtggcaaaattccaggaaaatagaagtagttttgttttattttattaataattctacaatagtagctgtaataaaataataaattactgtggaacttctaacctaatgaatctattgtagattttcatttttaaataaaagctaattttaattttttcagatactgcaaccaggttactattttcatacaatcatggaaatttaaaatgcaaagttaattgaaagtataaagatgaaaagcaagtgctatgcctaaaatagtgcacgacagtcatgtttcacttaactctcaagtcagaacataaattaagaattctagatgtgacatgccaaatattttagacatagaagaaagcatacaacagaatctgtaccaattacaaacttaaaggcaaaatttacaaggcaacaagttcatgctgaaatactgacaacaaataatgtttctcttattttcagaaagtgatgctgcatttaaatcccatcaccactttatacagtactaaaaattcataatagcgttttcccaagtcttgtattataccccaaagccaaaatatctgtaaggagtaaagaacactgatactctgaacctaacctaagaagaatttttttttttttttttgcttataacaaaatttaaatgaaataaatattacacaaagggactccattaaaaacaatataacatttgacagcataagtatatacaagaagcctgccttatgctctatacttcatcatcctatttttgtaagtgagcatattctatatataatcctgttaagagtaaaggaaatattataacttttaacattttcctcatcatttttgctgctctattccctttctttaaaaatgtgttttgtaattgaaatataagactattcagctaggagtcatagttaaccaacacaagaacaagaaaaatacctcaaaatgtactaacatacggatttcttcagagtgaaagttgaaccaataaaatatgaaattatatttagacaccctcaaataagctacaaaacataatgacaagaagaatggagatgttaaaaaatcctctcttaaaaattcaataagcatatttacccaacataagtaaataaaacaggaaatatcattcttgtttatttgaggcacgtacaactatagtaaataaataatttcattcttatatatgcagaacaacaatctatgagaaattagtaacaagcataagcaagattacccctttacataggctctttttaaaaaatcacttcacataggcacttttaaaaactgatgatatatttagattgtctgtaatatccaaataaagctactttctaaatgcgttgcaaatgaaagcgattttcagacctatcctagaaacccactgtcatgcagaactcaagacatcccacttcatattttatctgtcaatttattttcttcccccacacactcacatccctattcacattcccaaattagactttaaaatccctgagggcaggacctatctatctttgtattccctcttgtacccgatattgtggcaagcaagatatgggtactctatgattatttaataagtggatgagagcattaacaagtatggaagtacacgcaaattccatagctgtcagtgttttgccttccttatttcagctcagtaaaatgaagatatattcagtaacatattttcatagtgaaatgaagcataatcactaaactgtattctatgagaaaatacagaagtatatccttcagaacactattacccaagctgtgctttgctttatagaacagttaaatatgggatagtaaaaagtttctcctcctcttaataaaagggttccaccacgatcaggtaatctgagcaatccagtttaaaaaaaaaattcaagtagcatttctttactgttattagttttggggttttttgtttgtttgttttttgtttttactgttatcaatagcatttatttcactcttcaaaatacattatatgctaacatgtactatcactttctaagcaatatcaaagaacactttggtcttggatcatctcagcagaagaaagatctatggaatggagtttgacaaaagatgttttaggagaataaaagacatcatgttaaatttcctttaccaaaatagcattatagatttgaagggcatatttaacgtcccattaaatattcattactctgtgtccacagaaagtagaatgaaggcggaactatcatgagcattcttctgtactcactcgctcattgtgaaagggtagaggaatatgtatttgctgtttctcatacctctgtagggtttggttgttacacttcattgaagagttttcttaattcttctcaatatattctcaaaatatttccttctttcctcttcctcttctgtcttttctttctaagtgtatatgtacaaaggaaatagggacctctgaattgtatcttaaagatattttcagacaatgaatgtttaagtttgattaatctttggaagtgttcagaaaacattaatactcattaacgaatgggataaccatgatatttctatgagaaaaaaatgtcaacagatatggttctgagatttcatgcaggtccatcatgattctgcaaaataatatgccttctgcatgactaaaccacaaatatcataataaaagattgcatacggagaaaagcactattcaaggaaaagtaggaagctagttgactctacagtgctcattatcacaagatgtggacctagtgccagttctgccattagctgtgtgactttgggacatttctcagcgtctcaggatatcaggtatgtcttttgcaaaggaaaggaacaagtttagtggttcagcgactgctgcagtagtggattatgaaggagaacagcagaaggggagaccaagcacgtgggacaccgatctcacatcttccactgagcagctccactttcacatgtttgatatattaaaatttagagcaatatttatttttaaaaagtcctgctaacttaaaaatggggaaacatagattgcatgacctaaatttctatttaagatagcatggtctagtttgcatgtttaattaatatgttttcgtctcagaaaaaaaaaaaagtttcaacatcttttcctgttcactcatgtgctcttggttcaagtaaaataaaaacttaatgactatatcatttttatagagcttattttatacttttgtaatatatttctttcttattaaataaaaagatgagtggaggtgttgctttcaaaataaaattaaacataacagagagattggatgaagtcaactcctgcccatgcttaactttagagttatcttttcacgcggccttatgggcacttaaatactgtactgtcttatctttgaggtagaacaaaaaaaatggcaaaaacattcacataaaggggaaaatggaaaagaaagctgtgagagatttctttttaacataattatcatcattaggctttgcagtcttctttgacacaaagttgagatatagtcttcttaatacgaagagcagttaggcgggccgctccgttggcataccaacactcacgcattattctccccatgactcggagtgcttcacaactttgccactggtttgggatacttggtcgaaacttctggtcacaaacaacctttctcatttcctctatcgagggatctgaaggcaccatgtcataataaggcaattggtactcctcaacaattcctccgaccgaacacctccgggctatttcccagtaaaccagaccaacagaatagatgtcagctcgtttgaaggactcaaagatattcacattcattgtatcatcaagcatttcaggagccatatacctcttcgttcccactttaggattctgaggtatgtcgatagtgttcagtattgaatcatgcttcacagccaaccctaagtccgctatggcacaagtttcacattttttcactaagatattctttgattttatgtctcgatgagcaatagcaggtttaccttgtgtcccaacaatctccatatgaaggtgtgccagaccactagcaattgagagcgccagcttgatcattccagccaccgtcactatatttctattcaaatagtcatataaggagccctgttcatgatattcagataccagccaaagctgagtccaggttccattatctttgttgtcagcagcaatgaaaccaaggatgttttcatgtcgcagcatgaccgtctggtaaatttctgcctcacgaaaccaagatctttcatctctggaggagaatattttcacagccacatcttccccacaccatcttccatgccacacctcaccaaatctaccttttcctactatttcctgaagcacaatcgtccttgcaattgtcctttgaaccaacagaggtagaccagagccagatccagaggcagttacatcataaatcagatctttcagggtttttccagcatttaccagattgcactcagagagtggttcctccacattcggtctctttttcttcctgtaggagcactgtcgaccctggcatgcccatattgtcagcatcgcagctatggacaggaggcaaacaggcacagtaataatgatggccagctccatgggtccaagttttggggcatttggtgatgctgttggaaggtgcagtgttatgttgttgcaaaaatctgtgaagcagcattcggttttggtaacattgttggaactatgacagaacacttgagcattcagttctggaagggagacacaggatttgatcacctgttcttttccattggttagcatgactgatgcccaacatgctccttctgtttggcaggtaaagtttgaagaatcacacaaaagacatacacacttcagtcctgccgagagctcggcggccgcggcgagcagcaggagagcctggcggagcgctgagcggagcgcccgggtcatcgccaccaggcggccgcgccggggctgcgaggccccagagcagagcgaggcagccggggcagcacggcccgctttgaagttcccgggccgcgggaggggagcgcggcaccgacacccttttgaagtgcgcggttggctctagtcagtgtgggcgcccc

SEQ ID NO: 219 - DNA, 3100 bp, Macaca mulatta
  source 1..3100: mol_type = genomic DNA
gctgccccggctgcctcgctctgctctggggcctcgcagccccggcgcggccgcctggtggcgatgacccgggcgctccgctcagcgctccgccaggctctcctgctgctcgccgcggccgccgagctctcggcaggactgaagtgtgtatgtcttttgtgtgattcttcaaactttacctgccaaacagaaggagcatgttgggcatcagtcatgctaaccaatggaaaagaacaggtgatcaaatcctgtgtctcccttccagaactgaatgctcaagtgttctgtcatagttccaacaatgttaccaaaaccgaatgctgcttcacagatttttgcaacaacataacactgcaccttccaacagcatcaccaaatgccccaaaacttggacccatggagctggccatcattattactgtgcctgtttgcctcctgtccatagctgcgatgctgacaatatgggcatgccagggtcgacagtgctcctacaggaagaaaaagagaccgaatgtggaggaaccactctctgagtgcaatctggtaaatgctggaaaaaccctgaaagatctgatttatgatgtaactgcctctggatctggctctggtctacctctgttggttcaaaggacaattgcaaggacgattgtgcttcaggaaatagtaggaaaaggtagatttggtgaggtgtggcatggaagatggtgtggggaagatgtggctgtgaaaatattctcctccagagatgaaagatcttggtttcgtgaggcagaaatttaccagacggtcatgctgcgacatgaaaacatccttggtttcattgctgctgacaacaaagataatggaacctggactcaactttggctggtatctgaatatcatgaacagggctccttatatgactatttgaatagaaatatagtgacggtggctggaatgatcaagctggcgctctcaattgctagtggtctggcacaccttcatatggagattgttgggacacaaggtaaacctgctattgctcatcgagacataaaatcaaagaatatcttagtgaaaaaatgtgaaacttgtgccatagcggacttagggttggctgtgaagcatgattcaatactgaacactatcgacatacctcagaatcctaaagtgggaacgaagaggtatatggctcctgaaatgcttgatgatacaatgaatgtgagtatctttgagtccttcaaacgagcggacatctattctgttggtctggtttactgggaaatagcccggaggtgttcggtcggaggaattgttgaggagtaccaattgccttattatgacatggtgccttcagatccctcgatagaggaaatgagaaaggttgtttgtgaccagaagtttcgaccaagtatcccaaaccagtggcaaagttgtgaagcactccgagtcatggggagaataatgcgtgagtgttggtatgccaacggagcggcccgcctaactgctcttcgtattaagaagactatatctcaactttgtgtcaaagaagactgcaaagcctaatgatgataattatgttaaaaagaaatctctcacagctttcttttccattttcccctttatgtgaatgtttttgccattttttttgttctacctcaaagataagacagtacagtatttaagtgcccataaggccgcgtgaaaagataactctaaagttaagcatgggcaggagttgacttcatccaatctctctgttatgtttaattttattttgaaagcaacacctccactcatctttttatttaataagaaagaaatatattacaaaagtataaaataagctctataaaaatgatatagtcattaagtttttattttacttgaaccaagagcacatgagtgaacaggaaaagatgttaaaacttttttttttttctgagacgaaaacatattaattaaacatgcaaactagaccatgctatcttaaatagaaatttaggtcatgcaatctatgtttccccatttttaagttagcaggactttttaaaaataaatattgctctaaattttaatatatcaaacatgtgaaagtggagctgctcagcggaagatgtgagatcggtgtcccacgtgcttggtctccccttctgctgttctccttcataatccactactgcagcagtcgctgaaccactaaacttgttcctttcctttgcaaaagacatacctgatatcctgagacgctgagaaatgtcccaaagtcacacagctaatggcagaactggcactaggtccacatcttgtgataatgagcactgtagagtcaactagcttcctacttttccttgaatagtgcttttctccgtatgcaatcttttattatgatatttgtggtttagtcatgcagaaggcatattattttgcagaatcatgatggacctgcatgaaatctcagaaccatatctgttgacatttttttctcatagaaatatcatggttatcccattcgttaatgagtattaatgttttctgaacacttccaaagattaatcaaacataaatattcattgtctgaaaatatctttaagatacaattcagaggtccctatttcctttgtacatatacacttagaaagaaaagacagaagaggaagaggaaagaaggaaatattttgagaatatattgagaagaattaagaaaactcttcaatgaagtgtaacaaccaaaccctacagagggtatgagaaacagcaaatacatattcctctaccctttcacaatgagcgagtgagtacagaagaatgctcatgatagttccgccttcattctactttctgtggacacagagtaatgaatatttaatgggacgttaaatatgcccttcaaatctataatgctattttggtaaaggaaatttaacatgatgtcttttattctcctaaaacatcttttgtcaaactccattccatagaactttcttctgctgagatgatccaagaccaaagtgttctttgatattgcttagaaagtgatagtacatgttagcatataatgtattttgaagaatgaaataaatgctattgataacagtaaaaacaaaaaacaaaacaaaac

SEQ ID NO: 220 - DNA, 3100 bp, Macaca mulatta
  source 1..3100: mol_type = genomic DNA
gttttgttttgttttttgtttttactgttatcaatagcatttatttcattcttcaaaatacattatatgctaacatgtactatcactttctaagcaatatcaaagaacactttggtcttggatcatctcagcagaagaaagttctatggaatggagtttgacaaaagatgttttaggagaataaaagacatcatgttaaatttcctttaccaaaatagcattatagatttgaagggcatatttaacgtcccattaaatattcattactctgtgtccacagaaagtagaatgaaggcggaactatcatgagcattcttctgtactcactcgctcattgtgaaagggtagaggaatatgtatttgctgtttctcataccctctgtagggtttggttgttacacttcattgaagagttttcttaattcttctcaatatattctcaaaatatttccttctttcctcttcctcttctgtcttttctttctaagtgtatatgtacaaaggaaatagggacctctgaattgtatcttaaagatattttcagacaatgaatatttatgtttgattaatctttggaagtgttcagaaaacattaatactcattaacgaatgggataaccatgatatttctatgagaaaaaaatgtcaacagatatggttctgagatttcatgcaggtccatcatgattctgcaaaataatatgccttctgcatgactaaaccacaaatatcataataaaagattgcatacggagaaaagcactattcaaggaaaagtaggaagctagttgactctacagtgctcattatcacaagatgtggacctagtgccagttctgccattagctgtgtgactttgggacatttctcagcgtctcaggatatcaggtatgtcttttgcaaaggaaaggaacaagtttagtggttcagcgactgctgcagtagtggattatgaaggagaacagcagaaggggagaccaagcacgtgggacaccgatctcacatcttccgctgagcagctccactttcacatgtttgatatattaaaatttagagcaatatttatttttaaaaagtcctgctaacttaaaaatggggaaacatagattgcatgacctaaatttctatttaagatagcatggtctagtttgcatgtttaattaatatgttttcgtctcagaaaaaaaaaaaagttttaacatcttttcctgttcactcatgtgctcttggttcaagtaaaataaaaacttaatgactatatcatttttatagagcttattttatacttttgtaatatatttctttcttattaaataaaaagatgagtggaggtgttgctttcaaaataaaattaaacataacagagagattggatgaagtcaactcctgcccatgcttaactttagagttatcttttcacgcggccttatgggcacttaaatactgtactgtcttatctttgaggtagaacaaaaaaaatggcaaaaacattcacataaaggggaaaatggaaaagaaagctgtgagagatttctttttaacataattatcatcattaggctttgcagtcttctttgacacaaagttgagatatagtcttcttaatacgaagagcagttaggcgggccgctccgttggcataccaacactcacgcattattctccccatgactcggagtgcttcacaactttgccactggtttgggatacttggtcgaaacttctggtcacaaacaacctttctcatttcctctatcgagggatctgaaggcaccatgtcataataaggcaattggtactcctcaacaattcctccgaccgaacacctccgggctatttcccagtaaaccagaccaacagaatagatgtccgctcgtttgaaggactcaaagatactcacattcattgtatcatcaagcatttcaggagccatatacctcttcgttcccactttaggattctgaggtatgtcgatagtgttcagtattgaatcatgcttcacagccaaccctaagtccgctatggcacaagtttcacattttttcactaagatattctttgattttatgtctcgatgagcaatagcaggtttaccttgtgtcccaacaatctccatatgaaggtgtgccagaccactagcaattgagagcgccagcttgatcattccagccaccgtcactatatttctattcaaatagtcatataaggagccctgttcatgatattcagataccagccaaagttgagtccaggttccattatctttgttgtcagcagcaatgaaaccaaggatgttttcatgtcgcagcatgaccgtctggtaaatttctgcctcacgaaaccaagatctttcatctctggaggagaatattttcacagccacatcttccccacaccatcttccatgccacacctcaccaaatctaccttttcctactatttcctgaagcacaatcgtccttgcaattgtcctttgaaccaacagaggtagaccagagccagatccagaggcagttacatcataaatcagatctttcagggtttttccagcatttaccagattgcactcagagagtggttcctccacattcggtctctttttcttcctgtaggagcactgtcgaccctggcatgcccatattgtcagcatcgcagctatggacaggaggcaaacaggcacagtaataatgatggccagctccatgggtccaagttttggggcatttggtgatgctgttggaaggtgcagtgttatgttgttgcaaaaatctgtgaagcagcattcggttttggtaacattgttggaactatgacagaacacttgagcattcagttctggaagggagacacaggatttgatcacctgttcttttccattggttagcatgactgatgcccaacatgctccttctgtttggcaggtaaagtttgaagaatcacacaaaagacatacacacttcagtcctgccgagagctcggcggccgcggcgagcagcaggagagcctggcggagcgctgagcggagcgcccgggtcatcgccaccaggcggccgcgccggggctgcgaggccccagagcagagcgaggcagccggggcagc

SEQ ID NO: 221 - DNA, 2819 bp, Homo sapiens
  source 1..2819: mol_type = genomic DNA
agattcactggtgtggcaagttgtctctcagactgtacatgcattaaaattttgcttggcattactcaaaagcaaaagaaaagtaaaaggaagaaacaagaacaagaaaaaagattatattgattttaaaatcatgcaaaaactgcaactctgtgtttatatttacctgtttatgctgattgttgctggtccagtggatctaaatgagaacagtgagcaaaaagaaaatgtggaaaaagaggggctgtgtaatgcatgtacttggagacaaaacactaaatcttcaagaatagaagccattaagatacaaatcctcagtaaacttcgtctggaaacagctcctaacatcagcaaagatgttataagacaacttttacccaaagctcctccactccgggaactgattgatcagtatgatgtccagagggatgacagcagcgatggctctttggaagatgacgattatcacgctacaacggaaacaatcattaccatgcctacagagtctgattttctaatgcaagtggatggaaaacccaaatgttgcttctttaaatttagctctaaaatacaatacaataaagtagtaaaggcccaactatggatatatttgagacccgtcgagactcctacaacagtgtttgtgcaaatcctgagactcatcaaacctatgaaagacggtacaaggtatactggaatccgatctctgaaacttgacatgaacccaggcactggtatttggcagagcattgatgtgaagacagtgttgcaaaattggctcaaacaacctgaatccaacttaggcattgaaataaaagctttagatgagaatggtcatgatcttgctgtaaccttcccaggaccaggagaagatgggctgaatccgtttttagaggtcaaggtaacagacacaccaaaaagatccagaagggattttggtcttgactgtgatgagcactcaacagaatcacgatgctgtcgttaccctctaactgtggattttgaagcttttggatgggattggattatcgctcctaaaagatataaggccaattactgctctggagagtgtgaatttgtatttttacaaaaatatcctcatactcatctggtacaccaagcaaaccccagaggttcagcaggcccttgctgtactcccacaaagatgtctccaattaatatgctatattttaatggcaaagaacaaataatatatgggaaaattccagcgatggtagtagaccgctgtgggtgctcatgagatttatattaagcgttcataacttcctaaaacatggaaggttttcccctcaacaattttgaagctgtgaaattaagtaccacaggctataggcctagagtatgctacagtcacttaagcataagctacagtatgtaaactaaaagggggaatatatgcaatggttggcatttaaccatccaaacaaatcatacaagaaagttttatgatttccagagtttttgagctagaaggagatcaaattacatttatgttcctatatattacaacatcggcgaggaaatgaaagcgattctccttgagttctgatgaattaaaggagtatgctttaaagtctatttctttaaagttttgtttaatatttacagaaaaatccacatacagtattggtaaaatgcaggattgttatataccatcattcgaatcatccttaaacacttgaatttatattgtatggtagtatacttggtaagataaaattccacaaaaatagggatggtgcagcatatgcaatttccattcctattataattgacacagtacattaacaatccatgccaacggtgctaatacgataggctgaatgtctgaggctaccaggtttatcacataaaaaacattcagtaaaatagtaagtttctcttttcttcaggtgcattttcctacacctccaaatgaggaatggattttctttaatgtaagaagaatcatttttctagaggttggctttcaattctgtagcatacttggagaaactgcattatcttaaaaggcagtcaaatggtgtttgtttttatcaaaatgtcaaaataacatacttggagaagtatgtaattttgtctttggaaaattacaacactgcctttgcaacactgcagtttttatggtaaaataatagaaatgatcgactctatcaatattgtataaaaagactgaaacaatgcatttatataatatgtatacaatattgttttgtaaataagtgtctccttttttatttactttggtatatttttacactaaggacatttcaaattaagtactaaggcacaaagacatgtcatgcatcacagaaaagcaactacttatatttcagagcaaattagcagattaaatagtggtcttaaaactccatatgttaatgattagatggttatattacaatcattttatatttttttacatgattaacattcacttatggattcatgatggctgtataaagtgaatttgaaatttcaatggtttactgtcattgtgtttaaatctcaacgttccattattttaatacttgcaaaaacattactaagtataccaaaataattgactctattatctgaaatgaagaataaactgatgctatctcaacaataactgttacttttattttataatttgataatgaatatatttctgcatttatttacttctgttttgtaaattgggattttgttaatcaaatttattgtactatgactaaatgaaattatttcttacatctaatttgtagaaacagtataagttatattaaagtgttttcacatttttttgaaagaca

SEQ ID NO: 222 - DNA, 2819 bp, Homo sapiens
  source 1..2819: mol_type = genomic DNA
tgtctttcaaaaaaatgtgaaaacactttaatataacttatactgtttctacaaattagatgtaagaaataatttcatttagtcatagtacaataaatttgattaacaaaatcccaatttacaaaacagaagtaaataaatgcagaaatatattcattatcaaattataaaataaaagtaacagttattgttgagatagcatcagtttattcttcatttcagataatagagtcaattattttggtatacttagtaatgtttttgcaagtattaaaataatggaacgttgagatttaaacacaatgacagtaaaccattgaaatttcaaattcactttatacagccatcatgaatccataagtgaatgttaatcatgtaaaaaaatataaaatgattgtaatataaccatctaatcattaacatatggagttttaagaccactatttaatctgctaatttgctctgaaatataagtagttgcttttctgtgatgcatgacatgtctttgtgccttagtacttaatttgaaatgtccttagtgtaaaaatataccaaagtaaataaaaaaggagacacttatttacaaaacaatattgtatacatattatataaatgcattgtttcagtctttttatacaatattgatagagtcgatcatttctattattttaccataaaaactgcagtgttgcaaaggcagtgttgtaattttccaaagacaaaattacatacttctccaagtatgttattttgacattttgataaaaacaaacaccatttgactgccttttaagataatgcagtttctccaagtatgctacagaattgaaagccaacctctagaaaaatgattcttcttacattaaagaaaatccattcctcatttggaggtgtaggaaaatgcacctgaagaaaagagaaacttactattttactgaatgttttttatgtgataaacctggtagcctcagacattcagcctatcgtattagcaccgttggcatggattgttaatgtactgtgtcaattataataggaatggaaattgcatatgctgcaccatccctatttttgtggaattttatcttaccaagtatactaccatacaatataaattcaagtgtttaaggatgattcgaatgatggtatataacaatcctgcattttaccaatactgtatgtggatttttctgtaaatattaaacaaaactttaaagaaatagactttaaagcatactcctttaattcatcagaactcaaggagaatcgctttcatttcctcgccgatgttgtaatatataggaacataaatgtaatttgatctccttctagctcaaaaactctggaaatcataaaactttcttgtatgatttgtttggatggttaaatgccaaccattgcatatattcccccttttagtttacatactgtagcttatgcttaagtgactgtagcatactctaggcctatagcctgtggtacttaatttcacagcttcaaaattgttgaggggaaaaccttccatgttttaggaagttatgaacgcttaatataaatctcatgagcacccacagcggtctactaccatcgctggaattttcccatatattatttgttctttgccattaaaatatagcatattaattggagacatctttgtgggagtacagcaagggcctgctgaacctctggggtttgcttggtgtaccagatgagtatgaggatatttttgtaaaaatacaaattcacactctccagagcagtaattggccttatatcttttaggagcgataatccaatcccatccaaaagcttcaaaatccacagttagagggtaacgacagcatcgtgattctgttgagtgctcatcacagtcaagaccaaaatcccttctggatctttttggtgtgtctgttaccttgacctctaaaaacggattcagcccatcttctcctggtcctgggaaggttacagcaagatcatgaccattctcatctaaagcttttatttcaatgcctaagttggattcaggttgtttgagccaattttgcaacactgtcttcacatcaatgctctgccaaataccagtgcctgggttcatgtcaagtttcagagatcggattccagtataccttgtaccgtctttcataggtttgatgagtctcaggatttgcacaaacactgttgtaggagtctcgacgggtctcaaatatatccatagttgggcctttactactttattgtattgtattttagagctaaatttaaagaagcaacatttgggttttccatccacttgcattagaaaatcagactctgtaggcatggtaatgattgtttccgttgtagcgtgataatcgtcatcttccaaagagccatcgctgctgtcatccctctggacatcatactgatcaatcagttcccggagtggaggagctttgggtaaaagttgtcttataacatctttgctgatgttaggagctgtttccagacgaagtttactgaggatttgtatcttaatggcttctattcttgaagatttagtgttttgtctccaagtacatgcattacacagcccctctttttccacattttctttttgctcactgttctcatttagatccactggaccagcaacaatcagcataaacaggtaaatataaacacagagttgcagtttttgcatgattttaaaatcaatataatcttttttcttgttcttgtttcttccttttacttttcttttgcttttgagtaatgccaagcaaaattttaatgcatgtacagtctgagagacaacttgccacaccagtgaatct

SEQ ID NO: 223 - DNA, 2705 bp, Mus musculus
  source 1..2705: mol_type = genomic DNA
aggactccctggcgtggcaggttgtctctcggacggtacatgcactaatatttcacttggcattactcaaaagcaaaaagaagaaataagaacaagggaaaaaaaaagattgtgctgatttttaaaatgatgcaaaaactgcaaatgtatgtttatatttacctgttcatgctgattgctgctggcccagtggatctaaatgagggcagtgagagagaagaaaatgtggaaaaagaggggctgtgtaatgcatgtgcgtggagacaaaacacgaggtactccagaatagaagccataaaaattcaaatcctcagtaagctgcgcctggaaacagctcctaacatcagcaaagatgctataagacaacttctgccaagagcgcctccactccgggaactgatcgatcagtacgacgtccagagggatgacagcagtgatggctctttggaagatgacgattatcacgctaccacggaaacaatcattaccatgcctacagagtctgactttctaatgcaagcggatggcaagcccaaatgttgcttttttaaatttagctctaaaatacagtacaacaaagtagtaaaagcccaactgtggatatatctcagacccgtcaagactcctacaacagtgtttgtgcaaatcctgagactcatcaaacccatgaaagacggtacaaggtatactggaatccgatctctgaaacttgacatgagcccaggcactggtatttggcagagtattgatgtgaagacagtgttgcaaaattggctcaaacagcctgaatccaacttaggcattgaaatcaaagctttggatgagaatggccatgatcttgctgtaaccttcccaggaccaggagaagatgggctgaatccctttttagaagtcaaggtgacagacacacccaagaggtcccggagagactttgggcttgactgcgatgagcactccacggaatcccggtgctgccgctaccccctcacggtcgattttgaagcctttggatgggactggattatcgcacccaaaagatataaggccaattactgctcaggagagtgtgaatttgtgtttttacaaaaatatccgcatactcatcttgtgcaccaagcaaaccccagaggctcagcaggcccttgctgcactccgacaaaaatgtctcccattaatatgctatattttaatggcaaagaacaaataatatatgggaaaattccagccatggtagtagaccgctgtgggtgctcatgagctttgcattaggttagaaatttcccaagtcatggaaggtcttcccctcaatttcgaaactgtgaattcaagcaccacaggctgtaggccttgagtatgctctagtaacgtaagcacaagctacagtgtatgaactaaaagagagaatagatgcaatggttggcattcaaccaccaaaataaaccatactataggatgttgtatgatttccagagtttttgaaatagatggagatcaaattacatttatgtccatatatgtatattacaactacaatctaggcaaggaagtgagagcacatcttgtggtctgctgagttaggagggtatgattaaaaggtaaagtcttatttcctaacagtttcacttaatatttacggaagaatctatatgtagcctttgtaaagtgtaggattgttatcatttaaaaacatcatgtacacttatatttgtattgtatacttggtaagataaaattccacaaagtaggaatggggccttacatacacattgccattcctattataattggacaatccaccacggtgctaatgcagtgctgaatggctcctactggacctctcgatagaacactctacaaagtacgagtctctctctcccttccaggtgcatctccacacacacagcactaagtgttcaatgcattttctttaaggaaagaagaatctttttttctagaggtcaactttcagtcaactctagcacagcgggagtgactgctgcatcttaaaaggcagccaaacagtattcattttttaatctaaatttcaaaatcactgtctgcctttatcacatggcaattttgtggtaaaataatggaaatgactggttctatcaatattgtataaaagactctgaaacaattacatttatataatatgtatacaatattgttttgtaaataagtgtctccttttatatttactttggtatatttttacactaatgaaatttcaaatcattaaagtacaaagacatgtcatgtatcacaaaaaaggtgactgcttctatttcagagtgaattagcagattcaatagtggtcttaaaactctgtatgttaagattagaaggttatattacaatcaatttatgtattttttacattatcaacattcacttatggtttcatggtggctgtatctatgaatgtggctcccagtcaaatttcaatgccccaccattttaaaaattacaagcattactaaacataccaacatgtatctaaagaaatacaaatatggtatctcaataacagctacttttttattttataatttgacaatgaatacatttcttttatttacttcagttttataaattggaactttgtttatcaaatgtattgtactcatagctaaatgaaattatttcttacataaaaatgtgtagaaactataaattaaagtgttttcacatttttgaaaggc

SEQ ID NO: 224 - DNA, 2705 bp, Mus musculus
  source 1..2705: mol_type = genomic DNA
gcctttcaaaaatgtgaaaacactttaatttatagtttctacacatttttatgtaagaaataatttcatttagctatgagtacaatacatttgataaacaaagttccaatttataaaactgaagtaaataaaagaaatgtattcattgtcaaattataaaataaaaaagtagctgttattgagataccatatttgtatttctttagatacatgttggtatgtttagtaatgcttgtaatttttaaaatggtggggcattgaaatttgactgggagccacattcatagatacagccaccatgaaaccataagtgaatgttgataatgtaaaaaatacataaattgattgtaatataaccttctaatcttaacatacagagttttaagaccactattgaatctgctaattcactctgaaatagaagcagtcaccttttttgtgatacatgacatgtctttgtactttaatgatttgaaatttcattagtgtaaaaatataccaaagtaaatataaaaggagacacttatttacaaaacaatattgtatacatattatataaatgtaattgtttcagagtcttttatacaatattgatagaaccagtcatttccattattttaccacaaaattgccatgtgataaaggcagacagtgattttgaaatttagattaaaaaatgaatactgtttggctgccttttaagatgcagcagtcactcccgctgtgctagagttgactgaaagttgacctctagaaaaaaagattcttctttccttaaagaaaatgcattgaacacttagtgctgtgtgtgtggagatgcacctggaagggagagagagactcgtactttgtagagtgttctatcgagaggtccagtaggagccattcagcactgcattagcaccgtggtggattgtccaattataataggaatggcaatgtgtatgtaaggccccattcctactttgtggaattttatcttaccaagtatacaatacaaatataagtgtacatgatgtttttaaatgataacaatcctacactttacaaaggctacatatagattcttccgtaaatattaagtgaaactgttaggaaataagactttaccttttaatcataccctcctaactcagcagaccacaagatgtgctctcacttccttgcctagattgtagttgtaatatacatatatggacataaatgtaatttgatctccatctatttcaaaaactctggaaatcatacaacatcctatagtatggtttattttggtggttgaatgccaaccattgcatctattctctcttttagttcatacactgtagcttgtgcttacgttactagagcatactcaaggcctacagcctgtggtgcttgaattcacagtttcgaaattgaggggaagaccttccatgacttgggaaatttctaacctaatgcaaagctcatgagcacccacagcggtctactaccatggctggaattttcccatatattatttgttctttgccattaaaatatagcatattaatgggagacatttttgtcggagtgcagcaagggcctgctgagcctctggggtttgcttggtgcacaagatgagtatgcggatatttttgtaaaaacacaaattcacactctcctgagcagtaattggccttatatcttttgggtgcgataatccagtcccatccaaaggcttcaaaatcgaccgtgagggggtagcggcagcaccgggattccgtggagtgctcatcgcagtcaagcccaaagtctctccgggacctcttgggtgtgtctgtcaccttgacttctaaaaagggattcagcccatcttctcctggtcctgggaaggttacagcaagatcatggccattctcatccaaagctttgatttcaatgcctaagttggattcaggctgtttgagccaattttgcaacactgtcttcacatcaatactctgccaaataccagtgcctgggctcatgtcaagtttcagagatcggattccagtataccttgtaccgtctttcatgggtttgatgagtctcaggatttgcacaaacactgttgtaggagtcttgacgggtctgagatatatccacagttgggcttttactactttgttgtactgtattttagagctaaatttaaaaaagcaacatttgggcttgccatccgcttgcattagaaagtcagactctgtaggcatggtaatgattgtttccgtggtagcgtgataatcgtcatcttccaaagagccatcactgctgtcatccctctggacgtcgtactgatcgatcagttcccggagtggaggcgctcttggcagaagttgtcttatagcatctttgctgatgttaggagctgtttccaggcgcagcttactgaggatttgaatttttatggcttctattctggagtacctcgtgttttgtctccacgcacatgcattacacagcccctctttttccacattttcttctctctcactgccctcatttagatccactgggccagcagcaatcagcatgaacaggtaaatataaacatacatttgcagtttttgcatcattttaaaaatcagcacaatctttttttttcccttgttcttatttcttctttttgcttttgagtaatgccaagtgaaatattagtgcatgtaccgtccgagagacaacctgccacgccagggagtcct

SEQ ID NO: 225 - DNA, 1131 bp, Rattus norvegicus
  source 1..1131: mol_type = genomic DNA
atgattcaaaaaccgcaaatgtatgtttatatttacctgtttgtgctgattgctgctggcccagtggatctaaatgaggacagtgagagagaggcgaatgtggaaaaagaggggctgtgtaatgcgtgtgcgtggagacaaaacacaaggtactccagaatagaagccataaaaattcaaatcctcagtaaactccgcctggaaacagcgcctaacatcagcaaagatgctataagacaacttctgcccagagcgcctccactccgggaactgatcgatcagtacgacgtccagagggatgacagcagtgacggctctttggaagatgacgattatcacgctaccacggaaacaatcattaccatgcctaccgagtctgactttctaatgcaagcggatggaaagcccaaatgttgcttttttaaatttagctctaaaatacagtacaacaaagtggtaaaggcccagctgtggatatatctgagagccgtcaagactcctacaacagtgtttgtgcaaatcctgagactcatcaaacccatgaaagacggtacaaggtataccggaatccgatctctgaaacttgacatgagcccaggcactggtatttggcagagtattgatgtgaagacagtgttgcaaaattggctcaaacagcctgaatccaacttaggcattgaaatcaaagctttggatgagaatgggcatgatcttgctgtaaccttcccaggaccaggagaagatgggctgaatccctttttagaagtcaaagtaacagacacacccaagaggtcccggagagactttgggcttgactgtgatgaacactccacggaatcgcggtgctgtcgctaccccctcacggtcgatttcgaagcctttggatgggactggattattgcacccaaaagatataaggctaattactgctctggagagtgtgaatttgtgttcttacaaaaatatccgcatactcatcttgtgcaccaagcaaaccccagaggctcggcaggcccttgctgcacgccaacaaaaatgtctcccattaatatgctatattttaatggcaaagaacaaataatatatgggaaaattccagccatggtagtagaccggtgtgggtgctcgtga

SEQ ID NO: 226 - DNA, 1131 bp, Rattus norvegicus
  source 1..1131: mol_type = genomic DNA
tcacgagcacccacaccggtctactaccatggctggaattttcccatatattatttgttctttgccattaaaatatagcatattaatgggagacatttttgttggcgtgcagcaagggcctgccgagcctctggggtttgcttggtgcacaagatgagtatgcggatatttttgtaagaacacaaattcacactctccagagcagtaattagccttatatcttttgggtgcaataatccagtcccatccaaaggcttcgaaatcgaccgtgagggggtagcgacagcaccgcgattccgtggagtgttcatcacagtcaagcccaaagtctctccgggacctcttgggtgtgtctgttactttgacttctaaaaagggattcagcccatcttctcctggtcctgggaaggttacagcaagatcatgcccattctcatccaaagctttgatttcaatgcctaagttggattcaggctgtttgagccaattttgcaacactgtcttcacatcaatactctgccaaataccagtgcctgggctcatgtcaagtttcagagatcggattccggtataccttgtaccgtctttcatgggtttgatgagtctcaggatttgcacaaacactgttgtaggagtcttgacggctctcagatatatccacagctgggcctttaccactttgttgtactgtattttagagctaaatttaaaaaagcaacatttgggctttccatccgcttgcattagaaagtcagactcggtaggcatggtaatgattgtttccgtggtagcgtgataatcgtcatcttccaaagagccgtcactgctgtcatccctctggacgtcgtactgatcgatcagttcccggagtggaggcgctctgggcagaagttgtcttatagcatctttgctgatgttaggcgctgtttccaggcggagtttactgaggatttgaatttttatggcttctattctggagtaccttgtgttttgtctccacgcacacgcattacacagcccctctttttccacattcgcctctctctcactgtcctcatttagatccactgggccagcagcaatcagcacaaacaggtaaatataaacatacatttgcggtttttgaatcat

SEQ ID NO: 227 - DNA, 1128 bp, Macaca fascicularis
  source 1..1128: mol_type = genomic DNA
atgcaaaaactgcaactctgtgtttatatttacctgtttatgctgattgttgctggtccagtggatctaaatgagaacagtgagcaaaaagaaaatgtggaaaaagaggggctgtgtaatgcatgtacttggagacaaaacactaaatcttcaagaatagaagccattaaaatacaaatcctcagtaaacttcgtctggaaacagctcctaacatcagcaaagatgctataagacaacttttacccaaagctcctccactccgggaactgattgatcagtatgatgtccagagggatgacagcagcgatggctctttggaagatgacgattatcacgctacaactgaaacaatcattaccatgcctacagagtctgattttttaatgcaagtggatggaaaacccaaatgttgcttctttaaatttagctctaaaatacaatacaataaagtggtaaaggcccaactatggatatatttgagacccgtcgagactcctacaacagtgtttgtgcaaatcctgagactcatcaaacctatgaaagacggtacaaggtatactggaatccgatctctgaaacttgacatgaacccaggcactggtatttggcagagcattgatgtgaagacagtgttgcaaaattggctcaaacaacctgaatccaacttaggcattgaaataaaagctttagatgagaatggtcatgatcttgctgtaaccttcccaggaccaggagaagatgggctgaatccctttttagaggtcaaggtaacagacacaccaaaaagatccagaagggattttggtcttgactgtgatgagcactcaacagaatcgcgatgctgtcgttaccctctaactgtggattttgaagcttttggatgggattggattatcgctcctaaaagatataaggccaattactgctctggagagtgtgaatttgtatttttacaaaaatatcctcatactcatctggtacaccaagcaaaccccagaggttcagcaggcccttgctgtactcccacaaagatgtctccaattaatatgctatattttaatggcaaagaacaaataatatatgggaaaattccagccatggtagtagaccgctgcgggtgctcatga

SEQ ID NO: 228 - DNA, 1128 bp, Macaca fascicularis
  source 1..1128: mol_type = genomic DNA
tcatgagcacccgcagcggtctactaccatggctggaattttcccatatattatttgttctttgccattaaaatatagcatattaattggagacatctttgtgggagtacagcaagggcctgctgaacctctggggtttgcttggtgtaccagatgagtatgaggatatttttgtaaaaatacaaattcacactctccagagcagtaattggccttatatcttttaggagcgataatccaatcccatccaaaagcttcaaaatccacagttagagggtaacgacagcatcgcgattctgttgagtgctcatcacagtcaagaccaaaatcccttctggatctttttggtgtgtctgttaccttgacctctaaaaagggattcagcccatcttctcctggtcctgggaaggttacagcaagatcatgaccattctcatctaaagcttttatttcaatgcctaagttggattcaggttgtttgagccaattttgcaacactgtcttcacatcaatgctctgccaaataccagtgcctgggttcatgtcaagtttcagagatcggattccagtataccttgtaccgtctttcataggtttgatgagtctcaggatttgcacaaacactgttgtaggagtctcgacgggtctcaaatatatccatagttgggcctttaccactttattgtattgtattttagagctaaatttaaagaagcaacatttgggttttccatccacttgcattaaaaaatcagactctgtaggcatggtaatgattgtttcagttgtagcgtgataatcgtcatcttccaaagagccatcgctgctgtcatccctctggacatcatactgatcaatcagttcccggagtggaggagctttgggtaaaagttgtcttatagcatctttgctgatgttaggagctgtttccagacgaagtttactgaggatttgtattttaatggcttctattcttgaagatttagtgttttgtctccaagtacatgcattacacagcccctctttttccacattttctttttgctcactgttctcatttagatccactggaccagcaacaatcagcataaacaggtaaatataaacacagagttgcagtttttgcat

SEQ ID NO: 229 - DNA, 1128 bp, Macaca mulatta
  source 1..1128: mol_type = genomic DNA
atgcaaaaactgcaactctgtgtttatatttacctgtttatgctgattgttgctggtccagtggatctaaatgagaacagtgagcaaaaagaaaatgtggaaaaagaggggctgtgtaatgcatgtacttggagacaaaacactaaatcttcaagaatagaagccattaaaatacaaatcctcagtaaacttcgtctggaaacagctcctaacatcagcaaagatgctataagacaacttttacccaaagctcctccactccgggaactgattgatcagtatgatgtccagagggatgacagcagcgatggctctttggaagatgacgattatcacgctacaactgaaacaatcattaccatgcctacagagtctgattttttaatgcaagtggatggaaaacccaaatgttgcttctttaaatttagctctaaaatacaatacaataaagtggtaaaggcccaactatggatatatttgagacccgtcgagactcctacaacagtgtttgtgcaaatcctgagactcatcaaacctatgaaagacggtacaaggtatactggaatccgatctctgaaacttgacatgaacccaggcactggtatttggcagagcattgatgtgaagacagtgttgcaaaattggctcaaacaacctgaatccaacttaggcattgaaataaaagctttagatgagaatggtcatgatcttgctgtaaccttcccaggaccaggagaagatgggctgaatccgtttttagaggtcaaggtaacagacacaccaaaaagatccagaagggattttggtcttgactgtgatgagcactcaacagaatcacgatgctgtcgttaccctctaactgtggattttgaagcttttggatgggattggattatcgctcctaaaagatataaggccaattactgctctggagagtgtgaatttgtatttttacaaaaatatcctcatactcatctggtacaccaagcaaaccccagaggttcagcaggcccttgctgtactcccacaaagatgtctccaattaatatgctatattttaatggcaaagaacaaataatatatgggaaaattccagcgatggtagtagaccgctgtgggtgctcatga

SEQ ID NO: 230 - DNA, 1128 bp, Macaca mulatta
  source 1..1128: mol_type = genomic DNA
tcatgagcacccacagcggtctactaccatcgctggaattttcccatatattatttgttctttgccattaaaatatagcatattaattggagacatctttgtgggagtacagcaagggcctgctgaacctctggggtttgcttggtgtaccagatgagtatgaggatatttttgtaaaaatacaaattcacactctccagagcagtaattggccttatatcttttaggagcgataatccaatcccatccaaaagcttcaaaatccacagttagagggtaacgacagcatcgtgattctgttgagtgctcatcacagtcaagaccaaaatcccttctggatctttttggtgtgtctgttaccttgacctctaaaaacggattcagcccatcttctcctggtcctgggaaggttacagcaagatcatgaccattctcatctaaagcttttatttcaatgcctaagttggattcaggttgtttgagccaattttgcaacactgtcttcacatcaatgctctgccaaataccagtgcctgggttcatgtcaagtttcagagatcggattccagtataccttgtaccgtctttcataggtttgatgagtctcaggatttgcacaaacactgttgtaggagtctcgacgggtctcaaatatatccatagttgggcctttaccactttattgtattgtattttagagctaaatttaaagaagcaacatttgggttttccatccacttgcattaaaaaatcagactctgtaggcatggtaatgattgtttcagttgtagcgtgataatcgtcatcttccaaagagccatcgctgctgtcatccctctggacatcatactgatcaatcagttcccggagtggaggagctttgggtaaaagttgtcttatagcatctttgctgatgttaggagctgtttccagacgaagtttactgaggatttgtattttaatggcttctattcttgaagatttagtgttttgtctccaagtacatgcattacacagcccctctttttccacattttctttttgctcactgttctcatttagatccactggaccagcaacaatcagcataaacaggtaaatataaacacagagttgcagtttttgcat

SEQ ID NO: 231 - DNA, 2059 bp, Homo sapiens
  source 1..2059: mol_type = genomic DNA
agacaagcacccagccagagtgccagtgagaagcacaggccaccactctgccctggtccacacaagctccggtagcccatggagccctggcctctcctcctgctctttagcctttgctcagctggcctcgtcctgggctccgaacatgagacccgtctggtggcaaagctatttaaagactacagcagcgtggtgcggccagtggaagaccaccgccaggtcgtggaggtcaccgtgggcctgcagctgatacagctcatcaatgtggatgaagtaaatcagatcgtgacaaccaatgtgcgtctgaaacagggtgacatggtagatctgccacgccccagctgcgtgactttgggagttcctttgttttctcatctgcagaatgagcaatgggtggattacaacctaaaatggaatccagatgactatggcggtgtgaaaaaaattcacattccttcagaaaagatctggcgcccagaccttgttctctataacaatgcagatggtgactttgctattgtcaagttcaccaaagtgctcctgcagtacactggccacatcacgtggacacctccagccatctttaaaagctactgtgagatcatcgtcacccactttccctttgatgaacagaactgcagcatgaagctgggcacctggacctacgacggctctgtcgtggccatcaacccggaaagcgaccagccagacctgagcaacttcatggagagcggggagtgggtgatcaaggagtcccggggctggaagcactccgtgacctattcctgctgccccgacaccccctacctggacatcacctaccacttcgtcatgcagcgcctgcccctctacttcatcgtcaacgtcatcatcccctgcctgctcttctccttcttaactggcctggtattctacctgcccacagactcaggggagaagatgactctgagcatctctgtcttactgtctttgactgtgttccttctggtcatcgtggagctgatcccctccacgtccagtgctgtgcccttgattggaaaatacatgctgttcaccatggtgttcgtcattgcctccatcatcatcactgtcatcgtcatcaacacacaccaccgctcacccagcacccatgtcatgcccaactgggtgcggaaggtttttatcgacactatcccaaatatcatgtttttctccacaatgaaaagaccatccagagaaaagcaagacaaaaagatttttacagaagacattgatatctctgacatttctggaaagccagggcctccacccatgggcttccactctcccctgatcaaacaccccgaggtgaaaagtgccatcgagggcatcaagtacatcgcagagaccatgaagtcagaccaggagtctaacaatgcggcggcagagtggaagtacgttgcaatggtgatggaccacatactcctcggagtcttcatgcttgtttgcatcatcggaaccctagccgtgtttgcaggtcgactcattgaattaaatcagcaaggatgagcagaaaatgagctgagcttagctctgccctggaacctaccagagcagagaagggcaggagaggaagatttgtctacttgctccactcgcacttatcaaacgtgttatattccatacttattattgatgataagatttacctttatgtaagtttatggccttgaagtgttttcatattgcttctccctttagttctgctgtctccctgaagagtgaaccctctttagtaaatgaaactaatcactaaaaaaagtgttcatttccagtgtctggaagagtttttgccaggataaccgaggttttctgttgcattgtcattgctgttatatttatatatttacttattttgtctaaccacgagaccactagggagttgctgatgttctaaatgaagtgtattctttgcttaagagtcagttttgtacctactaagaaaaccccatctaccagtcctaaagagataaggcatttgatttggagagagaggaagcagtagaaatgaaataaactaaaatgcaaactgcatcaaaaa

SEQ ID NO: 232 - DNA, 2059 bp, Homo sapiens
  source 1..2059: mol_type = genomic DNA
tttttgatgcagtttgcattttagtttatttcatttctactgcttcctctctctccaaatcaaatgccttatctctttaggactggtagatggggttttcttagtaggtacaaaactgactcttaagcaaagaatacacttcatttagaacatcagcaactccctagtggtctcgtggttagacaaaataagtaaatatataaatataacagcaatgacaatgcaacagaaaacctcggttatcctggcaaaaactcttccagacactggaaatgaacactttttttagtgattagtttcatttactaaagagggttcactcttcagggagacagcagaactaaagggagaagcaatatgaaaacacttcaaggccataaacttacataaaggtaaatcttatcatcaataataagtatggaatataacacgtttgataagtgcgagtggagcaagtagacaaatcttcctctcctgcccttctctgctctggtaggttccagggcagagctaagctcagctcattttctgctcatccttgctgatttaattcaatgagtcgacctgcaaacacggctagggttccgatgatgcaaacaagcatgaagactccgaggagtatgtggtccatcaccattgcaacgtacttccactctgccgccgcattgttagactcctggtctgacttcatggtctctgcgatgtacttgatgccctcgatggcacttttcacctcggggtgtttgatcaggggagagtggaagcccatgggtggaggccctggctttccagaaatgtcagagatatcaatgtcttctgtaaaaatctttttgtcttgcttttctctggatggtcttttcattgtggagaaaaacatgatatttgggatagtgtcgataaaaaccttccgcacccagttgggcatgacatgggtgctgggtgagcggtggtgtgtgttgatgacgatgacagtgatgatgatggaggcaatgacgaacaccatggtgaacagcatgtattttccaatcaagggcacagcactggacgtggaggggatcagctccacgatgaccagaaggaacacagtcaaagacagtaagacagagatgctcagagtcatcttctcccctgagtctgtgggcaggtagaataccaggccagttaagaaggagaagagcaggcaggggatgatgacgttgacgatgaagtagaggggcaggcgctgcatgacgaagtggtaggtgatgtccaggtagggggtgtcggggcagcaggaataggtcacggagtgcttccagccccgggactccttgatcacccactccccgctctccatgaagttgctcaggtctggctggtcgctttccgggttgatggccacgacagagccgtcgtaggtccaggtgcccagcttcatgctgcagttctgttcatcaaagggaaagtgggtgacgatgatctcacagtagcttttaaagatggctggaggtgtccacgtgatgtggccagtgtactgcaggagcactttggtgaacttgacaatagcaaagtcaccatctgcattgttatagagaacaaggtctgggcgccagatcttttctgaaggaatgtgaatttttttcacaccgccatagtcatctggattccattttaggttgtaatccacccattgctcattctgcagatgagaaaacaaaggaactcccaaagtcacgcagctggggcgtggcagatctaccatgtcaccctgtttcagacgcacattggttgtcacgatctgatttacttcatccacattgatgagctgtatcagctgcaggcccacggtgacctccacgacctggcggtggtcttccactggccgcaccacgctgctgtagtctttaaatagctttgccaccagacgggtctcatgttcggagcccaggacgaggccagctgagcaaaggctaaagagcaggaggagaggccagggctccatgggctaccggagcttgtgtggaccagggcagagtggtggcctgtgcttctcactggcactctggctgggtgcttgtct

SEQ ID NO: 233 - DNA, 4320 bp, Mus musculus
  source 1..4320: mol_type = genomic DNA
ggagtaggaccggcagcaagccgctggcggccacagcggcacccacagcccatggagctctcgactgttctcctgctgctaggcctctgctccgctggccttgttctgggctccgaacatgagacgcgtctggtggcaaagctctttgaagactacagcagtgtagtccggccagtggaggaccaccgtgagattgtacaagtcaccgtgggtctacagctgatccagcttatcaatgtggatgaagtaaatcagattgtgacaaccaatgtacgtctgaaacagcaatgggtcgattacaacttgaaatggaatccagatgactatggaggagtgaaaaaaattcacatcccctcggaaaagatctggcggccggacgtcgttctctataacaacgcagacggcgactttgccattgtcaaattcaccaaggtgctcctggactacaccggccacatcacctggacaccgccagccatctttaaaagctactgtgagatcattgtcactcactttcccttcgatgagcagaactgcagcatgaagctgggcacctggacctatgacggctctgtggtggccattaacccggaaagtgaccagcccgacctgagtaacttcatggagagcggggagtgggtgatcaaggaagctcggggctggaagcactgggtgttctactcctgctgccccaccactccctacctggacatcacctaccacttcgtcatgcagcgcctgcccctctacttcattgtcaacgtcatcattccctgcctgctcttctccttcttaaccagcctggtgttctacctgcccacagactcaggggagaagatgacgctgagcatctctgtcttactgtccctgaccgtgttccttctggtcattgtggagctaatcccttccacctccagcgctgtgcccctgatcgggaagtatatgttgttcaccatggtctttgtcattgcgtccatcatcatcaccgtcatcgtcatcaacacacaccaccgttcgcccagcacccacatcatgcccgagtgggtgcggaaggtttttatcgacactatcccaaacatcatgtttttctccacaatgaaaagaccatccagagataaacaagagaaaaggatttttacagaagacatagatatatctgacatctctgggaagccgggtcctccacctatgggctttcactctccgctgatcaagcaccctgaggtgaaaagcgccatcgagggcgtgaagtacattgcagagaccatgaagtcagaccaggagtccaataacgccgctgaggaatggaagtatgttgccatggtgatggatcacatcctcctcggagtctttatgctggtgtgtctcatcgggacgctggctgtgtttgcaggtcggctcattgagttacatcaacaaggatgagcagaggctgagctaagcctacctctgtcccagccatagccatcgctaggaaagatggaagagaggaaggtctgtctccttgaatcctttcacacttaccaaacatgcagtgttctacatgtcctacatgttaatgagagtgatctctgctcacacggctgtattcttgaagtgtctcccctttgcttctgcttttaacactatgggcctccttaaagggcgaaccctttgaagtaaataaaagtgagccctcaaaagaagtgtttgcttctaaatggcccctgggagagttttgcttggatactcaaggttttctgtttgtattgccatggctagttgtttttgttttctttcctttaataaatataattgtacttatatgagtgatccgcctacgtgtatgtctcacatacacgcctagtgtccatgaaggtcagaagaaggtatcccatctcctagaactggaactacaaatggttgtgagcgtccacatggaacctgggaatcaggccctctggaagagcacccagtgttcttaaccactgaaccacccacctatcgggctcagttaatttttatttttaaagtgctgagagtcccttacttaagacacacggtttcatacctactagaaaagtcgtgtctaccagattccccagatttgatgtggacacaaaggaagtggtagaaaggaaattaggtaactttaaacttaaaaaaaaattgtgtgtgtgtgtgtgtgtgtgtgtgtgtgtgtgtgtacatactcgcacacattgatgaaattgggggacaacttttaggagttagttctcatcttttatctcatttgaggcaaagtatcttgtgatttctgccgctgtgttacattctcatgtaaagcttcctggggcattttcctttctatacttctcggcccatgaacagagtgcagggattccagatgcatgccgccatctccagcttttcataggtcctaggatagaatttaggtcgttaggtttgtccagcaaaaaactacttttacctgcttaatccatttcactggcccaaaggtaattttagggcgatcacatacaaatagtatcaaaacctcatggtttaaagtagacttctgaaaccaggagagggagaatgctttcttaagtgatttctgtttgagaggccttcttgaaagggcgcttgggattccttgggattgtacctagagctttgcacacagagctataactgagcctcagctctcccaacttaacggagcccctggattttgttctcaggacccgaggaagggcagatcccatcctcatcaagggtgtgcctctgaccccatgagaatcgtctcgcccgcatgggtttattttatccaaattgttttacacagtctccataatgtccctaatttacaaatggaaaaaaaaatttttggggaaagttaaactctgctccatctagaagtagaagaactgagatctgaacccagacagaacttaagattctaaaacaggggctggagagatggctctatggttaagatcattcccagcaaccacagggtgcatggtggctcacaaccatctacagtgggatctgatgccctctgctggtgtgcaggtgtgcatatacaaagcactcacacataaatacataaacaaacaaacaaatattttttaaagatttatttatttattatatgtaaatacactgtagctgtcttcagacactccagaagagggcatcagatcttgttacagatggttgtgagccaccatgtggttgctgggatttgaactctggaccttcagaagaacagtcgggtgctcttacccactgagccatctcaccagccccaaatattttttttaaaagtcaaaaagaaaagggattctaaaccgacttgcagctgatggggtcacctgctccctgctctcccagcatgcctggcgtgatctaagtagttctggtctgtgttggtggggactctgtgatatcctatttcctgccttctcaattaaaacccctggcttttccttcagtccttggacgcaatcatgtttggagttcaggccctatgaatggaaccagaaacgtatgcacacaccatcaccatttctgaaatctgaaaaataaattctctgtgccaaactctaggctctagtacaatttacccagaccaagaagccgtgtggctctggacgcagaaaaggcctttgaatcacaaacacatctgatccgtcatctccagggagagctataaactgcataaccaggaggccagtgcgagcccaggtggcttcaatctcctgagggacttcccatcacccctgcaccagtgctgggctctttcatctcaaatagtttgcactttaaagtggaaacaattggcagtttctcagaaagtcacactcgggtcaccaagtcactcagcagtcccattcccaggtagagagccaaagaaatcgaaagaaagacttacacaatttgtatgagaacgcgcacagaaggcaagagccagagaaagcggtctaggctccaacccacagacgacaagcaaaagggatgtggagaatgggttttggggtgtatgtgtgtaggcctggggggccatcgcctttttgttttgttgttgtttttgagatagagtttctcactggcctggaacttgccaagtagtttaggctggctaggcaggccattccgagatctgcctgtctcctctttctgcaaacaatttagttggcatgggttctggggctcttactcagatctaaaaacaagcattttgtcagttgatctaattctttagctttttctactcacgaccactttttgcttgagaaatgttatgtagaaatataaaatatgtataaaaataaataacaaagaaatttaatt

SEQ ID NO: 234 - DNA, 4320 bp, Mus musculus
  source 1..4320: mol_type = genomic DNA
aattaaatttctttgttatttatttttatacatattttatatttctacataacatttctcaagcaaaaagtggtcgtgagtagaaaaagctaaagaattagatcaactgacaaaatgcttgtttttagatctgagtaagagccccagaacccatgccaactaaattgtttgcagaaagaggagacaggcagatctcggaatggcctgcctagccagcctaaactacttggcaagttccaggccagtgagaaactctatctcaaaaacaacaacaaaacaaaaaggcgatggccccccaggcctacacacatacaccccaaaacccattctccacatcccttttgcttgtcgtctgtgggttggagcctagaccgctttctctggctcttgccttctgtgcgcgttctcatacaaattgtgtaagtctttctttcgatttctttggctctctacctgggaatgggactgctgagtgacttggtgacccgagtgtgactttctgagaaactgccaattgtttccactttaaagtgcaaactatttgagatgaaagagcccagcactggtgcaggggtgatgggaagtccctcaggagattgaagccacctgggctcgcactggcctcctggttatgcagtttatagctctccctggagatgacggatcagatgtgtttgtgattcaaaggccttttctgcgtccagagccacacggcttcttggtctgggtaaattgtactagagcctagagtttggcacagagaatttatttttcagatttcagaaatggtgatggtgtgtgcatacgtttctggttccattcatagggcctgaactccaaacatgattgcgtccaaggactgaaggaaaagccaggggttttaattgagaaggcaggaaataggatatcacagagtccccaccaacacagaccagaactacttagatcacgccaggcatgctgggagagcagggagcaggtgaccccatcagctgcaagtcggtttagaatcccttttctttttgacttttaaaaaaaatatttggggctggtgagatggctcagtgggtaagagcacccgactgttcttctgaaggtccagagttcaaatcccagcaaccacatggtggctcacaaccatctgtaacaagatctgatgccctcttctggagtgtctgaagacagctacagtgtatttacatataataaataaataaatctttaaaaaatatttgtttgtttgtttatgtatttatgtgtgagtgctttgtatatgcacacctgcacaccagcagagggcatcagatcccactgtagatggttgtgagccaccatgcaccctgtggttgctgggaatgatcttaaccatagagccatctctccagcccctgttttagaatcttaagttctgtctgggttcagatctcagttcttctacttctagatggagcagagtttaactttccccaaaaatttttttttccatttgtaaattagggacattatggagactgtgtaaaacaatttggataaaataaacccatgcgggcgagacgattctcatggggtcagaggcacacccttgatgaggatgggatctgcccttcctcgggtcctgagaacaaaatccaggggctccgttaagttgggagagctgaggctcagttatagctctgtgtgcaaagctctaggtacaatcccaaggaatcccaagcgccctttcaagaaggcctctcaaacagaaatcacttaagaaagcattctccctctcctggtttcagaagtctactttaaaccatgaggttttgatactatttgtatgtgatcgccctaaaattacctttgggccagtgaaatggattaagcaggtaaaagtagttttttgctggacaaacctaacgacctaaattctatcctaggacctatgaaaagctggagatggcggcatgcatctggaatccctgcactctgttcatgggccgagaagtatagaaaggaaaatgccccaggaagctttacatgagaatgtaacacagcggcagaaatcacaagatactttgcctcaaatgagataaaagatgagaactaactcctaaaagttgtcccccaatttcatcaatgtgtgcgagtatgtacacacacacacacacacacacacacacacacacacaatttttttttaagtttaaagttacctaatttcctttctaccacttcctttgtgtccacatcaaatctggggaatctggtagacacgacttttctagtaggtatgaaaccgtgtgtcttaagtaagggactctcagcactttaaaaataaaaattaactgagcccgataggtgggtggttcagtggttaagaacactgggtgctcttccagagggcctgattcccaggttccatgtggacgctcacaaccatttgtagttccagttctaggagatgggataccttcttctgaccttcatggacactaggcgtgtatgtgagacatacacgtaggcggatcactcatataagtacaattatatttattaaaggaaagaaaacaaaaacaactagccatggcaatacaaacagaaaaccttgagtatccaagcaaaactctcccaggggccatttagaagcaaacacttcttttgagggctcacttttatttacttcaaagggttcgccctttaaggaggcccatagtgttaaaagcagaagcaaaggggagacacttcaagaatacagccgtgtgagcagagatcactctcattaacatgtaggacatgtagaacactgcatgtttggtaagtgtgaaaggattcaaggagacagaccttcctctcttccatctttcctagcgatggctatggctgggacagaggtaggcttagctcagcctctgctcatccttgttgatgtaactcaatgagccgacctgcaaacacagccagcgtcccgatgagacacaccagcataaagactccgaggaggatgtgatccatcaccatggcaacatacttccattcctcagcggcgttattggactcctggtctgacttcatggtctctgcaatgtacttcacgccctcgatggcgcttttcacctcagggtgcttgatcagcggagagtgaaagcccataggtggaggacccggcttcccagagatgtcagatatatctatgtcttctgtaaaaatccttttctcttgtttatctctggatggtcttttcattgtggagaaaaacatgatgtttgggatagtgtcgataaaaaccttccgcacccactcgggcatgatgtgggtgctgggcgaacggtggtgtgtgttgatgacgatgacggtgatgatgatggacgcaatgacaaagaccatggtgaacaacatatacttcccgatcaggggcacagcgctggaggtggaagggattagctccacaatgaccagaaggaacacggtcagggacagtaagacagagatgctcagcgtcatcttctcccctgagtctgtgggcaggtagaacaccaggctggttaagaaggagaagagcaggcagggaatgatgacgttgacaatgaagtagaggggcaggcgctgcatgacgaagtggtaggtgatgtccaggtagggagtggtggggcagcaggagtagaacacccagtgcttccagccccgagcttccttgatcacccactccccgctctccatgaagttactcaggtcgggctggtcactttccgggttaatggccaccacagagccgtcataggtccaggtgcccagcttcatgctgcagttctgctcatcgaagggaaagtgagtgacaatgatctcacagtagcttttaaagatggctggcggtgtccaggtgatgtggccggtgtagtccaggagcaccttggtgaatttgacaatggcaaagtcgccgtctgcgttgttatagagaacgacgtccggccgccagatcttttccgaggggatgtgaatttttttcactcctccatagtcatctggattccatttcaagttgtaatcgacccattgctgtttcagacgtacattggttgtcacaatctgatttacttcatccacattgataagctggatcagctgtagacccacggtgacttgtacaatctcacggtggtcctccactggccggactacactgctgtagtcttcaaagagctttgccaccagacgcgtctcatgttcggagcccagaacaaggccagcggagcagaggcctagcagcaggagaacagtcgagagctccatgggctgtgggtgccgctgtggccgccagcggcttgctgccggtcctactcc

SEQ ID NO: 235 - DNA, 1850 bp, Rattus norvegicus
  source 1..1850: mol_type = genomic DNA
tgcagccagagtgccagggagtgggacaggctgctggaggccacaccagcgtccacagcccatggagctcaccgctgtcctcctgctgctgggcctctgctccgctggcactgttctgggctccgaacatgagactcgtctggtggcaaagctctttaaagactacagcagtgtggtccggccagtaggggaccaccgtgagattgtacaggtcactgtgggactgcaactgatccagcttatcaacgtggatgaagtaaatcagattgtgacaaccaacgttcgtctgaaacagcaatgggttgattacaacttgaaatggaatccagatgactatggaggagtgaaaaaaattcacatcccctcggaaaagatctggcggccggacgttgttctctataacaatgcagatggagactttgccattgtcaaattcaccaaggtgctcctggactacaccggtcacatcacctggacccctccagccatctttaaaagctactgtgagatcattgtcacccactttcccttcgatgagcagaactgcagcatgaagctgggcacttggacctatgacggctctgtggtggccatcaatccggaaagtgaccagcccgacctgagtaacttcatggagagcggagagtgggtgatcaaggaagcccggggctggaagcactgggtgttttactcctgctgccccaacaccccttatctggacatcacctaccacttcgtcatgcagcgtctgcctctctacttcattgtcaacgtcatcattccctgcctgctcttctccttcttaaccagtctggtgttctacctgcccacagactcaggggagaagatgacgctgagcatctctgtcttactgtccctgactgtgttccttctcgtcattgtggagctgatcccttccacctctagcgctgtacccctgatcgggaagtacatgttgtttaccatggtctttgtcattgcgtccataataatcaccgtcattgtcatcaacacacaccaccgttcgcccagcacccacatcatgcccgagtgggtgcggaaggtttttatcgacactatcccaaacatcatgtttttctccacaatgaaaagaccatccagagataaacaagaaaaaaggattttcacagaagacatagatatctctgacatctctgggaagccggggcctccacctatgggctttcattctccactgatcaagcaccctgaggtgaaaagcgccattgagggtgtgaagtacattgcagagaccatgaagtcagaccaggagtctaacaatgcgtctgaggagtggaagtatgtcgccatggtgatggaccacatcctcctcggagtctttatgctggtgtgtctcatcgggacgctggctgtgtttgcaggtcggctcattgagctacatcaacaaggatgagcagaagctgaactaagcctccctctgccccagctgcagccaccaccaggaaagatagaagagaggaaggcctgtctacttgaatcctttcgcgcttaccaagcacacagtgtgctacatgtcctgttaatgatagtggtctctgctcacactgctatgtccttaaagtatctcccctttgcttctgcttttaacaccatgggtctccttaaagagggaaccctttgtagtaaataaaagtgagtcctcgggctggagagatggctcagcggttaagagcacccgactgctcttccagaggtcatgagttcaattcccagcaaccacatggtggctcacaaccatctataaagagatctgatgccctcttctggtgtatctgaagacagctacagtgtacttatatataataaaa

SEQ ID NO: 236 - DNA, 1850 bp, Rattus norvegicus
  source 1..1850: mol_type = genomic DNA
ttttattatatataagtacactgtagctgtcttcagatacaccagaagagggcatcagatctctttatagatggttgtgagccaccatgtggttgctgggaattgaactcatgacctctggaagagcagtcgggtgctcttaaccgctgagccatctctccagcccgaggactcacttttatttactacaaagggttccctctttaaggagacccatggtgttaaaagcagaagcaaaggggagatactttaaggacatagcagtgtgagcagagaccactatcattaacaggacatgtagcacactgtgtgcttggtaagcgcgaaaggattcaagtagacaggccttcctctcttctatctttcctggtggtggctgcagctggggcagagggaggcttagttcagcttctgctcatccttgttgatgtagctcaatgagccgacctgcaaacacagccagcgtcccgatgagacacaccagcataaagactccgaggaggatgtggtccatcaccatggcgacatacttccactcctcagacgcattgttagactcctggtctgacttcatggtctctgcaatgtacttcacaccctcaatggcgcttttcacctcagggtgcttgatcagtggagaatgaaagcccataggtggaggccccggcttcccagagatgtcagagatatctatgtcttctgtgaaaatccttttttcttgtttatctctggatggtcttttcattgtggagaaaaacatgatgtttgggatagtgtcgataaaaaccttccgcacccactcgggcatgatgtgggtgctgggcgaacggtggtgtgtgttgatgacaatgacggtgattattatggacgcaatgacaaagaccatggtaaacaacatgtacttcccgatcaggggtacagcgctagaggtggaagggatcagctccacaatgacgagaaggaacacagtcagggacagtaagacagagatgctcagcgtcatcttctcccctgagtctgtgggcaggtagaacaccagactggttaagaaggagaagagcaggcagggaatgatgacgttgacaatgaagtagagaggcagacgctgcatgacgaagtggtaggtgatgtccagataaggggtgttggggcagcaggagtaaaacacccagtgcttccagccccgggcttccttgatcacccactctccgctctccatgaagttactcaggtcgggctggtcactttccggattgatggccaccacagagccgtcataggtccaagtgcccagcttcatgctgcagttctgctcatcgaagggaaagtgggtgacaatgatctcacagtagcttttaaagatggctggaggggtccaggtgatgtgaccggtgtagtccaggagcaccttggtgaatttgacaatggcaaagtctccatctgcattgttatagagaacaacgtccggccgccagatcttttccgaggggatgtgaatttttttcactcctccatagtcatctggattccatttcaagttgtaatcaacccattgctgtttcagacgaacgttggttgtcacaatctgatttacttcatccacgttgataagctggatcagttgcagtcccacagtgacctgtacaatctcacggtggtcccctactggccggaccacactgctgtagtctttaaagagctttgccaccagacgagtctcatgttcggagcccagaacagtgccagcggagcagaggcccagcagcaggaggacagcggtgagctccatgggctgtggacgctggtgtggcctccagcagcctgtcccactccctggcactctggctgca

SEQ ID NO: 237 - DNA, 3037 bp, Macaca fascicularis
  source 1..3037: mol_type = genomic DNA
tttgttcgaatccactggaatgagaggatctgtcaggatgttgtcgtgggcttgaggtgagaggacctgtctcacctagttccatgtgggaaggaggcctggaaggacaggcaggatacttttaaataactgtctccttctgtgaacccacctcacgccctgcaaagaagcgcagctcgggtaacaatacttctcagactgagaaattactaactgctggttttcaggatgtttttcaagcaaaagaattgaaaagcggaaccactctgctctctgcttccctgagtgagagagtgggcagaggaacggatggaaggaggcagggacccggaacaactgctgatgcggtgggacactttttcccggtaattactcttcacttgaatcacagtgcacaggacgtgggcaatttgctccagctaatggttcgtgtgggataggtattgcctgatacagaggcaggggttggaacagccactctgggggccagtaaagtcagttttatggaagaagccgtctttgttaaaaaccaaacccaatcagcatgggggctctccagcagcggactcaacaccagctacactcttctgaaatccaggcagtcacaaaagccccccgcaccctcagcctaacactgaggcagaggaaatgaaactgaagccatgtttgcagaatgtggatttttgtggtttaggacaaacagctgactatctactcagaccaaatgtccctaatcaaatcaacccacagagacgaggttctggtttacacaaaagggaggcggtttgctcaccattcaaaataattccttcctttctatacattttttttttcattaagatctgactcctggtgcatttaaaatataacgcagttcatactcagcttgtcaagggtaagcaattgtgtaaagcgaggcacatttgtaatggtgtacagtgccagtaactccctgggctccagggctgagggcagcccagctgtcgctcccgcaaacaggtggtgtaaaacaatagctctagtgagccgacttgctttccaaaccctccagcagccaagcgcccagtcagagtgccagtgagaagtacaggccaccactctgccctggtccacaccagctccggtggcccatggagccctggcctctcctcctgctctttagcctttgctcagctggcctcgtcctgggctccgaacatgagacccgtctggtggcaaagctatttaaagactacagcagcgtggtgcggccagtggaagaccaccaccaggtcgtggaggtcaccgtgggcctgcagctgatacagctcatcaatgtggatgaagtaaatcagatcgtgacaaccaatgtgcgtctgaaacagcaatgggtggattacaacctaaaatggaatccagatgactatggcggtgtgaaaaaaattcacattccttcagaaaagatctggcgcccagactttgttctctataacaatgcagatggtgactttgctattgtcaagttcaccaaagtgctcctggaccacactggccacatcacatggacacctccagccatctttaaaagctactgtgagatcatcgtcacccacttcccctttgatgaacagaactgcagcatgaagctgggtacctggacctatgacggctctgtcgtggccatcaacccggaaagcgaccagccagacctgagcaacttcatggagagcggagagtgggtgatcaaggagtcccgaggctggaagcactgggtgttctattcctgctgccccaacaccccctacctggacatcacctaccacttcgtcatgcagcgcctgcccctctacttcatcgtcaatgtcatcatcccctgcctgctcttctccttcttaactggcctggtattctacctgcccacagactcaggggagaagatgactctgagcatctctgtcttactgtctttgactgtgttccttctggtcatcgtggagctgatcccctccacgtccagtgctgtacccttgattggaaaatacatgctgttcaccatggtgttcgtcattgcctccatcatcatcaccgtcatcgtcatcaacacacaccaccgctcacccagcacccatgtcatgcccgactgggtgcggaaggtttttatcgacactatcccaaatatcatgtttttctccacaatgaaaagaccatctagagaaaagcaagacaaaaagatttttacagaagacatcgatatctccgacatttctggaaagccagggcctccacccatgggcttccactctcccctgatcaaacaccccgaggtgaaaagtgccatcgagggcatcaagtacatcgcagagaccatgaagtcagaccaggagtctaacaatgcagcggaggagtggaagtacgttgcaatggtgatggaccacattctcctcggagtcttcatgctcgtctgcatcatcggaaccctagccgtgtttgcaggtcgactcattgaattaaatcagcaaggatgagcagaaagtgagctgagcctagctctgccccagaacctaccagagcaaagaagggcaggagaggaagatttgtctgcttgctacactcacacttatcaaacgtgtaatcttctgtacttactattgataagatttacctttatgtaagtttatagccttgaagtgttttcacattgcttctccctttagttctgctgtctccctgaagagtgaaccctctttagtaaatgaaactaatcactaaaaaagtgttcatttccagtgtctggaagagtttttcccaggataactgaggttttctgttgcattgtcattgctgttatatttatgtgtttacttattttgtctaaccacgagaccactagggagttgctgatgttctttttaaaatgtagtgtatcctttgcttaacagtcagttttgtacctactaataaaaccccatctaccagtcctaaagagataaggcatttgattcagagagagagggagcagtagaaatgaaataaactaaaatgcaaactgcatcaaaaa

SEQ ID NO: 238 - DNA, 3037 bp, Macaca fascicularis
  source 1..3037: mol_type = genomic DNA
tttttgatgcagtttgcattttagtttatttcatttctactgctccctctctctctgaatcaaatgccttatctctttaggactggtagatggggttttattagtaggtacaaaactgactgttaagcaaaggatacactacattttaaaaagaacatcagcaactccctagtggtctcgtggttagacaaaataagtaaacacataaatataacagcaatgacaatgcaacagaaaacctcagttatcctgggaaaaactcttccagacactggaaatgaacacttttttagtgattagtttcatttactaaagagggttcactcttcagggagacagcagaactaaagggagaagcaatgtgaaaacacttcaaggctataaacttacataaaggtaaatcttatcaatagtaagtacagaagattacacgtttgataagtgtgagtgtagcaagcagacaaatcttcctctcctgcccttctttgctctggtaggttctggggcagagctaggctcagctcactttctgctcatccttgctgatttaattcaatgagtcgacctgcaaacacggctagggttccgatgatgcagacgagcatgaagactccgaggagaatgtggtccatcaccattgcaacgtacttccactcctccgctgcattgttagactcctggtctgacttcatggtctctgcgatgtacttgatgccctcgatggcacttttcacctcggggtgtttgatcaggggagagtggaagcccatgggtggaggccctggctttccagaaatgtcggagatatcgatgtcttctgtaaaaatctttttgtcttgcttttctctagatggtcttttcattgtggagaaaaacatgatatttgggatagtgtcgataaaaaccttccgcacccagtcgggcatgacatgggtgctgggtgagcggtggtgtgtgttgatgacgatgacggtgatgatgatggaggcaatgacgaacaccatggtgaacagcatgtattttccaatcaagggtacagcactggacgtggaggggatcagctccacgatgaccagaaggaacacagtcaaagacagtaagacagagatgctcagagtcatcttctcccctgagtctgtgggcaggtagaataccaggccagttaagaaggagaagagcaggcaggggatgatgacattgacgatgaagtagaggggcaggcgctgcatgacgaagtggtaggtgatgtccaggtagggggtgttggggcagcaggaatagaacacccagtgcttccagcctcgggactccttgatcacccactctccgctctccatgaagttgctcaggtctggctggtcgctttccgggttgatggccacgacagagccgtcataggtccaggtacccagcttcatgctgcagttctgttcatcaaaggggaagtgggtgacgatgatctcacagtagcttttaaagatggctggaggtgtccatgtgatgtggccagtgtggtccaggagcactttggtgaacttgacaatagcaaagtcaccatctgcattgttatagagaacaaagtctgggcgccagatcttttctgaaggaatgtgaatttttttcacaccgccatagtcatctggattccattttaggttgtaatccacccattgctgtttcagacgcacattggttgtcacgatctgatttacttcatccacattgatgagctgtatcagctgcaggcccacggtgacctccacgacctggtggtggtcttccactggccgcaccacgctgctgtagtctttaaatagctttgccaccagacgggtctcatgttcggagcccaggacgaggccagctgagcaaaggctaaagagcaggaggagaggccagggctccatgggccaccggagctggtgtggaccagggcagagtggtggcctgtacttctcactggcactctgactgggcgcttggctgctggagggtttggaaagcaagtcggctcactagagctattgttttacaccacctgtttgcgggagcgacagctgggctgccctcagccctggagcccagggagttactggcactgtacaccattacaaatgtgcctcgctttacacaattgcttacccttgacaagctgagtatgaactgcgttatattttaaatgcaccaggagtcagatcttaatgaaaaaaaaaatgtatagaaaggaaggaattattttgaatggtgagcaaaccgcctcccttttgtgtaaaccagaacctcgtctctgtgggttgatttgattagggacatttggtctgagtagatagtcagctgtttgtcctaaaccacaaaaatccacattctgcaaacatggcttcagtttcatttcctctgcctcagtgttaggctgagggtgcggggggcttttgtgactgcctggatttcagaagagtgtagctggtgttgagtccgctgctggagagcccccatgctgattgggtttggtttttaacaaagacggcttcttccataaaactgactttactggcccccagagtggctgttccaacccctgcctctgtatcaggcaatacctatcccacacgaaccattagctggagcaaattgcccacgtcctgtgcactgtgattcaagtgaagagtaattaccgggaaaaagtgtcccaccgcatcagcagttgttccgggtccctgcctccttccatccgttcctctgcccactctctcactcagggaagcagagagcagagtggttccgcttttcaattcttttgcttgaaaaacatcctgaaaaccagcagttagtaatttctcagtctgagaagtattgttacccgagctgcgcttctttgcagggcgtgaggtgggttcacagaaggagacagttatttaaaagtatcctgcctgtccttccaggcctccttcccacatggaactaggtgagacaggtcctctcacctcaagcccacgacaacatcctgacagatcctctcattccagtggattcgaacaaa

SEQ ID NO: 239 - DNA, 1988 bp, Macaca mulatta
  source 1..1988: mol_type = genomic DNA
cagccaagcgcccagtcagagtgccagtgagaagtacaggccaccactctgccctggtccacaccagctccggtggcccatggagccctggcctctcctcctgctctttagcctttgctcagctggcctcgtcctgggctccgaacatgagacccgtctggtggcaaagctatttaaagactacagcagcgtggtgcggccagtggaagaccaccaccaggtcgtggaggtcaccgtgggcctgcagctgatacagctcatcaatgtggatgaagtaaatcagatcgtgacaaccaatgtgcgtctgaaacagcaatgggtagattgcaacctaaaatggaatccagatgactatggcggtgtgaaaaaaattcacattccttcagaaaagatctggcgcccagactttgttctctataacaatgcagatggtgactttgctattgtcaagttcaccaaagtgctcctggaccacactggccacatcacatggacacctccagccatctttaaaagctactgtgagatcatcgtcacccacttcccctttgatgaacagaactgcagcatgaagctgggtacctggacctatgacggctctgtcgtggccatcaacccggaaagcgaccagccagatctgagcaacttcatggagagcggagagtgggtgatcaaggagtcccgaggctggaagcactgggtgttctattcctgctgccccaacaccccctacctggacatcacctaccacttcgtcatgcagcgcctgcccctctacttcatcgtgaatgtcatcatcccctgcctgctcttctccttcttaactggcctggtattctacctgcccacagactcaggggagaagatgactctgagcatctctgtcttactgtctttgactgtgttccttctggtcatcgtggagctgatcccctccacgtccagtgctgtacccttgattggaaaatacatgctgttcaccatggtgttcgttattgcctccatcatcatcaccgtcatcgtcatcaacacacaccaccgctcacccagcacccatgtcatgcccgactgggtgcggaaggtttttatcgacactatcccaaatatcatgtttttctccacaatgaaaagaccatctagagaaaagcaagacaaaaagatttttacagaagacatcgatatctccgacatttctggaaagccagggcctccacccatgggcttccactctcccctgatcaaacaccccgaggtgaaaagtgccatcgagggcatcaagtacatcgcagagaccatgaagtcagaccaggagtctaacaatgcagcggaggagtggaagtacgttgcaatggtgatggaccacattctcctcggagtcttcatgctcgtctgcatcatcggaaccctagccgtgtttgcaggtcgactcattgaattaaatcagcaaggatgagcagaaagtgagctgagcctagctctgccccagaacctaccagagcaaagaagggcaggagaggaagatttgtctgcttgctacactcgcacttatcaaacgtgtaatcttctgtacttattattgataagatttacctttatgtaagtttataaccttgaagtgttttcacattgcttctccctttagttctgctgtctccctgaagagtgaaccctctttagtaaatgaaactaaccactaaaaaagtgttcatttccagtgtctggaagagtttttcccaggataactgaggttttctgttgcattgtcattgctgttatatttatgtgtttacttattttgtctaaccacgagaccactagggagttgctgatgttctttttaaaatgtagtgtatcctttgcttaacagtcagttttgtacctactaataaaaccccatctaccagtcctaaagagataaggcatttgattcagagagagagggagcagtagaaatgaaataaactaaaatgcaaactgcatcaaaaatc

SEQ ID NO: 240 - DNA, 1988 bp, Macaca mulatta
  source 1..1988: mol_type = genomic DNA
gatttttgatgcagtttgcattttagtttatttcatttctactgctccctctctctctgaatcaaatgccttatctctttaggactggtagatggggttttattagtaggtacaaaactgactgttaagcaaaggatacactacattttaaaaagaacatcagcaactccctagtggtctcgtggttagacaaaataagtaaacacataaatataacagcaatgacaatgcaacagaaaacctcagttatcctgggaaaaactcttccagacactggaaatgaacacttttttagtggttagtttcatttactaaagagggttcactcttcagggagacagcagaactaaagggagaagcaatgtgaaaacacttcaaggttataaacttacataaaggtaaatcttatcaataataagtacagaagattacacgtttgataagtgcgagtgtagcaagcagacaaatcttcctctcctgcccttctttgctctggtaggttctggggcagagctaggctcagctcactttctgctcatccttgctgatttaattcaatgagtcgacctgcaaacacggctagggttccgatgatgcagacgagcatgaagactccgaggagaatgtggtccatcaccattgcaacgtacttccactcctccgctgcattgttagactcctggtctgacttcatggtctctgcgatgtacttgatgccctcgatggcacttttcacctcggggtgtttgatcaggggagagtggaagcccatgggtggaggccctggctttccagaaatgtcggagatatcgatgtcttctgtaaaaatctttttgtcttgcttttctctagatggtcttttcattgtggagaaaaacatgatatttgggatagtgtcgataaaaaccttccgcacccagtcgggcatgacatgggtgctgggtgagcggtggtgtgtgttgatgacgatgacggtgatgatgatggaggcaataacgaacaccatggtgaacagcatgtattttccaatcaagggtacagcactggacgtggaggggatcagctccacgatgaccagaaggaacacagtcaaagacagtaagacagagatgctcagagtcatcttctcccctgagtctgtgggcaggtagaataccaggccagttaagaaggagaagagcaggcaggggatgatgacattcacgatgaagtagaggggcaggcgctgcatgacgaagtggtaggtgatgtccaggtagggggtgttggggcagcaggaatagaacacccagtgcttccagcctcgggactccttgatcacccactctccgctctccatgaagttgctcagatctggctggtcgctttccgggttgatggccacgacagagccgtcataggtccaggtacccagcttcatgctgcagttctgttcatcaaaggggaagtgggtgacgatgatctcacagtagcttttaaagatggctggaggtgtccatgtgatgtggccagtgtggtccaggagcactttggtgaacttgacaatagcaaagtcaccatctgcattgttatagagaacaaagtctgggcgccagatcttttctgaaggaatgtgaatttttttcacaccgccatagtcatctggattccattttaggttgcaatctacccattgctgtttcagacgcacattggttgtcacgatctgatttacttcatccacattgatgagctgtatcagctgcaggcccacggtgacctccacgacctggtggtggtcttccactggccgcaccacgctgctgtagtctttaaatagctttgccaccagacgggtctcatgttcggagcccaggacgaggccagctgagcaaaggctaaagagcaggaggagaggccagggctccatgggccaccggagctggtgtggaccagggcagagtggtggcctgtacttctcactggcactctgactgggcgcttggctg

SEQ ID NO: 241 - DNA, 2560 bp, Homo sapiens
  source 1..2560: mol_type = genomic DNA
gtcacttcccctgtgctggcggtcccagcggctctctgagcgaagtcactgagcgagccgccaggctatgaccccaggggctctgctgatgctgctgggggcgctgggggcgccgctcgccccaggcgtccgcggctcggaggcggagggtcgactccgggagaaacttttctctggctatgatagctccgtgcggccagcgcgggaggtgggagaccgtgtcagggtcagcgttggtctcatcctggcgcaactcatcagcctgaacgagaaggatgaagagatgagcacaaaggtgtacttagacctggagtggactgactacaggctgagctgggaccctgcggagcacgacggcatcgattcgctccgcatcacggcggaatccgtgtggctccctgacgtggtgctactgaacaacaatgatgggaattttgacgtggctctggacattagcgtcgtggtgtcctccgacggctccgtgcgttggcaacccccgggcatctatcgcagcagctgcagcatccaggtcacctacttccccttcgactggcagaattgcactatggtgttcagctcctacagctacgacagctcggaggtcagcctgcagacaggcctgggtcctgacgggcaagggcatcaggaaatccacattcatgaagggactttcattgagaatggccagtgggagattatccacaagccctctcggctaatccagcctccaggcgatcctaggggagggagggaaggacagcgccaggaagtcatcttctacctcatcatccgccgcaagcctctcttctacctggtcaacgtcattgccccatgcatcctcatcactcttctggccatcttcgtcttctacctgccaccagatgcaggagagaagatggggctctcaatctttgccctgctgacccttactgtgttcctgctgctgctggctgacaaagtacctgagacctcactatcagtacccattattatcaagtacctcatgtttaccatggtcctcgtcaccttctcagtcatccttagtgtcgtggttctcaacctgcaccaccgctcaccccacacccaccaaatgcccctttgggtccgtcagatcttcattcacaaacttccgctgtacctgcgtctaaaaaggcccaaacccgagagagacctgatgccggagccccctcactgttcttctccaggaagtggctggggtcggggaacagatgaatatttcatccggaagccgccaagtgattttctcttccccaaacccaataggttccagcctgaactgtctgcccctgatctgcggcgatttatcgatggtccaaaccgggctgtggccctgcttccggagctacgggaggtcgtctcctctatcagctacatcgctcgacagctgcaggaacaggaggaccacgatgcgctgaaggaggactggcagtttgtggccatggtagtggaccgcctcttcctgtggactttcatcatcttcaccagcgttgggaccctagtcatcttcctggacgccacgtaccacttgccccctccagacccctttccttgaagactggagggttgagacccaggccccctgccagttgaagtgagagtttggtgatactgtcaagccctatccttctctgcctcttaactccttcacgaggaatctgggcctcttatttcgtttctggggactgcattggactgagggctgggtaggcaggtgtcttggacccacctgaaatgcagtatcatctgatttactctttgggatcttgaagaagctcttttgggtatcaacacctaggtcgccagtgaaatagaacacagaacaggaactagattataagccttatgaggtcaagaaatgtgacttggccgggcgcggtggctcacgcctgtaatcccagcactttgggaggccaaggcgggcggatcacctgaggtcgggagtttgagaccagcccgaccaacatggagaaaccctgtctctactaaaaatacaaaattagccaggtgtggtggtacatgcctgtaatcccagctactagggaggctgaggcaggagaatcactcgaacccgggaggcagaggttgcagtgagtcaagatcacgccattgcactccagcctgggcaacaagagcgaaactccatctcaaaaaaaaaaaagtgtcttgttcactgcagcatgcccagtgccacgcacaggtgctgacctatagtaagtgcttaacatttgttgaataggggaaagaaatttccggaagtaaatacagcaattaataatgtttataagctgggcatggtcgctcaggccagtaatcccagtgacttaggaggctgaggtgggaggattacttgaaacccacagtttgagaccagcctgggcaacatagtgagaccctgtctctaaaaaaataaaaatagaaataaagtagtgcttattgtttgcatgttgggtcttgtggtcgttttctttttacctttctgtaatttattatgttttgtaatgtgtactatctctgggattaaaaaaagttatttctacaa

SEQ ID NO: 242 - DNA, 2560 bp, Homo sapiens
  source 1..2560: mol_type = genomic DNA
ttgtagaaataactttttttaatcccagagatagtacacattacaaaacataataaattacagaaaggtaaaaagaaaacgaccacaagacccaacatgcaaacaataagcactactttatttctatttttatttttttagagacagggtctcactatgttgcccaggctggtctcaaactgtgggtttcaagtaatcctcccacctcagcctcctaagtcactgggattactggcctgagcgaccatgcccagcttataaacattattaattgctgtatttacttccggaaatttctttcccctattcaacaaatgttaagcacttactataggtcagcacctgtgcgtggcactgggcatgctgcagtgaacaagacacttttttttttttgagatggagtttcgctcttgttgcccaggctggagtgcaatggcgtgatcttgactcactgcaacctctgcctcccgggttcgagtgattctcctgcctcagcctccctagtagctgggattacaggcatgtaccaccacacctggctaattttgtatttttagtagagacagggtttctccatgttggtcgggctggtctcaaactcccgacctcaggtgatccgcccgccttggcctcccaaagtgctgggattacaggcgtgagccaccgcgcccggccaagtcacatttcttgacctcataaggcttataatctagttcctgttctgtgttctatttcactggcgacctaggtgttgatacccaaaagagcttcttcaagatcccaaagagtaaatcagatgatactgcatttcaggtgggtccaagacacctgcctacccagccctcagtccaatgcagtccccagaaacgaaataagaggcccagattcctcgtgaaggagttaagaggcagagaaggatagggcttgacagtatcaccaaactctcacttcaactggcagggggcctgggtctcaaccctccagtcttcaaggaaaggggtctggagggggcaagtggtacgtggcgtccaggaagatgactagggtcccaacgctggtgaagatgatgaaagtccacaggaagaggcggtccactaccatggccacaaactgccagtcctccttcagcgcatcgtggtcctcctgttcctgcagctgtcgagcgatgtagctgatagaggagacgacctcccgtagctccggaagcagggccacagcccggtttggaccatcgataaatcgccgcagatcaggggcagacagttcaggctggaacctattgggtttggggaagagaaaatcacttggcggcttccggatgaaatattcatctgttccccgaccccagccacttcctggagaagaacagtgagggggctccggcatcaggtctctctcgggtttgggcctttttagacgcaggtacagcggaagtttgtgaatgaagatctgacggacccaaaggggcatttggtgggtgtggggtgagcggtggtgcaggttgagaaccacgacactaaggatgactgagaaggtgacgaggaccatggtaaacatgaggtacttgataataatgggtactgatagtgaggtctcaggtactttgtcagccagcagcagcaggaacacagtaagggtcagcagggcaaagattgagagccccatcttctctcctgcatctggtggcaggtagaagacgaagatggccagaagagtgatgaggatgcatggggcaatgacgttgaccaggtagaagagaggcttgcggcggatgatgaggtagaagatgacttcctggcgctgtccttccctccctcccctaggatcgcctggaggctggattagccgagagggcttgtggataatctcccactggccattctcaatgaaagtcccttcatgaatgtggatttcctgatgcccttgcccgtcaggacccaggcctgtctgcaggctgacctccgagctgtcgtagctgtaggagctgaacaccatagtgcaattctgccagtcgaaggggaagtaggtgacctggatgctgcagctgctgcgatagatgcccgggggttgccaacgcacggagccgtcggaggacaccacgacgctaatgtccagagccacgtcaaaattcccatcattgttgttcagtagcaccacgtcagggagccacacggattccgccgtgatgcggagcgaatcgatgccgtcgtgctccgcagggtcccagctcagcctgtagtcagtccactccaggtctaagtacacctttgtgctcatctcttcatccttctcgttcaggctgatgagttgcgccaggatgagaccaacgctgaccctgacacggtctcccacctcccgcgctggccgcacggagctatcatagccagagaaaagtttctcccggagtcgaccctccgcctccgagccgcggacgcctggggcgagcggcgcccccagcgcccccagcagcatcagcagagcccctggggtcatagcctggcggctcgctcagtgacttcgctcagagagccgctgggaccgccagcacaggggaagtgac

SEQ ID NO: 243 - DNA, 2151 bp, Mus musculus
  source 1..2151: mol_type = genomic DNA
ttcccctggcctgaggccgctatccggacaaacttcactgagcgaaagaggcagggccatggccttaggggcgctgcttctgcttctaggggtactcgggacgcccctcgccccaggcgcccgcgggtcggaagccgaaggccaactgattaagaaacttttctccaactatgatagctcggtgaggccggcgcgggaggtgggagaccgcgtcggggtcagcatcggcctcaccctggcgcaactcatcagcctgaacgagaaggatgaagaaatgagcacaaaggtgtacttagacctggagtggaccgactacaggttaagctgggaccccgcagaacatgatggcatcgattctctccgcatcactgctgaatccgtttggctccctgatgtggtgctgctgaacaacaatgacggaaatttcgacgttgccctggacatcaatgttgtggtatctttcgagggctctgtgcgctggcaaccccctggcctgtaccgcagcagctgcagcatccaggtcacctacttcccctttgactggcagaactgcaccatggtgtttagttcctacagctatgacagctctgaggtcagcctgaagacgggcctggatcctgaaggagaggagaggcaggaagtctacattcatgaagggaccttcattgagaatggccaatgggagattatccacaaaccttctaggttaatccaacttccaggggatcagagaggtgggaaggaagggcatcatgaggaagttatcttctatctcattattcggcggaagcctctcttctacctggtcaacgtcattgccccatgcatcctcatcacgctcctggccatctttgtcttctacctcccaccagatgcaggagagaagatggggctctccatctttgccctgctgacgctcactgtgttcttgctgctgttggccgacaaagtgcctgagacctccctggcggtgcccatcattatcaagtacctcatgtttaccatggtccttgtcaccttctccgttatccttagtgttgtggtcctcaacctgcatcatcgctcaccccacacccaccaaatgcccttttgggtccgccagatcttcattcacaagctccctccatacctgggtctgaagaggcccaaacccgagagagaccaactccctgaaccacatcactctctttctccaagaagtggctggggcagaggaactgatgaatatttcatccggaagcctccaagtgattttcttttccctaaacttaacaggtttcagcctgaatcatctgccccggacctgcgacgatttatcgatggtccaacccgggctgtaggtctgcctcaggagctacgagaggtcatttcctcaatcagctacatggcccgacagcttcaggaacaggaggaccacgacgcactgaaggaggactggcagtttgtggccatggttgtggaccgtctttttctgtggacattcatcgttttcacaagcgtcgggaccctagtcattttcctagatgccacgtaccatttgccccctcctgaacctttcccttgaggaccctccggtcatttttgccaaatgctgcaggtactctcaagctcaatagcgcttggcgcttgtaagaatcttgtttctgggaagacgttcaagtgagacttggaggctgagcatggtgccttggacccacccgaaatgtccttctacttattatttagagttttgttcttctgcggttttgtttttgttgtttttgagacagagtctcactctgtggcccaggctagcctggaactgtggcgtccaggctggtctcaaactcccaacaatgttacttccttagcctagcaattgttggaatcacagacctggtaaaccagcacacttggagtttgtttcttgaaactacatagaatgtcacagcttagatctctagtgaaatagaattataaccaagtagtagactgtaagccttttgaggacaggagatctgttggctactgaattatccccagcaatgtgtacaggtcctagcccataagtgcttaacatttgttgaagagagggaaaataaatctggaaggaaatataaatatcgcctacaattgcacgtattaaaattaaaatgtagaaaatgattaaaa

SEQ ID NO: 244 - DNA, 2151 bp, Mus musculus
  source 1..2151: mol_type = genomic DNA
ttttaatcattttctacattttaattttaatacgtgcaattgtaggcgatatttatatttccttccagatttattttccctctcttcaacaaatgttaagcacttatgggctaggacctgtacacattgctggggataattcagtagccaacagatctcctgtcctcaaaaggcttacagtctactacttggttataattctatttcactagagatctaagctgtgacattctatgtagtttcaagaaacaaactccaagtgtgctggtttaccaggtctgtgattccaacaattgctaggctaaggaagtaacattgttgggagtttgagaccagcctggacgccacagttccaggctagcctgggccacagagtgagactctgtctcaaaaacaacaaaaacaaaaccgcagaagaacaaaactctaaataataagtagaaggacatttcgggtgggtccaaggcaccatgctcagcctccaagtctcacttgaacgtcttcccagaaacaagattcttacaagcgccaagcgctattgagcttgagagtacctgcagcatttggcaaaaatgaccggagggtcctcaagggaaaggttcaggagggggcaaatggtacgtggcatctaggaaaatgactagggtcccgacgcttgtgaaaacgatgaatgtccacagaaaaagacggtccacaaccatggccacaaactgccagtcctccttcagtgcgtcgtggtcctcctgttcctgaagctgtcgggccatgtagctgattgaggaaatgacctctcgtagctcctgaggcagacctacagcccgggttggaccatcgataaatcgtcgcaggtccggggcagatgattcaggctgaaacctgttaagtttagggaaaagaaaatcacttggaggcttccggatgaaatattcatcagttcctctgccccagccacttcttggagaaagagagtgatgtggttcagggagttggtctctctcgggtttgggcctcttcagacccaggtatggagggagcttgtgaatgaagatctggcggacccaaaagggcatttggtgggtgtggggtgagcgatgatgcaggttgaggaccacaacactaaggataacggagaaggtgacaaggaccatggtaaacatgaggtacttgataatgatgggcaccgccagggaggtctcaggcactttgtcggccaacagcagcaagaacacagtgagcgtcagcagggcaaagatggagagccccatcttctctcctgcatctggtgggaggtagaagacaaagatggccaggagcgtgatgaggatgcatggggcaatgacgttgaccaggtagaagagaggcttccgccgaataatgagatagaagataacttcctcatgatgcccttccttcccacctctctgatcccctggaagttggattaacctagaaggtttgtggataatctcccattggccattctcaatgaaggtcccttcatgaatgtagacttcctgcctctcctctccttcaggatccaggcccgtcttcaggctgacctcagagctgtcatagctgtaggaactaaacaccatggtgcagttctgccagtcaaaggggaagtaggtgacctggatgctgcagctgctgcggtacaggccagggggttgccagcgcacagagccctcgaaagataccacaacattgatgtccagggcaacgtcgaaatttccgtcattgttgttcagcagcaccacatcagggagccaaacggattcagcagtgatgcggagagaatcgatgccatcatgttctgcggggtcccagcttaacctgtagtcggtccactccaggtctaagtacacctttgtgctcatttcttcatccttctcgttcaggctgatgagttgcgccagggtgaggccgatgctgaccccgacgcggtctcccacctcccgcgccggcctcaccgagctatcatagttggagaaaagtttcttaatcagttggccttcggcttccgacccgcgggcgcctggggcgaggggcgtcccgagtacccctagaagcagaagcagcgcccctaaggccatggccctgcctctttcgctcagtgaagtttgtccggatagcggcctcaggccaggggaa

SEQ ID NO: 245 - DNA, 2299 bp, Rattus norvegicus
  source 1..2299: mol_type = genomic DNA
cgtcacttcccctggcctggcggcctcggccgctcttcggacaaacccactgagcgaaatcggcagggccatggccttaggggcgctgcttctgattctggggatactcgggacgcccctcgccccaggagcccgcgggtcggaagccgaaggccaactgcttaagaaacttttctcggattatgatagctcagtaaggccggcgcaggaggtgggagaccgcgtcggggtcagcatcggcctcaccctggcgcaactcatcagcctggtgagagagaacgagaaggatgaagaaatgagcacaaaggtgtacttagacctggagtggaccgactacaggttaagctgggaccccgcagaacacgatggcatcgagtctctccgtgtcactgctgaatctgtttggctcccggacgtggtgctgctgaacaacaatgatggaaactttgacgttgccctggacattaatgtcgtggtgtcctttgagggctctgtgcgctggcaaccccctggcctgtatcgcagcagctgcagcatccaggtcacctacttcccctttgactggcagaattgcaccatggtgtttagttcctacagctatgacagctctgaggtcagcctgaagacaggcccagatcctgatggacaggagaggcaggaaatctacatccatgaagggaccttcatcgagaatggtcaatgggagattatccacaaaccctctaggttaatccaccttccaggggatcgaagaggagggaaggaaggacatcgtgaggaagttatcttctatctcattattcggaggaagcctctcttctacctggtcaatgtcattgccccgtgcatcctcatcaccctcctggccatctttgttttctaccttccaccagatgcaggagagaagatggggctctccatctttgccctgctgaccctcactgtgttcttgctgctgctggccgacaaagtgcctgagacctccctggcggtccccatcatcatcaagtatctcatgtttaccatgatccttgtcaccttctcagttatccttagcgttgtggtcctcaacttgcaccatcgctcaccccacacccaccaaatgcccttttgggtccgccagatcttcattcacaagctccctccatacctgggtctgaagaggcccaaacccgagagagaccaactacccgaaccacatcactccttctccccaaggagtggctggggccgaggaactgatgaatatttcatacggaagcctccatgtgattttcttttccctaaacttaacaggtttcagcctgaatcacctgctccggacctgagacgatttatcgatggtccaccccgggctgtaggtctgcctcaggagctacgcgaggtcatttcttccatcagctacatggcccgacaacttcaggaacaggaggaccacgatgcactgaaggaggactggcagtttgtcgccatggttgtggaccgtctttttctgtggacattcatcgttttcacaagcgtcgggacgctagtcattttcctagatgccacgtaccatttgccccctcctgaaccttttccttgaggaccctccggtcatttttgccaagtgctgcaggtactctcacgctgtatagcgcttggctcctgtaagaatcttgttcttgtttctgggaagacgttgaagtgggacttggggggtgagcagggtgccttggacttcaacaaatgtccttcaacccattagttttgttcttctgcagctttgtttttgttggttttttttttgttgttgttgtttttgccccccccccccccccgggctggggagcgaacccaggatcttgcgcttcctaggtagaagcgctctaccactgagccaaatccccaaccccgtttttgttgtttttgagacagagtctcactctgtgtcccaggctagcctggaactatgaagtccaggctggcctcaaactcccagcagtgttacttccttagcttaccaaatgttggaatggcaggtctggtaagccagcgcacttggattttgtttcttgaaactacacagaatgtcacaacttagatatctagtgaaagagaattataagcaactagtagcttgaaagcctttggaggacaggaaatctgttggctactgtaacgtccccagcaatgcgcacaggtcctaccccataagtgcttaacatttgttgaagagggaaaaaaatccggaaggaaatacaaaataatactgcctacaattgcatgtattgaaattaaaatgtagagaaatgattga

SEQ ID NO: 246 - DNA, 2299 bp, Rattus norvegicus
  source 1..2299: mol_type = genomic DNA
tcaatcatttctctacattttaatttcaatacatgcaattgtaggcagtattattttgtatttccttccggatttttttccctcttcaacaaatgttaagcacttatggggtaggacctgtgcgcattgctggggacgttacagtagccaacagatttcctgtcctccaaaggctttcaagctactagttgcttataattctctttcactagatatctaagttgtgacattctgtgtagtttcaagaaacaaaatccaagtgcgctggcttaccagacctgccattccaacatttggtaagctaaggaagtaacactgctgggagtttgaggccagcctggacttcatagttccaggctagcctgggacacagagtgagactctgtctcaaaaacaacaaaaacggggttggggatttggctcagtggtagagcgcttctacctaggaagcgcaagatcctgggttcgctccccagcccggggggggggggggggcaaaaacaacaacaacaaaaaaaaaaccaacaaaaacaaagctgcagaagaacaaaactaatgggttgaaggacatttgttgaagtccaaggcaccctgctcaccccccaagtcccacttcaacgtcttcccagaaacaagaacaagattcttacaggagccaagcgctatacagcgtgagagtacctgcagcacttggcaaaaatgaccggagggtcctcaaggaaaaggttcaggagggggcaaatggtacgtggcatctaggaaaatgactagcgtcccgacgcttgtgaaaacgatgaatgtccacagaaaaagacggtccacaaccatggcgacaaactgccagtcctccttcagtgcatcgtggtcctcctgttcctgaagttgtcgggccatgtagctgatggaagaaatgacctcgcgtagctcctgaggcagacctacagcccggggtggaccatcgataaatcgtctcaggtccggagcaggtgattcaggctgaaacctgttaagtttagggaaaagaaaatcacatggaggcttccgtatgaaatattcatcagttcctcggccccagccactccttggggagaaggagtgatgtggttcgggtagttggtctctctcgggtttgggcctcttcagacccaggtatggagggagcttgtgaatgaagatctggcggacccaaaagggcatttggtgggtgtggggtgagcgatggtgcaagttgaggaccacaacgctaaggataactgagaaggtgacaaggatcatggtaaacatgagatacttgatgatgatggggaccgccagggaggtctcaggcactttgtcggccagcagcagcaagaacacagtgagggtcagcagggcaaagatggagagccccatcttctctcctgcatctggtggaaggtagaaaacaaagatggccaggagggtgatgaggatgcacggggcaatgacattgaccaggtagaagagaggcttcctccgaataatgagatagaagataacttcctcacgatgtccttccttccctcctcttcgatcccctggaaggtggattaacctagagggtttgtggataatctcccattgaccattctcgatgaaggtcccttcatggatgtagatttcctgcctctcctgtccatcaggatctgggcctgtcttcaggctgacctcagagctgtcatagctgtaggaactaaacaccatggtgcaattctgccagtcaaaggggaagtaggtgacctggatgctgcagctgctgcgatacaggccagggggttgccagcgcacagagccctcaaaggacaccacgacattaatgtccagggcaacgtcaaagtttccatcattgttgttcagcagcaccacgtccgggagccaaacagattcagcagtgacacggagagactcgatgccatcgtgttctgcggggtcccagcttaacctgtagtcggtccactccaggtctaagtacacctttgtgctcatttcttcatccttctcgttctctctcaccaggctgatgagttgcgccagggtgaggccgatgctgaccccgacgcggtctcccacctcctgcgccggccttactgagctatcataatccgagaaaagtttcttaagcagttggccttcggcttccgacccgcgggctcctggggcgaggggcgtcccgagtatccccagaatcagaagcagcgcccctaaggccatggccctgccgatttcgctcagtgggtttgtccgaagagcggccgaggccgccaggccaggggaagtgacg

SEQ ID NO: 247 - DNA, 2175 bp, Macaca fascicularis
  source 1..2175: mol_type = genomic DNA
gtcacttcccctgtgctggcggtcccagtggctctcggagcgaagtcactgagcgagccgccaggctatgaccccaggggctctgctgatgctgctgggggcgctgggagcgccgctcgccccaggcgtccgcggctcggaggcagagggccgactccgggagaaacttttctctggctatgatagctccgtgcggccagcgcgggaggtgggagaccgtgtcagggtcagcgttggtctcatcctggcacaactcatcagcctgaacgagaaggatgaagagatgagcacaaaagtgtacttagacctggagtggactgactacaggctgagctgggaccctgcggagcacgacggcatcgatttgctccgcatcacggcggaatccgtgtggctccctgacgtggtgctactgaacaaatcccttctctgcagcaatgatgggaattttgacgtggctctggacattaacgtcgtggcgtcctccgacggctccgtgcgttggcaacccccgggcatctatcgcagcagctgcagcatccaggtcacctacttccccttcgactggcagaactgtactatggtgttcagttcctacagctacgacagctccgaggtcagcctgcagacaggcctgggtcctgacgggcaagagcagcaggaaatccacattcatgaagggactttcattgagaatggccagtgggagattatccacaagccctctcggctaatccagcctccaggtgatcctagggaagggagggaaggacagcgccaggaagtcgtcttctacctcatcatccgccggaagcctctcttctacctggtcaacgtcatcgccccatgcatcctcatcactcttctggccatcttcgtcttctacctgccaccagatgcaggagagaagatggggctctcaatctttgccctgctgacccttactgtgttcctgctgctactggccgacaaagtacctgagacctccctatcggtacccattattatcaagtacctcatgtttaccatggtcctcgtcaccttctcagtcatccttagtgtcgtggttctcaacctgcaccaccgctcaccccacacccaccaaatgcccctttgggtccgtcagatcttcattcacaaactgccgccgtacctgggtttaaaaaggcccaagcccgagagagaactgatgccggagccccctcactgttcttctccaggaagtggctggggtcggggaacagatgaatatttcatccggaagccgccaagtgattttctcttccccaaacccaacaggttccagcctgaactgtctgcccctgatctgcggcgatttatcgatggtccaaaccgggctgtggccctgcctccggagttacgggaggtcgtctcctctatcagctacatcgctcgacagctgcaggaacaggaggaccacgatgcgctgaaggaggactggcagtttgtggccatggtagtggaccgcctcttcctgtggactttcatcatcttcaccagcgttggaaccctagtcattttcctggacgccacgtaccacttgccccctccagacccctttccttgaagactggagggtcgagacccaggccctctaccagttgaagtgagagtttggtgatactgtcaagccatatccttctctgcctcttaactccttcactaggaatccgggcctcttatttcgtttctggggactgcattggactgagggctgggtaggcaggtgtcttggacccacctgaaatgcactatcatctgatttcctctttgggatcttgaagaagctcttttgggtatcaacacctaggttgccagtgaaatagaacaaagaacaggaactagattgtaagccttatgaggtcaagaaatgtgtcttgttcactgtaacatccccagtgccatgcacaggtcctgacctatagtaagtgcttaacatttgttgaataggggaaataaatttctggaagtaaatacagcaattaataatgtttataagctgggcatggtcgctcaggccagtaatcccagtgacttgggaggctgaggtgggaggattacttgaaccccacagtttgagaccagcctgggcaacatagtgagactctgtctctaaaaaaataaaaatagaaataaagtagcttattgtttgca

SEQ ID NO: 248 - DNA, 2175 bp, Macaca fascicularis
  source 1..2175: mol_type = genomic DNA
tgcaaacaataagctactttatttctatttttatttttttagagacagagtctcactatgttgcccaggctggtctcaaactgtggggttcaagtaatcctcccacctcagcctcccaagtcactgggattactggcctgagcgaccatgcccagcttataaacattattaattgctgtatttacttccagaaatttatttcccctattcaacaaatgttaagcacttactataggtcaggacctgtgcatggcactggggatgttacagtgaacaagacacatttcttgacctcataaggcttacaatctagttcctgttctttgttctatttcactggcaacctaggtgttgatacccaaaagagcttcttcaagatcccaaagaggaaatcagatgatagtgcatttcaggtgggtccaagacacctgcctacccagccctcagtccaatgcagtccccagaaacgaaataagaggcccggattcctagtgaaggagttaagaggcagagaaggatatggcttgacagtatcaccaaactctcacttcaactggtagagggcctgggtctcgaccctccagtcttcaaggaaaggggtctggagggggcaagtggtacgtggcgtccaggaaaatgactagggttccaacgctggtgaagatgatgaaagtccacaggaagaggcggtccactaccatggccacaaactgccagtcctccttcagcgcatcgtggtcctcctgttcctgcagctgtcgagcgatgtagctgatagaggagacgacctcccgtaactccggaggcagggccacagcccggtttggaccatcgataaatcgccgcagatcaggggcagacagttcaggctggaacctgttgggtttggggaagagaaaatcacttggcggcttccggatgaaatattcatctgttccccgaccccagccacttcctggagaagaacagtgagggggctccggcatcagttctctctcgggcttgggcctttttaaacccaggtacggcggcagtttgtgaatgaagatctgacggacccaaaggggcatttggtgggtgtggggtgagcggtggtgcaggttgagaaccacgacactaaggatgactgagaaggtgacgaggaccatggtaaacatgaggtacttgataataatgggtaccgatagggaggtctcaggtactttgtcggccagtagcagcaggaacacagtaagggtcagcagggcaaagattgagagccccatcttctctcctgcatctggtggcaggtagaagacgaagatggccagaagagtgatgaggatgcatggggcgatgacgttgaccaggtagaagagaggcttccggcggatgatgaggtagaagacgacttcctggcgctgtccttccctcccttccctaggatcacctggaggctggattagccgagagggcttgtggataatctcccactggccattctcaatgaaagtcccttcatgaatgtggatttcctgctgctcttgcccgtcaggacccaggcctgtctgcaggctgacctcggagctgtcgtagctgtaggaactgaacaccatagtacagttctgccagtcgaaggggaagtaggtgacctggatgctgcagctgctgcgatagatgcccgggggttgccaacgcacggagccgtcggaggacgccacgacgttaatgtccagagccacgtcaaaattcccatcattgctgcagagaagggatttgttcagtagcaccacgtcagggagccacacggattccgccgtgatgcggagcaaatcgatgccgtcgtgctccgcagggtcccagctcagcctgtagtcagtccactccaggtctaagtacacttttgtgctcatctcttcatccttctcgttcaggctgatgagttgtgccaggatgagaccaacgctgaccctgacacggtctcccacctcccgcgctggccgcacggagctatcatagccagagaaaagtttctcccggagtcggccctctgcctccgagccgcggacgcctggggcgagcggcgctcccagcgcccccagcagcatcagcagagcccctggggtcatagcctggcggctcgctcagtgacttcgctccgagagccactgggaccgccagcacaggggaagtgac

SEQ ID NO: 249 - DNA, 2160 bp, Macaca mulatta
  source 1..2160: mol_type = genomic DNA
ttcccctgtgctggcggtcccagtggctctcggagcgaagtcactgagcgagccgccaggctatgaccccaggggctctgctgatgctgctgggggcgctgggagcgccgctcaccccaggcgtccgcggctcggaggcagagggccgactccgggagaaacttttctctggctatgatagctccgtgcggccagcgcgggaggtgggagaccgtgtcagggtcagcgttggtctcatcctggcacaactcatcagcctgaacgagaaggatgaagagatgagcacaaaagtgtacttagacctggagtggactgactacaggctgagctgggaccctgcgcagcacgacggcatcgatttgctccgcatcacggcggaatccgtgtggctccctgacgtggtgctactgaacaacaatgatgggaattttgacgtggctctggacattaacgtcgtggcgtcctccgacggctccgtgcgttggcaacccccgggcatctatcgcagcagctgcagcatccaggtcacctacttccccttcgactggcagaactgtactatggtgttcagttcctacacctacgacagctcggaggtcagcctgcagacaggcctgggtcctgacgggcaagagcagcaggaaatccacattcatgaagggactttcattgagaatggccagtgggagattatccacaagccctctcggctaatccagcctccaggtgatcctagggaagggagggaaggacagcgccaggaagtcgtcttctacctcatcatccgccggaagcctctcttctacctggtcaacgtcatcgccccatgcatcctcatcactcttctggccatcttcgtcttctacctgccaccagatgcaggagagaagatggggctctcaatctttgccctgctgacccttactgtgttcctgctgctactggccgacaaagtacctgagacctccctatcggtacccattattatcaagtacctcatgtttaccatggtcctcgtcaccttctcagtcatccttagtgtcgtggttctcaacctgcaccaccgctcaccccacacccaccaaatgcccctttgggtccgtcagatcttcattcacaaactgccgccgtacctgggtttaaaaaggcccaagcccgagagagaactgatgccggagccccctcactgttcttctccaggaagtggctggggtcggggaacagatgaatatttcatccggaagccgccaagtgattttctcttccccaaacccaacaggttccagcctgaactgtctgcccctgatctgcggcgatttatcgatggtccaaaccgggctgtggccctgcctccggagttacgggaggtcgtctcctctatcagctacatcgctcgacagctgcaggaacaggaggaccacgatgcgctgaaggaggactggcagtttgtggccatggtagtggaccgcctcttcctgtggactttcatcatcttcaccagcgttggaaccctagtcattttcctggacgccacgtaccacttgccccctccagacccctttccttgaagactggaaggtcgagacccaggccctctaccagttgaagtgagagtttggtgatactgtcaagccatatccttctctgcctcttaactccttcactaggaatccgggcctcttatttcgtttctggggactgcattggactgagggctgggtaggcaggtgtcttggacccacctgaaatgcactatcatctgatttcctctttgggatcttgaagaagctcttttgggtatcaacacctaggttgccagtgaaatagaacaaagaacaggaactagattgtaagccttatgaggtcaagaaatgtgtcttgttcactgtaacatccccagtgccatgcacaggtcctgacctatagtaagtgcttaacatttgttgaataggggaaataaatttctggaagtaaatacagcaattaataatgtttataagctgggcatggtcgctcaggccagtaatcccagtgacttggggggctgaggtgggaggattacttgaaccccacagtttgagaccagcctgggcaacatagtgagactctgtctctaaaaaaataaaaatagaaataaagtagcttattgtttgcatgtca

SEQ ID NO: 250 - DNA, 2160 bp, Macaca mulatta
  source 1..2160: mol_type = genomic DNA
tgacatgcaaacaataagctactttatttctatttttatttttttagagacagagtctcactatgttgcccaggctggtctcaaactgtggggttcaagtaatcctcccacctcagccccccaagtcactgggattactggcctgagcgaccatgcccagcttataaacattattaattgctgtatttacttccagaaatttatttcccctattcaacaaatgttaagcacttactataggtcaggacctgtgcatggcactggggatgttacagtgaacaagacacatttcttgacctcataaggcttacaatctagttcctgttctttgttctatttcactggcaacctaggtgttgatacccaaaagagcttcttcaagatcccaaagaggaaatcagatgatagtgcatttcaggtgggtccaagacacctgcctacccagccctcagtccaatgcagtccccagaaacgaaataagaggcccggattcctagtgaaggagttaagaggcagagaaggatatggcttgacagtatcaccaaactctcacttcaactggtagagggcctgggtctcgaccttccagtcttcaaggaaaggggtctggagggggcaagtggtacgtggcgtccaggaaaatgactagggttccaacgctggtgaagatgatgaaagtccacaggaagaggcggtccactaccatggccacaaactgccagtcctccttcagcgcatcgtggtcctcctgttcctgcagctgtcgagcgatgtagctgatagaggagacgacctcccgtaactccggaggcagggccacagcccggtttggaccatcgataaatcgccgcagatcaggggcagacagttcaggctggaacctgttgggtttggggaagagaaaatcacttggcggcttccggatgaaatattcatctgttccccgaccccagccacttcctggagaagaacagtgagggggctccggcatcagttctctctcgggcttgggcctttttaaacccaggtacggcggcagtttgtgaatgaagatctgacggacccaaaggggcatttggtgggtgtggggtgagcggtggtgcaggttgagaaccacgacactaaggatgactgagaaggtgacgaggaccatggtaaacatgaggtacttgataataatgggtaccgatagggaggtctcaggtactttgtcggccagtagcagcaggaacacagtaagggtcagcagggcaaagattgagagccccatcttctctcctgcatctggtggcaggtagaagacgaagatggccagaagagtgatgaggatgcatggggcgatgacgttgaccaggtagaagagaggcttccggcggatgatgaggtagaagacgacttcctggcgctgtccttccctcccttccctaggatcacctggaggctggattagccgagagggcttgtggataatctcccactggccattctcaatgaaagtcccttcatgaatgtggatttcctgctgctcttgcccgtcaggacccaggcctgtctgcaggctgacctccgagctgtcgtaggtgtaggaactgaacaccatagtacagttctgccagtcgaaggggaagtaggtgacctggatgctgcagctgctgcgatagatgcccgggggttgccaacgcacggagccgtcggaggacgccacgacgttaatgtccagagccacgtcaaaattcccatcattgttgttcagtagcaccacgtcagggagccacacggattccgccgtgatgcggagcaaatcgatgccgtcgtgctgcgcagggtcccagctcagcctgtagtcagtccactccaggtctaagtacacttttgtgctcatctcttcatccttctcgttcaggctgatgagttgtgccaggatgagaccaacgctgaccctgacacggtctcccacctcccgcgctggccgcacggagctatcatagccagagaaaagtttctcccggagtcggccctctgcctccgagccgcggacgcctggggtgagcggcgctcccagcgcccccagcagcatcagcagagcccctggggtcatagcctggcggctcgctcagtgacttcgctccgagagccactgggaccgccagcacaggggaa

SEQ ID NO: 251 - DNA, 2962 bp, Homo sapiens
  source 1..2962: mol_type = genomic DNA
attccacagccctgtagacaggaggggcagatgcacgtcccagtcagagggatgggatggaggggccagtgctgacactggggctgctggctgccctggcggtgtgtggcagctgggggctgaacgaggaggagcggctgatccggcacctgtttcaagagaagggctacaacaaggagctccggcccgtggcacacaaagaggagagtgtggacgttgccctggccctcacactctccaacctcatctccctgaaagaagttgaggagaccctcactaccaatgtgtggatagagcacggctggacagacaaccggctgaagtggaatgctgaagaatttggaaacatcagtgtcctgcgcctccccccggacatggtgtggctcccagagattgtgctggagaacaacaatgacggctccttccagatctcctactcctgcaacgtgcttgtctaccactacggcttcgtgtactggctgccacctgccatcttccgctcctcctgccccatctctgtcacctatttccccttcgactggcagaactgctccctcaagttcagttccctcaagtatacggccaaagagatcaccctgagcctgaaacaggatgccaaggagaaccgcacctaccccgtggagtggatcatcattgatcctgaaggcttcacagagaacggggagtgggagatagtccaccggccggccagggtcaacgtggaccccagagcccctctggacagccccagccgccaggacatcaccttctacctcatcatccgccgcaagcccctcttctacatcatcaacatcctggtgccctgcgtgctcatctccttcatggtcaacctggtcttctacctaccggctgacagtggtgagaagacatcagtggccatctcggtgctcctggctcagtctgtcttcctgctgctcatctccaagcgtctgcctgccacatccatggccatcccccttatcggcaagttcctgctcttcggcatggtgctggtcaccatggttgtggtgatctgtgtcatcgtgctcaacatccacttccgaacacccagcacccatgtgctgtctgagggggtcaagaagctcttcctggagaccctgccggagctcctgcacatgtcccgcccagcagaggatggacccagccctggggccctggtgcggaggagcagctccctgggatacatctccaaggccgaggagtacttcctgctcaagtcccgcagtgacctcatgttcgagaagcagtcagagcggcatgggctggccaggcgcctcaccactgcacgccggcccccagcaagctctgagcaggcccagcaggaactcttcaatgagctgaagccagctgtggatggggcaaacttcattgttaaccacatgagggaccagaacaattacaatgaggagaaagacagctggaaccgagtggcccgcacagtggaccgcctctgcctgtttgtggtgacgcctgtcatggtggtgggcacagcctggatcttcctgcagggcgtttacaaccagccaccaccccagccttttcctggggacccctactcctacaacgtgcaggacaagcgcttcatctagggtgggcctgttggggagccaggagacagcagggtctgagagaggagccacagtccctaatgacacccactcctagccctgaggctcgtgcccctcagactggggaagagtccaaggaagggagggagcagccactcctcaatgctcaatggctcccctgaaatcaagacaggggccacccgagatggtctgagggtggacatcggctacagtgggtgggcaggacgatttggggggaggcccgaggctggctcaggggccagggaggaggccactcagggtggcctcagggggagagctctgataggggtgagacagatagggccccttctctgcttctcctcccccaaggtgtggggtagagcaggcaggaatctgcgccttcactctctggcccctccagcctccctcttcctacctacccttcaacctcaggcttctgaggcctcacctgggactgaggttgaggacacctccctccctccagaccccagagtatcctttcctagctctttctgccttgacctctctgcctaggtccctttgggaagttgaggactggagtggaaaggtcaggatcgacatccacaaagacttggggtcagcctgaggttgcacacacaatcctagaggaccagaacgcagcacctctccccaaagggtccctgccccccagcacctactcctctccaaattagggttgtcatgcattatttggggcatacatattctaaaaaatcattcgttgtttctctgaaatttgtcccctatttttatttgctaaatctagcaaccctatcccaaaggcagcctccactcaatcttatcctgagggccaaaggccaaggctgcaggaattgggagacaagggtctgtttgtatggtggtccacctccaagatggccccagtgatgcccagtattcacacccttgtgcagtcccctcactctgtaccagggtgggtctgggtaaccaatagaatgaggcagaagtgatggtacctcacttcccagatttggttaggaaagacactatggcctctttcttgctcattagccctcattctcacatcagttggatctctcactttggggaagccagctggcatgttaaggagccctatggagaggcccacatggcaaggaactaaggcctcctgccaacagccacgtgagtgaatgtggaagtggatcctctgccccagtagggccttcggatgagatcacagcccagtagacatcttatgtgcagccccatgaaagtccctaagccagaaccaccagctaagtgactcctggattcctgacccccagaaactgtgtgagataataaatgtgtgttgttttaagtga

SEQ ID NO: 252 - DNA, 2962 bp, Homo sapiens
  source 1..2962: mol_type = genomic DNA
tcacttaaaacaacacacatttattatctcacacagtttctgggggtcaggaatccaggagtcacttagctggtggttctggcttagggactttcatggggctgcacataagatgtctactgggctgtgatctcatccgaaggccctactggggcagaggatccacttccacattcactcacgtggctgttggcaggaggccttagttccttgccatgtgggcctctccatagggctccttaacatgccagctggcttccccaaagtgagagatccaactgatgtgagaatgagggctaatgagcaagaaagaggccatagtgtctttcctaaccaaatctgggaagtgaggtaccatcacttctgcctcattctattggttacccagacccaccctggtacagagtgaggggactgcacaagggtgtgaatactgggcatcactggggccatcttggaggtggaccaccatacaaacagacccttgtctcccaattcctgcagccttggcctttggccctcaggataagattgagtggaggctgcctttgggatagggttgctagatttagcaaataaaaataggggacaaatttcagagaaacaacgaatgattttttagaatatgtatgccccaaataatgcatgacaaccctaatttggagaggagtaggtgctggggggcagggaccctttggggagaggtgctgcgttctggtcctctaggattgtgtgtgcaacctcaggctgaccccaagtctttgtggatgtcgatcctgacctttccactccagtcctcaacttcccaaagggacctaggcagagaggtcaaggcagaaagagctaggaaaggatactctggggtctggagggagggaggtgtcctcaacctcagtcccaggtgaggcctcagaagcctgaggttgaagggtaggtaggaagagggaggctggaggggccagagagtgaaggcgcagattcctgcctgctctaccccacaccttgggggaggagaagcagagaaggggccctatctgtctcacccctatcagagctctccccctgaggccaccctgagtggcctcctccctggcccctgagccagcctcgggcctccccccaaatcgtcctgcccacccactgtagccgatgtccaccctcagaccatctcgggtggcccctgtcttgatttcaggggagccattgagcattgaggagtggctgctccctcccttccttggactcttccccagtctgaggggcacgagcctcagggctaggagtgggtgtcattagggactgtggctcctctctcagaccctgctgtctcctggctccccaacaggcccaccctagatgaagcgcttgtcctgcacgttgtaggagtaggggtccccaggaaaaggctggggtggtggctggttgtaaacgccctgcaggaagatccaggctgtgcccaccaccatgacaggcgtcaccacaaacaggcagaggcggtccactgtgcgggccactcggttccagctgtctttctcctcattgtaattgttctggtccctcatgtggttaacaatgaagtttgccccatccacagctggcttcagctcattgaagagttcctgctgggcctgctcagagcttgctgggggccggcgtgcagtggtgaggcgcctggccagcccatgccgctctgactgcttctcgaacatgaggtcactgcgggacttgagcaggaagtactcctcggccttggagatgtatcccagggagctgctcctccgcaccagggccccagggctgggtccatcctctgctgggcgggacatgtgcaggagctccggcagggtctccaggaagagcttcttgaccccctcagacagcacatgggtgctgggtgttcggaagtggatgttgagcacgatgacacagatcaccacaaccatggtgaccagcaccatgccgaagagcaggaacttgccgataagggggatggccatggatgtggcaggcagacgcttggagatgagcagcaggaagacagactgagccaggagcaccgagatggccactgatgtcttctcaccactgtcagccggtaggtagaagaccaggttgaccatgaaggagatgagcacgcagggcaccaggatgttgatgatgtagaagaggggcttgcggcggatgatgaggtagaaggtgatgtcctggcggctggggctgtccagaggggctctggggtccacgttgaccctggccggccggtggactatctcccactccccgttctctgtgaagccttcaggatcaatgatgatccactccacggggtaggtgcggttctccttggcatcctgtttcaggctcagggtgatctctttggccgtatacttgagggaactgaacttgagggagcagttctgccagtcgaaggggaaataggtgacagagatggggcaggaggagcggaagatggcaggtggcagccagtacacgaagccgtagtggtagacaagcacgttgcaggagtaggagatctggaaggagccgtcattgttgttctccagcacaatctctgggagccacaccatgtccggggggaggcgcaggacactgatgtttccaaattcttcagcattccacttcagccggttgtctgtccagccgtgctctatccacacattggtagtgagggtctcctcaacttctttcagggagatgaggttggagagtgtgagggccagggcaacgtccacactctcctctttgtgtgccacgggccggagctccttgttgtagcccttctcttgaaacaggtgccggatcagccgctcctcctcgttcagcccccagctgccacacaccgccagggcagccagcagccccagtgtcagcactggcccctccatcccatccctctgactgggacgtgcatctgcccctcctgtctacagggctgtggaat

SEQ ID NO: 253 - DNA, 3003 bp, Mus musculus
  source 1..3003: mol_type = genomic DNA
acccctaaaccaccagcacctgtccccttgcttgcctcattccacagccaacaggctgaagggaagacaaaccctagtcagtcagaggtgggggatggcagggcctgtgctcacactggggctgctggctgcccttgttgtgtgtgccctcccaggcagttggggcctgaatgaggaacaaaggctgatccagcacctattcaatgagaagggctacgacaaagacctgcggccggtggctcgaaaggaggacaaagtggatgtcgccctaagtctcaccctctccaacctcatctccctgaaagaagtggaggagaccctcaccaccaacgtgtggatagatcatgcctgggtagacagccgtctacagtgggatgccaacgacttcgggaacatcactgtcctgcgcctgccccctgacatggtgtggctaccagagattgtactggagaacaacaatgatggctcgttccagatttcttatgcctgcaatgtgcttgtctatgactcgggctatgtgacctggctgccgcccgccatcttccgctcctcctgccccatctcagtcacctacttccctttcgactggcagaactgctccctcaaattcagttcactcaagtatacagccaaggagatcacacttagcctgaagcaggaggaggaaaacaaccgctcttaccccatcgagtggatcatcattgaccctgaaggtttcacagagaacggtgagtgggagatagtgcatcgggcagccaagctcaatgtggaccccagtgtcccgatggacagcaccaaccaccaagatgtcaccttctaccttatcatccgccgcaagcccctcttctacatcatcaacattctggtaccctgcgtgctcatctccttcatgatcaacctagtcttctacctgccaggcgactgtggagagaagacctccgtggccatctcagtgctcctggcccaatctgtcttcctgctgcttatctccaagaggctgccggccacttccatggccatccccttggtaggcaagttcctgcttttcggcatggtgctggtcaccatggtggtggtgatctgtgtcatcgtactgaacatccacttccggacgcccagcacccatgtgctgtctgagggagtcaagaagttcttcctggagaccctgcccaagctcctgcacatgtcccgcccagcagaggaagacccaggccccagggctctcatccggagaagcagctctctgggatacatctgcaaagcagaggagtatttctcacttaagtcccgcagtgacctcatgtttgagaagcaatcagagcggcatgggctggcccggcgcctcaccacagcccgcaggcctccagcaagctctgagcaggtccaacaggagctcttcaatgagatgaagccagctgtggatggggcaaacttcatcgtcaaccatatgagagaccaaaacagttacaatgaggagaaggacaactggaaccaggtggcccgcacagtggaccgtctctgcctgtttgtggtgacacccgtcatggtggtgggcacagcctggatcttcctgcagggtgtctacaaccagcccccactccagcctttccctggggaccccttctcctatagcgaacaggacaagcgcttcatctagagcaggcatgagtagacagccaggcagacagcagtctgagaacggcacgtagttcctgcccttgagcttgtgcctagcgggtgctgtgtggctgggcagaggccatggtcgggagagctcccttccggaaacaattcctttctaaataaaggagggagacacttgagatgggctaagggtggacgtggtggagagggaggctccagggttgtgaggagaagcaggggccttgctcagggggccagagaggtgaccttgggactggcttcctgggaacagtcctgtgagagatcccccaacctgagctgctcctccgcctgactgtcttccagagcaggtcagaattctgaacttgcaatttccttgccttccttcccttacctacctggggcccagagagggtgactactctccattccccagggaaggaggtttactgggatggtgggctgtccaggttgtcatctgtcagcccccgatgccttggtcgttctgtctgagtccttctgagaagcgggggactggtgtgggaggatgacacttggcatcaaaagccccatcagtgtgtgttctcacatcctagagcatcaggacccagcagcccctctaagagacccccacattgagtcccttcctcctagccccaggctctccaaaccagggttgcctagcaatatttgaggtacacttgggataaagatttatccgtcgttcatctgaagctcaaatttaaatgtgcacccagtgttcttattgagtctggtcttcaaccctatcctaaaggaaggcacattcagaactatcctgagtcctatcaatcacaggagcaaggagactaggtcttagtgtagcctgcaaagcccacctctcaaatcgtgtcttgagacagtccctgctctctgtacctggcagttcagagtaaccaatagaatgaggtagaaatgatgctatgctccttcaaagaacagcttctgagatggctgctcctgcagagtaatggcgcacacctataaccccagcacttaagaagccggagcaaacagatgagaccagcctgggttgcacacacacacacacacacacacacacacacacacacacacacagcactgcggcctctcccttccactctcccactctctttggaagtcagccacactgctgagactctgtaaaagggtccacctatcaagagccacacaggcaggtagactagaaagggggtctttctaccctgggaggacctctagatgagagctgttcaggaccctcagaaactgtcggggataataaatacatttgggagcaaaaaaaaaaaaaaaaaaaaaaaaaaaaaaaaaaaaaaa

SEQ ID NO: 254 - DNA, 3003 bp, Mus musculus
  source 1..3003: mol_type = genomic DNA
tttttttttttttttttttttttttttttttttttttttgctcccaaatgtatttattatccccgacagtttctgagggtcctgaacagctctcatctagaggtcctcccagggtagaaagaccccctttctagtctacctgcctgtgtggctcttgataggtggacccttttacagagtctcagcagtgtggctgacttccaaagagagtgggagagtggaagggagaggccgcagtgctgtgtgtgtgtgtgtgtgtgtgtgtgtgtgtgtgtgtgtgtgtgcaacccaggctggtctcatctgtttgctccggcttcttaagtgctggggttataggtgtgcgccattactctgcaggagcagccatctcagaagctgttctttgaaggagcatagcatcatttctacctcattctattggttactctgaactgccaggtacagagagcagggactgtctcaagacacgatttgagaggtgggctttgcaggctacactaagacctagtctccttgctcctgtgattgataggactcaggatagttctgaatgtgccttcctttaggatagggttgaagaccagactcaataagaacactgggtgcacatttaaatttgagcttcagatgaacgacggataaatctttatcccaagtgtacctcaaatattgctaggcaaccctggtttggagagcctggggctaggaggaagggactcaatgtgggggtctcttagaggggctgctgggtcctgatgctctaggatgtgagaacacacactgatggggcttttgatgccaagtgtcatcctcccacaccagtcccccgcttctcagaaggactcagacagaacgaccaaggcatcgggggctgacagatgacaacctggacagcccaccatcccagtaaacctccttccctggggaatggagagtagtcaccctctctgggccccaggtaggtaagggaaggaaggcaaggaaattgcaagttcagaattctgacctgctctggaagacagtcaggcggaggagcagctcaggttgggggatctctcacaggactgttcccaggaagccagtcccaaggtcacctctctggccccctgagcaaggcccctgcttctcctcacaaccctggagcctccctctccaccacgtccacccttagcccatctcaagtgtctccctcctttatttagaaaggaattgtttccggaagggagctctcccgaccatggcctctgcccagccacacagcacccgctaggcacaagctcaagggcaggaactacgtgccgttctcagactgctgtctgcctggctgtctactcatgcctgctctagatgaagcgcttgtcctgttcgctataggagaaggggtccccagggaaaggctggagtgggggctggttgtagacaccctgcaggaagatccaggctgtgcccaccaccatgacgggtgtcaccacaaacaggcagagacggtccactgtgcgggccacctggttccagttgtccttctcctcattgtaactgttttggtctctcatatggttgacgatgaagtttgccccatccacagctggcttcatctcattgaagagctcctgttggacctgctcagagcttgctggaggcctgcgggctgtggtgaggcgccgggccagcccatgccgctctgattgcttctcaaacatgaggtcactgcgggacttaagtgagaaatactcctctgctttgcagatgtatcccagagagctgcttctccggatgagagccctggggcctgggtcttcctctgctgggcgggacatgtgcaggagcttgggcagggtctccaggaagaacttcttgactccctcagacagcacatgggtgctgggcgtccggaagtggatgttcagtacgatgacacagatcaccaccaccatggtgaccagcaccatgccgaaaagcaggaacttgcctaccaaggggatggccatggaagtggccggcagcctcttggagataagcagcaggaagacagattgggccaggagcactgagatggccacggaggtcttctctccacagtcgcctggcaggtagaagactaggttgatcatgaaggagatgagcacgcagggtaccagaatgttgatgatgtagaagaggggcttgcggcggatgataaggtagaaggtgacatcttggtggttggtgctgtccatcgggacactggggtccacattgagcttggctgcccgatgcactatctcccactcaccgttctctgtgaaaccttcagggtcaatgatgatccactcgatggggtaagagcggttgttttcctcctcctgcttcaggctaagtgtgatctccttggctgtatacttgagtgaactgaatttgagggagcagttctgccagtcgaaagggaagtaggtgactgagatggggcaggaggagcggaagatggcgggcggcagccaggtcacatagcccgagtcatagacaagcacattgcaggcataagaaatctggaacgagccatcattgttgttctccagtacaatctctggtagccacaccatgtcagggggcaggcgcaggacagtgatgttcccgaagtcgttggcatcccactgtagacggctgtctacccaggcatgatctatccacacgttggtggtgagggtctcctccacttctttcagggagatgaggttggagagggtgagacttagggcgacatccactttgtcctcctttcgagccaccggccgcaggtctttgtcgtagcccttctcattgaataggtgctggatcagcctttgttcctcattcaggccccaactgcctgggagggcacacacaacaagggcagccagcagccccagtgtgagcacaggccctgccatcccccacctctgactgactagggtttgtcttcccttcagcctgttggctgtggaatgaggcaagcaaggggacaggtgctggtggtttaggggt

SEQ ID NO: 255 - DNA, 1696 bp, Rattus norvegicus
  source 1..1696: mol_type = genomic DNA
atggcagggcctgtgcccacactggggctgctggctgcccttgttgtgtgtggcagctggggcctgaatgaggaacaaaggctgatccagcacctgtttgaggaaaaaggctacaacaaagaacttcggccggtggctcgaaaggaggacatagtggatgtcgccttaagtctgaccctctccaacctcatctccctgaaagaagtggaggagaccctcaccaccaatgtgtggatagatcatgcatggatagacagccggctacaatggaatgccaacgagtttgggaacatcaccgtcctgcgcctgccctctgacatggtgtggctaccagaaattgtactggagaacaacaatgacggctcattccagatttcttacgcctgcaatgtgcttgtttctgactcgggccatgtgacctggctgccacccgccatcttccgctcctcctgccccatctcggtcacctacttccctttcgattggcagaactgctccctcaaattcagttcactcaagtataccgccaaggagatcagacttagcctgaagcaggaggaggaagacaaccgcagttaccccattgagtggatcatcattgaccctgagggtttcacagagaacggtgagtgggaaatagttcaccgggcagccaaggtcaacgtggaccccagtgtcccaatggacagcaccaaccaccaagacgtcaccttctacctcatcatccgccgcaagccgctcttctacatcatcaacatcctggtaccctgtgtgctcatctccttcatgatcaacctggtcttctacctgccaggcgactgtggagagaagacctcggtggccatctcagtgctcctggcccaatctgtcttcctgttgcttatctccaagaggctgccggccacatccatggccattcctttggtaggcaagttcctgctttttggcatggtgctggtcaccatggttgtggtgatctgcgtcatcgtgctcaacatccacttccgaacacccagcacgcatgttctgtctgagggagtcaagaagttcttcctggagaccctgcccaaactcctgcacatgtcccgcccagaagaggaagacccgggccccagggctctcatccggaggaccagctctctgggatacatctccaaggcagaggagtacttctcacttaagtcccgcagtgacctcatgtttgagaagcaatcagagcggcatgggctggcccggcgcctcaccacagcccgcaagccaccagcaagctctgagcaggtccaacaggagcttttcaatgagatgaagccagccgtggatggggcgaacttcatcgtcaaccacatgagggaccagaacagttacaatgaggagaaggacaactggaaccaggtggcccgcacagtggaccgtctctgcttgtttgtggtgacgcccgtcatggtggtgggcacagcctggatcttcctgcagggtgtctacaaccagcccccaccccagcctttccctggggaccccttctcctatgatgaacaggacaggcgcttcatttagagcaggcatgagtaaaacagtcaggcagacggcggtctgagaattgtccttgagcttgtgcctatctggggctgtgtggctgggcagaggtcatgggaggaagagctccctcccaggagcaattcctttctaaataaaggag

SEQ ID NO: 256 - DNA, 1696 bp, Rattus norvegicus
  source 1..1696: mol_type = genomic DNA
ctcctttatttagaaaggaattgctcctgggagggagctcttcctcccatgacctctgcccagccacacagccccagataggcacaagctcaaggacaattctcagaccgccgtctgcctgactgttttactcatgcctgctctaaatgaagcgcctgtcctgttcatcataggagaaggggtccccagggaaaggctggggtgggggctggttgtagacaccctgcaggaagatccaggctgtgcccaccaccatgacgggcgtcaccacaaacaagcagagacggtccactgtgcgggccacctggttccagttgtccttctcctcattgtaactgttctggtccctcatgtggttgacgatgaagttcgccccatccacggctggcttcatctcattgaaaagctcctgttggacctgctcagagcttgctggtggcttgcgggctgtggtgaggcgccgggccagcccatgccgctctgattgcttctcaaacatgaggtcactgcgggacttaagtgagaagtactcctctgccttggagatgtatcccagagagctggtcctccggatgagagccctggggcccgggtcttcctcttctgggcgggacatgtgcaggagtttgggcagggtctccaggaagaacttcttgactccctcagacagaacatgcgtgctgggtgttcggaagtggatgttgagcacgatgacgcagatcaccacaaccatggtgaccagcaccatgccaaaaagcaggaacttgcctaccaaaggaatggccatggatgtggccggcagcctcttggagataagcaacaggaagacagattgggccaggagcactgagatggccaccgaggtcttctctccacagtcgcctggcaggtagaagaccaggttgatcatgaaggagatgagcacacagggtaccaggatgttgatgatgtagaagagcggcttgcggcggatgatgaggtagaaggtgacgtcttggtggttggtgctgtccattgggacactggggtccacgttgaccttggctgcccggtgaactatttcccactcaccgttctctgtgaaaccctcagggtcaatgatgatccactcaatggggtaactgcggttgtcttcctcctcctgcttcaggctaagtctgatctccttggcggtatacttgagtgaactgaatttgagggagcagttctgccaatcgaaagggaagtaggtgaccgagatggggcaggaggagcggaagatggcgggtggcagccaggtcacatggcccgagtcagaaacaagcacattgcaggcgtaagaaatctggaatgagccgtcattgttgttctccagtacaatttctggtagccacaccatgtcagagggcaggcgcaggacggtgatgttcccaaactcgttggcattccattgtagccggctgtctatccatgcatgatctatccacacattggtggtgagggtctcctccacttctttcagggagatgaggttggagagggtcagacttaaggcgacatccactatgtcctcctttcgagccaccggccgaagttctttgttgtagcctttttcctcaaacaggtgctggatcagcctttgttcctcattcaggccccagctgccacacacaacaagggcagccagcagccccagtgtgggcacaggccctgccat

SEQ ID NO: 257 - DNA, 4426 bp, Macaca fascicularis
  source 1..4426: mol_type = genomic DNA
gaggggcagatgcaggtcccagtcagagggatgggatggaggggccagtgctgacactggggctgctggccaccctggcggtgtgtggcatctgggggctgaacgaggaggagcggctgatccggcacctgtttcaagagaagggctacaacaaggagctccggcccgtggcacacaaagaggagagtgtggacgtcaccctggccctcacgctctccaacctcatctccctgaaagaagttgaggagaccctcactaccaatgtgtggatagagcacggctggacagacaaccggctgaagtggaatgctgaagaatttggaaacatcagtgtcctgcgcctccccccagacatggtgtggctcccagagattgtgctggagaacaagttgagccaagccctccctgacctcctgtctgtcaccctgcctcctttccttaagcctcctctgcatcccccaactctgccagtcctgagtcgccagagctcactgtggttcttgtccctgttccccagcaatgatggctccttccagatctcctactcctgcaacgtgcttgtctacaactacggctttgtgtactggctgccacctgccatcttccgctcctcctgccccatctctgtcacctatttccccttcgactggcagaactgctccctcaagttcagttccctcaagtacacggccaaagagatcaccctgagcctgaagcaggatgccgaagagaaccgcacctaccccgtggagtggatcatcattgaccctgaaggcttcacagagaacggggagtgggagatagtgcatcggccggccagggtcaacgtggaccccagagcccctctggacagccccagccgccaggacgtcaccttctacctcatcatccgccgcaagcccctcttctacatcatcaacatcttggtgccctgtgtgctcatctccttcatggtcaacctggtcttctacctaccggccgacagtggtgagaagacatcagtggccatttctgtgctcctggctcagtccgtcttcctgctgctcatctccaagcggctgcccgccacatccatggccatcccccttatcggcaagttcctgctcttcggcatggtgctggtcaccatggttgtggtgatctgtgtcatcgtgctcaacatccacttccgaacacccagcacccatgtgctgtctgagggggtcaagaagctcttcctggagaccctgccagagctcctgcacatgtcccgcccagcagaggatggacccagccctggggccctggtgcggaggagcagctccctgggatacatctccaaggctgaggagtacttcttgctcaagtcccgcagcgacctcatgtttgagaagcagtcagagcggcacgggctggccaggcgcctcaccactgcacgtgggttcccgctggtcttggttttcagcccatctgtgggaggtgggggcaggcctcacacccactctggccccttgtccataggccggcccccagcaagctctgagcaggcccagcaggaactcttcaatgagctgaagccagctgtggatggggcaaacttcattgttaaccacatgagggaccagaacaattacaatgaggagaaagacagctggaaccgagtggcccgcacagtggaccgcctctgcctgtttgtggtgacgcctgttatggtggtgggcacagcctggatcttcctgcagggcgtttacaaccagccaccgccccagccttttcccggggacccctactcctacgacgtgcaggacaagcgcttcatctagggtgggcctgtgggggagccaggagacagcagggtctgagagaggagccatggtccctaatgagacccactcatagccctgaggctcacgcccctcagactggggaagagtccaaggaaggaagggaacagctactcctcaatgctcaatggctcccctgaaatcaagacagggccacctgagatggtctgagggtggacaccggctacagcaggtgggcaggacgatccgtggggaagtaggaggctggctcaggggccagggaggaggccactcagggtggcctcacagggagaactctgataggggtgagacagatagggccccttctctgctcctcctctcgcaaggtgtggggtagagcaggcaggaatctgcgccttcactccctggctcctccagcctccctcttcccacctacccttcaacctcaggcttctgaggcctcacctgggactgaggttgaggacacctccctccctccagaccccagagtctcctttcctagctctttctgccttgaccactctgcctaggtccctttgggaagttgaggactggagtggaaaggtcaggattgacatccacaaagacttggggtcaacctgaggttgcacacacaatcctagaggaccggaatgcagcacctctccccaaagggcccctgccccccagcatctactcctccccaaagtagggttgtcatgcattatttggggcatagtctaaaaaaatcattcgttgtttctctgaaatttgtcctgtatttttatttgctaaatctagcaaccctatcccaaagacagcctccattcaatcctatcctgagggccaaaggccaatactgcaggaattgggagacaagggtctgtttgtatggcagcccacctccaagatggccccggtgatagccagtattcacactcttgtgcagtcccctcactctgtaccagggtgggtctgggtaaccaacagaatgaggcagaagtgatggtacctcacttcccagattcagttaggaaagacactagggcctctttctggctcattcaccctcattctcacagcagttggatctctcactttggggaagccagctggcacgttgaggagccctatggagaggcccacacggcaaggaaataaggcctcctgccatcagccacgtgagcaaaggtggaagtggatcctctgccccagtagggcctttggatgagatcacagcccagtagacatcttacgtgcagcaccatgaaagtccctaagccagaaccaccagctaagtggctcctggattcctgatcccccagaaactgtgtgagataataaatgtgtgttgttttaagtaacaaagttttggtgtcatttgttataccagcaatgtgaccttgagtgagctgctcttcatctcttaccttccattttctaatctgcaaaatgtgtgtctagtgagtcctagtcatggggtgttgtgaaaattgaatttctagtagtagtattttcatgtgacctgcacatttaatgggtggtgatttaacccatttccctcagtggggaattggtgacctcattaactcagatatatagaaggtgagatttttaatgtttagatgtaaccaaggaaaaagaaaaaccatttaaaaccaaaactgaccccagtaacttctgccttccagcatgaactatattcacaaaattcaaggtacaaatcttttattttcctgtctaaataggaaagccagtttgttctcacacccgtcaggtgagcaggaagtctgagacttcgccaggaatagtccatcaactcagggagggtccgtcttaagtacagggatgagagtgagtctagggctctcagccacagtctttgcttctctctgcctcatggtggcgctgctggcaacaggtcttggttcaaccaccagctgagtcctcagttctattaggccctgctcaagtggctgtggacttccagagaagacaaccccaaaatgtcacacaaaactgggggggtgcctcttgcacaggctcccagggaaaccacggtttccaccagcagcacccgctcccccagcaccgtggtgctctcaggactggtccactctgactgacatggaactccatattctgtccccaggaagtcatgctcatgggcacagctttccgggaagccagagggtgttccttactctctccagaccaacagggctatacctgctctctttcaatggacagtgaatcagtaatacactgggatgcaaggaacagaaagctcaaggaattgtagtttaaacacaaaaggtttcctttttctcacataataatagggaggcggaggtgatcacatcgcctcagctgtctaacaaagctatcagggacccaggcactttgccatctgcccagccctgcctccatggcaagctggcttctgtcctcagacctattggccccaggttgcgagctgacagcaacagctgcacaattagaacctatgttcaggcagaaaagggccagccatttctgacccctttcatcaagaagcaaaacttttccagaggccggacatagtggctcacgcctgtaatcacagcactttgggaggccaaggcggctggatcacctga

SEQ ID NO: 258 - DNA, 4426 bp, Macaca fascicularis
  source 1..4426: mol_type = genomic DNA
tcaggtgatccagccgccttggcctcccaaagtgctgtgattacaggcgtgagccactatgtccggcctctggaaaagttttgcttcttgatgaaaggggtcagaaatggctggcccttttctgcctgaacataggttctaattgtgcagctgttgctgtcagctcgcaacctggggccaataggtctgaggacagaagccagcttgccatggaggcagggctgggcagatggcaaagtgcctgggtccctgatagctttgttagacagctgaggcgatgtgatcacctccgcctccctattattatgtgagaaaaaggaaaccttttgtgtttaaactacaattccttgagctttctgttccttgcatcccagtgtattactgattcactgtccattgaaagagagcaggtatagccctgttggtctggagagagtaaggaacaccctctggcttcccggaaagctgtgcccatgagcatgacttcctggggacagaatatggagttccatgtcagtcagagtggaccagtcctgagagcaccacggtgctgggggagcgggtgctgctggtggaaaccgtggtttccctgggagcctgtgcaagaggcacccccccagttttgtgtgacattttggggttgtcttctctggaagtccacagccacttgagcagggcctaatagaactgaggactcagctggtggttgaaccaagacctgttgccagcagcgccaccatgaggcagagagaagcaaagactgtggctgagagccctagactcactctcatccctgtacttaagacggaccctccctgagttgatggactattcctggcgaagtctcagacttcctgctcacctgacgggtgtgagaacaaactggctttcctatttagacaggaaaataaaagatttgtaccttgaattttgtgaatatagttcatgctggaaggcagaagttactggggtcagttttggttttaaatggtttttctttttccttggttacatctaaacattaaaaatctcaccttctatatatctgagttaatgaggtcaccaattccccactgagggaaatgggttaaatcaccacccattaaatgtgcaggtcacatgaaaatactactactagaaattcaattttcacaacaccccatgactaggactcactagacacacattttgcagattagaaaatggaaggtaagagatgaagagcagctcactcaaggtcacattgctggtataacaaatgacaccaaaactttgttacttaaaacaacacacatttattatctcacacagtttctgggggatcaggaatccaggagccacttagctggtggttctggcttagggactttcatggtgctgcacgtaagatgtctactgggctgtgatctcatccaaaggccctactggggcagaggatccacttccacctttgctcacgtggctgatggcaggaggccttatttccttgccgtgtgggcctctccatagggctcctcaacgtgccagctggcttccccaaagtgagagatccaactgctgtgagaatgagggtgaatgagccagaaagaggccctagtgtctttcctaactgaatctgggaagtgaggtaccatcacttctgcctcattctgttggttacccagacccaccctggtacagagtgaggggactgcacaagagtgtgaatactggctatcaccggggccatcttggaggtgggctgccatacaaacagacccttgtctcccaattcctgcagtattggcctttggccctcaggataggattgaatggaggctgtctttgggatagggttgctagatttagcaaataaaaatacaggacaaatttcagagaaacaacgaatgatttttttagactatgccccaaataatgcatgacaaccctactttggggaggagtagatgctggggggcaggggccctttggggagaggtgctgcattccggtcctctaggattgtgtgtgcaacctcaggttgaccccaagtctttgtggatgtcaatcctgacctttccactccagtcctcaacttcccaaagggacctaggcagagtggtcaaggcagaaagagctaggaaaggagactctggggtctggagggagggaggtgtcctcaacctcagtcccaggtgaggcctcagaagcctgaggttgaagggtaggtgggaagagggaggctggaggagccagggagtgaaggcgcagattcctgcctgctctaccccacaccttgcgagaggaggagcagagaaggggccctatctgtctcacccctatcagagttctccctgtgaggccaccctgagtggcctcctccctggcccctgagccagcctcctacttccccacggatcgtcctgcccacctgctgtagccggtgtccaccctcagaccatctcaggtggccctgtcttgatttcaggggagccattgagcattgaggagtagctgttcccttccttccttggactcttccccagtctgaggggcgtgagcctcagggctatgagtgggtctcattagggaccatggctcctctctcagaccctgctgtctcctggctcccccacaggcccaccctagatgaagcgcttgtcctgcacgtcgtaggagtaggggtccccgggaaaaggctggggcggtggctggttgtaaacgccctgcaggaagatccaggctgtgcccaccaccataacaggcgtcaccacaaacaggcagaggcggtccactgtgcgggccactcggttccagctgtctttctcctcattgtaattgttctggtccctcatgtggttaacaatgaagtttgccccatccacagctggcttcagctcattgaagagttcctgctgggcctgctcagagcttgctgggggccggcctatggacaaggggccagagtgggtgtgaggcctgcccccacctcccacagatgggctgaaaaccaagaccagcgggaacccacgtgcagtggtgaggcgcctggccagcccgtgccgctctgactgcttctcaaacatgaggtcgctgcgggacttgagcaagaagtactcctcagccttggagatgtatcccagggagctgctcctccgcaccagggccccagggctgggtccatcctctgctgggcgggacatgtgcaggagctctggcagggtctccaggaagagcttcttgaccccctcagacagcacatgggtgctgggtgttcggaagtggatgttgagcacgatgacacagatcaccacaaccatggtgaccagcaccatgccgaagagcaggaacttgccgataagggggatggccatggatgtggcgggcagccgcttggagatgagcagcaggaagacggactgagccaggagcacagaaatggccactgatgtcttctcaccactgtcggccggtaggtagaagaccaggttgaccatgaaggagatgagcacacagggcaccaagatgttgatgatgtagaagaggggcttgcggcggatgatgaggtagaaggtgacgtcctggcggctggggctgtccagaggggctctggggtccacgttgaccctggccggccgatgcactatctcccactccccgttctctgtgaagccttcagggtcaatgatgatccactccacggggtaggtgcggttctcttcggcatcctgcttcaggctcagggtgatctctttggccgtgtacttgagggaactgaacttgagggagcagttctgccagtcgaaggggaaataggtgacagagatggggcaggaggagcggaagatggcaggtggcagccagtacacaaagccgtagttgtagacaagcacgttgcaggagtaggagatctggaaggagccatcattgctggggaacagggacaagaaccacagtgagctctggcgactcaggactggcagagttgggggatgcagaggaggcttaaggaaaggaggcagggtgacagacaggaggtcagggagggcttggctcaacttgttctccagcacaatctctgggagccacaccatgtctggggggaggcgcaggacactgatgtttccaaattcttcagcattccacttcagccggttgtctgtccagccgtgctctatccacacattggtagtgagggtctcctcaacttctttcagggagatgaggttggagagcgtgagggccagggtgacgtccacactctcctctttgtgtgccacgggccggagctccttgttgtagcccttctcttgaaacaggtgccggatcagccgctcctcctcgttcagcccccagatgccacacaccgccagggtggccagcagccccagtgtcagcactggcccctccatcccatccctctgactgggacctgcatctgcccctc

SEQ ID NO: 259 - DNA, 3008 bp, Macaca mulatta
  source 1..3008: mol_type = genomic DNA
ctttgactccctcctcccccaacacctgtcccctctcccgcccaccctcattccacagccctgtagatgggaggggcagatgcaggtcccagtcagagggatgggatggaggggccagtgctgacactggggctgctggccaccctggcggtgtgtggcatctgggggctgaacgaggaggagcggctgatccggcacctgtttcaagagaagggctacaacaaggagctccggcccgtggcacacaaagaggagagtgtggacgtcaccctggccctcacgctctccaacctcatctccctgaaagaagttgaggagaccctcactaccaatgtgtggatagagcacggctggacagacaaccggctgaagtggaatgctgaagaatttggaaacatcagtgtcctgcgcctccccccagacatggtgtggctcccagagattgtgctggagaacaacaatgatggcttcttccagatctcctactcctgcaacgtgcttgtctacaactacggctttgtgtactggctgccacctgccatcttccgctcctcctgccccatctctgtcacctatttccccttcgactggcagaactgctccctcaagttcagttccctcaagtacacggccaaagagatcaccctgagcctgaagcaggatgccgaagagaaccgcacctaccccgtggagtggatcatcattgaccctgaaggcttcacagagaacggggagtgggagatagtgcaccggccggccagggtcaacgtggaccccagagcccctctggacagccccagccgccaggacgtcaccttctacctcatcatccgccgcaagcccctattctacatcatcaacatcttggtgccctgtgtgctcatctccttcatggtcaacctggtcttctacctaccggccgacagtggtgagaagacatcagtggccatttctgtgctcctggctcagtccgtcttcctgctgctcatctccaagcggctgcccgccacatccatggccatcccccttattggcaagttcctgctcttcggcatggtgctggtcaccatggttgtggtgatctgtgtcatcgtgctcaacatccacttccgaacacccagcacccatgtgctgtctgagggggtcaagaagctcttcctggagaccctgccagagctcctgcacatgtcccgcccagcagaggatggacccagccctggggccctggtgcggaggagcagctccctgggatacatctccaaggctgaggagtacttcttgctcaagtcccgcagcgacctcatgtttgagaagcagtcagagcggcacgggctggccaggcgcctcaccactgcacgccggcccccagcaagctctgagcaggcccagcaggaactcttcaatgagctgaagccagctgtggatggggcaaacttcattgttaaccacatgagggaccagaacaattacaatgaggagaaagacagctggaaccgagtggcccgcacagtggaccgcctctgcctgtttgtggtgacgcctgttatggtggtgggcacagcctggatcttcctgcagggcgtttacaaccagccaccgccccagccttttcccggggacccctactcctacgacgtgcaggacaagcgcttcatctagggtgggcctgtgggggagccaggagacagcagggtctgagagaggagccatggtccctaatgagacccactcatagccctgaggctcacgcccctcagactggggaagagtccaaggaaggaagggagcagccactcctcaatgctcaatggctcccctgaaatcaagacagggccacctgagatggtctgagggtggacaccggctacagcaggtgggcaggacgatctgtggggaagtaggaggctggctcaggggccagggaggaggccactcagggtggcctcacagggagaactctgataggggtgagacagatagggccccttctctgctcctcctctcgcaaggtgtggggtagagcaggcaggaatctgcgccttcactccctggctcctccagcctccctcttcccacctacccttcaacctcaggcttctgaggcctcacctgggactgaggttgaggacacctccctccctccagaccccagagtctcctttcctagctctttctgccttgaccactctgcctaggtccctttgggaagttgaggactggagtggaaaggtcaggattgacatccacaaagacttggggtcaacctgaggttgcacacacaatcctagaggaccggaatgcagcacctctccccaaagggcccctgccccccagcatctactcctccccaaagtagggttgtcatgcattatttggggcatattctaaaaaaatcattcgttgtttctctgaaatttgtcctgtatttttatttgctaaatctagcaaccctatcccaaagacagcctccattcaatcctatcctgagggccaaaggccaatactgcaggaattgggagacaagggtctgtttgtatggcagcccacctccaagatggccccggtgatagccagtattcacactcttgtgcagtcccctcactctgtaccagggtgggtctgggtaaccaacagaatgaggcagaagtgatggtacctcacttcccagattcagttaggaaaggcactagggcctctttctggatcattcaccctcattctcacagcagttggatctctcactttggggaagccagctggcacgttgaggagccctatggagaggcccacacggcaaggaaataaggcctcctgccatcagccacgtgagcgaaggtggaagtggatcctctgccccagtagggcctttggatgagatcacagcccagtagacatcttacgtgcagcaccatgaaagtccctaagccagaaccaccagctaagtggctcctggattcctgatcccccagaaactgtgtgagataataaatgtgtgttgttttaagtaa

SEQ ID NO: 260 - DNA, 3008 bp, Macaca mulatta
  source 1..3008: mol_type = genomic DNA
ttacttaaaacaacacacatttattatctcacacagtttctgggggatcaggaatccaggagccacttagctggtggttctggcttagggactttcatggtgctgcacgtaagatgtctactgggctgtgatctcatccaaaggccctactggggcagaggatccacttccaccttcgctcacgtggctgatggcaggaggccttatttccttgccgtgtgggcctctccatagggctcctcaacgtgccagctggcttccccaaagtgagagatccaactgctgtgagaatgagggtgaatgatccagaaagaggccctagtgcctttcctaactgaatctgggaagtgaggtaccatcacttctgcctcattctgttggttacccagacccaccctggtacagagtgaggggactgcacaagagtgtgaatactggctatcaccggggccatcttggaggtgggctgccatacaaacagacccttgtctcccaattcctgcagtattggcctttggccctcaggataggattgaatggaggctgtctttgggatagggttgctagatttagcaaataaaaatacaggacaaatttcagagaaacaacgaatgatttttttagaatatgccccaaataatgcatgacaaccctactttggggaggagtagatgctggggggcaggggccctttggggagaggtgctgcattccggtcctctaggattgtgtgtgcaacctcaggttgaccccaagtctttgtggatgtcaatcctgacctttccactccagtcctcaacttcccaaagggacctaggcagagtggtcaaggcagaaagagctaggaaaggagactctggggtctggagggagggaggtgtcctcaacctcagtcccaggtgaggcctcagaagcctgaggttgaagggtaggtgggaagagggaggctggaggagccagggagtgaaggcgcagattcctgcctgctctaccccacaccttgcgagaggaggagcagagaaggggccctatctgtctcacccctatcagagttctccctgtgaggccaccctgagtggcctcctccctggcccctgagccagcctcctacttccccacagatcgtcctgcccacctgctgtagccggtgtccaccctcagaccatctcaggtggccctgtcttgatttcaggggagccattgagcattgaggagtggctgctcccttccttccttggactcttccccagtctgaggggcgtgagcctcagggctatgagtgggtctcattagggaccatggctcctctctcagaccctgctgtctcctggctcccccacaggcccaccctagatgaagcgcttgtcctgcacgtcgtaggagtaggggtccccgggaaaaggctggggcggtggctggttgtaaacgccctgcaggaagatccaggctgtgcccaccaccataacaggcgtcaccacaaacaggcagaggcggtccactgtgcgggccactcggttccagctgtctttctcctcattgtaattgttctggtccctcatgtggttaacaatgaagtttgccccatccacagctggcttcagctcattgaagagttcctgctgggcctgctcagagcttgctgggggccggcgtgcagtggtgaggcgcctggccagcccgtgccgctctgactgcttctcaaacatgaggtcgctgcgggacttgagcaagaagtactcctcagccttggagatgtatcccagggagctgctcctccgcaccagggccccagggctgggtccatcctctgctgggcgggacatgtgcaggagctctggcagggtctccaggaagagcttcttgaccccctcagacagcacatgggtgctgggtgttcggaagtggatgttgagcacgatgacacagatcaccacaaccatggtgaccagcaccatgccgaagagcaggaacttgccaataagggggatggccatggatgtggcgggcagccgcttggagatgagcagcaggaagacggactgagccaggagcacagaaatggccactgatgtcttctcaccactgtcggccggtaggtagaagaccaggttgaccatgaaggagatgagcacacagggcaccaagatgttgatgatgtagaataggggcttgcggcggatgatgaggtagaaggtgacgtcctggcggctggggctgtccagaggggctctggggtccacgttgaccctggccggccggtgcactatctcccactccccgttctctgtgaagccttcagggtcaatgatgatccactccacggggtaggtgcggttctcttcggcatcctgcttcaggctcagggtgatctctttggccgtgtacttgagggaactgaacttgagggagcagttctgccagtcgaaggggaaataggtgacagagatggggcaggaggagcggaagatggcaggtggcagccagtacacaaagccgtagttgtagacaagcacgttgcaggagtaggagatctggaagaagccatcattgttgttctccagcacaatctctgggagccacaccatgtctggggggaggcgcaggacactgatgtttccaaattcttcagcattccacttcagccggttgtctgtccagccgtgctctatccacacattggtagtgagggtctcctcaacttctttcagggagatgaggttggagagcgtgagggccagggtgacgtccacactctcctctttgtgtgccacgggccggagctccttgttgtagcccttctcttgaaacaggtgccggatcagccgctcctcctcgttcagcccccagatgccacacaccgccagggtggccagcagccccagtgtcagcactggcccctccatcccatccctctgactgggacctgcatctgcccctcccatctacagggctgtggaatgagggtgggcgggagaggggacaggtgttgggggaggagggagtcaaag

SEQ ID NO: 261 - DNA, 2482 bp, Homo sapiens
  source 1..2482: mol_type = genomic DNA
agagctcagaataaccctgagaaccacgcagcaggatggcaagggctccgcttggggtcctgctcctcttggggcttctcggcaggggtgtggggaagaacgaggaactgcgtctttatcaccatctcttcaacaactatgacccaggaagccggccagtgcgggagcctgaggatactgtcaccatcagcctcaaggtcaccctgacgaatctcatctcactgaatgaaaaagaggagactctcaccactagcgtctggattggaatcgattggcaggattaccgactcaactacagcaaggacgactttgggggtatagaaaccctgcgagtcccttcagaactcgtgtggctgccagagattgtgctggaaaacaatattgatggccagttcggagtggcctacgacgccaacgtgctcgtctacgagggcggctccgtgacgtggctgcctccggccatctaccgcagcgtctgcgcagtggaggtcacctacttccccttcgattggcagaactgttcgcttattttccgctctcagacgtacaatgccgaagaggtggagttcacttttgccgtagacaacgacggcaagaccatcaacaagatcgacatcgacacagaggcctatactgagaacggcgagtgggccatcgacttctgcccgggggtgatccgccgccaccacggtggcgccaccgacggcccaggggagactgacgtcatctactcgctcatcatccgccggaagccgctcttctacgtcattaacatcatcgtgccctgtgtgctcatctcgggcctggtgctgctcgcctacttcctgccggcgcaggccggcggccagaaatgcacggtctccatcaacgtcctgctcgcccagaccgtcttcttgttcctcattgcccagaaaatcccagagacttctctgagcgtgccgctcctgggcaggttccttattttcgtcatggtggtcgccacgctcattgtcatgaattgcgtcatcgtgctcaacgtgtcccagcggacgcccaccacccacgccatgtccccgcggctgcgccacgttctcctggagctgctgccgcgcctcctgggctccccgccgccgcccgaggccccccgggccgcctcgcccccaaggcgggcgtcgtcggtgggcttattgctccgcgcggaggagctgatactgaaaaagccacggagcgagctcgtgtttgaggggcagaggcaccggcaggggacctggacggctgccttctgccagagcctgggcgccgccgcccccgaggtccgctgctgtgtggatgccgtgaacttcgtggccgagagcacgagagatcaggaggccaccggcgaggaagtgtccgactgggtgcgcatggggaatgcccttgacaacatctgcttctgggccgctctggtgctcttcagcgtgggctccagcctcatcttcctcggggcctacttcaaccgagtgcctgatctcccctacgcgccgtgtatccagccttagctcgcaccgacttcaatttcccacccatctccagtaggaaattgattttgaaaaagtaggctgccgccaccacggcattatgatcccttccccctgctgatcaatctgcagtttgtgaacttcacaagaatggtgtgtgcccgttccctggcgtgtgtaggcctggccgcagtccaggggtcagcaggaggaaagggttcacataggctctcaggtgccagtcttccagaaagcaaggactgcccttcattcagccttgctgacctcccagcctttctaaggctcagccccacgggactctggtggctgccagcttgtgagctatctatctatattcatttcatagccaaacaggagacccctttgcaggacttgcacacagggaggctgtagccaggaaaccctcttcttccctggtctggctctgctggagcgggtgggaaccaaacaccttcagtgctggtggccctcaggcccacaggtttaaggctgaggctgccctgacccttccacagtcatttcttctaggttttcttggcccagcactgcccatcccaccccatgaggctcactcattgcagatcccagcccaccctgcccctttcttccccaccctggaggctctctctgcctagtctacagtactgacagaaagcaaggacatgcggcctgcatggtgggagctggttgaattgtctttattaacaaacaggatatccaaggccactacattgaggaggggtggggggggagggagaagggttacttgctgctcacactatatacagatgcaagcaaggggcgtggagagtgagggctccctgctccctccctccaccggggaagggcatgggctagaagaggagaggggggtcgggaatggggggaatgttttggctggcggggtcccccctccattccctggagtttgggggaaggggaatcattaaagtgctttcagaaaa

SEQ ID NO: 262 - DNA, 2482 bp, Homo sapiens
  source 1..2482: mol_type = genomic DNA
ttttctgaaagcactttaatgattccccttcccccaaactccagggaatggaggggggaccccgccagccaaaacattccccccattcccgacccccctctcctcttctagcccatgcccttccccggtggagggagggagcagggagccctcactctccacgccccttgcttgcatctgtatatagtgtgagcagcaagtaacccttctccctccccccccacccctcctcaatgtagtggccttggatatcctgtttgttaataaagacaattcaaccagctcccaccatgcaggccgcatgtccttgctttctgtcagtactgtagactaggcagagagagcctccagggtggggaagaaaggggcagggtgggctgggatctgcaatgagtgagcctcatggggtgggatgggcagtgctgggccaagaaaacctagaagaaatgactgtggaagggtcagggcagcctcagccttaaacctgtgggcctgagggccaccagcactgaaggtgtttggttcccacccgctccagcagagccagaccagggaagaagagggtttcctggctacagcctccctgtgtgcaagtcctgcaaaggggtctcctgtttggctatgaaatgaatatagatagatagctcacaagctggcagccaccagagtcccgtggggctgagccttagaaaggctgggaggtcagcaaggctgaatgaagggcagtccttgctttctggaagactggcacctgagagcctatgtgaaccctttcctcctgctgacccctggactgcggccaggcctacacacgccagggaacgggcacacaccattcttgtgaagttcacaaactgcagattgatcagcagggggaagggatcataatgccgtggtggcggcagcctactttttcaaaatcaatttcctactggagatgggtgggaaattgaagtcggtgcgagctaaggctggatacacggcgcgtaggggagatcaggcactcggttgaagtaggccccgaggaagatgaggctggagcccacgctgaagagcaccagagcggcccagaagcagatgttgtcaagggcattccccatgcgcacccagtcggacacttcctcgccggtggcctcctgatctctcgtgctctcggccacgaagttcacggcatccacacagcagcggacctcgggggcggcggcgcccaggctctggcagaaggcagccgtccaggtcccctgccggtgcctctgcccctcaaacacgagctcgctccgtggctttttcagtatcagctcctccgcgcggagcaataagcccaccgacgacgcccgccttgggggcgaggcggcccggggggcctcgggcggcggcggggagcccaggaggcgcggcagcagctccaggagaacgtggcgcagccgcggggacatggcgtgggtggtgggcgtccgctgggacacgttgagcacgatgacgcaattcatgacaatgagcgtggcgaccaccatgacgaaaataaggaacctgcccaggagcggcacgctcagagaagtctctgggattttctgggcaatgaggaacaagaagacggtctgggcgagcaggacgttgatggagaccgtgcatttctggccgccggcctgcgccggcaggaagtaggcgagcagcaccaggcccgagatgagcacacagggcacgatgatgttaatgacgtagaagagcggcttccggcggatgatgagcgagtagatgacgtcagtctcccctgggccgtcggtggcgccaccgtggtggcggcggatcacccccgggcagaagtcgatggcccactcgccgttctcagtataggcctctgtgtcgatgtcgatcttgttgatggtcttgccgtcgttgtctacggcaaaagtgaactccacctcttcggcattgtacgtctgagagcggaaaataagcgaacagttctgccaatcgaaggggaagtaggtgacctccactgcgcagacgctgcggtagatggccggaggcagccacgtcacggagccgccctcgtagacgagcacgttggcgtcgtaggccactccgaactggccatcaatattgttttccagcacaatctctggcagccacacgagttctgaagggactcgcagggtttctatacccccaaagtcgtccttgctgtagttgagtcggtaatcctgccaatcgattccaatccagacgctagtggtgagagtctcctctttttcattcagtgagatgagattcgtcagggtgaccttgaggctgatggtgacagtatcctcaggctcccgcactggccggcttcctgggtcatagttgttgaagagatggtgataaagacgcagttcctcgttcttccccacacccctgccgagaagccccaagaggagcaggaccccaagcggagcccttgccatcctgctgcgtggttctcagggttattctgagctct

SEQ ID NO: 263 - DNA, 1599 bp, Mus musculus
  source 1..1599: mol_type = genomic DNA
ctgagaaccagacatcaggatggcaggggctctgcttggtgccctgcttctcctgacactctttggcagaagccagggaaagaatgaagagcttagcctgtatcaccatctcttcgacaattatgatccagaatgccggccagttaggagacctgaggacactgtcaccatcaccctcaaggtcaccctaaccaacctcatctcactgaacgagaaagaagaaactctgaccaccagtgtctggattggcattgactggcacgactatcggctcaactacagcaaggacgattttgcaggtgtaggaatcctccgggtcccttcagaacatgtatggctgccagagattgttctagaaaacaatattgatgggcagtttggagtggcctacgacagcaatgttctagtctatgagggaggctatgtgagctggttgcccccagccatctaccgcagcacctgcgcagtggaggtcacctatttcccctttgactggcagaactgctctctcatttttcgctcccagacctacaatgctgaggaggtggagttcatctttgccgtggatgacgacggcaataccatcaacaagattgacattgacacggcagcttttaccgagaatggagaatgggccatagactactgcccaggcatgattcgccgctatgagggaggttccacagaaggtcctggagaaactgacgtcatctatacgctcatcatccgccggaagccgcttttttacgtcattaacatcattgtgccttgcgtgctcatttctggcttggtgctgctcgcttacttcctgcctgcgcaggctggtggccagaaatgcacggtctctatcaacgtcctgctagcccagactgtcttcttgtttctaattgcccagaaaattccagagacttctctgagcgtgccactgctgggcaggtatcttatattcgtcatggtggttgccacgctcattgtcatgaattgcgtcatcgtgctcaacgtatctttgaggacgccaacgactcatgctacatcccctcggctgcgccagattttattagagctgctgccgcgtctcctgggctcgagcccacccccagaggatccccgaactgcctcaccagcgaggcgtgcctcgtctgtgggcattctgctcagagcggaggagctcatcttgaaaaagccgcggagcgaactcgtgtttgagggtcagaggcatcggcacggaacttggaccgcagccctctgccagaacctgggtgctgcagccccagaaatccgctgctgtgtggatgctgtgaactttgtggctgagagcacaagagaccaggaagccactggagaggaactgtccgactgggtgcgtatggggaaggccctggacaatgtctgtttttgggcagctttggtgctcttcagcgttggttctactctcatcttccttgggggttacttcaaccaagttcctgatctcccttacccaccgtgcatccaaccatgagcctgcactggcacccacctctcccccaccccccaagaaagagattttgaaaacaggccgctgacaataaatctggtttgtgaacttgcaaaaaaaaa

SEQ ID NO: 264 - DNA, 1599 bp, Mus musculus
  source 1..1599: mol_type = genomic DNA
tttttttttgcaagttcacaaaccagatttattgtcagcggcctgttttcaaaatctctttcttggggggtgggggagaggtgggtgccagtgcaggctcatggttggatgcacggtgggtaagggagatcaggaacttggttgaagtaacccccaaggaagatgagagtagaaccaacgctgaagagcaccaaagctgcccaaaaacagacattgtccagggccttccccatacgcacccagtcggacagttcctctccagtggcttcctggtctcttgtgctctcagccacaaagttcacagcatccacacagcagcggatttctggggctgcagcacccaggttctggcagagggctgcggtccaagttccgtgccgatgcctctgaccctcaaacacgagttcgctccgcggctttttcaagatgagctcctccgctctgagcagaatgcccacagacgaggcacgcctcgctggtgaggcagttcggggatcctctgggggtgggctcgagcccaggagacgcggcagcagctctaataaaatctggcgcagccgaggggatgtagcatgagtcgttggcgtcctcaaagatacgttgagcacgatgacgcaattcatgacaatgagcgtggcaaccaccatgacgaatataagatacctgcccagcagtggcacgctcagagaagtctctggaattttctgggcaattagaaacaagaagacagtctgggctagcaggacgttgatagagaccgtgcatttctggccaccagcctgcgcaggcaggaagtaagcgagcagcaccaagccagaaatgagcacgcaaggcacaatgatgttaatgacgtaaaaaagcggcttccggcggatgatgagcgtatagatgacgtcagtttctccaggaccttctgtggaacctccctcatagcggcgaatcatgcctgggcagtagtctatggcccattctccattctcggtaaaagctgccgtgtcaatgtcaatcttgttgatggtattgccgtcgtcatccacggcaaagatgaactccacctcctcagcattgtaggtctgggagcgaaaaatgagagagcagttctgccagtcaaaggggaaataggtgacctccactgcgcaggtgctgcggtagatggctgggggcaaccagctcacatagcctccctcatagactagaacattgctgtcgtaggccactccaaactgcccatcaatattgttttctagaacaatctctggcagccatacatgttctgaagggacccggaggattcctacacctgcaaaatcgtccttgctgtagttgagccgatagtcgtgccagtcaatgccaatccagacactggtggtcagagtttcttctttctcgttcagtgagatgaggttggttagggtgaccttgagggtgatggtgacagtgtcctcaggtctcctaactggccggcattctggatcataattgtcgaagagatggtgatacaggctaagctcttcattctttccctggcttctgccaaagagtgtcaggagaagcagggcaccaagcagagcccctgccatcctgatgtctggttctcag

SEQ ID NO: 265 - DNA, 1624 bp, Rattus norvegicus
  source 1..1624: mol_type = genomic DNA
gcttgtcaaagctcagaataacctgagaaccagacatcaggatgacaatggctctgcttgggaccctgcttctcctggcactctttggcagaagccaaggcaagaatgaagagctgagcctgtatcaccatctcttcgacaattatgacccagaatgccggccagttaggagacctgaggacactgtcaccatcaccctcaaggtcaccctaaccaacctcatctcactgaatgagaaagaagagactctgaccaccagtgtctggattggaattgaatggcaagactatcggctcaacttcagcaaggacgattttgcaggcgtagaaatcctgcgggtcccttccgaacatgtatggctgccagagattgttctggaaaacaatattgatgggcagtttggagtggcctacgactgcaatgttctggtctatgagggaggctctgtgagctggctgcccccagctatctaccgcagcacgtgcgcagtggaggtcacctatttcccctttgactggcagaactgctctctcatttttcgttcccagacctacaatgctgaagaggtggagttaatctttgcagtggatgacgatggcaatgccatcaacaaaattgacatcgacaccgcagcttttaccgagaatggagaatgggccattgactactgcccaggcatgattcgccattatgagggaggctccacagaagaccctggagaaactgacgtcatctacacgctcatcatccgtcgaaagccgcttttttacgtcattaacatcattgtgccttgtgtgctcatttctggcttggtgctactcgcttacttcctacctgcgcaggctggtggccagaaatgcacggtctctatcaacgtcctgctagcccagactgtcttcttgttcctaattgcccagaaaattccagagacttctctgagcgtgccgctgctgggcaggtatcttatttttgtcatggtggttgccacgctcattgtcatgaattgcgtcatcgtgctcaacgtatctttgcgaacgccaacgactcacgccacatcccctcggctgcgccagattttattagagctactgccgcgcctcctcggcttgagcccacccccagaggatcccggagctgcctcaccagcgaggcgtgcctcatctgtgggcattctgcttagagcggaggagctcatcttgaaaaagccgcggagcgaactcgtgtttgagggacagaggcatcggcatggaacttggaccgcagccgccctctgccagaacctgggtgctgcagcccctgaagtccgctgctgtgtggatgctgtgaactttgtggctgagagcacaagggaccaggaagccactggagaggaactgtctgactgggtgcgtatggggaaggccctcgacaatgtctgtttttgggcagcgttggtgctcttcagcgtcggttctacgctcatcttccttggaggttacttcaaccaagttcctgatctcccctacccaccgtgcatccaaccatgagcctgcaccaggacccacctcatccccaccccccaagaaagagattttgaaaacaggctgctgacaataaatctggtttgtgaacttgcaaaaaaaaa

SEQ ID NO: 266 - DNA, 1624 bp, Rattus norvegicus
  source 1..1624: mol_type = genomic DNA
tttttttttgcaagttcacaaaccagatttattgtcagcagcctgttttcaaaatctctttcttggggggtggggatgaggtgggtcctggtgcaggctcatggttggatgcacggtgggtaggggagatcaggaacttggttgaagtaacctccaaggaagatgagcgtagaaccgacgctgaagagcaccaacgctgcccaaaaacagacattgtcgagggccttccccatacgcacccagtcagacagttcctctccagtggcttcctggtcccttgtgctctcagccacaaagttcacagcatccacacagcagcggacttcaggggctgcagcacccaggttctggcagagggcggctgcggtccaagttccatgccgatgcctctgtccctcaaacacgagttcgctccgcggctttttcaagatgagctcctccgctctaagcagaatgcccacagatgaggcacgcctcgctggtgaggcagctccgggatcctctgggggtgggctcaagccgaggaggcgcggcagtagctctaataaaatctggcgcagccgaggggatgtggcgtgagtcgttggcgttcgcaaagatacgttgagcacgatgacgcaattcatgacaatgagcgtggcaaccaccatgacaaaaataagatacctgcccagcagcggcacgctcagagaagtctctggaattttctgggcaattaggaacaagaagacagtctgggctagcaggacgttgatagagaccgtgcatttctggccaccagcctgcgcaggtaggaagtaagcgagtagcaccaagccagaaatgagcacacaaggcacaatgatgttaatgacgtaaaaaagcggctttcgacggatgatgagcgtgtagatgacgtcagtttctccagggtcttctgtggagcctccctcataatggcgaatcatgcctgggcagtagtcaatggcccattctccattctcggtaaaagctgcggtgtcgatgtcaattttgttgatggcattgccatcgtcatccactgcaaagattaactccacctcttcagcattgtaggtctgggaacgaaaaatgagagagcagttctgccagtcaaaggggaaataggtgacctccactgcgcacgtgctgcggtagatagctgggggcagccagctcacagagcctccctcatagaccagaacattgcagtcgtaggccactccaaactgcccatcaatattgttttccagaacaatctctggcagccatacatgttcggaagggacccgcaggatttctacgcctgcaaaatcgtccttgctgaagttgagccgatagtcttgccattcaattccaatccagacactggtggtcagagtctcttctttctcattcagtgagatgaggttggttagggtgaccttgagggtgatggtgacagtgtcctcaggtctcctaactggccggcattctgggtcataattgtcgaagagatggtgatacaggctcagctcttcattcttgccttggcttctgccaaagagtgccaggagaagcagggtcccaagcagagccattgtcatcctgatgtctggttctcaggttattctgagctttgacaagc

SEQ ID NO: 267 - DNA, 2117 bp, Macaca fascicularis
  source 1..2117: mol_type = genomic DNA
tgccccctccaagccttccagagctcagaataatcctgagaaccaggcagcaggatggcaggggctcctcttggggtcctgctcctcttggggctcctcggcagtggtgtggggaagaacgaagaactgcgtctttatcaccatctcttcgacaactatgactcaggaagccggccagtgcgggagcctgaggatactgtcaccatcagcctcaaggtcaccctgacgaatctcatctcactgaatgaaaaagaggagactctcaccactaacgtctggatcggaatcgattggcaggattaccgactcaactacagcaaggacgactttgggggcatagaaattctgcgagtcccttcagaactcgtgtggctgccagagattgttctggaaaacaatattgatggccagttcggcgtggcctacgacgccaacgtgctggtctacgaggatggctccgtgacgtggttgcctccagccatctaccgcagcgtctgcgccgtggaggtcacctacttccccttcgattggcagaactgttcacttattttccgctctcagacgtacaatgccgaagaagtggagttcacctttgctgtggacgactccggcgagaccatcaacaagatcgacatcgacactgaggcctatactgagaacggcgagtgggccatcgattactgcccgggggtgatccgccgccacgacagtggcgccaccgacggcccaggggagactgacgtcgtctactcgctcatcatccgccggaagccgctcttctacgtcattaacatcatcgtgccctgtgtgctcatctcgggcctggtgcttctcgcctacttcctgccggcgcaggccggcggccagaaatgcacggtctccatcaacgtcctgctcgcccagaccgtcttcttgttcctcattgcccagaaaatcccagagacgtctctgagcgtgccgctcctgggcaggttccttattttcgtcatggtggtcgccacgctcattgtcatgaattgcgtcatcgtgctcaacgtgtccctgcggacgcccacgacccacagcatgtccccgcggctgcgctacgttctcctggagctgctgccgcgcctgctgggctccccgccgccccccgaggctccccgagccgcctcgcctccaaggcgggcgtcgtctgtgggcttattgctccgcgcggaggagctgatactaaaaaagccgcggagcgagctcgtgtttgaggggcagaggcaccggcacgggacctggacggctgccttctgccagagcctgggcgccgccgcccccgaggtccgctgctgtgtggatgccgtgaacttcgtggccgagagcacgagagatcaggaggccaccggcgagtgtccgactgggtgcgcatggggaatgcccttgacaacatctgcttctgggccgctctggtgctcttcagcgtgggctccagcctcatcttcctcggggcctacttcaaccgagtgcctgatctcccgtacccgccgtgtatccagccttagtgcgcaccgacttcaacttcccacccatctccagaagaatggtgtgtgcccaccccttggtgtgtgcaggcctggccccagtccaggggtcagcaggaggaaacgattcacacaggctctcaggtgccagtgttccagaaagcaaggactgcccttcattcagccttgctgacctcccagcctttctcaggcccagccccaggggactctggaggctgccagcttgtgagctgcctttgttcatctcatagccagacaggagacccctttgcaggacttgcacatagggaggctggagccaggaaaccctcttcttccctggtctggctctgctggagctggtgggaaccaaaccccttcagtgccggtggccctctggcccacaagtttagggctgaggctgccctggtcctcctgcagtcatttcttctaggttttcttggcccagcactgcccatcccaacccccatgaggctcgctcattgcagatcccagcccaccctgcccctttcttctgcaccctggaggctctctctgcctagtatacaggactgagagaaagcaataaaatggggcctgcatggt

SEQ ID NO: 268 - DNA, 2117 bp, Macaca fascicularis
  source 1..2117: mol_type = genomic DNA
accatgcaggccccattttattgctttctctcagtcctgtatactaggcagagagagcctccagggtgcagaagaaaggggcagggtgggctgggatctgcaatgagcgagcctcatgggggttgggatgggcagtgctgggccaagaaaacctagaagaaatgactgcaggaggaccagggcagcctcagccctaaacttgtgggccagagggccaccggcactgaaggggtttggttcccaccagctccagcagagccagaccagggaagaagagggtttcctggctccagcctccctatgtgcaagtcctgcaaaggggtctcctgtctggctatgagatgaacaaaggcagctcacaagctggcagcctccagagtcccctggggctgggcctgagaaaggctgggaggtcagcaaggctgaatgaagggcagtccttgctttctggaacactggcacctgagagcctgtgtgaatcgtttcctcctgctgacccctggactggggccaggcctgcacacaccaaggggtgggcacacaccattcttctggagatgggtgggaagttgaagtcggtgcgcactaaggctggatacacggcgggtacgggagatcaggcactcggttgaagtaggccccgaggaagatgaggctggagcccacgctgaagagcaccagagcggcccagaagcagatgttgtcaagggcattccccatgcgcacccagtcggacactcgccggtggcctcctgatctctcgtgctctcggccacgaagttcacggcatccacacagcagcggacctcgggggcggcggcgcccaggctctggcagaaggcagccgtccaggtcccgtgccggtgcctctgcccctcaaacacgagctcgctccgcggcttttttagtatcagctcctccgcgcggagcaataagcccacagacgacgcccgccttggaggcgaggcggctcggggagcctcggggggcggcggggagcccagcaggcgcggcagcagctccaggagaacgtagcgcagccgcggggacatgctgtgggtcgtgggcgtccgcagggacacgttgagcacgatgacgcaattcatgacaatgagcgtggcgaccaccatgacgaaaataaggaacctgcccaggagcggcacgctcagagacgtctctgggattttctgggcaatgaggaacaagaagacggtctgggcgagcaggacgttgatggagaccgtgcatttctggccgccggcctgcgccggcaggaagtaggcgagaagcaccaggcccgagatgagcacacagggcacgatgatgttaatgacgtagaagagcggcttccggcggatgatgagcgagtagacgacgtcagtctcccctgggccgtcggtggcgccactgtcgtggcggcggatcacccccgggcagtaatcgatggcccactcgccgttctcagtataggcctcagtgtcgatgtcgatcttgttgatggtctcgccggagtcgtccacagcaaaggtgaactccacttcttcggcattgtacgtctgagagcggaaaataagtgaacagttctgccaatcgaaggggaagtaggtgacctccacggcgcagacgctgcggtagatggctggaggcaaccacgtcacggagccatcctcgtagaccagcacgttggcgtcgtaggccacgccgaactggccatcaatattgttttccagaacaatctctggcagccacacgagttctgaagggactcgcagaatttctatgcccccaaagtcgtccttgctgtagttgagtcggtaatcctgccaatcgattccgatccagacgttagtggtgagagtctcctctttttcattcagtgagatgagattcgtcagggtgaccttgaggctgatggtgacagtatcctcaggctcccgcactggccggcttcctgagtcatagttgtcgaagagatggtgataaagacgcagttcttcgttcttccccacaccactgccgaggagccccaagaggagcaggaccccaagaggagcccctgccatcctgctgcctggttctcaggattattctgagctctggaaggcttggagggggca

SEQ ID NO: 269 - DNA, 2213 bp, Macaca mulatta
  source 1..2213: mol_type = genomic DNA
tgccccctccaagccttccagagctcagaataatcctgagaaccaggcagcaggatggcaggggctcctcttggggtcctgctcctcttggggctcctcggcagtggtgtggggaagaacgaagaactgcgtctttatcaccatctcttcgacaactatgactcaggaagccggccagtgcgggagcctgaggatactgtcaccatcagcctcaaggtcaccctgacgaatctcatctcactgaatgaaaaagaggagactctcaccactaacgtctggatcggaatcgattggcaggattaccgactcaactacagcaaggacgactttgggggcatagaaattctgcgagtcccttcagaactcgtgtggctgccagagattgttctggaaaacaatattgatggccagttcggcgtggcctacgacgtcaacgtgctggtctacgaggatggctccgtgacgtggttgcctccggccatctaccgcagcgtctgcgccgtggaggtcacctacttccccttcgattggcagaactgttcgcttattttccgctctcagacgtacaatgccgaagaagtggagttcacctttgctgtggacgactccggcgagaccatcaacaagatcgacatcgacactgaggcctatactgagaacggcgagtgggccatcgattactgcccgggggtgatccgccgccacgacagtggcgccaccgacggcccaggggagactgacgtcgtctactcgctcatcatccgccggaagccgctcttctacgtcattaacatcatcgtgccctgtgtgctcatctcgggcctggtgcttctcgcctacttcctgccggcgcaggccggcggccagaaatgcacggtctccatcaacgtcctgctcgcccagaccgtcttcttgttcctcattgcccagaaaatcccagagacgtctctgagcgtgccgctcctgggcaggttccttattttcgtcatggtggtcgccacgctcattgtcatgaattgcgtcatcgtgctcaacgtgtccctgcggacgcccacgacccacagcatgtccccgcggctgcgccacgttctcctggagctgctgccgcgcctgctgggctccccgccgccccccgaggctccccgagccgcctcgcctccaaggcgggcgtcgtctgtgggcttattgctccgcgcggaggagctgatactaaaaaagccgcggagcgagctcgtgtttgaggggcagaggcaccggcacgggacctggacggctgccttctgccagagcctgggcgccgccgcccccgaggtccgctgctgtgtggatgccgtgaacttcgtggccgagagcacgagagatcaggaggccaccggcgaggaagtgtccgactgggtgcgcatggggaatgcccttgacaacatctgcttctgggccgctctggtgctcttcagcgtgggctccagcctcatcttcctcggggcctacttcaaccgagtgcctgatctcccgtacccgccgtgtatccagccttagtgcgcaccgacttcaacttcccacccatctccagtaggaaactgattttgaaaaaggctgccgccaccgcggcattctgatcccttcccacggctgatcaatctgtattttgtgaactttacaggaagaatggtgtgtgcccaccccttggtgtgtgtaggcctggccccagtccaggggtcagcaggaggaaacgattcacacaggctctcaggtgccagtgttccagaaagcaaggactgcccttcattcagccttgctgacctcccagcctttctcaggcccagccccaggggactctggaggctgccagcttgtgagctgcctttgttcatctcagagccagacaggagacccctttgcaggacttgcacatagggaggctggagccaggaaaccctcttcttccctggtctggctctgctggagctggtgggaaccaaaccccttcagtgccggtggccctctggcccacaagtttagggctgaggctgccctggtcctcccgcagtcatttcttctaggttttcttggcccagcactgcccatcccaacccccatgaggctcgctcattgcagatcccagcccaccctgcccctttcttctgcaccctggaggctctctctgcctagtatacaggactgagagaaagcaataaaatggggcctgcatggtg

SEQ ID NO: 270 - DNA, 2213 bp, Macaca mulatta
  source 1..2213: mol_type = genomic DNA
caccatgcaggccccattttattgctttctctcagtcctgtatactaggcagagagagcctccagggtgcagaagaaaggggcagggtgggctgggatctgcaatgagcgagcctcatgggggttgggatgggcagtgctgggccaagaaaacctagaagaaatgactgcgggaggaccagggcagcctcagccctaaacttgtgggccagagggccaccggcactgaaggggtttggttcccaccagctccagcagagccagaccagggaagaagagggtttcctggctccagcctccctatgtgcaagtcctgcaaaggggtctcctgtctggctctgagatgaacaaaggcagctcacaagctggcagcctccagagtcccctggggctgggcctgagaaaggctgggaggtcagcaaggctgaatgaagggcagtccttgctttctggaacactggcacctgagagcctgtgtgaatcgtttcctcctgctgacccctggactggggccaggcctacacacaccaaggggtgggcacacaccattcttcctgtaaagttcacaaaatacagattgatcagccgtgggaagggatcagaatgccgcggtggcggcagcctttttcaaaatcagtttcctactggagatgggtgggaagttgaagtcggtgcgcactaaggctggatacacggcgggtacgggagatcaggcactcggttgaagtaggccccgaggaagatgaggctggagcccacgctgaagagcaccagagcggcccagaagcagatgttgtcaagggcattccccatgcgcacccagtcggacacttcctcgccggtggcctcctgatctctcgtgctctcggccacgaagttcacggcatccacacagcagcggacctcgggggcggcggcgcccaggctctggcagaaggcagccgtccaggtcccgtgccggtgcctctgcccctcaaacacgagctcgctccgcggcttttttagtatcagctcctccgcgcggagcaataagcccacagacgacgcccgccttggaggcgaggcggctcggggagcctcggggggcggcggggagcccagcaggcgcggcagcagctccaggagaacgtggcgcagccgcggggacatgctgtgggtcgtgggcgtccgcagggacacgttgagcacgatgacgcaattcatgacaatgagcgtggcgaccaccatgacgaaaataaggaacctgcccaggagcggcacgctcagagacgtctctgggattttctgggcaatgaggaacaagaagacggtctgggcgagcaggacgttgatggagaccgtgcatttctggccgccggcctgcgccggcaggaagtaggcgagaagcaccaggcccgagatgagcacacagggcacgatgatgttaatgacgtagaagagcggcttccggcggatgatgagcgagtagacgacgtcagtctcccctgggccgtcggtggcgccactgtcgtggcggcggatcacccccgggcagtaatcgatggcccactcgccgttctcagtataggcctcagtgtcgatgtcgatcttgttgatggtctcgccggagtcgtccacagcaaaggtgaactccacttcttcggcattgtacgtctgagagcggaaaataagcgaacagttctgccaatcgaaggggaagtaggtgacctccacggcgcagacgctgcggtagatggccggaggcaaccacgtcacggagccatcctcgtagaccagcacgttgacgtcgtaggccacgccgaactggccatcaatattgttttccagaacaatctctggcagccacacgagttctgaagggactcgcagaatttctatgcccccaaagtcgtccttgctgtagttgagtcggtaatcctgccaatcgattccgatccagacgttagtggtgagagtctcctctttttcattcagtgagatgagattcgtcagggtgaccttgaggctgatggtgacagtatcctcaggctcccgcactggccggcttcctgagtcatagttgtcgaagagatggtgataaagacgcagttcttcgttcttccccacaccactgccgaggagccccaagaggagcaggaccccaagaggagcccctgccatcctgctgcctggttctcaggattattctgagctctggaaggcttggagggggca

SEQ ID NO: 271 - DNA, 4009 bp, Homo sapiens
  source 1..4009: mol_type = genomic DNA
gccccagaccttggagctgttgtcccacccctgtcactgcagagagctgaggcaccatgcatgggggccaggggccgctgctcctcctgctgctgctggctgtctgcctgggggcccagggccggaaccaggaggagcgcctgctcgcagacctgatgcaaaactacgaccccaacctgcggcccgcggaacgagactcggatgtggtcaatgtcagcctgaagctaaccctcaccaacctcatctccctgaacgagcgagaggaagccctcaccaccaatgtctggatagagatgcagtggtgcgactatcgcctgcgctgggatccgcgagactacgaaggcctgtgggtgctgagggtgccgtccaccatggtgtggcggccggatatcgtgctggagaacaacgtggacggtgtcttcgaggtggccctctactgcaatgtgctcgtgtcccctgacggctgtatctactggctgccgcctgccatcttccgttccgcctgctctatctcagtcacctacttccccttcgactggcagaactgctcccttatcttccagtcccagacttacagcaccaatgagattgatctgcagctgagtcaggaagatggccagaccatcgagtggattttcattgaccctgaggccttcacagagaatggggagtgggccatccagcaccgaccagccaagatgctcctggacccagcggcgccagcccaggaagcaggccaccagaaggtggtgttctacctgctcatccagcgcaagcccctcttctacgtcatcaacatcatcgccccctgtgtgctcatctcctctgtcgccatcctcatccacttccttcctgccaaggctgggggccagaagtgtaccgtcgccatcaacgtgctcctggcccagactgtcttcctcttccttgtggccaagaaggtgcctgaaacctcccaggcggtgccactcatcagcaagtacctgaccttcctcctggtggtgaccatcctcattgtcgtgaatgctgtggttgtgctcaatgtctccttgcggtctccacacacacactccatggcccgaggggtccgcaaggtgttcctgaggctcttgccccagctgctgaggatgcacgttcgcccgctggccccggcagctgtgcaggacacccagtcccggctacagaatggctcctcgggatggtcgatcacaactggggaggaggtggccctctgcctgcctcgcagtgaactcctcttccagcagtggcagcggcaagggctggtggcggcagcgctggagaagctagagaaaggcccggagttagggctgagccagttctgtggcagcctgaagcaggctgccccagccatccaggcctgtgtggaagcctgcaacctcattgcctgtgcccggcaccagcagagtcactttgacaatgggaatgaggagtggttcctggtgggccgagtgctggaccgcgtctgcttcctggccatgctctcgctcttcatctgtggcacagctggcatcttcctcatggcccactacaaccgggtgccggccctgccattccctggagatccacgcccctacctgccctcaccagactgagccaaccaaccactgtggggcatgtgggagtcacacacgtgggtcacactgagtcttatcagccacgttctcctactgaggtcctaagtgtgctctttgggaagtgcccttcaggactgtgtgagccaaacagccctgagaaaagctggggaaacagtctgagctggagtccgagagtggttgggggtgggccgtggctagtgtcctgctgcagtcagcacacacgtgggattggctagctcatcctggcaccagccacccctccactcagtgcactcccctcacttaggcaaagcattattcattcccatcagtctgaagcccgaaggactgttttgtataataccttcggacttgggactggctccccttttacaagttctccctgaaagagggcagtcacaagaggtgtgaagagtagcagccgatgctctctccaaagcagggcagcagcccataccagctggcatctcccccccgtgccttctgggtacaataagcacccaattctcaacagccccagtggcctttccattcatgtgcatttttctgccactgaccacaagacgatttcctgagttttgtaatcctcttttttttttttttttttttagtttttgatgtgttgttgttgttttgtttagttttgagatagagcctcactcttgtcatgcaagttggagtggagtggcatgatcatggctcactgcagcctcaacctccagggctcaagcaatgctcctgcctcagcctcccaagtagctggcaccacaggcatgcaccactacacccagctacttttaaatttttagtagagatgaggttttgctatgttgcctaggttggtcttgaactcctgagctcaagtgatcctcccacttgagtcttgggattacaggcataagccactgtacctggcctcctttttaattaagagctcctcacagcagtatggataagcaagagtcattattccccatgttatataggcaaattgagcctagagtaagcgggactccacacaacagtggtggttaaacaaggtttgaagtccagaattcctgactctgacccaatctgacactctaagattctacggcctgaaaaacaggcccttcttcccaaaggatggttaagacaaggaagagctaggcaagaggaggtgtggagttaacagagagccactgagctcttcattccaggaggagactttgactggcctcccttgaccccactaatcaggtagtaaggctggggtcttcctgggggagaggcaaggtcctgctctgagattacagccggcacacgagtttggctggtaaccaggggacacccttgggcaagtcacctatgctccctgaggctgttccctcatctgtaaataaggtgcaaaaaataatccattcctggccaggtgtggtggctcacacctgcaatcccagcaccttgggaggacaaggtgggtggactgcttgagctcaggagcccacgaacccaggaacccagcctgggcaacatggggacacccggcctctaccaaaaaatacaaaacttagctgggcgtggtgatgcatgcctgtagtcccagttactcgggaggctgaggtgggaggatcgcttgagcccaggaggtctaggctgcagtgagctgtgatcatgtgactgcactccagcctgatgacacagtaagaccctgtctcaaaaaaaataaaaaaattacaaaactgaaaaaagaaaagtgaaagtgccacataaaggcctgacgacaggatatgctggcaggaggggaccttggaaatatgccctccctccaagcacaggattgctgtctttgggattcaatcaccagcaagttcgtattatttactccagtgtgagtctgtgtctgtgcatgcacagtgtgtttgaagcaagagcagagtcagagctatagagaactagaggagttagggagagtgggggagaacttcaatcagggagggaatctgatgacagtggggccatttccggttcccaccagccccttactagttgtgtatctggcacaagtctctcaacctctctgaaagcctcagagggcagaggattagctccttgtacacaataaacactcaaatgttaacattagctgccattactataagttactgtctcatgggatccatacagcaacctaaggaggtaggtcgaggcatacctcaaagacattgcaggttcagttccagaccaacacaagaaagcaagtcacatgaatgtttttggtttcccaatgcatataaaagttatgtttacactatactgtagaccagcaagagtgcaatagcattgtctaataaaacaatatacatacctaaatttaaaaatactttattgctaaaaaatgctgattatcaatctga

SEQ ID NO: 272 - DNA, 4009 bp, Homo sapiens
  source 1..4009: mol_type = genomic DNA
tcagattgataatcagcattttttagcaataaagtatttttaaatttaggtatgtatattgttttattagacaatgctattgcactcttgctggtctacagtatagtgtaaacataacttttatatgcattgggaaaccaaaaacattcatgtgacttgctttcttgtgttggtctggaactgaacctgcaatgtctttgaggtatgcctcgacctacctccttaggttgctgtatggatcccatgagacagtaacttatagtaatggcagctaatgttaacatttgagtgtttattgtgtacaaggagctaatcctctgccctctgaggctttcagagaggttgagagacttgtgccagatacacaactagtaaggggctggtgggaaccggaaatggccccactgtcatcagattccctccctgattgaagttctcccccactctccctaactcctctagttctctatagctctgactctgctcttgcttcaaacacactgtgcatgcacagacacagactcacactggagtaaataatacgaacttgctggtgattgaatcccaaagacagcaatcctgtgcttggagggagggcatatttccaaggtcccctcctgccagcatatcctgtcgtcaggcctttatgtggcactttcacttttcttttttcagttttgtaatttttttattttttttgagacagggtcttactgtgtcatcaggctggagtgcagtcacatgatcacagctcactgcagcctagacctcctgggctcaagcgatcctcccacctcagcctcccgagtaactgggactacaggcatgcatcaccacgcccagctaagttttgtattttttggtagaggccgggtgtccccatgttgcccaggctgggttcctgggttcgtgggctcctgagctcaagcagtccacccaccttgtcctcccaaggtgctgggattgcaggtgtgagccaccacacctggccaggaatggattattttttgcaccttatttacagatgagggaacagcctcagggagcataggtgacttgcccaagggtgtcccctggttaccagccaaactcgtgtgccggctgtaatctcagagcaggaccttgcctctcccccaggaagaccccagccttactacctgattagtggggtcaagggaggccagtcaaagtctcctcctggaatgaagagctcagtggctctctgttaactccacacctcctcttgcctagctcttccttgtcttaaccatcctttgggaagaagggcctgtttttcaggccgtagaatcttagagtgtcagattgggtcagagtcaggaattctggacttcaaaccttgtttaaccaccactgttgtgtggagtcccgcttactctaggctcaatttgcctatataacatggggaataatgactcttgcttatccatactgctgtgaggagctcttaattaaaaaggaggccaggtacagtggcttatgcctgtaatcccaagactcaagtgggaggatcacttgagctcaggagttcaagaccaacctaggcaacatagcaaaacctcatctctactaaaaatttaaaagtagctgggtgtagtggtgcatgcctgtggtgccagctacttgggaggctgaggcaggagcattgcttgagccctggaggttgaggctgcagtgagccatgatcatgccactccactccaacttgcatgacaagagtgaggctctatctcaaaactaaacaaaacaacaacaacacatcaaaaactaaaaaaaaaaaaaaaaaaaagaggattacaaaactcaggaaatcgtcttgtggtcagtggcagaaaaatgcacatgaatggaaaggccactggggctgttgagaattgggtgcttattgtacccagaaggcacgggggggagatgccagctggtatgggctgctgccctgctttggagagagcatcggctgctactcttcacacctcttgtgactgccctctttcagggagaacttgtaaaaggggagccagtcccaagtccgaaggtattatacaaaacagtccttcgggcttcagactgatgggaatgaataatgctttgcctaagtgaggggagtgcactgagtggaggggtggctggtgccaggatgagctagccaatcccacgtgtgtgctgactgcagcaggacactagccacggcccacccccaaccactctcggactccagctcagactgtttccccagcttttctcagggctgtttggctcacacagtcctgaagggcacttcccaaagagcacacttaggacctcagtaggagaacgtggctgataagactcagtgtgacccacgtgtgtgactcccacatgccccacagtggttggttggctcagtctggtgagggcaggtaggggcgtggatctccagggaatggcagggccggcacccggttgtagtgggccatgaggaagatgccagctgtgccacagatgaagagcgagagcatggccaggaagcagacgcggtccagcactcggcccaccaggaaccactcctcattcccattgtcaaagtgactctgctggtgccgggcacaggcaatgaggttgcaggcttccacacaggcctggatggctggggcagcctgcttcaggctgccacagaactggctcagccctaactccgggcctttctctagcttctccagcgctgccgccaccagcccttgccgctgccactgctggaagaggagttcactgcgaggcaggcagagggccacctcctccccagttgtgatcgaccatcccgaggagccattctgtagccgggactgggtgtcctgcacagctgccggggccagcgggcgaacgtgcatcctcagcagctggggcaagagcctcaggaacaccttgcggacccctcgggccatggagtgtgtgtgtggagaccgcaaggagacattgagcacaaccacagcattcacgacaatgaggatggtcaccaccaggaggaaggtcaggtacttgctgatgagtggcaccgcctgggaggtttcaggcaccttcttggccacaaggaagaggaagacagtctgggccaggagcacgttgatggcgacggtacacttctggcccccagccttggcaggaaggaagtggatgaggatggcgacagaggagatgagcacacagggggcgatgatgttgatgacgtagaagaggggcttgcgctggatgagcaggtagaacaccaccttctggtggcctgcttcctgggctggcgccgctgggtccaggagcatcttggctggtcggtgctggatggcccactccccattctctgtgaaggcctcagggtcaatgaaaatccactcgatggtctggccatcttcctgactcagctgcagatcaatctcattggtgctgtaagtctgggactggaagataagggagcagttctgccagtcgaaggggaagtaggtgactgagatagagcaggcggaacggaagatggcaggcggcagccagtagatacagccgtcaggggacacgagcacattgcagtagagggccacctcgaagacaccgtccacgttgttctccagcacgatatccggccgccacaccatggtggacggcaccctcagcacccacaggccttcgtagtctcgcggatcccagcgcaggcgatagtcgcaccactgcatctctatccagacattggtggtgagggcttcctctcgctcgttcagggagatgaggttggtgagggttagcttcaggctgacattgaccacatccgagtctcgttccgcgggccgcaggttggggtcgtagttttgcatcaggtctgcgagcaggcgctcctcctggttccggccctgggcccccaggcagacagccagcagcagcaggaggagcagcggcccctggcccccatgcatggtgcctcagctctctgcagtgacaggggtgggacaacagctccaaggtctggggc

SEQ ID NO: 273 - DNA, 1921 bp, Mus musculus
  source 1..1921: mol_type = genomic DNA
agaactgaggcaccatgcaagggggccagagacctcagctcctcttgctgctgttggctgtctgcctgggggcccagagccgcaaccaagaggagcgtctgcttgcggacctgatgcgaaactacgacccccacctgcggccggctgagcgcgactcagatgtggtcaatgtcagcctgaagcttaccttgaccaacctcatctccctgaatgaacgagaggaggccctcacaactaacgtctggatagagatgcaatggtgcgactatcgcctgcgctgggacccaaaagactacgaaggcctgtggatattgagggtgccatctactatggtctggcggccagatatcgtcctggagaacaatgtggacggtgtcttcgaggtggctctctactgcaatgtcctcgtgtcccccgacggttgtatctactggctgccgcctgccatcttccgctcctcctgctccatctctgtcacctacttccccttcgattggcagaactgttccctcgtcttccaatcccagacttacagcaccagtgagatcaacttgcagctgagccaggaggatgggcaagccattgagtggatcttcattgacccggaggctttcacagagaatggggagtgggccatccggcaccgaccggctaaaatgctcctggactccgtggctcctgcagaggaggcgggccaccagaaggtggtgttctacctgcttatccagcgcaagcccctcttctacgtcatcaacatcatcgccccctgtgtgctcatctcctcagtcgccatcctcatctacttccttcctgctaaggcgggcgggcagaaatgcacagtggccaccaacgtgctcctggcccagactgtcttccttttccttgtggctaagaaggtgcctgagacctcccaggcagtgccactcatcagcaagtacctgaccttcctcatggtggtgaccatcctcatcgtcgtgaactctgtggtcgtgctcaatgtgtccttgcggtccccccacacacactccatggcccgtggggtccgcaaggtgttcctgaggctcctgccccagctgttacggatgcatgtgcgcccactagctccagctgctgtccaggatgcccggttccgactccagaatggctcttcctcagggtggcccatcatggctcgagaggaaggggacctctgtctgcctcgaagcgaactcctctttaggcaaaggcagcgcaatggattagtgcaggcagtattggagaagctagagaatggtccagaagtgaggcagagccaggagttctgtggcagcctgaagcaagcctccccagccatccaggcctgtgtggatgcctgtaacctcatggctcgtgcccgacgccagcagagtcactttgacagtgggaacgaggagtggttgctggtgggccgagtgctggaccgagtctgcttcctagccatgctctccctcttcatctgtggcactgctggcatcttcctcatggcccactacaaccaagtgcctgacctgccgttccccggagacccccgcccctacctgcctttgccagactgagccaaccaatccctcctgggccctggagtcagctatgagggccatgctgtttgtagagctgtatcccgtgttgatgctgagtgtgctcttggggaaatacccaaggcttcctgggagaagatagagaaataaagagacagagggggatttctgcagtggttggtgatgggtatggtcacatgactttgagcagttctgataggtcactttgaagccctaagagctctgcctttcctgatgtcattgactgggcaaggttttaccctttgaggcctgagaaaatttcctcctgccattttgtaagatttatttctattatttctaactatatgtatgtatgtacgtac

SEQ ID NO: 274 - DNA, 1921 bp, Mus musculus
  source 1..1921: mol_type = genomic DNA
gtacgtacatacatacatatagttagaaataatagaaataaatcttacaaaatggcaggaggaaattttctcaggcctcaaagggtaaaaccttgcccagtcaatgacatcaggaaaggcagagctcttagggcttcaaagtgacctatcagaactgctcaaagtcatgtgaccatacccatcaccaaccactgcagaaatccccctctgtctctttatttctctatcttctcccaggaagccttgggtatttccccaagagcacactcagcatcaacacgggatacagctctacaaacagcatggccctcatagctgactccagggcccaggagggattggttggctcagtctggcaaaggcaggtaggggcgggggtctccggggaacggcaggtcaggcacttggttgtagtgggccatgaggaagatgccagcagtgccacagatgaagagggagagcatggctaggaagcagactcggtccagcactcggcccaccagcaaccactcctcgttcccactgtcaaagtgactctgctggcgtcgggcacgagccatgaggttacaggcatccacacaggcctggatggctggggaggcttgcttcaggctgccacagaactcctggctctgcctcacttctggaccattctctagcttctccaatactgcctgcactaatccattgcgctgcctttgcctaaagaggagttcgcttcgaggcagacagaggtccccttcctctcgagccatgatgggccaccctgaggaagagccattctggagtcggaaccgggcatcctggacagcagctggagctagtgggcgcacatgcatccgtaacagctggggcaggagcctcaggaacaccttgcggaccccacgggccatggagtgtgtgtggggggaccgcaaggacacattgagcacgaccacagagttcacgacgatgaggatggtcaccaccatgaggaaggtcaggtacttgctgatgagtggcactgcctgggaggtctcaggcaccttcttagccacaaggaaaaggaagacagtctgggccaggagcacgttggtggccactgtgcatttctgcccgcccgccttagcaggaaggaagtagatgaggatggcgactgaggagatgagcacacagggggcgatgatgttgatgacgtagaagaggggcttgcgctggataagcaggtagaacaccaccttctggtggcccgcctcctctgcaggagccacggagtccaggagcattttagccggtcggtgccggatggcccactccccattctctgtgaaagcctccgggtcaatgaagatccactcaatggcttgcccatcctcctggctcagctgcaagttgatctcactggtgctgtaagtctgggattggaagacgagggaacagttctgccaatcgaaggggaagtaggtgacagagatggagcaggaggagcggaagatggcaggcggcagccagtagatacaaccgtcgggggacacgaggacattgcagtagagagccacctcgaagacaccgtccacattgttctccaggacgatatctggccgccagaccatagtagatggcaccctcaatatccacaggccttcgtagtcttttgggtcccagcgcaggcgatagtcgcaccattgcatctctatccagacgttagttgtgagggcctcctctcgttcattcagggagatgaggttggtcaaggtaagcttcaggctgacattgaccacatctgagtcgcgctcagccggccgcaggtgggggtcgtagtttcgcatcaggtccgcaagcagacgctcctcttggttgcggctctgggcccccaggcagacagccaacagcagcaagaggagctgaggtctctggcccccttgcatggtgcctcagttct

SEQ ID NO: 275 - DNA, 1832 bp, Rattus norvegicus
  source 1..1832: mol_type = genomic DNA
ctggtggggcctgatagagctggcagggttggctgggaggggcgtgtaggctgacacaggacactccaaccccccaaccccaagacctgtaaagctactgtcctactcatcactgggcagaactgaggcaccatgcacgggggccagggacctcagctcctcttgctgctgctggctacctgcctgggggcccagagccgcaaccaagaggagcggctgcttgcggacctgatgcgcaactacgacccccatctgcggccggctgagcgtgactcagatgtggttaatgtcagcctgaagcttaccttaaccaacctcatctcccttaatgagcgagaggaggccctcacgactaatgtctggatagaaatgcaatggtgcgactatcgcctacgctgggacccgaaagactacgaaggcctgtggatattgagggtgccatctaccatggtctggcagcccgatatcgtgctgggaaacaatgtggacggtgtcttcgaggtggcgctctactgcaatgtgctcgtgtcccctgatggttgtatctactggctgccgcctgccatcttccgctcctcctgctccatctctgtcacctacttccccttcgattggcagaactgctccctcgtcttccagtcccagacttacagcaccagcgagatcaacttgcagctgagccaggaggatgggcaagccattgagtggatcttcattgaccccgaggctttcacagagaatggggaatgggccatccggcatcgaccagccaaaatgctactggatcctgtgactccagcagaggaggcaggccaccagaaggtggtgttctacctgctcatccaacgcaagcccctcttctatgtcatcaacatcatcgtcccctgtgtgctcatctcctcagttgcgatcctcatctacttccttcctgccaaggcgggcggccagaagtgcacagtggccaccaacgtgctcctggcccagaccgtcttccttttcctcgtggctaagaaggtgcctgagacctcccaggcagtgccgctcatcagcaagtacctgaccttcctcatggtggtgaccatcctcatcgttgtgaactctgtggtcgtgctcaatgtgtccttgaggtccccacacacacactccatggcccggggggtccgcaaggtgtttttgaggctcctgccccagctgttacggatgcatgtgcatcctcgggctcctgctgctgtccaggatgcccggctgcgactccagaatggctcttcctcagggtggcccatcatgactcgagaggaaggggacctctgtttgcctcgaagcgaactcctctttaggcaaaggcagcgcaatggattggtgcaggcagtactggagaagttagagaatggtccagaaatgaggcagagccaggagttctgtggcagcctgaagcaagcctccccggccatccaggcctgtgtggatgcctgtaacctcatggcgcgtgcccgacaccagcaaagtcactttgacagtgggaatgaggagtggttgctggtgggccgagtgctggaccgagtctgtttcctagccatgctctccctcttcatctgcggcactgctggcatcttcctcatggcccactacaaccaggtgcctgacctgccattccctggagacccccgcccctacttgcctttgccagactgagccaaccaatcactcctgcgccctggagtcagccatgtgggtcatgctgtttatggagctgtattctctgttgatcctgatgggctcctggggagcaatcattcttgggagaagatagaggaataaaggaataggaataa

SEQ ID NO: 276 - DNA, 1832 bp, Rattus norvegicus
  source 1..1832: mol_type = genomic DNA
ttattcctattcctttattcctctatcttctcccaagaatgattgctccccaggagcccatcaggatcaacagagaatacagctccataaacagcatgacccacatggctgactccagggcgcaggagtgattggttggctcagtctggcaaaggcaagtaggggcgggggtctccagggaatggcaggtcaggcacctggttgtagtgggccatgaggaagatgccagcagtgccgcagatgaagagggagagcatggctaggaaacagactcggtccagcactcggcccaccagcaaccactcctcattcccactgtcaaagtgactttgctggtgtcgggcacgcgccatgaggttacaggcatccacacaggcctggatggccggggaggcttgcttcaggctgccacagaactcctggctctgcctcatttctggaccattctctaacttctccagtactgcctgcaccaatccattgcgctgcctttgcctaaagaggagttcgcttcgaggcaaacagaggtccccttcctctcgagtcatgatgggccaccctgaggaagagccattctggagtcgcagccgggcatcctggacagcagcaggagcccgaggatgcacatgcatccgtaacagctggggcaggagcctcaaaaacaccttgcggaccccccgggccatggagtgtgtgtgtggggacctcaaggacacattgagcacgaccacagagttcacaacgatgaggatggtcaccaccatgaggaaggtcaggtacttgctgatgagcggcactgcctgggaggtctcaggcaccttcttagccacgaggaaaaggaagacggtctgggccaggagcacgttggtggccactgtgcacttctggccgcccgccttggcaggaaggaagtagatgaggatcgcaactgaggagatgagcacacaggggacgatgatgttgatgacatagaagaggggcttgcgttggatgagcaggtagaacaccaccttctggtggcctgcctcctctgctggagtcacaggatccagtagcattttggctggtcgatgccggatggcccattccccattctctgtgaaagcctcggggtcaatgaagatccactcaatggcttgcccatcctcctggctcagctgcaagttgatctcgctggtgctgtaagtctgggactggaagacgagggagcagttctgccaatcgaaggggaagtaggtgacagagatggagcaggaggagcggaagatggcaggcggcagccagtagatacaaccatcaggggacacgagcacattgcagtagagcgccacctcgaagacaccgtccacattgtttcccagcacgatatcgggctgccagaccatggtagatggcaccctcaatatccacaggccttcgtagtctttcgggtcccagcgtaggcgatagtcgcaccattgcatttctatccagacattagtcgtgagggcctcctctcgctcattaagggagatgaggttggttaaggtaagcttcaggctgacattaaccacatctgagtcacgctcagccggccgcagatgggggtcgtagttgcgcatcaggtccgcaagcagccgctcctcttggttgcggctctgggcccccaggcaggtagccagcagcagcaagaggagctgaggtccctggcccccgtgcatggtgcctcagttctgcccagtgatgagtaggacagtagctttacaggtcttggggttggggggttggagtgtcctgtgtcagcctacacgcccctcccagccaaccctgccagctctatcaggccccaccag

SEQ ID NO: 277 - DNA, 2338 bp, Macaca fascicularis
  source 1..2338: mol_type = genomic DNA
tgacacccagagcccgtctctctctgccccagaccttggagctgttgtcccacccatcactgcagagagccgaggcgccatgcatgggggccaggggctgctgctcctcctgccgctgctggctgtctgcctgggggtccagggccggaatcaggaggagcgcctgctcgcagacctgatgcaaaactacgaccccaacctgcgacctgcggaacgagactcggatgtggtcaacgtcagcctgaagctaaccctcaccaacctcatctccctgaacgagcgagaggaagccctcaccaccaacgtctggatagagatgcagtggtgtgactatcgcctgcgctgggatccgcgagactacgaaggcctgtgggtgctgagggtgccgtccaccatggtgtggcggccggatatcgtgctggagaacaacgtggacggtgtcttcgaggtggccctctactgcaatgtgctcgtgtcccctgacggctgtatctactggctgccgcccgccatcttccgttccgcctgctctatctcagtcacctacttccccttcgactggcagaactgctcccttatcttccagtcccagacttacagcaccaatgagattgatctgcagctgagtcaggaagatggccagaccatcgagtggattttcattgaccctgaggccttcacagagaatggggagtgggccatccagcaccgaccagccaagatgctcctggacccagcggcaccagcccaggaggcaggccaccagaaggtggtgttctacctgctcatccagcgcaagcccctcttctacatcatcaacatcatcgccccctgcgtgctcatctcctccgttgccatcctcatctacttccttcctgccaaggctgggggccagaagtgtaccgtcgccatcaacgtgctcctggcccagactgtcttccttttccttgtggccaagaaggtgcctgaaacctcccaggcggtgccactcattagcaagtacctgaccttcctcctggtggtgaccatcctcattgtcgtgaatgctgtggtcgtgctcaacgtgtccttgcggtccccacacacacactccatggcccaaggggtccgcaaggtgttcctgaggctcttgccccagctgctgaggatgcacgttcgcccgctggccccggcagctgtgcaggacacccagccccggctacagaatggctcctcgggatggtcgatcacaactggggaggtggccctctgcctgcctcgcagtgaactcctcttccagcagtggcagcagcaagggctggtggcagcagcgctggagaagctagagaaaggcccggagttagagccgagccagttctgtggcagcctgaagcaggctgcgccagccatccaggcctgcgtggaagcctgcaacctcattgcccgtgcccggcaccagcagagtcactttgacaatgggaatgaggagtggttcctggtgggccgagtgttggaccgcgtctgcttcctggccatgctctcgctcttcgtctgtggcacggctggcatcttcctcatggcccactacaaccgggtgccagccctgccattccctggagatccacgctcctacctgccctcaccagactgagccaaccaaccaccgcggggcatgtgggagtcacacacgtgggtcacactgagtcttatcagccacgttctcctactgaggtcctaagtgtactctttgggaagtgcccttcagggctgtgtgagccaaacagccctaagaaaagctggggaaagggtctgagctggagtccgggagtggttgggggtaggctctggttagtgtgctgctgcggtcagcatgcgtgcaggactggctagcttgtcctggcaatagctgctcctccactcagcgcactcccctcacttaggccaagcattattcattcccatcaatctgaagtccaaaggactgttttgtgtaataccttcgggcttgggactggctccctttttacaagttctccctgaaagagggcagtcaagagaggtgtgaagagtagcggccaatgatctctccaaagcagggcagcagcccatgccagctggcatctccccactgtgccttctgggtacaataagcacccaattctcaaaagccccagtggcctttccattcatgtgcatttttctaccactgaccacaagacaatttcctgagttttgtaatccttttttttttttagtttttgatgtgttgttgttgttttgtttagttttgagacagagcctcactcttgtcatgcaagctagagtggagtggcatgatcaaagctcactgcagcctcaa

SEQ ID NO: 278 - DNA, 2338 bp, Macaca fascicularis
  source 1..2338: mol_type = genomic DNA
ttgaggctgcagtgagctttgatcatgccactccactctagcttgcatgacaagagtgaggctctgtctcaaaactaaacaaaacaacaacaacacatcaaaaactaaaaaaaaaaaaggattacaaaactcaggaaattgtcttgtggtcagtggtagaaaaatgcacatgaatggaaaggccactggggcttttgagaattgggtgcttattgtacccagaaggcacagtggggagatgccagctggcatgggctgctgccctgctttggagagatcattggccgctactcttcacacctctcttgactgccctctttcagggagaacttgtaaaaagggagccagtcccaagcccgaaggtattacacaaaacagtcctttggacttcagattgatgggaatgaataatgcttggcctaagtgaggggagtgcgctgagtggaggagcagctattgccaggacaagctagccagtcctgcacgcatgctgaccgcagcagcacactaaccagagcctacccccaaccactcccggactccagctcagaccctttccccagcttttcttagggctgtttggctcacacagccctgaagggcacttcccaaagagtacacttaggacctcagtaggagaacgtggctgataagactcagtgtgacccacgtgtgtgactcccacatgccccgcggtggttggttggctcagtctggtgagggcaggtaggagcgtggatctccagggaatggcagggctggcacccggttgtagtgggccatgaggaagatgccagccgtgccacagacgaagagcgagagcatggccaggaagcagacgcggtccaacactcggcccaccaggaaccactcctcattcccattgtcaaagtgactctgctggtgccgggcacgggcaatgaggttgcaggcttccacgcaggcctggatggctggcgcagcctgcttcaggctgccacagaactggctcggctctaactccgggcctttctctagcttctccagcgctgctgccaccagcccttgctgctgccactgctggaagaggagttcactgcgaggcaggcagagggccacctccccagttgtgatcgaccatcccgaggagccattctgtagccggggctgggtgtcctgcacagctgccggggccagcgggcgaacgtgcatcctcagcagctggggcaagagcctcaggaacaccttgcggaccccttgggccatggagtgtgtgtgtggggaccgcaaggacacgttgagcacgaccacagcattcacgacaatgaggatggtcaccaccaggaggaaggtcaggtacttgctaatgagtggcaccgcctgggaggtttcaggcaccttcttggccacaaggaaaaggaagacagtctgggccaggagcacgttgatggcgacggtacacttctggcccccagccttggcaggaaggaagtagatgaggatggcaacggaggagatgagcacgcagggggcgatgatgttgatgatgtagaagaggggcttgcgctggatgagcaggtagaacaccaccttctggtggcctgcctcctgggctggtgccgctgggtccaggagcatcttggctggtcggtgctggatggcccactccccattctctgtgaaggcctcagggtcaatgaaaatccactcgatggtctggccatcttcctgactcagctgcagatcaatctcattggtgctgtaagtctgggactggaagataagggagcagttctgccagtcgaaggggaagtaggtgactgagatagagcaggcggaacggaagatggcgggcggcagccagtagatacagccgtcaggggacacgagcacattgcagtagagggccacctcgaagacaccgtccacgttgttctccagcacgatatccggccgccacaccatggtggacggcaccctcagcacccacaggccttcgtagtctcgcggatcccagcgcaggcgatagtcacaccactgcatctctatccagacgttggtggtgagggcttcctctcgctcgttcagggagatgaggttggtgagggttagcttcaggctgacgttgaccacatccgagtctcgttccgcaggtcgcaggttggggtcgtagttttgcatcaggtctgcgagcaggcgctcctcctgattccggccctggacccccaggcagacagccagcagcggcaggaggagcagcagcccctggcccccatgcatggcgcctcggctctctgcagtgatgggtgggacaacagctccaaggtctggggcagagagagacgggctctgggtgtca

SEQ ID NO: 279 - DNA, 2301 bp, Macaca mulatta
  source 1..2301: mol_type = genomic DNA
cacccagagcccatctctctctgccccagaccttggagctgttgtcccacccatcactgcagagagctgaggcgccatgcatgggggccaggggctgctgctcctcctgccgctgctggctgtctgcctgggtaggacacaaaggaatctcagcctaaggagggtccagggccggaatcaggaggagcgcctgctcgcagacctgatgcaaaactacgaccccaacctgcgacctgcggaacgagactcggatgtggtcaacgtcagcctgaagctaaccctcaccaacctcatctccctgaacgagcgagaggaagccctcaccaccaacgtctggatagagatgcagtggtgcgactatcgcctgcgctgggatccgcgagactacgaaggcctgtgggtgctgagggtgccgtccaccatggtgtggcggccggatatcgtgctggagaacaacgtggacggtgtcttcgaggtggccctctactgcaatgtgctcgtgtcccctgacggctgtatctactggctgccgcctgccatcttccgttccgcctgctctatctcagtcacctacttccccttcgactggcagaactgctcccttatcttccagtcccagacttacagcaccaatgagattgatctgcagctgagtcaggaagatggccagaccatcgagtggattttcattgaccctgaggccttcacagagaatggggagtgggccatccagcaccgaccagccaagatgctcctggacccagcggcaccagcccaggaggcaggccaccagaaggtggtgttctacctgctcatccagcgcaagcccctcttctacgtcatcaacatcatcgccccctgcgtgctcatctcctccgtcgccatcctcatctacttccttcctgccaaggctgggggccagaagtgtaccgtcgccatcaacgtgctcctggcccagactgtcttccttttccttgtggccaagaaggtgcctgaaacctcccaggcggtgccactcattagcaagtacctgaccttcctcctggtggtgaccatcctcattgtcgtgaatgctgtggtcgtgctcaacgtgtccttgcggtccccacacacacactccatggcccaaggggtccgcaaggtgttcctgaggctcttgccccagctgctgaggatgcacgttcgcccgctggccccggcagctgtgcaggacacccagccccggctacagaatggctcctcgggatggtcgatcacaactggggaggtggccctctgcctgcctcgcagtgaactcctcttccagcagtggcagcagcaagggctggtggcagcagcgctggagaagctagagaaaggcccggagttagagccgagccagttctgtggcagcctgaagcaggctgcgccagccatccaggcctgcgtggaagcctgcaacctcattgcccgtgcccggcaccagcagagtcactttgacaatgggaatgaggagtggttcctggtgggccgagtgctggaccgcgtctgcttcctggccatgctctcgctcttcgtctgtggcacggctggcatcttcctcatggcccactacaaccgggtgccagccctgccattccctggagatccacgctcctacctgccctcaccagactgagccaaccaaccacctcggggcatgtgggagtcacacacgtgggtcacactgagtcttatcagccacgttctcctactgaggtcctaagtgtactctttgggaagtgcccttcagggctgtgtgagccaaacagccctaagaaaagctggggaaagagtctgagctggagtccgggagtggttgggggtgggctgtggttagtgtgctgctgcggtcagcatgcgtgcaggactggctagcttgtcctggcaatagctgctcctccactcagcgcactcccctcacttaggccaagcattattcattcccatcaatctgaagtccaaaggactgttttgtgtaataccttcgggcttgggactggctccctttttacaagttctccctgaaagagggcagtcaagagaggtgtgaagagtagcggccaatgatctctccaaagcagggcagcagcccatgccagctggcatctccccactgtgccttctgggtacaataagcacccaattctcaaaagccccagtggcctttccattcatgtgcatttttctaccactgaccacaagacaatttcctgagttttgtaatcctttttatttttagtttttgatgtgttgttgttgttttgtttagttttgagacag

SEQ ID NO: 280 - DNA, 2301 bp, Macaca mulatta
  source 1..2301: mol_type = genomic DNA
ctgtctcaaaactaaacaaaacaacaacaacacatcaaaaactaaaaataaaaaggattacaaaactcaggaaattgtcttgtggtcagtggtagaaaaatgcacatgaatggaaaggccactggggcttttgagaattgggtgcttattgtacccagaaggcacagtggggagatgccagctggcatgggctgctgccctgctttggagagatcattggccgctactcttcacacctctcttgactgccctctttcagggagaacttgtaaaaagggagccagtcccaagcccgaaggtattacacaaaacagtcctttggacttcagattgatgggaatgaataatgcttggcctaagtgaggggagtgcgctgagtggaggagcagctattgccaggacaagctagccagtcctgcacgcatgctgaccgcagcagcacactaaccacagcccacccccaaccactcccggactccagctcagactctttccccagcttttcttagggctgtttggctcacacagccctgaagggcacttcccaaagagtacacttaggacctcagtaggagaacgtggctgataagactcagtgtgacccacgtgtgtgactcccacatgccccgaggtggttggttggctcagtctggtgagggcaggtaggagcgtggatctccagggaatggcagggctggcacccggttgtagtgggccatgaggaagatgccagccgtgccacagacgaagagcgagagcatggccaggaagcagacgcggtccagcactcggcccaccaggaaccactcctcattcccattgtcaaagtgactctgctggtgccgggcacgggcaatgaggttgcaggcttccacgcaggcctggatggctggcgcagcctgcttcaggctgccacagaactggctcggctctaactccgggcctttctctagcttctccagcgctgctgccaccagcccttgctgctgccactgctggaagaggagttcactgcgaggcaggcagagggccacctccccagttgtgatcgaccatcccgaggagccattctgtagccggggctgggtgtcctgcacagctgccggggccagcgggcgaacgtgcatcctcagcagctggggcaagagcctcaggaacaccttgcggaccccttgggccatggagtgtgtgtgtggggaccgcaaggacacgttgagcacgaccacagcattcacgacaatgaggatggtcaccaccaggaggaaggtcaggtacttgctaatgagtggcaccgcctgggaggtttcaggcaccttcttggccacaaggaaaaggaagacagtctgggccaggagcacgttgatggcgacggtacacttctggcccccagccttggcaggaaggaagtagatgaggatggcgacggaggagatgagcacgcagggggcgatgatgttgatgacgtagaagaggggcttgcgctggatgagcaggtagaacaccaccttctggtggcctgcctcctgggctggtgccgctgggtccaggagcatcttggctggtcggtgctggatggcccactccccattctctgtgaaggcctcagggtcaatgaaaatccactcgatggtctggccatcttcctgactcagctgcagatcaatctcattggtgctgtaagtctgggactggaagataagggagcagttctgccagtcgaaggggaagtaggtgactgagatagagcaggcggaacggaagatggcaggcggcagccagtagatacagccgtcaggggacacgagcacattgcagtagagggccacctcgaagacaccgtccacgttgttctccagcacgatatccggccgccacaccatggtggacggcaccctcagcacccacaggccttcgtagtctcgcggatcccagcgcaggcgatagtcgcaccactgcatctctatccagacgttggtggtgagggcttcctctcgctcgttcagggagatgaggttggtgagggttagcttcaggctgacgttgaccacatccgagtctcgttccgcaggtcgcaggttggggtcgtagttttgcatcaggtctgcgagcaggcgctcctcctgattccggccctggaccctccttaggctgagattcctttgtgtcctacccaggcagacagccagcagcggcaggaggagcagcagcccctggcccccatgcatggcgcctcagctctctgcagtgatgggtgggacaacagctccaaggtctggggcagagagagatgggctctgggtg

SEQ ID NO: 281 - DNA, 3115 bp, Homo sapiens
  source 1..3115: mol_type = genomic DNA
atccgatccgtgccgccgcagggagtgtgtcaagttacagaggcgccggaatcggcccctgcgctcctcgccagccgccacgacccacctctgcccatggggccctccgtgtgcgccccttcgcccggggactgaaactgactggcccgggagacacgaggcgcccagaaggactgacagcgcggcaccaactgctctgcagacacttgaagggaaagactgggcggagagaaggagagccggtcagattcccctaactttcctggacttggaacgttcttcgaaataacttttttctcacctaggtgtaccccaattaccgctggttgtgctttttcggcacttcctctcctactgctaatttttccgtcctctttgccgggagcagcggaaagggacgttttccagcgatacaagccctttccccctgccccgcagtttggatagagccttttggcagcggctgtcgcctttatttattctatttatttatttattggttctcaagacgcgagaggatggtagcggagcgcacccacaaagcggcagccaccggtgcccgcggccctggggagttgggcgcgcccgggacggtggctctggtggcggcgcgggcggagcgcggcgcacggctgccgagtccagggtcgtgcgggctgctgacgctggccctctgctcgctggcactcagcctgctcgcccactttcggacggccgagctgcaggcccgggtgctgcgcctggaagcggagcgcggggagcagcaaatggagacggctattttgggacgagtcaatcaactgctggacgagaaatggaagctccactcaaggaggcgccgggaggccccaaagacatctccaggatgtaactgcccaccaggacctcctggtcccactggaagacccggactcccaggggacaaaggtgccattgggatgcctggacgtgtggggtcccccggagacgctgggctgtccatcattggtccccgcggcccccctggtcaaccaggaactagaggtttccctggatttccgggtcccattgggctggacggcaaaccgggccacccaggaccaaagggcgacatgggtctgacgggtcccccaggacagccgggaccccagggacaaaaaggagaaaagggtcagtgtggagagtacccacaccgggagtgcctaagcagcatgccagcagctctgcgctccagccaaataattgccctgaagctgctgcctctcctcaattcagtgcgactggctccacccccggtcataaaaaggcggacgttccagggcgaacagagccaggccagcatccaaggtccaccagggcccccaggcccccctggaccaagtggacctctggggcacccaggactgccagggcctatggggccacctggcttacctgggcctcctggaccaaagggagacccagggatccagggctaccacggccggaagggagaacggggcatgccagggatgccaggcaagcatggagccaagggggcgcccggaattgccgtggctgggatgaagggtgagccagggatcccaggaaccaagggtgagaagggggctgaaggctcccctgggcttcctggcctcctggggcagaagggagagaaaggcgatgctggcaactccattggaggaggcagaggggaacctggccctccagggctccctgggcccccagggccaaagggagaagcaggtgtcgatggccaggttggccccccagggcagccaggagacaagggggagcgtggagcagctggagaacagggaccagatggccccaagggctccaagggagaaccagggaaaggagagatggtggattacaatggaaacatcaatgaggctctccaggagatccggacgctggccttgatggggcctcctggtcttcctgggcaaattggcccacctggagctccagggattccaggccagaagggggagattggactgccaggccctccaggacacgatggggaaaagggacctcgcggtaaaccaggagacatgggccctcctggtccccaaggccccccaggaaaggatggacctccaggagtgaagggagaaaacgggcacccagggagcccaggagagaagggggaaaaaggggagacaggacaagcaggctcaccgggagagaaaggagaagccggggagaagggcaatccaggagcagaggttcctgggctgccagggccagaggggcctcccggacctccggggctccaaggtgttcctggaccaaagggggaagcaggactagatggagcaaaaggagagaaaggcttccagggagaaaaaggagaccgtggtcccctgggactacccggagcttcaggtttggacggcaggcctgggccaccgggtactccaggaccaattggagttccaggcccagcgggaccaaagggcgagaggggcagcaaaggagaccctgggatgacaggaccaacgggagcagctgggcttcctggtttacatggaccacccggggacaagggaaaccggggggagagggggaagaaaggctctagagggcctaaaggggataagggagaccaaggagcgcctggattagatgccccctgcccattgggcgaagatggcttaccagtccaaggctgctggaacaagtgatgcctctaaccttggattggcctgtgtgtgtgtttgtacatagaatatttatttttatacagttttcactttttgaaaatgccagaagtatgatgcatcttacagattattaaaaaagaaagaaaaacctgcatattttgtacagaaaatatcaacctcttcccttttgtttacaagatgttttgtataagcctatgtctctaatacattttttgtttggtcgtaatgtctgcatgatatttgtgcacatttattaagtatcgaagcttaataaattattgtgtcctggtgccaaagggggccagccagaactgaggtgctggctagctcatgtgtgaattcacataaatgtagaggtccatgatatttgctaagctaggtgtgtctaagagtattttaaacccttatggattttcattattaaaggaaatgaaacatggcaa

SEQ ID NO: 282 - DNA, 3115 bp, Homo sapiens
  source 1..3115: mol_type = genomic DNA
ttgccatgtttcatttcctttaataatgaaaatccataagggtttaaaatactcttagacacacctagcttagcaaatatcatggacctctacatttatgtgaattcacacatgagctagccagcacctcagttctggctggccccctttggcaccaggacacaataatttattaagcttcgatacttaataaatgtgcacaaatatcatgcagacattacgaccaaacaaaaaatgtattagagacataggcttatacaaaacatcttgtaaacaaaagggaagaggttgatattttctgtacaaaatatgcaggtttttctttcttttttaataatctgtaagatgcatcatacttctggcattttcaaaaagtgaaaactgtataaaaataaatattctatgtacaaacacacacacaggccaatccaaggttagaggcatcacttgttccagcagccttggactggtaagccatcttcgcccaatgggcagggggcatctaatccaggcgctccttggtctcccttatcccctttaggccctctagagcctttcttccccctctccccccggtttcccttgtccccgggtggtccatgtaaaccaggaagcccagctgctcccgttggtcctgtcatcccagggtctcctttgctgcccctctcgccctttggtcccgctgggcctggaactccaattggtcctggagtacccggtggcccaggcctgccgtccaaacctgaagctccgggtagtcccaggggaccacggtctcctttttctccctggaagcctttctctccttttgctccatctagtcctgcttccccctttggtccaggaacaccttggagccccggaggtccgggaggcccctctggccctggcagcccaggaacctctgctcctggattgcccttctccccggcttctcctttctctcccggtgagcctgcttgtcctgtctcccctttttcccccttctctcctgggctccctgggtgcccgttttctcccttcactcctggaggtccatcctttcctggggggccttggggaccaggagggcccatgtctcctggtttaccgcgaggtcccttttccccatcgtgtcctggagggcctggcagtccaatctcccccttctggcctggaatccctggagctccaggtgggccaatttgcccaggaagaccaggaggccccatcaaggccagcgtccggatctcctggagagcctcattgatgtttccattgtaatccaccatctctcctttccctggttctcccttggagcccttggggccatctggtccctgttctccagctgctccacgctcccccttgtctcctggctgccctggggggccaacctggccatcgacacctgcttctccctttggccctgggggcccagggagccctggagggccaggttcccctctgcctcctccaatggagttgccagcatcgcctttctctcccttctgccccaggaggccaggaagcccaggggagccttcagcccccttctcacccttggttcctgggatccctggctcacccttcatcccagccacggcaattccgggcgcccccttggctccatgcttgcctggcatccctggcatgccccgttctcccttccggccgtggtagccctggatccctgggtctccctttggtccaggaggcccaggtaagccaggtggccccataggccctggcagtcctgggtgccccagaggtccacttggtccaggggggcctgggggccctggtggaccttggatgctggcctggctctgttcgccctggaacgtccgcctttttatgaccgggggtggagccagtcgcactgaattgaggagaggcagcagcttcagggcaattatttggctggagcgcagagctgctggcatgctgcttaggcactcccggtgtgggtactctccacactgacccttttctcctttttgtccctggggtcccggctgtcctgggggacccgtcagacccatgtcgccctttggtcctgggtggcccggtttgccgtccagcccaatgggacccggaaatccagggaaacctctagttcctggttgaccaggggggccgcggggaccaatgatggacagcccagcgtctccgggggaccccacacgtccaggcatcccaatggcacctttgtcccctgggagtccgggtcttccagtgggaccaggaggtcctggtgggcagttacatcctggagatgtctttggggcctcccggcgcctccttgagtggagcttccatttctcgtccagcagttgattgactcgtcccaaaatagccgtctccatttgctgctccccgcgctccgcttccaggcgcagcacccgggcctgcagctcggccgtccgaaagtgggcgagcaggctgagtgccagcgagcagagggccagcgtcagcagcccgcacgaccctggactcggcagccgtgcgccgcgctccgcccgcgccgccaccagagccaccgtcccgggcgcgcccaactccccagggccgcgggcaccggtggctgccgctttgtgggtgcgctccgctaccatcctctcgcgtcttgagaaccaataaataaataaatagaataaataaaggcgacagccgctgccaaaaggctctatccaaactgcggggcagggggaaagggcttgtatcgctggaaaacgtccctttccgctgctcccggcaaagaggacggaaaaattagcagtaggagaggaagtgccgaaaaagcacaaccagcggtaattggggtacacctaggtgagaaaaaagttatttcgaagaacgttccaagtccaggaaagttaggggaatctgaccggctctccttctctccgcccagtctttcccttcaagtgtctgcagagcagttggtgccgcgctgtcagtccttctgggcgcctcgtgtctcccgggccagtcagtttcagtccccgggcgaaggggcgcacacggagggccccatgggcagaggtgggtcgtggcggctggcgaggagcgcaggggccgattccggcgcctctgtaacttgacacactccctgcggcggcacggatcggat

SEQ ID NO: 283 - DNA, 3164 bp, Mus musculus
  source 1..3164: mol_type = genomic DNA
ggctgtgtcaagttacagaggcgccagaatcggccccagcgcggctcactgcagccacgacccacctctgcccatggggccctgcatgcgtgccccttcgcccggggactgacacccgttctccccggagacacaaaacacccagaaggaccccgagcgtcgcaccagcccgagaactctgcagaagagagaagggaaagagtggggagcggggccagatccccgaacttggaacattcttcgaaataacttttttcttactttggcgtactccgatcgcgtctgctggtggctcttggctgctcccgactccgactgctcattttcggtcctctttggcgagcaaaggaaagggacgtcctctagccacgttaaccccctttccccttgcctctcagtttggatcgcgcctcttggatctcgtttttatttattctatttatttatttattggctctcaagacgcgagggcatggtggcggagcgcacccgcaaagcggcagcctctggcagccgcggccctggggagctgggcgctccggggcccgggacagtggcgctggctgagcagtgcgctaggctgccgagccccgggtgctgcggactgctggctctagcgctgtgttcgctggcgctcagcctgctcgcccactttcggaccgcggagctgcaggcccgggtgctgcgcttggaagcagagcgcggggagcagcagatggagaaagctattttgggacgagtcaaccaactgctggacgagaaatggaagttctactcgcgtaggcgccgggaagccccgaagatgtctccaggatgtaactgcccaccaggacctcctggtcccactggaagacctggactcccaggggacaagggtgccatcgggatgcctggacgtgtgggtatcaaaggtcaaccaggcgagaagggtgcccctggagatgcggggatgtccatcgtcgggcctcgaggcccccctggccagcctggtacccgaggtttccctggattcccgggtcccattggtcttgacggcaggccgggccaccccggacctaaaggggagatgggcctggtgggtcctcgaggacaaccgggacctcagggacaaaagggagaaaagggtcagtgtggagagtacccacacagggagtacccaggcggcatgctagcagctctgcgctccaacccgataatgtccctaaagctgttgcctctactcaattcagtgcggctggctccacccccagtcattaaaaggcggacctttcagggggaacaaagtcagactggcatccaaggccctccagggccaccgggccccccaggaccaagtggccctctgggacacccaggactgccagggcctatagggccacctggtttaccggggcctcctggaccaaagggagacccagggatccagggctatcatggccgcaagggagagcggggcatgccaggaatgccaggcaagcacggagccaagggggttcctgggattgccgtggctgggatgaagggtgagccagggacgccaggaaccaagggtgagaagggtgcagcaggctcccctggcctcctggggcagaagggagaaaaaggtgatgctggcaatgccatcggaggaggcaggggggagcctggccccccggggctccctgggccccctgggccaaagggagaagctggtgttgatggccaggctgggcccccaggacagcaaggagacaaggggcagccaggagcagctggtgaacagggaccctctggccccaagggtgccaagggtgaacccggcaaaggagagatggtggattataatggcagcatcaacgaggcgcttcaggagatcaggacgctggccttgatggggcctcctggtcttcctggacaaacaggcccacccggacctccagggactccaggccaaaggggggagattggactgccaggccctccaggacacgatggggacaaggggcctcgaggaaaaccaggagatatggggccggctggtcctcaaggacccccaggaaaggatgggcctccaggaatgaagggagaagtcggacccccaggaagtccaggggagaaaggggagacaggacaagcaggcccccagggtctagacggcccaactggggagaaaggagaaccaggtgacgaagggaggcctggagcgacaggattgcctgggcccatcgggctcccgggattcacaggagagaaaggagaagctggggagaaaggcgacccgggagcagaggttcctgggccgccagggccagagggtcctccaggacctccgggcctccaaggttttcctggaccaaagggagaagcaggcctagagggcagtaaaggagagaagggctcccagggagaaaaaggagaccgggggcctctgggattgcctggtactccaggaccaatcggggttccaggcccagccggaccaaagggcgaaaggggcagcaaaggcgacccagggatgacgggaccaacgggagcagctgggctgcctggtttacatggaccacccggggacaaaggaaaccggggggagagggggaagaagggctctagagggcctaaaggggacaagggggaccaaggagcacctggactagacgccccctgcccgctgggagaagatggcttaccagtccaaggctgctggaacaagtgatgcctctaacctgggactggcctgtgtgtgtttgtatataggatatttatttttatacagttttcaccttttgaaaatgcccaaactatgatgcatcttacagatcattaagaaagaaagaagaaaagcctgcagattttgtacaggaaataacccctttccctttttgtttacaagacatttttgtataaatctgtttctaatacactttctgtctgtgcgtctgctcctaatgttgcatgatatttgtgcacacttactaaatatcacagcttcataaattattgtgttccagtgccaaagggggcccaccagcacagaggtgctgtgagcttgtgtgtgaattcacacacacacacaaaaaaagtggaggtcggtggtgtttgccagactacatgtgtctgacaatattttacattttaactgacggtcattattataagaaaaaaataataaaacgtggcaattcatg

SEQ ID NO: 284 - DNA, 3164 bp, Mus musculus
  source 1..3164: mol_type = genomic DNA
catgaattgccacgttttattatttttttcttataataatgaccgtcagttaaaatgtaaaatattgtcagacacatgtagtctggcaaacaccaccgacctccactttttttgtgtgtgtgtgtgaattcacacacaagctcacagcacctctgtgctggtgggccccctttggcactggaacacaataatttatgaagctgtgatatttagtaagtgtgcacaaatatcatgcaacattaggagcagacgcacagacagaaagtgtattagaaacagatttatacaaaaatgtcttgtaaacaaaaagggaaaggggttatttcctgtacaaaatctgcaggcttttcttctttctttcttaatgatctgtaagatgcatcatagtttgggcattttcaaaaggtgaaaactgtataaaaataaatatcctatatacaaacacacacaggccagtcccaggttagaggcatcacttgttccagcagccttggactggtaagccatcttctcccagcgggcagggggcgtctagtccaggtgctccttggtcccccttgtcccctttaggccctctagagcccttcttccccctctccccccggtttcctttgtccccgggtggtccatgtaaaccaggcagcccagctgctcccgttggtcccgtcatccctgggtcgcctttgctgcccctttcgccctttggtccggctgggcctggaaccccgattggtcctggagtaccaggcaatcccagaggcccccggtctcctttttctccctgggagcccttctctcctttactgccctctaggcctgcttctccctttggtccaggaaaaccttggaggcccggaggtcctggaggaccctctggccctggcggcccaggaacctctgctcccgggtcgcctttctccccagcttctcctttctctcctgtgaatcccgggagcccgatgggcccaggcaatcctgtcgctccaggcctcccttcgtcacctggttctcctttctccccagttgggccgtctagaccctgggggcctgcttgtcctgtctcccctttctcccctggacttcctgggggtccgacttctcccttcattcctggaggcccatcctttcctgggggtccttgaggaccagccggccccatatctcctggttttcctcgaggccccttgtccccatcgtgtcctggagggcctggcagtccaatctcccccctttggcctggagtccctggaggtccgggtgggcctgtttgtccaggaagaccaggaggccccatcaaggccagcgtcctgatctcctgaagcgcctcgttgatgctgccattataatccaccatctctcctttgccgggttcacccttggcacccttggggccagagggtccctgttcaccagctgctcctggctgccccttgtctccttgctgtcctgggggcccagcctggccatcaacaccagcttctccctttggcccagggggcccagggagccccggggggccaggctcccccctgcctcctccgatggcattgccagcatcacctttttctcccttctgccccaggaggccaggggagcctgctgcacccttctcacccttggttcctggcgtccctggctcacccttcatcccagccacggcaatcccaggaacccccttggctccgtgcttgcctggcattcctggcatgccccgctctcccttgcggccatgatagccctggatccctgggtctccctttggtccaggaggccccggtaaaccaggtggccctataggccctggcagtcctgggtgtcccagagggccacttggtcctggggggcccggtggccctggagggccttggatgccagtctgactttgttccccctgaaaggtccgccttttaatgactgggggtggagccagccgcactgaattgagtagaggcaacagctttagggacattatcgggttggagcgcagagctgctagcatgccgcctgggtactccctgtgtgggtactctccacactgacccttttctcccttttgtccctgaggtcccggttgtcctcgaggacccaccaggcccatctcccctttaggtccggggtggcccggcctgccgtcaagaccaatgggacccgggaatccagggaaacctcgggtaccaggctggccaggggggcctcgaggcccgacgatggacatccccgcatctccaggggcacccttctcgcctggttgacctttgatacccacacgtccaggcatcccgatggcacccttgtcccctgggagtccaggtcttccagtgggaccaggaggtcctggtgggcagttacatcctggagacatcttcggggcttcccggcgcctacgcgagtagaacttccatttctcgtccagcagttggttgactcgtcccaaaatagctttctccatctgctgctccccgcgctctgcttccaagcgcagcacccgggcctgcagctccgcggtccgaaagtgggcgagcaggctgagcgccagcgaacacagcgctagagccagcagtccgcagcacccggggctcggcagcctagcgcactgctcagccagcgccactgtcccgggccccggagcgcccagctccccagggccgcggctgccagaggctgccgctttgcgggtgcgctccgccaccatgccctcgcgtcttgagagccaataaataaataaatagaataaataaaaacgagatccaagaggcgcgatccaaactgagaggcaaggggaaagggggttaacgtggctagaggacgtccctttcctttgctcgccaaagaggaccgaaaatgagcagtcggagtcgggagcagccaagagccaccagcagacgcgatcggagtacgccaaagtaagaaaaaagttatttcgaagaatgttccaagttcggggatctggccccgctccccactctttcccttctctcttctgcagagttctcgggctggtgcgacgctcggggtccttctgggtgttttgtgtctccggggagaacgggtgtcagtccccgggcgaaggggcacgcatgcagggccccatgggcagaggtgggtcgtggctgcagtgagccgcgctggggccgattctggcgcctctgtaacttgacacagcc

SEQ ID NO: 285 - DNA, 3146 bp, Rattus norvegicus
  source 1..3146: mol_type = genomic DNA
ggctgtgtcaagttacagaggcgccggaatcggccccagcgcggctcactgcagccacgacccacctctgcccatggggccctgcatgcgcgccccttcgcccggggactgacacccgctctccccggagacacaaaacacccagaaggaccccgagcgtcgcacgagcccgaggactctgcagaagcgggaagggaaagagcgggcagtggagccagatccctgaacttggaacattcttcgaaataacttttttcttactttggtgtaccccgatcgcgtctgttgctcttggctgccctcaactccgactgctcatttttggtcctttttggcgagcaaaggaaagggacgtcctctagccacgctagctccctttcaccctgcttcttagtttggatcgcacctctttgatctcatttttatttattctatttatttatttattggctctcaagacgcgaggggatggtggcggagcgcgcccgcaaagcggcagcctccagcaaccgcggccctggggatctgggcgcgccagggcccgggacagtggcgctggctgagcagtgcgctaggctgccgagccccgggtgctgcggactgctggctctggcgttgtgctcgctggcgctcagcctgctcgcccactttcggacggccgagctgcaggcccgggtgctgcgcctggaatcggagcgcggggaacagcagatggagaaagctattttgggacgagtcaaccaactgctggacgagaaatggaagttctactcgcgcaggcgcagggaggccccgaagatgtctccaggatgtaactgcccaccaggaccgcctggccccactggaagacctggactcccaggggacaagggtgccatcgggatgcctggacgcgtgggtgtcaaaggtcaaccaggcgagaagggtgcccctggagatgcggggatatccatcatcgggccacgaggcccccctggccagccaggtacccgaggcttccctggattcccgggtcccattggtcttgacggcagaccgggccatcccggacctaaaggggagacgggcctggtgggtcctcgaggacaaccgggacctcagggacaaaagggagaaaagggtcagtgtggagaatacccacaccgggagtatccgagcggcacgctagcagctctgcgctccaacccgataatttccctgaagctgctgcctctcctcaattcagtgcggctggctccacccccagtcattaaaaggcggacctttcagggggaacaaagccaggctggcatccaaggccctccagggccaccgggccccccaggaccaattggccctctgggacacccaggactgccagggcctatagggccacctggtttacccgggcctcctggaccaaagggagacccagggatccagggctatcatggccgcaagggagagcggggcttgccaggaatgccaggcaagcatggagccaagggtgctcctgggattgccgtggctgggatgaagggtgagccagggacgccaggagccaagggtgagaagggtgctacaggctcccctggcctcctggggcagaagggagaaaagggagatgctggcaacgccattggaggaggcaggggagagcctggccccccggggctccctgggccccctgggccaaagggagaagctggtgtcgatggacaggctggtcccccaggacagcaaggagacaaggggcagccaggagcagctggcgaaccgggaccaactggccccaagggttccaagggtgaacccggcaagggagagatggtggactacaacagcagcatcaacgaggctcttcaggagatcaggacgctggccttgatggggcctcctggtcttcctggacaaacaggcccacccggacctccagggactccaggccaaaggggggagattggattgccaggccctccaggacacgatggggacaaggggcctcgaggaaaaccaggagatatggggcctgctggtcctcaaggacccccaggaaaggacgggcctccaggaatgaagggagaggttggacctccaggaaatccaggggagaaaggggagacaggacaagcaggccccccgggtctagacggcccaactggggagaaaggagaaccaggtgatgaagggaggcctggagcgacaggattgcctgggcccatcgggctcccgggattcacaggagagaaaggagaggctggggagaaaggtgacccaggagcagaggtgcctgggccgccagggccagagggtcctccaggaccgccgggcctccaaggtattccaggaccaaagggagaagcaggcctagatggcagtaaaggagagaagggctcccagggagaaaaaggagaccgggggcctctgggattgcctggtactccaggaccaatcggggttccaggcccagccggaccaaagggcgaaaggggcagcaagggagacccagggatgacgggaccaacaggagcagctgggctgcctggtttacacggaccacccggggacaaaggaaaccggggggagagggggaagaagggctctagagggcctaaaggggacaagggggaccaaggagcacctggactagacgccccctgcccactgggagaagatggcttaccagtccaaggctgctggaacaagtgatgcctctaacctcggactggcctgtgtgtgtttgtatataggatatttatttttatacagtttcacctttggaaaatgcccaaactatgatacatcttacagatcattaaaagagaaagaagaaaagcctgcatattttgtacaggaaataacccctttcccttttgtttacaagacatttttttttgtataaatctgtttctaatacactttctgtctgtgtgtctgctcctaatgttgcatgatatttgtgcacacttattaaatatcacagcttaataaattattgtgtgatggtgccaaaggggccttgtctgcataggggtgctgcgagcttacgtgtgaattcccaaaaaatgtggaggtccacggtgtttgccagacgacatgtgtctgacaatattttaaactttaactgactttcattattataaaaaaaataaaacgtggcaatttca

SEQ ID NO: 286 - DNA, 3146 bp, Rattus norvegicus
  source 1..3146: mol_type = genomic DNA
tgaaattgccacgttttattttttttataataatgaaagtcagttaaagtttaaaatattgtcagacacatgtcgtctggcaaacaccgtggacctccacattttttgggaattcacacgtaagctcgcagcacccctatgcagacaaggcccctttggcaccatcacacaataatttattaagctgtgatatttaataagtgtgcacaaatatcatgcaacattaggagcagacacacagacagaaagtgtattagaaacagatttatacaaaaaaaaatgtcttgtaaacaaaagggaaaggggttatttcctgtacaaaatatgcaggcttttcttctttctcttttaatgatctgtaagatgtatcatagtttgggcattttccaaaggtgaaactgtataaaaataaatatcctatatacaaacacacacaggccagtccgaggttagaggcatcacttgttccagcagccttggactggtaagccatcttctcccagtgggcagggggcgtctagtccaggtgctccttggtcccccttgtcccctttaggccctctagagcccttcttccccctctccccccggtttcctttgtccccgggtggtccgtgtaaaccaggcagcccagctgctcctgttggtcccgtcatccctgggtctcccttgctgcccctttcgccctttggtccggctgggcctggaaccccgattggtcctggagtaccaggcaatcccagaggcccccggtctcctttttctccctgggagcccttctctcctttactgccatctaggcctgcttctccctttggtcctggaataccttggaggcccggcggtcctggaggaccctctggccctggcggcccaggcacctctgctcctgggtcacctttctccccagcctctcctttctctcctgtgaatcccgggagcccgatgggcccaggcaatcctgtcgctccaggcctcccttcatcacctggttctcctttctccccagttgggccgtctagacccggggggcctgcttgtcctgtctcccctttctcccctggatttcctggaggtccaacctctcccttcattcctggaggcccgtcctttcctgggggtccttgaggaccagcaggccccatatctcctggttttcctcgaggccccttgtccccatcgtgtcctggagggcctggcaatccaatctcccccctttggcctggagtccctggaggtccgggtgggcctgtttgtccaggaagaccaggaggccccatcaaggccagcgtcctgatctcctgaagagcctcgttgatgctgctgttgtagtccaccatctctcccttgccgggttcacccttggaacccttggggccagttggtcccggttcgccagctgctcctggctgccccttgtctccttgctgtcctgggggaccagcctgtccatcgacaccagcttctccctttggcccagggggcccagggagccccggggggccaggctctcccctgcctcctccaatggcgttgccagcatctcccttttctcccttctgccccaggaggccaggggagcctgtagcacccttctcacccttggctcctggcgtccctggctcacccttcatcccagccacggcaatcccaggagcacccttggctccatgcttgcctggcattcctggcaagccccgctctcccttgcggccatgatagccctggatccctgggtctccctttggtccaggaggcccgggtaaaccaggtggccctataggccctggcagtcctgggtgtcccagagggccaattggtcctggggggcccggtggccctggagggccttggatgccagcctggctttgttccccctgaaaggtccgccttttaatgactgggggtggagccagccgcactgaattgaggagaggcagcagcttcagggaaattatcgggttggagcgcagagctgctagcgtgccgctcggatactcccggtgtgggtattctccacactgacccttttctcccttttgtccctgaggtcccggttgtcctcgaggacccaccaggcccgtctcccctttaggtccgggatggcccggtctgccgtcaagaccaatgggacccgggaatccagggaagcctcgggtacctggctggccaggggggcctcgtggcccgatgatggatatccccgcatctccaggggcacccttctcgcctggttgacctttgacacccacgcgtccaggcatcccgatggcacccttgtcccctgggagtccaggtcttccagtggggccaggcggtcctggtgggcagttacatcctggagacatcttcggggcctccctgcgcctgcgcgagtagaacttccatttctcgtccagcagttggttgactcgtcccaaaatagctttctccatctgctgttccccgcgctccgattccaggcgcagcacccgggcctgcagctcggccgtccgaaagtgggcgagcaggctgagcgccagcgagcacaacgccagagccagcagtccgcagcacccggggctcggcagcctagcgcactgctcagccagcgccactgtcccgggccctggcgcgcccagatccccagggccgcggttgctggaggctgccgctttgcgggcgcgctccgccaccatcccctcgcgtcttgagagccaataaataaataaatagaataaataaaaatgagatcaaagaggtgcgatccaaactaagaagcagggtgaaagggagctagcgtggctagaggacgtccctttcctttgctcgccaaaaaggaccaaaaatgagcagtcggagttgagggcagccaagagcaacagacgcgatcggggtacaccaaagtaagaaaaaagttatttcgaagaatgttccaagttcagggatctggctccactgcccgctctttcccttcccgcttctgcagagtcctcgggctcgtgcgacgctcggggtccttctgggtgttttgtgtctccggggagagcgggtgtcagtccccgggcgaaggggcgcgcatgcagggccccatgggcagaggtgggtcgtggctgcagtgagccgcgctggggccgattccggcgcctctgtaacttgacacagcc

SEQ ID NO: 287 - DNA, 3160 bp, Macaca fascicularis
  source 1..3160: mol_type = genomic DNA
gaggaggaggaggagggaggggggcgggagagattagtttgggaagtagcacggattgctcatccgatccgtgcagccgcagggagtgtgtcaagttacagaggcgccggaatcggccccagcgctcctcgccagccgccactacccacctctgcccatggggccctccatgtgcgccccttcgcccggggactgaaactggctggcccgggagacacgaggcgcccaggaggactgacagcgcggcaccaactgctctgcagactcttgaagggaaagactgggcggagagaaggagagccggtcagattcccctaactttcctggacttggaacgttcttcgaaataactttttttctcacctaggtgtaccccaattaccgctggttgtgctttttcggcccttcccctcctactgctaatttttccgtcctctttgccgggagcaacggaaagggacgttttccagcgatacaagccctttcccccttgccccgcagtttggatacagccttttggcagcagctgtcgcctttatttattctatttatttatttattggttctcaagacgtgagaggatggtagcggagagcacccacaaagcgggagccactggtgcctgcggccctagggagttgggcgcgtccgggacggtggctctggcggcggcgcgggcggagcgcggcgcacggctgccgagtccagggtcgtgcgggctgctggcgctggccctctgctcgctggcactcagcctgctcgcccactttcggacggcggagctgcaggcccgggtgctgcgcctggaagcggagcgcggggagcagcaaatggagacggctattttgggacgagtcaaccaactgctggacgagaaatggaagctccactcaaggaggcgccgggaggccccaaagacatctccaggatgtaactgcccaccaggacctcctggtcccactggaagacctggactcccaggggacaaaggtgccattgggatgcctggacgtgtggggtcccccggagatgctgggctgtccatcatcggcccccgcggcccccctggggtccaaccaggcactcgaggttttcctggatttccgggtcccattgggctggatggcaaaccgggccacccaggaccaaagggcgacatgggtctgacgggtcccccaggacagccgggacctcagggacaaaaaggagaaaagggtcagtgtggagagtacccacaccgggagtgcctaagcagcatgccagcagctctgcgctccagccagataattgccctgaagctgctgcctctcctcaattcagtgcgactggctccacccccggtcataaaaaggcggacattccagggtgaacagagccaagccagcatccaaggtccaccagggcccccaggcccccctggaccaagtggacctctggggcacccaggactgccagggcccgtggggccacccggcttacctgggcctcctggaccaaagggagacccagggatccagggctaccacggccggaagggagaacggggcatgccagggatgcccggcaagcatggagccaagggcactcctggaattgccgtggctgggatgaagggcgagccagggatcccaggaaccaagggtgagaagggggctgaaggctcccctgggcttcctggcctcctggggcagaagggagagaaaggcgatgctggcaactccattggaggaggcagaggggaacctggccctccagggctccctggacccccagggccaaagggagaagcgggtgtcgatggccaggtcggccccccagggcggcaaggagacaagggggagcctggagcagctggagaacagggaccagctggccccaagggctccaagggagaaccagggaaaggagagatggtggattacaatggaaacatcaatgaggctctccaggagatccggacactggccttgatggggcctcctggtcttcctgggcaaattggcccacctggagctccagggattccaggccagaagggggagattggactgccaggccctccaggacacgatggggagaagggacctcgcggtaaaccaggagacatgggccctcctggtccccaaggccccccaggaaaggatggacctccaggaatgaaaggagaaaacgggcacccagggagcccaggagaaaagggagagaaaggagagacaggacaagcaggctcgccgggagagaaaggagaagccggggagaagggcgatccaggagcagaggggctccaaggtgttcctggaccaaagggggaagcaggactagatggagcaaaaggagagaaaggcatccagggagaaaaaggagaccgtggtcccctgggactacccggagcttcaggtttggacggcaggcctgggccaccgggtactccaggaccaattggagttccaggcccagcaggaccaaagggcgagaggggcagcaaaggagaccctgggatgacaggaccaacgggagcagctgggcttcctggtttacatggaccacccggggacaagggaaaccggggggagagggggaagaaaggctctagagggcctaaaggggataagggagaccaaggagcgcctggattagatgccccctgcccattgggcgaagatggcttgccagtccaaggctgctggaacaagtgatgcctctaaccttggattggcctgtgtgtgtgtttgtacatagaatatttatttttatacagttttcactttttgaaaatgccagaagtatgatgcatcttacagattattaaaaaagaaagaaaaacctgcatattttgtacagaaaatatcaacctcttcccttttcccttttgtttacaagatgttttgtataaacctgtgtctctaatacactttttgtttgtgagtatggtcgtaatgtctgcatgatatttgtgcacacttattaagtattgaagcttaataaattattgtgtcctggtgccaaagggggccagccagaactgaggtgctggctagctcatgtgtgaattcacataaatgtagaggtccatgatatttgctaagctaggtgtgtcaaagagtattttaaacccttatgcattttcattattaaaaaaaaaatgaaacatggcaattca

SEQ ID NO: 288 - DNA, 3160 bp, Macaca fascicularis
  source 1..3160: mol_type = genomic DNA
tgaattgccatgtttcattttttttttaataatgaaaatgcataagggtttaaaatactctttgacacacctagcttagcaaatatcatggacctctacatttatgtgaattcacacatgagctagccagcacctcagttctggctggccccctttggcaccaggacacaataatttattaagcttcaatacttaataagtgtgcacaaatatcatgcagacattacgaccatactcacaaacaaaaagtgtattagagacacaggtttatacaaaacatcttgtaaacaaaagggaaaagggaagaggttgatattttctgtacaaaatatgcaggtttttctttcttttttaataatctgtaagatgcatcatacttctggcattttcaaaaagtgaaaactgtataaaaataaatattctatgtacaaacacacacacaggccaatccaaggttagaggcatcacttgttccagcagccttggactggcaagccatcttcgcccaatgggcagggggcatctaatccaggcgctccttggtctcccttatcccctttaggccctctagagcctttcttccccctctccccccggtttcccttgtccccgggtggtccatgtaaaccaggaagcccagctgctcccgttggtcctgtcatcccagggtctcctttgctgcccctctcgccctttggtcctgctgggcctggaactccaattggtcctggagtacccggtggcccaggcctgccgtccaaacctgaagctccgggtagtcccaggggaccacggtctcctttttctccctggatgcctttctctccttttgctccatctagtcctgcttccccctttggtccaggaacaccttggagcccctctgctcctggatcgcccttctccccggcttctcctttctctcccggcgagcctgcttgtcctgtctctcctttctctcccttttctcctgggctccctgggtgcccgttttctcctttcattcctggaggtccatcctttcctggggggccttggggaccaggagggcccatgtctcctggtttaccgcgaggtcccttctccccatcgtgtcctggagggcctggcagtccaatctcccccttctggcctggaatccctggagctccaggtgggccaatttgcccaggaagaccaggaggccccatcaaggccagtgtccggatctcctggagagcctcattgatgtttccattgtaatccaccatctctcctttccctggttctcccttggagcccttggggccagctggtccctgttctccagctgctccaggctcccccttgtctccttgccgccctggggggccgacctggccatcgacacccgcttctccctttggccctgggggtccagggagccctggagggccaggttcccctctgcctcctccaatggagttgccagcatcgcctttctctcccttctgccccaggaggccaggaagcccaggggagccttcagcccccttctcacccttggttcctgggatccctggctcgcccttcatcccagccacggcaattccaggagtgcccttggctccatgcttgccgggcatccctggcatgccccgttctcccttccggccgtggtagccctggatccctgggtctccctttggtccaggaggcccaggtaagccgggtggccccacgggccctggcagtcctgggtgccccagaggtccacttggtccaggggggcctgggggccctggtggaccttggatgctggcttggctctgttcaccctggaatgtccgcctttttatgaccgggggtggagccagtcgcactgaattgaggagaggcagcagcttcagggcaattatctggctggagcgcagagctgctggcatgctgcttaggcactcccggtgtgggtactctccacactgacccttttctcctttttgtccctgaggtcccggctgtcctgggggacccgtcagacccatgtcgccctttggtcctgggtggcccggtttgccatccagcccaatgggacccggaaatccaggaaaacctcgagtgcctggttggaccccaggggggccgcgggggccgatgatggacagcccagcatctccgggggaccccacacgtccaggcatcccaatggcacctttgtcccctgggagtccaggtcttccagtgggaccaggaggtcctggtgggcagttacatcctggagatgtctttggggcctcccggcgcctccttgagtggagcttccatttctcgtccagcagttggttgactcgtcccaaaatagccgtctccatttgctgctccccgcgctccgcttccaggcgcagcacccgggcctgcagctccgccgtccgaaagtgggcgagcaggctgagtgccagcgagcagagggccagcgccagcagcccgcacgaccctggactcggcagccgtgcgccgcgctccgcccgcgccgccgccagagccaccgtcccggacgcgcccaactccctagggccgcaggcaccagtggctcccgctttgtgggtgctctccgctaccatcctctcacgtcttgagaaccaataaataaataaatagaataaataaaggcgacagctgctgccaaaaggctgtatccaaactgcggggcaagggggaaagggcttgtatcgctggaaaacgtccctttccgttgctcccggcaaagaggacggaaaaattagcagtaggaggggaagggccgaaaaagcacaaccagcggtaattggggtacacctaggtgagaaaaaaagttatttcgaagaacgttccaagtccaggaaagttaggggaatctgaccggctctccttctctccgcccagtctttcccttcaagagtctgcagagcagttggtgccgcgctgtcagtcctcctgggcgcctcgtgtctcccgggccagccagtttcagtccccgggcgaaggggcgcacatggagggccccatgggcagaggtgggtagtggcggctggcgaggagcgctggggccgattccggcgcctctgtaacttgacacactccctgcggctgcacggatcggatgagcaatccgtgctacttcccaaactaatctctcccgcccccctccctcctcctcctcctc

SEQ ID NO: 289 - DNA, 3254 bp, Macaca mulatta
  source 1..3254: mol_type = genomic DNA
cgggagcgcgggagaggggctccggggccggcgggctggggccgccggacctgctcaccacgccccccaccccgggcgagtttgcataaataaacaaattcaagccgtcggccccgcgggaggtggaggaggagtgaggaggaggaggagggaggggggcgggagagattagtttgggaagtagcacggattgctcatccgatccgtgcagccgcagggagtgtgtcaagttacagaggcgccggaatcggccccagcgctcctcgccagccgccactacccacctctgcccatggggccctccatgtgcgccccttcgcccggggactgaaactggctggcccgggagacacgaggcgcccaggaggactgacagcgcggcaccaactgctctgcagactcttgaagggaaagactgggcggagagaaggagagccggtcagattcccctaactttcctggacttggaacgttcttcgaaataactttttttctcacctaggtgtaccccaattaccgctggttgtgctttttcggcccttcccctcctactgctaatttttccgtcctctttgccgggagcaacggaaagggacgttttccagcgatacaagccctttcccccttgccccgcagtttggatacagccttttggcagcagctgtcgcctttatttattctatttatttatttattggttctcaagacgtgagaggatggtagcggagagcacccacaaagcggcagccactggtgcctgcggccctagggagttgggcgcgcccgggacggtggctctggcggcggcgcgggcggagcgcggcgcacggctgccgagtccagggtcgtgcgggctgctggcgctggccctctgctcgctggcactcagcctgctcgcccactttcggacggcggagctgcaggcccgggtgctgcgcctggaagcggagcgcggggagcagcaaatggagacggctattttgggacgagtcaaccaactgctggacgagaaatggaagctccactcaaggaggcgccgggaggccccaaagacatctccaggatgtaactgcccaccaggacctcctggtcccactggaagacctggactcccaggggacaaaggtgccattgggatgcctggacgtgtgggagtaaagggccaaccaggcgagaaggggtcccccggagatgctgggctgtccatcatcggcccccgcggcccccctggtcaaccaggcactcgaggttttcctggatttccgggtcccattgggctggatggcaaaccgggccacccaggaccaaagggcgacatgggtctgacgggtcccccaggacagccgggacctcagggacaaaaaggagaaaagggtcagtgtggagagtacccacaccggctgctgcctctcctcaattcagtgcgactggctccacccccggtcataaaaaggcggacattccagggtgaacagagccaagccagcatccaaggtccaccagggcccccaggcccccctggaccaagtggacctctggggcacccaggactgccagggcccgtggggccacccggcttacctgggcctcctggaccaaagggagacccagggatccagggctaccacggccggaagggagaacggggcatgccagggatgcccggcaagcatggagccaagggcactcctggaattgccgtggctgggatgaagggcgagccagggatcccaggaaccaagggtgagaagggggctgaaggctcccctgggcttcctggcctcctggggcagaagggagagaaaggcgatgctggcaactccattggaggaggcagaggggaacctggccctccagggctccctggacccccagggccaaagggagaagcgggtgtcgatggccaggtcggccccccagggcggcaaggagacaagggggagcctggagcagctggagaacagggaccagctggccccaagggctccaagggagaaccagggaaaggagagatggtggattacaatggaaacatcaatgaggctctccaggagatccggacactggccttgatggggcctcctggtcttcctgggcaaattggcccacctggagctccagggattccaggccagaagggggagattggactgccaggccctccaggacacgatggggagaagggacctcgcggtaaaccaggagacatgggccctcctggtccccaaggccccccaggaaaggatggacctccaggaatgaaaggagaaaacgggcacccagggagcccaggagaaaagggagagaaaggagagacaggacaagcaggctcgccgggagagaaaggagaagccggggagaagggcgatccaggagcagaggggctccaaggtgttcctggaccaaagggggaagcaggactagatggagcaaaaggagagaaaggcatccagggagaaaaaggagaccgtggtcccctgggactacccggagcttcaggtttggacggcaggcctgggccaccgggtactccaggaccaattggagttccaggcccagcaggaccaaagggcgagaggggcagcaaaggagaccctgggatgacaggaccaacgggagcagctgggcttcctggtttacatggaccacccggggacaagggaaaccggggggagagggggaagaaaggctctagagggcctaaaggggataagggagaccaaggagcgcctggattagatgccccctgcccattgggcgaagatggcttgccagtccaaggctgctggaacaagtgatgcctctaaccttggattggcctgtgtgtgtgtttgtacatagaatatttatttttatacagttttcactttttgaaaatgccagaaggatgatgcatcttacagattattaaaaaagaaaaacctgcatattttgtacagaaaatatcaacctcttcccttttcccttttgtttacaagatgttttgtataaacctgtgtctctaatacactttttgtttgtgagtatggtcgtaatgtctgcatgatatttgtgcacacttattaagtattgaagcttaataaattattgtgtcctggtgccaaagggggccagccagaactgaggtgctggctagctcatgtgtgaattcacataaatgtagaggtccatgatatttgctaagctaggtgtgtcgaagagtattttaaacccttatgcattttcattattaaaaaaaaaatgaaacatggcaa

SEQ ID NO: 290 - DNA, 3254 bp, Macaca mulatta
  source 1..3254: mol_type = genomic DNA
ttgccatgtttcattttttttttaataatgaaaatgcataagggtttaaaatactcttcgacacacctagcttagcaaatatcatggacctctacatttatgtgaattcacacatgagctagccagcacctcagttctggctggccccctttggcaccaggacacaataatttattaagcttcaatacttaataagtgtgcacaaatatcatgcagacattacgaccatactcacaaacaaaaagtgtattagagacacaggtttatacaaaacatcttgtaaacaaaagggaaaagggaagaggttgatattttctgtacaaaatatgcaggtttttcttttttaataatctgtaagatgcatcatccttctggcattttcaaaaagtgaaaactgtataaaaataaatattctatgtacaaacacacacacaggccaatccaaggttagaggcatcacttgttccagcagccttggactggcaagccatcttcgcccaatgggcagggggcatctaatccaggcgctccttggtctcccttatcccctttaggccctctagagcctttcttccccctctccccccggtttcccttgtccccgggtggtccatgtaaaccaggaagcccagctgctcccgttggtcctgtcatcccagggtctcctttgctgcccctctcgccctttggtcctgctgggcctggaactccaattggtcctggagtacccggtggcccaggcctgccgtccaaacctgaagctccgggtagtcccaggggaccacggtctcctttttctccctggatgcctttctctccttttgctccatctagtcctgcttccccctttggtccaggaacaccttggagcccctctgctcctggatcgcccttctccccggcttctcctttctctcccggcgagcctgcttgtcctgtctctcctttctctcccttttctcctgggctccctgggtgcccgttttctcctttcattcctggaggtccatcctttcctggggggccttggggaccaggagggcccatgtctcctggtttaccgcgaggtcccttctccccatcgtgtcctggagggcctggcagtccaatctcccccttctggcctggaatccctggagctccaggtgggccaatttgcccaggaagaccaggaggccccatcaaggccagtgtccggatctcctggagagcctcattgatgtttccattgtaatccaccatctctcctttccctggttctcccttggagcccttggggccagctggtccctgttctccagctgctccaggctcccccttgtctccttgccgccctggggggccgacctggccatcgacacccgcttctccctttggccctgggggtccagggagccctggagggccaggttcccctctgcctcctccaatggagttgccagcatcgcctttctctcccttctgccccaggaggccaggaagcccaggggagccttcagcccccttctcacccttggttcctgggatccctggctcgcccttcatcccagccacggcaattccaggagtgcccttggctccatgcttgccgggcatccctggcatgccccgttctcccttccggccgtggtagccctggatccctgggtctccctttggtccaggaggcccaggtaagccgggtggccccacgggccctggcagtcctgggtgccccagaggtccacttggtccaggggggcctgggggccctggtggaccttggatgctggcttggctctgttcaccctggaatgtccgcctttttatgaccgggggtggagccagtcgcactgaattgaggagaggcagcagccggtgtgggtactctccacactgacccttttctcctttttgtccctgaggtcccggctgtcctgggggacccgtcagacccatgtcgccctttggtcctgggtggcccggtttgccatccagcccaatgggacccggaaatccaggaaaacctcgagtgcctggttgaccaggggggccgcgggggccgatgatggacagcccagcatctccgggggaccccttctcgcctggttggccctttactcccacacgtccaggcatcccaatggcacctttgtcccctgggagtccaggtcttccagtgggaccaggaggtcctggtgggcagttacatcctggagatgtctttggggcctcccggcgcctccttgagtggagcttccatttctcgtccagcagttggttgactcgtcccaaaatagccgtctccatttgctgctccccgcgctccgcttccaggcgcagcacccgggcctgcagctccgccgtccgaaagtgggcgagcaggctgagtgccagcgagcagagggccagcgccagcagcccgcacgaccctggactcggcagccgtgcgccgcgctccgcccgcgccgccgccagagccaccgtcccgggcgcgcccaactccctagggccgcaggcaccagtggctgccgctttgtgggtgctctccgctaccatcctctcacgtcttgagaaccaataaataaataaatagaataaataaaggcgacagctgctgccaaaaggctgtatccaaactgcggggcaagggggaaagggcttgtatcgctggaaaacgtccctttccgttgctcccggcaaagaggacggaaaaattagcagtaggaggggaagggccgaaaaagcacaaccagcggtaattggggtacacctaggtgagaaaaaaagttatttcgaagaacgttccaagtccaggaaagttaggggaatctgaccggctctccttctctccgcccagtctttcccttcaagagtctgcagagcagttggtgccgcgctgtcagtcctcctgggcgcctcgtgtctcccgggccagccagtttcagtccccgggcgaaggggcgcacatggagggccccatgggcagaggtgggtagtggcggctggcgaggagcgctggggccgattccggcgcctctgtaacttgacacactccctgcggctgcacggatcggatgagcaatccgtgctacttcccaaactaatctctcccgcccccctccctcctcctcctcctcactcctcctccacctcccgcggggccgacggcttgaatttgtttatttatgcaaactcgcccggggtggggggcgtggtgagcaggtccggcggccccagcccgccggccccggagcccctctcccgcgctcccg

SEQ ID NO: 291 - DNA, 2566 bp, Homo sapiens
  source 1..2566: mol_type = genomic DNA
gagctattttgaaagtgaccctgggctggggcgccggggcgagcgcggcggcgcggaaccatgacagaagatgaccgaggcggcgctggtggagggccaggtcaagctgcgggacggcaagaagtggaagagtaggtggctggtgctgcggaagccgtcgcccgtggcagactgcctgctgatgctggtctacaaggacaagtcggagcgtatcaagggcctgcgggagcgcagcagcctgacgctagaggacatctgcgggctggagcccggcctgccctacgagggcctggtccacacgctggccattgtctgcctgtcccaggccatcatgctgggctttgacagccacgaggccatgtgtgcgtgggatgcccggatccgctatgcgctcggcgaggtgcataggttccatgtgacagtggctccaggcaccaagttggagagcggcccggctaccctgcacctctgcaatgatgtcctcgtcttggccagggacatccccccggctgtcacggggcagtggaagctgtctgacctccggcgctacggggccgtgccaagcggattcatctttgaaggcgggaccaggtgtgggtactgggctggcgtcttcttcctgtcctcggccgagggggagcagatcagcttcctgttcgactgcatcgtccgaggcatctcccccaccaagggcccctttgggctgcggccggttctaccagacccaagtcccccgggaccctcgactgtggaggagcgtgtggcccaggaagccctggaaaccctacagctggagaagcggctgagcctcctctcacatgcgggcaggccgggcagtggaggggatgaccgcagcctgtccagctcatcctcagaggccagtcacttggacgtcagcgccagcagccggctcaccgcatggccagagcaatcctcgtcgtcagccagcacgtcacaggaggggcctagaccagcagctgcccaggccgccggggaagccatggtgggtgcctcaaggccaccccccaagccgctgcgtccgcggcagctgcaggaggttggccgccagagctcctcggacagcggcatcgccactggcagccactcctcttactccagcagcctctcgtcctacgcgggcagcagcctggacgtgtggcgggccacagatgaactgggctcactgctcagcctgccagcagcgggggcccccgagcccagcctgtgcacctgcctgcccgggacagtcgagtaccaggtgcccacctccctgcgggcccactatgacacaccacgcagcctttgcctggctcctagagaccacagccccccctcacagggcagccccggcaacagtgcggccagggactcaggcggccagacgtccgccgggtgtccctctggctggctgggcacgagacggcggggcctggtgatggaggccccccagggcagcgaggccacactgcctggccctgcccctggcgagccctgggaagcaggcggcccccacgcggggccacccccggctttcttttcggcatgtccagtctgtggaggactcaaggtaaacccccctccttgagagccgcagatcccgccccgcggctgcaaaggggctgaatttgcccccagatggcagaggaagtggcgccagcctccttgcagactggtgctctgtgttctgtgggagggaccgggggtctcccggagaggggagctggagggcgcgccctgtggctgccaccggaggaaggggctgacttggggaggtgagttctggaaggcaggggctctgggtccggcaggtcggggtcaccagagccccaatgctcagctgcttcactccgtgtcccccacccctgaggatcaggtgagtgctgcacctctgttggctcgtgccttgcactggggtgccaagggctggaggccctgccgctggccttgtcctccttgggcctcacgcccccttcgggggtggccggttctccccatcacctctctggggcagtcacaccacctgttaagcatcaagctaccacagaggctccggccacctgggctccaccagcccagcccccctgggctccgtgtgcgctgggcctcatccccatctatgggaggaaactgaagctcaggaggctgtgtggcttgcggggtctctgggttctgggccccactgttccccagtgaagcccttgtgggaaggttccgggagcaggtggtgtcctcagagcagcctcgcctgctgaccccactgggagaggcgccgtgcctcgggcccctggtgggagctctgctggctcctgtctgaacctcctcgcagggccaaaggctggcttggcctgtgtttcccctggcccaggcctcagcccctgcgtcggaggtggggctgtgttgggcccattgtcccccgccctgggtggcttcctcttgcacagcctggagcctgccctgaccacagcccagcagctccctgtgaacacctctttgtcccttcactgtcagctgtttctaaacccagacactgtttgtaatagactggaaataaaatgttctttcctta

SEQ ID NO: 292 - DNA, 2566 bp, Homo sapiens
  source 1..2566: mol_type = genomic DNA
taaggaaagaacattttatttccagtctattacaaacagtgtctgggtttagaaacagctgacagtgaagggacaaagaggtgttcacagggagctgctgggctgtggtcagggcaggctccaggctgtgcaagaggaagccacccagggcgggggacaatgggcccaacacagccccacctccgacgcaggggctgaggcctgggccaggggaaacacaggccaagccagcctttggccctgcgaggaggttcagacaggagccagcagagctcccaccaggggcccgaggcacggcgcctctcccagtggggtcagcaggcgaggctgctctgaggacaccacctgctcccggaaccttcccacaagggcttcactggggaacagtggggcccagaacccagagaccccgcaagccacacagcctcctgagcttcagtttcctcccatagatggggatgaggcccagcgcacacggagcccaggggggctgggctggtggagcccaggtggccggagcctctgtggtagcttgatgcttaacaggtggtgtgactgccccagagaggtgatggggagaaccggccacccccgaagggggcgtgaggcccaaggaggacaaggccagcggcagggcctccagcccttggcaccccagtgcaaggcacgagccaacagaggtgcagcactcacctgatcctcaggggtgggggacacggagtgaagcagctgagcattggggctctggtgaccccgacctgccggacccagagcccctgccttccagaactcacctccccaagtcagccccttcctccggtggcagccacagggcgcgccctccagctcccctctccgggagacccccggtccctcccacagaacacagagcaccagtctgcaaggaggctggcgccacttcctctgccatctgggggcaaattcagcccctttgcagccgcggggcgggatctgcggctctcaaggaggggggtttaccttgagtcctccacagactggacatgccgaaaagaaagccgggggtggccccgcgtgggggccgcctgcttcccagggctcgccaggggcagggccaggcagtgtggcctcgctgccctggggggcctccatcaccaggccccgccgtctcgtgcccagccagccagagggacacccggcggacgtctggccgcctgagtccctggccgcactgttgccggggctgccctgtgagggggggctgtggtctctaggagccaggcaaaggctgcgtggtgtgtcatagtgggcccgcagggaggtgggcacctggtactcgactgtcccgggcaggcaggtgcacaggctgggctcgggggcccccgctgctggcaggctgagcagtgagcccagttcatctgtggcccgccacacgtccaggctgctgcccgcgtaggacgagaggctgctggagtaagaggagtggctgccagtggcgatgccgctgtccgaggagctctggcggccaacctcctgcagctgccgcggacgcagcggcttggggggtggccttgaggcacccaccatggcttccccggcggcctgggcagctgctggtctaggcccctcctgtgacgtgctggctgacgacgaggattgctctggccatgcggtgagccggctgctggcgctgacgtccaagtgactggcctctgaggatgagctggacaggctgcggtcatcccctccactgcccggcctgcccgcatgtgagaggaggctcagccgcttctccagctgtagggtttccagggcttcctgggccacacgctcctccacagtcgagggtcccgggggacttgggtctggtagaaccggccgcagcccaaaggggcccttggtgggggagatgcctcggacgatgcagtcgaacaggaagctgatctgctccccctcggccgaggacaggaagaagacgccagcccagtacccacacctggtcccgccttcaaagatgaatccgcttggcacggccccgtagcgccggaggtcagacagcttccactgccccgtgacagccggggggatgtccctggccaagacgaggacatcattgcagaggtgcagggtagccgggccgctctccaacttggtgcctggagccactgtcacatggaacctatgcacctcgccgagcgcatagcggatccgggcatcccacgcacacatggcctcgtggctgtcaaagcccagcatgatggcctgggacaggcagacaatggccagcgtgtggaccaggccctcgtagggcaggccgggctccagcccgcagatgtcctctagcgtcaggctgctgcgctcccgcaggcccttgatacgctccgacttgtccttgtagaccagcatcagcaggcagtctgccacgggcgacggcttccgcagcaccagccacctactcttccacttcttgccgtcccgcagcttgacctggccctccaccagcgccgcctcggtcatcttctgtcatggttccgcgccgccgcgctcgccccggcgccccagcccagggtcactttcaaaatagctc

SEQ ID NO: 293 - DNA, 2723 bp, Mus musculus
  source 1..2723: mol_type = genomic DNA
gtctcccccacatccaggtccccgtgtcgctgcgccccgcccgccgcgccgggcccgccctcctggcgcagcccaaggccctcccggagctattttgaaagtgaccctgggctcaggcgcccaggacgcgtggagagggcgcagcgggcggcgggaaccatgacagaagatgaccgaggcagcgctggtggagggccaggtcaagctgcgggacggcaagaagtggaagagtaggtggctggtgctgcgcaagccatcgccggtggcagactgcctgctgatgctggtctacaaggacaaatgtgaacgctccaagggccttcgggagcgcagcagcctcaccctggaggacatctgtggcctggagcctgccctgccctatgagggcctggcccacactctggccatcatctgcctgtctcaggctgttatgctgggcttcgatagccatgaggccatgtgtgcctgggatacccgtatccgctacgcactgggcgaggtgcacaggttccatgtgacagtagctcctggtaccaaactggagagtggtccagccactcttcacctctgcaatgacattctggtcctggccagagacatccctccaaccgtcatggggcagtggaagctgtctgacctccggcgttacggggctgttccgaatggattcatcttcgaaggcgggaccaggtgtgggtactgggctggagtcttcttcttgtcatcagctgagggagagcagatgagcttcctgtttgactgcatcgtccgaggcatctccccgaccaaaggcccgtttgggcttcggccagttctcccagacccgagttctgggggaccctcagcctcagaagagcgtgttgcccaggaagcactggaagccctgcagctagagaagaggctcagcctgctttctcactctggccggccaggcagtggaggggatgacagaagtctatccagttcctcttctgaggctagccactcggacatcagcgccagcagcaggctcactgcgtggccggagcagtcctcatcctcggccggcacatcacaagaaggaccagggctggtggctgcccagggcccaggagaagccatgctgggagcctcaaggccacccctcaagccactgcggcctcggcagttacaggaggttggccgccagagctcctctgacagtggcattgccacaggcagccactcctcttactctggcagcttctcctcttatgccggcagcaacctggacgtgtggcgggccggtgaggaattcggttctctgctcagtctgccccctggagccagcgcacctgagcccagactgtgtgcctgcccacctggggcggccgagtaccaggtgcccacgtcactgagacaccactatgacacacctcgaagcctgcgccaggcccccagagacccaagcccagcttctcagggcagctctgaccacggttcagccacagacttgggtggtcaggcgcccacagggtgtccctccagttggctgggagctcgccgacggggacaggcaacggaaggcccaggcagtgacgctgcgctgccgagtccatcccctggcgagtcctgggaagcaggcagcccccatgcagggccgcctccagctttctttttgtcatgttcaatctgtggcggactcaaggtcatggctacttcatcccctggattcactgtgacgcatccaggatctccagggcgggtggctgctgatagccctgggcctgagcgaccacacagtgagatgcccacgtatgtgaatatccccatcagccccatctccagaccgcagctgcactacatggacttggagctcccgggggccagtgctggtgttcgaggggccagcacctcccgctatgcccagattgacattgcagctaccgagacagcacatcgcgtcggggtccggcatgcgcagactcgggaggaacggttaccagagttggagcagcggaagaaggggccctgaggctgggactggctgggcacatggccagctggactgtccaacatggccaggcagggatggtggccttttggggctagagaccttggcctgtctgtgtactctggtggtcagtaattgaagctgagtcttgacctcctgctgcagtggaggctgtggctggtctttgtgcattggaatgagtagtcagaggttctgggcccagaccatatcagttcattccaatatgtgaaaggcatgtagtagcctcctttttgccagcagggtctcttgcctcactggtggccaagacttgacttgaacaagttctcctatgccatggggccaccaagagacccatctccaggaatcggtagcctcagcatctgacacaacagcactactagctgcccggttgaaatggaaagtctcccaggcctggaatgcaagctgtattacccatcctggacgaggtgaccacgatgacagtttgcactagcagaacactctgcactggtcctgtactcagagggacctgtgacttgccactggagccccctccccttttcctacagtgtctctcttgagcaaggccctgtaccttgggatgaagaccagggtggggacaagtctgtttccacttgtcatcttgttgggacctactccagcagtcgggtacatggttttaaatccccactgttacatttttaacaatttatattattttccaaaagctgaaaaaaaaaaaaaaaaa

SEQ ID NO: 294 - DNA, 2723 bp, Mus musculus
  source 1..2723: mol_type = genomic DNA
tttttttttttttttttcagcttttggaaaataatataaattgttaaaaatgtaacagtggggatttaaaaccatgtacccgactgctggagtaggtcccaacaagatgacaagtggaaacagacttgtccccaccctggtcttcatcccaaggtacagggccttgctcaagagagacactgtaggaaaaggggagggggctccagtggcaagtcacaggtccctctgagtacaggaccagtgcagagtgttctgctagtgcaaactgtcatcgtggtcacctcgtccaggatgggtaatacagcttgcattccaggcctgggagactttccatttcaaccgggcagctagtagtgctgttgtgtcagatgctgaggctaccgattcctggagatgggtctcttggtggccccatggcataggagaacttgttcaagtcaagtcttggccaccagtgaggcaagagaccctgctggcaaaaaggaggctactacatgcctttcacatattggaatgaactgatatggtctgggcccagaacctctgactactcattccaatgcacaaagaccagccacagcctccactgcagcaggaggtcaagactcagcttcaattactgaccaccagagtacacagacaggccaaggtctctagccccaaaaggccaccatccctgcctggccatgttggacagtccagctggccatgtgcccagccagtcccagcctcagggccccttcttccgctgctccaactctggtaaccgttcctcccgagtctgcgcatgccggaccccgacgcgatgtgctgtctcggtagctgcaatgtcaatctgggcatagcgggaggtgctggcccctcgaacaccagcactggcccccgggagctccaagtccatgtagtgcagctgcggtctggagatggggctgatggggatattcacatacgtgggcatctcactgtgtggtcgctcaggcccagggctatcagcagccacccgccctggagatcctggatgcgtcacagtgaatccaggggatgaagtagccatgaccttgagtccgccacagattgaacatgacaaaaagaaagctggaggcggccctgcatgggggctgcctgcttcccaggactcgccaggggatggactcggcagcgcagcgtcactgcctgggccttccgttgcctgtccccgtcggcgagctcccagccaactggagggacaccctgtgggcgcctgaccacccaagtctgtggctgaaccgtggtcagagctgccctgagaagctgggcttgggtctctgggggcctggcgcaggcttcgaggtgtgtcatagtggtgtctcagtgacgtgggcacctggtactcggccgccccaggtgggcaggcacacagtctgggctcaggtgcgctggctccagggggcagactgagcagagaaccgaattcctcaccggcccgccacacgtccaggttgctgccggcataagaggagaagctgccagagtaagaggagtggctgcctgtggcaatgccactgtcagaggagctctggcggccaacctcctgtaactgccgaggccgcagtggcttgaggggtggccttgaggctcccagcatggcttctcctgggccctgggcagccaccagccctggtccttcttgtgatgtgccggccgaggatgaggactgctccggccacgcagtgagcctgctgctggcgctgatgtccgagtggctagcctcagaagaggaactggatagacttctgtcatcccctccactgcctggccggccagagtgagaaagcaggctgagcctcttctctagctgcagggcttccagtgcttcctgggcaacacgctcttctgaggctgagggtcccccagaactcgggtctgggagaactggccgaagcccaaacgggcctttggtcggggagatgcctcggacgatgcagtcaaacaggaagctcatctgctctccctcagctgatgacaagaagaagactccagcccagtacccacacctggtcccgccttcgaagatgaatccattcggaacagccccgtaacgccggaggtcagacagcttccactgccccatgacggttggagggatgtctctggccaggaccagaatgtcattgcagaggtgaagagtggctggaccactctccagtttggtaccaggagctactgtcacatggaacctgtgcacctcgcccagtgcgtagcggatacgggtatcccaggcacacatggcctcatggctatcgaagcccagcataacagcctgagacaggcagatgatggccagagtgtgggccaggccctcatagggcagggcaggctccaggccacagatgtcctccagggtgaggctgctgcgctcccgaaggcccttggagcgttcacatttgtccttgtagaccagcatcagcaggcagtctgccaccggcgatggcttgcgcagcaccagccacctactcttccacttcttgccgtcccgcagcttgacctggccctccaccagcgctgcctcggtcatcttctgtcatggttcccgccgcccgctgcgccctctccacgcgtcctgggcgcctgagcccagggtcactttcaaaatagctccgggagggccttgggctgcgccaggagggcgggcccggcgcggcgggcggggcgcagcgacacggggacctggatgtgggggagac

SEQ ID NO: 295 - DNA, 2428 bp, Rattus norvegicus
  source 1..2428: mol_type = genomic DNA
gtctccgcagtggaagagtaggtggctggtgctgcgcaagccatcgccggtggcagactgcctgctgatgctggtctacaaggacaggtgtgaacgttcaaagggcctgcgggagcgcagcagcctcaccctggaggacatctgtggcctggagcctgccctgccctatgagggcctggcccacaccctggctatcatctgcctgtctcaggccatcatgctgggctttgacagccacgaggccatgtgtgcctgggacactcgtatccgctatgcattgggcgaggtgcatcggttccatgtgacggtagctcctggcaccaaactggagagtggtccagccactcttcatctctgcaatgacatcctggtcctggccagagacatccctccaactgtcacggggcagtggaagttgtctgatctccggcgttatggggctgtgccaaatggattcatctttgaaggcgggaccaggtgtgggtactgggctggagtcttcttcttgtcctcagctgagggagagcagatcagcttcctgtttgactgcattgtccgaggcatctccccaaccaaaggcccatttgggcttcggccagttctcccagacccaagttctgggggaccctcagcctcagaagagcgtgttgcccaggaagcactggaggccctgcagctagagaagaggctcagcctgctttcacactctggccggccaggcagtggaggggatgatcgaagtctatccagttcctcttctgaggccagccactcagacatcagcgccagcagccggctcactgcatggccagagcagtcctcgtcctcagccagcacatcgcaagaaggaccagggctggtggctgcccagggcccaggggaagccatgctgggagcctcaaggccacccctcaagccactgcggcctcggcagttacaggaggttggccgccagagctcctctgacagtggcattgccacaggcagccactcctcctactctggcagcttctcatcctatgcgggcagcaacctggacgtgtggcgggctggcgaggaattcggttctctgctcagcctgccccctggagccagcgcacctgagcccagactgtgcgcctgcccacctggggcggccgagtaccaggtgcccacttcattgcgacaccactacgacacacctcgaagcctacgccaggcccccagagacccaagccccgcctctcagggcggctctgaccacagttcagctacagactcgggtggtcaggcacccacggggtctccctccagttgtctgggagctcgaagacgggggcaggcaacggaaggcccaggcagtgaagctgtgctgcccagtccatcccctggcgagtcctgggaagcaggcagccctcatactgggccacctccagctttctttttgtcttgttcaatctgtggcggactcaaggtcacggctacttcatccactggactcactgtgacgcatccaggatccccaggggtggctgctgacagccctgggcctgaacgaccacacggcgagacgcccacgtatgtgaatatccccatcagccccacctccagactgcagctgcattacatggacctagagctctcgggagccagtgggggtgtgcgaggggtcagcgcctcccgctatgcacagattgacatcacagctacggagacggcacatcgcgtaggggtccagcacgcgcagaaccgggaggaacgattgccagagttggagcagcggaagaagggaccctgagctgaggctgcagctcaggctgggactggccagccggactgtccaacagagacaggaaggctgtggttggcctttgtgcatcgttggaatgagtggtcgtaggttctgggcccacaccatatcagttcattccaatgtgtgaaagccgtgtagcagcctcctctttgccagcaggggctcttgccttactggtgcctaagacttgacctgaacaagttctcctaggccacggggccaccaacagacccatctccatgttttggtagcctcagtgtcagccaaacagcactgctaagccacccagtgggactgggaagtcccccaggcctggaatgcaagctgcactacccatcccggacggaagaggtgaccatggtgacagcagagcactctaaagccggttctgtatccagagggacctgtgacttgccactgatgagccactgagtggctctgctgctgggacactgcagcagccttccctaccttctcctgcagtgtctcccttgagctaggccctgtgccttaggatgaaggccacggtggggacaggactgttccctcttgtcatcatgttgggacctactccagtagctgggtaaattgtcttaaatccctactgttatatttttaacaatttatattattttc

SEQ ID NO: 296 - DNA, 2428 bp, Rattus norvegicus
  source 1..2428: mol_type = genomic DNA
gaaaataatataaattgttaaaaatataacagtagggatttaagacaatttacccagctactggagtaggtcccaacatgatgacaagagggaacagtcctgtccccaccgtggccttcatcctaaggcacagggcctagctcaagggagacactgcaggagaaggtagggaaggctgctgcagtgtcccagcagcagagccactcagtggctcatcagtggcaagtcacaggtccctctggatacagaaccggctttagagtgctctgctgtcaccatggtcacctcttccgtccgggatgggtagtgcagcttgcattccaggcctgggggacttcccagtcccactgggtggcttagcagtgctgtttggctgacactgaggctaccaaaacatggagatgggtctgttggtggccccgtggcctaggagaacttgttcaggtcaagtcttaggcaccagtaaggcaagagcccctgctggcaaagaggaggctgctacacggctttcacacattggaatgaactgatatggtgtgggcccagaacctacgaccactcattccaacgatgcacaaaggccaaccacagccttcctgtctctgttggacagtccggctggccagtcccagcctgagctgcagcctcagctcagggtcccttcttccgctgctccaactctggcaatcgttcctcccggttctgcgcgtgctggacccctacgcgatgtgccgtctccgtagctgtgatgtcaatctgtgcatagcgggaggcgctgacccctcgcacacccccactggctcccgagagctctaggtccatgtaatgcagctgcagtctggaggtggggctgatggggatattcacatacgtgggcgtctcgccgtgtggtcgttcaggcccagggctgtcagcagccacccctggggatcctggatgcgtcacagtgagtccagtggatgaagtagccgtgaccttgagtccgccacagattgaacaagacaaaaagaaagctggaggtggcccagtatgagggctgcctgcttcccaggactcgccaggggatggactgggcagcacagcttcactgcctgggccttccgttgcctgcccccgtcttcgagctcccagacaactggagggagaccccgtgggtgcctgaccacccgagtctgtagctgaactgtggtcagagccgccctgagaggcggggcttgggtctctgggggcctggcgtaggcttcgaggtgtgtcgtagtggtgtcgcaatgaagtgggcacctggtactcggccgccccaggtgggcaggcgcacagtctgggctcaggtgcgctggctccagggggcaggctgagcagagaaccgaattcctcgccagcccgccacacgtccaggttgctgcccgcataggatgagaagctgccagagtaggaggagtggctgcctgtggcaatgccactgtcagaggagctctggcggccaacctcctgtaactgccgaggccgcagtggcttgaggggtggccttgaggctcccagcatggcttcccctgggccctgggcagccaccagccctggtccttcttgcgatgtgctggctgaggacgaggactgctctggccatgcagtgagccggctgctggcgctgatgtctgagtggctggcctcagaagaggaactggatagacttcgatcatcccctccactgcctggccggccagagtgtgaaagcaggctgagcctcttctctagctgcagggcctccagtgcttcctgggcaacacgctcttctgaggctgagggtcccccagaacttgggtctgggagaactggccgaagcccaaatgggcctttggttggggagatgcctcggacaatgcagtcaaacaggaagctgatctgctctccctcagctgaggacaagaagaagactccagcccagtacccacacctggtcccgccttcaaagatgaatccatttggcacagccccataacgccggagatcagacaacttccactgccccgtgacagttggagggatgtctctggccaggaccaggatgtcattgcagagatgaagagtggctggaccactctccagtttggtgccaggagctaccgtcacatggaaccgatgcacctcgcccaatgcatagcggatacgagtgtcccaggcacacatggcctcgtggctgtcaaagcccagcatgatggcctgagacaggcagatgatagccagggtgtgggccaggccctcatagggcagggcaggctccaggccacagatgtcctccagggtgaggctgctgcgctcccgcaggccctttgaacgttcacacctgtccttgtagaccagcatcagcaggcagtctgccaccggcgatggcttgcgcagcaccagccacctactcttccactgcggagac

SEQ ID NO: 297 - DNA, 2596 bp, Macaca fascicularis
  source 1..2596: mol_type = genomic DNA
tgcccgcgggcccgccctcctggcccagcccagggccctgggagctattttgaaagtgaccctgggctggggcgccggggcgagcgcggcggcgcggaaccatgacagaagatgaccgaggcggcgctggtggagggccaggtcaagctgcgggacggcaagaagtggaagagtaggtggctggtgctgcgcaagccgtcgcccgtggcagactgcctgctgatgctggtctacaaggacaagtcggagcgctccaagggcctgcgggagcgcagcagcctgacactagaggacatctgcgggctggagcccggcctgccctacgaaggcctggcccacacgctggccatcgtctgcctgtcccaggctgtcatgctgggcttcgacagccacgaggccatgtgtgcgtgggatgcccggatccgctatgcgctaggcgaggtgcacaggttccatgtgacagtggctccaggcaccaagttggagagcggcccggccaccctgcacctctgcaatgacatcctcgtcttggccagggacatccccccggctgtcatggggcagtggaagctgtccgacctccggcgctacggggccgtgccgagcggattcatctttgaaggcgggaccaggtgtgggtactgggctggtgtcttcttcctgtcctcggccgagggggagcagatcagcttcctgttcgactgcatcgtccgaggcatctcccccaccaagggcccctttgggctgcggccggttctcccagacccaagtcccccgggaccctcgactgtggaggagcgcgtggcccaggaagccttggaaaccctgcagctggagaagcggctgagcctcctctcgcatgcaggccggccgggcagtggaggggatgaccgcagcctgtccagctcatcctcggaggccagccacttggacgtcagcgccagcagccggctcaccgcatggccagagcagtccttgtcgtcggccagcacgtcgcaggaggggcctagaccagcagctgcccaggcccccggggaagccatgctgggtgcctcaaggccacctcccaagccgctgcggccacggcagctgcaggaggtcggccgccagagctcctcggacagcggcatcgccactggcagccactcctcctactccggcagcctctcgtcctatgcgggcagcagcctggacgtgtggcgggccacggacgaactgggctcactgctcagcctgccagcagccggggcgcccgagcccagcctgtgcgcctgcctgcctggggccgtcgagtaccaggtgcccacctccctgaggccccactacgacacaccacgcagccttcgcctggttcccagggaccacagccccgcctcgcagggcagccccggcgacagtgcggccggggactcaggcggccagacgtccgccgggtgtccctctggctggctgggcacgagacggcggggcctggtgatggaggccccccagggcagcgaggccacactgcccagcccggcccccggagagccctgggaagcaggcagcccccacgcggggccatccccggctttcttttcggcatgtccagtctgtggaggactcaagggagtggccgcctcagccccgggacccgtgacagcacattcaggatccccaggacccgtggctgtggacagcccagggccagagaggccacgcggcgagccacctgcttacgtgaacatccccgtcagccccccctccgggaagcagctgcactacatgggcctggagctccaggaggccagcgagggggtccgaggggccagcgcctccctctacgcccagattgacatcgcggccactgagatggcgcacagagtgggagcgcagcacgcacgggcccgggaggagcagctgtcagagctggagcagaggaaggcagccccgcagtgaagctgcaacgccaggagctgaccacaaacctggcccccgggccacctcgtggcccccagcaggccggccccttctattggtcgtggcctgatccccagggagcccccagtcacaggagagggcatggccggtctccgggccacagtgcgaacaggaagacgtctccagggcccacagccaggcctccggcctcacgagtgctgggggttgacacttcctttggcctgaatgagtcgctctggaccccaggccacctgaggccccgcttccaggcatcaggcagctctggttgctgttgcgcgtctcaggcagaggctgctgcccaggagtgtttgggagcatggtttgtggtgcctgggatgcaaaccgccctctcaccctgggggtgactgcacggatgacagccgtgtcctggcaaaacgctcatcgcttcacctgggtgttgtggccccacagcgccaggacccagtgcccgctcacactgtcggcaccacgcccactcctgaaactggcggctcagacacttccggcgtcccctccccatctcccggctgtcctgcctgggccaccgcagccctgcgcctggggacggagcctggactcttccagccgcctgactgctgcacttcttgggacacattgcagtcagtcatgtaaa

SEQ ID NO: 298 - DNA, 2596 bp, Macaca fascicularis
  source 1..2596: mol_type = genomic DNA
tttacatgactgactgcaatgtgtcccaagaagtgcagcagtcaggcggctggaagagtccaggctccgtccccaggcgcagggctgcggtggcccaggcaggacagccgggagatggggaggggacgccggaagtgtctgagccgccagtttcaggagtgggcgtggtgccgacagtgtgagcgggcactgggtcctggcgctgtggggccacaacacccaggtgaagcgatgagcgttttgccaggacacggctgtcatccgtgcagtcacccccagggtgagagggcggtttgcatcccaggcaccacaaaccatgctcccaaacactcctgggcagcagcctctgcctgagacgcgcaacagcaaccagagctgcctgatgcctggaagcggggcctcaggtggcctggggtccagagcgactcattcaggccaaaggaagtgtcaacccccagcactcgtgaggccggaggcctggctgtgggccctggagacgtcttcctgttcgcactgtggcccggagaccggccatgccctctcctgtgactgggggctccctggggatcaggccacgaccaatagaaggggccggcctgctgggggccacgaggtggcccgggggccaggtttgtggtcagctcctggcgttgcagcttcactgcggggctgccttcctctgctccagctctgacagctgctcctcccgggcccgtgcgtgctgcgctcccactctgtgcgccatctcagtggccgcgatgtcaatctgggcgtagagggaggcgctggcccctcggaccccctcgctggcctcctggagctccaggcccatgtagtgcagctgcttcccggagggggggctgacggggatgttcacgtaagcaggtggctcgccgcgtggcctctctggccctgggctgtccacagccacgggtcctggggatcctgaatgtgctgtcacgggtcccggggctgaggcggccactcccttgagtcctccacagactggacatgccgaaaagaaagccggggatggccccgcgtgggggctgcctgcttcccagggctctccgggggccgggctgggcagtgtggcctcgctgccctggggggcctccatcaccaggccccgccgtctcgtgcccagccagccagagggacacccggcggacgtctggccgcctgagtccccggccgcactgtcgccggggctgccctgcgaggcggggctgtggtccctgggaaccaggcgaaggctgcgtggtgtgtcgtagtggggcctcagggaggtgggcacctggtactcgacggccccaggcaggcaggcgcacaggctgggctcgggcgccccggctgctggcaggctgagcagtgagcccagttcgtccgtggcccgccacacgtccaggctgctgcccgcataggacgagaggctgccggagtaggaggagtggctgccagtggcgatgccgctgtccgaggagctctggcggccgacctcctgcagctgccgtggccgcagcggcttgggaggtggccttgaggcacccagcatggcttccccgggggcctgggcagctgctggtctaggcccctcctgcgacgtgctggccgacgacaaggactgctctggccatgcggtgagccggctgctggcgctgacgtccaagtggctggcctccgaggatgagctggacaggctgcggtcatcccctccactgcccggccggcctgcatgcgagaggaggctcagccgcttctccagctgcagggtttccaaggcttcctgggccacgcgctcctccacagtcgagggtcccgggggacttgggtctgggagaaccggccgcagcccaaaggggcccttggtgggggagatgcctcggacgatgcagtcgaacaggaagctgatctgctccccctcggccgaggacaggaagaagacaccagcccagtacccacacctggtcccgccttcaaagatgaatccgctcggcacggccccgtagcgccggaggtcggacagcttccactgccccatgacagccggggggatgtccctggccaagacgaggatgtcattgcagaggtgcagggtggccgggccgctctccaacttggtgcctggagccactgtcacatggaacctgtgcacctcgcctagcgcatagcggatccgggcatcccacgcacacatggcctcgtggctgtcgaagcccagcatgacagcctgggacaggcagacgatggccagcgtgtgggccaggccttcgtagggcaggccgggctccagcccgcagatgtcctctagtgtcaggctgctgcgctcccgcaggcccttggagcgctccgacttgtccttgtagaccagcatcagcaggcagtctgccacgggcgacggcttgcgcagcaccagccacctactcttccacttcttgccgtcccgcagcttgacctggccctccaccagcgccgcctcggtcatcttctgtcatggttccgcgccgccgcgctcgccccggcgccccagcccagggtcactttcaaaatagctcccagggccctgggctgggccaggagggcgggcccgcgggca

SEQ ID NO: 299 - DNA, 3860 bp, Macaca mulatta
  source 1..3860: mol_type = genomic DNA
cgcccgcgccggccctggagtcgccggtgtcgccgccctgcccgcgggcccgccctcctggcccagcccagggccctgggagctattttgaaagtgaccctgggctggggcgccggggcgagcgcggcggcgcggaaccatgacagaagatgaccgaggcggcgctggtggagggccaggtcaagctgcgggacggcaagaagtggaagagtaggtggctggtgctgcgcaagccgtcgcccgtggcagactgcctgctgatgctggtctacaaggacaagtcggagcgctccaagggcctgcgggagcgcagcagcctgacactagaggacatctgcgggctggagcccggcctgccctacgaaggcctggcccacacgctggccatcgtctgcctgtcccaggctgtcatgctgggcttcgacagccacgaggccatgtgtgcgtgggatgcccggatccgctatgcgctaggcgaggtgcacaggttccatgtgacagtggctccaggcaccaagttggagagcggcccggccaccctgcacctctgcaatgacatcctcgtcttggccagggacatccccccggctgtcacggggcagtggaagctgtccgacctccggcgctacggggccgtgccgagcggattcatctttgaaggcgggaccaggtgtgggtactgggctggtgtcttcttcctgtcctcggccgagggggagcagatcagcttcctgttcgactgcatcgtccgaggcatctcccccaccaagggcccctttgggctgcggccggttctcccagacccaagtcccccgggaccctcgactgtggaggagcgcgtggcccaggaagccttggaaaccctgcagctggagaagcggctgagcctcctctcgcatgcaggccggccgggcagtggaggggatgaccgcagcctgtccagctcatcctcggaggccagccacttggacgtcagcgccagcagccggctcaccgcatggccagagcagtccttgtcgtcggccagcacgtcgcaggaggggcctagaccagcagctgcccaggcccccggggaagccatgctgggtgcctcaaggccacctcccaagccgctgcggccacggcagctgcaggaggtcggccgccagagctcctcggacagcggcatcgccactggcagccactcctcctactccggcagcctctcgtcctatgcgggcagcagcctggacgtgtggcgggccacggacgaactgggctcactgctcagcctgccagcagccggggcgcccgagcccagcctgtgcgcctgcctgcctggggccgtcgagtaccaggtgcccacctccctgaggccccactacgacacaccacgcagccttcgcctggttcccagggaccacagccccgcctcgcagggcagccccggcgacagtgcggccggggactcaggcggccagacgtccgccgggtgtccctctggctggctgggcacgagacggcggggcctggtgatggaggccccccagggcagcgaggccacactgcccagcccggcccccggagagccctgggaagcaggcagcccccacgcggggccatccccggctttcttttcggcatgtccagtctgtggaggactcaagggagtggccgcctcagccccgggacccgtgacagcacattcaggatccccaggacccgtggctgtggacagcccagggccagagaggccacgcggcgagccacctgcttacgtgaacatccccgtcagccccccctccgggaagcagctgcactacatgggcctggagctccaggaggccagcgagggggtccgaggggccagcgcctccctctacgcccagattgacatcgcggccactgagatggcgcacaaagtgggagcgcagcacgcacgggcccgggaggagcagctgtcagagctggagcagaggaaggcagccccgcagtgaagctgcaacgccaggagctgaccacaaacctggcccccgggccacctcgtggcccccagcaggctggccccttctattggtcgtggcctgatccccagggagcccccagtcacaggagagggcatggccggtctccgggccacaatgcgaacaggaagatgtctccagggcccacagccaggcctccggcctcacgagtgctgggggttgacacttcctttggcctgaatgagtcgctctggaccccaggccacctgaggccccgcttccaggcatcaggcagctctggttgctgttgcgcgtctcaggcagaggctgctgcccaggagtgtttgggagcatggtttgtggtgcctggcatgcaaaccgccctctcaccctgggggtgactgcacggatgacagccgtgtcctggcaaaacgctcatcgcttcacctgggtgttgtggccccacagcgccaggacccagtgcccgctcacactgtcggcaccacgcccactcctgagactggcggctcagacacttccggcgtcccctccccatctcccggctgtcctgcctgggccaccgcagccctgtgcctggggacggagcctggactcttccagccgcctgactgctgcacttcttgggacacattgcagtcagtcatgtaaagagcttaaaattctgactgctctgttcctgacaatgcctactttctctctcctggtttctgctcttggacgtggatctgatgtcttcacctggggatgcttggggttgaggcgagcagagctgccttccttggtggcttcctcctgcgtcagtgcggtgctgtggcttgggggttggtgaactgatggggctgtgtgtgtaggtggtgggcgtcctgcgtgccctcaactcctgtggcaggaggaagcaccgggcggcccctgccttgctcccggagatgggctttctgctctgcaagtctccacccatatctgtccgctttcatattcctgcctgtccttcccctgcccctcccctcccctagcagcccatcaaggacctggagagtctgtggttggcctgccccgggggacggcaggcagctgccactgctgctcagtggggccctcagtgggcaggctcagagcactggccctcctggcgcccccactctgcatgtgactgctgaggatgcttggtgtcaaggtggcagcatgcagggtcaacccggagccagctggagccaggacagagatcccctgcttagacgcaaaggccctggggagcgttctgacagacagggcagggctgggctctcagcctggaggatccgtggacaagactttcagctgcacgttggggcaaggcatggcctgcaccctggtccagggttgcagccgtgtcgggcccttagggtggcagagttgagatgtccacctccagggctggccgcatgcaccagctcagacacgcaacctgggtggcacagccccacccctccccatgaccctggcctgctggagctcgggcttcctgttcacaaagtgggagaaactgtcagtccctctgctgctgatgggatcgtggtgctgcgggggagggtttggagcccagacccagtgtgtctgggtgtgccttgggccacacccttttggcacaatggagtggccaggccatgtcctggggaaacggccgcatgaagagtgtggatgtggggctggggctggtcccacggctgtgggaagccaggaagcaggggtcagagtcagacctggccagggcaccacgggtgggagtatggggcccaggtacacccaggcctctagcagagtgcccggggaggctgtgatggcccacgctgtacccggcgcccgtggtgccctggccagggtcccacttgtgtggtg

SEQ ID NO: 300 - DNA, 3860 bp, Macaca mulatta
  source 1..3860: mol_type = genomic DNA
caccacacaagtgggaccctggccagggcaccacgggcgccgggtacagcgtgggccatcacagcctccccgggcactctgctagaggcctgggtgtacctgggccccatactcccacccgtggtgccctggccaggtctgactctgacccctgcttcctggcttcccacagccgtgggaccagccccagccccacatccacactcttcatgcggccgtttccccaggacatggcctggccactccattgtgccaaaagggtgtggcccaaggcacacccagacacactgggtctgggctccaaaccctcccccgcagcaccacgatcccatcagcagcagagggactgacagtttctcccactttgtgaacaggaagcccgagctccagcaggccagggtcatggggaggggtggggctgtgccacccaggttgcgtgtctgagctggtgcatgcggccagccctggaggtggacatctcaactctgccaccctaagggcccgacacggctgcaaccctggaccagggtgcaggccatgccttgccccaacgtgcagctgaaagtcttgtccacggatcctccaggctgagagcccagccctgccctgtctgtcagaacgctccccagggcctttgcgtctaagcaggggatctctgtcctggctccagctggctccgggttgaccctgcatgctgccaccttgacaccaagcatcctcagcagtcacatgcagagtgggggcgccaggagggccagtgctctgagcctgcccactgagggccccactgagcagcagtggcagctgcctgccgtcccccggggcaggccaaccacagactctccaggtccttgatgggctgctaggggaggggaggggcaggggaaggacaggcaggaatatgaaagcggacagatatgggtggagacttgcagagcagaaagcccatctccgggagcaaggcaggggccgcccggtgcttcctcctgccacaggagttgagggcacgcaggacgcccaccacctacacacacagccccatcagttcaccaacccccaagccacagcaccgcactgacgcaggaggaagccaccaaggaaggcagctctgctcgcctcaaccccaagcatccccaggtgaagacatcagatccacgtccaagagcagaaaccaggagagagaaagtaggcattgtcaggaacagagcagtcagaattttaagctctttacatgactgactgcaatgtgtcccaagaagtgcagcagtcaggcggctggaagagtccaggctccgtccccaggcacagggctgcggtggcccaggcaggacagccgggagatggggaggggacgccggaagtgtctgagccgccagtctcaggagtgggcgtggtgccgacagtgtgagcgggcactgggtcctggcgctgtggggccacaacacccaggtgaagcgatgagcgttttgccaggacacggctgtcatccgtgcagtcacccccagggtgagagggcggtttgcatgccaggcaccacaaaccatgctcccaaacactcctgggcagcagcctctgcctgagacgcgcaacagcaaccagagctgcctgatgcctggaagcggggcctcaggtggcctggggtccagagcgactcattcaggccaaaggaagtgtcaacccccagcactcgtgaggccggaggcctggctgtgggccctggagacatcttcctgttcgcattgtggcccggagaccggccatgccctctcctgtgactgggggctccctggggatcaggccacgaccaatagaaggggccagcctgctgggggccacgaggtggcccgggggccaggtttgtggtcagctcctggcgttgcagcttcactgcggggctgccttcctctgctccagctctgacagctgctcctcccgggcccgtgcgtgctgcgctcccactttgtgcgccatctcagtggccgcgatgtcaatctgggcgtagagggaggcgctggcccctcggaccccctcgctggcctcctggagctccaggcccatgtagtgcagctgcttcccggagggggggctgacggggatgttcacgtaagcaggtggctcgccgcgtggcctctctggccctgggctgtccacagccacgggtcctggggatcctgaatgtgctgtcacgggtcccggggctgaggcggccactcccttgagtcctccacagactggacatgccgaaaagaaagccggggatggccccgcgtgggggctgcctgcttcccagggctctccgggggccgggctgggcagtgtggcctcgctgccctggggggcctccatcaccaggccccgccgtctcgtgcccagccagccagagggacacccggcggacgtctggccgcctgagtccccggccgcactgtcgccggggctgccctgcgaggcggggctgtggtccctgggaaccaggcgaaggctgcgtggtgtgtcgtagtggggcctcagggaggtgggcacctggtactcgacggccccaggcaggcaggcgcacaggctgggctcgggcgccccggctgctggcaggctgagcagtgagcccagttcgtccgtggcccgccacacgtccaggctgctgcccgcataggacgagaggctgccggagtaggaggagtggctgccagtggcgatgccgctgtccgaggagctctggcggccgacctcctgcagctgccgtggccgcagcggcttgggaggtggccttgaggcacccagcatggcttccccgggggcctgggcagctgctggtctaggcccctcctgcgacgtgctggccgacgacaaggactgctctggccatgcggtgagccggctgctggcgctgacgtccaagtggctggcctccgaggatgagctggacaggctgcggtcatcccctccactgcccggccggcctgcatgcgagaggaggctcagccgcttctccagctgcagggtttccaaggcttcctgggccacgcgctcctccacagtcgagggtcccgggggacttgggtctgggagaaccggccgcagcccaaaggggcccttggtgggggagatgcctcggacgatgcagtcgaacaggaagctgatctgctccccctcggccgaggacaggaagaagacaccagcccagtacccacacctggtcccgccttcaaagatgaatccgctcggcacggccccgtagcgccggaggtcggacagcttccactgccccgtgacagccggggggatgtccctggccaagacgaggatgtcattgcagaggtgcagggtggccgggccgctctccaacttggtgcctggagccactgtcacatggaacctgtgcacctcgcctagcgcatagcggatccgggcatcccacgcacacatggcctcgtggctgtcgaagcccagcatgacagcctgggacaggcagacgatggccagcgtgtgggccaggccttcgtagggcaggccgggctccagcccgcagatgtcctctagtgtcaggctgctgcgctcccgcaggcccttggagcgctccgacttgtccttgtagaccagcatcagcaggcagtctgccacgggcgacggcttgcgcagcaccagccacctactcttccacttcttgccgtcccgcagcttgacctggccctccaccagcgccgcctcggtcatcttctgtcatggttccgcgccgccgcgctcgccccggcgccccagcccagggtcactttcaaaatagctcccagggccctgggctgggccaggagggcgggcccgcgggcagggcggcgacaccggcgactccagggccggcgcgggcg

SEQ ID NO: 301 - DNA, 8155 bp, Homo sapiens
  source 1..8155: mol_type = genomic DNA
agcgtcggctctggcagcactggaggcggcggcggcccgagggcgacttgcggggcgcgcaggccgccgtgcacccgggacgcttccccctcggggaccctccgcgggcttctccgccgcgccgtccggcgggagccggcgggaccccgggcgagcggcgcgggcggcaccatgaggcggcagtggggcgcgctgctgcttggcgccctgctctgcgcacacggcctggccagcagccccgagtgtgcttgtggtcggagccacttcacatgtgcagtgagtgctcttggagagtgtacctgcatccctgcccagtggcagtgtgatggagacaatgactgcggggaccacagcgatgaggatggatgtatactacctacctgttcccctcttgactttcactgtgacaatggcaagtgcatccgccgctcctgggtgtgtgacggggacaacgactgtgaggatgactcggatgagcaggactgtcccccccgggagtgtgaggaggacgagtttccctgccagaatggctactgcatccggagtctgtggcactgcgatggtgacaatgactgtggcgacaacagcgatgagcagtgtgacatgcgcaagtgctccgacaaggagttccgctgtagtgacggaagctgcattgctgagcattggtactgcgacggtgacaccgactgcaaagatggctccgatgaggagaactgtccctcagcagtgccagcgcccccctgcaacctggaggagttccagtgtgcctatggacgctgcatcctcgacatctaccactgcgatggcgacgatgactgtggagactggtcagacgagtctgactgctcctcccaccagccctgccgctctggggagttcatgtgtgacagtggcctgtgcatcaatgcaggctggcgctgcgatggtgacgcggactgtgatgaccagtctgatgagcgcaactgcaccacctccatgtgtacggcagaacagttccgctgtcactcaggccgctgtgtccgcctgtcctggcgctgtgatggggaggacgactgtgcagacaacagcgatgaagagaactgtgagaatacaggaagcccccaatgtgccttggaccagttcctgtgttggaatgggcgctgcattgggcagaggaagctgtgcaacggggtcaacgactgtggtgacaacagcgacgaaagcccacagcagaattgccggccccggacgggtgaggagaactgcaatgttaacaacggtggctgtgcccagaagtgccagatggtgcggggggcagtgcagtgtacctgccacacaggctaccggctcacagaggatgggcacacgtgccaagatgtgaatgaatgtgccgaggaggggtattgcagccagggctgcaccaacagcgaaggggctttccaatgctggtgtgaaacaggctatgaactacggcccgaccggcgcagctgcaaggctctggggccagagcctgtgctgctgttcgccaatcgcatcgacatccggcaggtgctgccacaccgctctgagtacacactgctgcttaacaacctggagaatgccattgcccttgatttccaccaccgccgcgagcttgtcttctggtcagatgtcaccctggaccggatcctccgtgccaacctcaacggcagcaacgtggaggaggttgtgtctactgggctggagagcccagggggcctggctgtggattgggtccatgacaaactctactggaccgactcaggcacctcgaggattgaggtggccaatctggatggggcccaccggaaagtgttgctgtggcagaacctggagaagccccgggccattgccttgcatcccatggagggtaccatttactggacagactggggcaacaccccccgtattgaggcctccagcatggatggctctggacgccgcatcattgccgatacccatctcttctggcccaatggcctcaccatcgactatgccgggcgccgtatgtactgggtggatgctaagcaccatgtcatcgagagggccaatctggatgggagtcaccgtaaggctgtcattagccagggcctcccgcatcccttcgccatcacagtgtttgaagacagcctgtactggacagactggcacaccaagagcatcaatagcgctaacaaatttacggggaagaaccaggaaatcattcgcaacaaactccacttccctatggacatccacaccttgcacccccagcgccaacctgcagggaaaaaccgctgtggggacaacaacggaggctgcacgcacctgtgtctgcccagtggccagaactacacctgtgcctgccccactggcttccgcaagatcagcagccacgcctgtgcccagagtcttgacaagttcctgctttttgcccgaaggatggacatccgtcgaatcagctttgacacagaggacctgtctgatgatgtcatcccactggctgacgtgcgcagtgctgtggcccttgactgggactcccgggatgaccacgtgtactggacagatgtcagcactgataccatcagcagggccaagtgggatggaacaggacaggaggtggtagtggataccagtttggagagcccagctggcctggccattgattgggtcaccaacaaactgtactggacagatgcaggtacagaccggattgaagtagccaacacagatggcagcatgagaacagtactcatctgggagaaccttgatcgtcctcgggacatcgtggtggaacccatgggcgggtacatgtattggactgactggggtgcgagccccaagattgaacgagctggcatggatgcctcaggccgccaagtcattatctcttctaatctgacctggcctaatgggttagctattgattatgggtcccagcgtctatactgggctgacgccggcatgaagacaattgaatttgctggactggatggcagtaagaggaaggtgctgattggaagccagctcccccacccatttgggctgaccctctatggagagcgcatctattggactgactggcagaccaagagcatacagagcgctgaccggctgacagggctggaccgggagactctgcaggagaacctggaaaacctaatggacatccatgtcttccaccgccgccggcccccagtgtctacaccatgtgctatggagaatggcggctgtagccacctgtgtcttaggtccccaaatccaagcggattcagctgtacctgccccacaggcatcaacctgctgtctgatggcaagacctgctcaccaggcatgaacagtttcctcatcttcgccaggaggatagacattcgcatggtctccctggacatcccttattttgctgatgtggtggtaccaatcaacattaccatgaagaacaccattgccattggagtagacccccaggaaggaaaggtgtactggtctgacagcacactgcacaggatcagtcgtgccaatctggatggctcacagcatgaggacatcatcaccacagggctacagaccacagatgggctcgcggttgatgccattggccggaaagtatactggacagacacgggaacaaaccggattgaagtgggcaacctggacgggtccatgcggaaagtgttggtgtggcagaaccttgacagtccccgggccatcgtactgtaccatgagatggggtttatgtactggacagactggggggagaatgccaagttagagcggtccggaatggatggctcagaccgcgcggtgctcatcaacaacaacctaggatggcccaatggactgactgtggacaaggccagctcccaactgctatgggccgatgcccacaccgagcgaattgaggctgctgacctgaatggtgccaatcggcatacattggtgtcaccggtgcagcacccatatggcctcaccctgctcgactcctatatctactggactgactggcagactcggagcatccaccgtgctgacaagggtactggcagcaatgtcatcctcgtgaggtccaacctgccaggcctcatggacatgcaggctgtggaccgggcacagccactaggttttaacaagtgcggctcgagaaatggcggctgctcccacctctgcttgcctcggccttctggcttctcctgtgcctgccccactggcatccagctgaagggagatgggaagacctgtgatccctctcctgagacctacctgctcttctccagccgtggctccatccggcgtatctcactggacaccagtgaccacaccgatgtgcatgtccctgttcctgagctcaacaatgtcatctccctggactatgacagcgtggatggaaaggtctattacacagatgtgttcctggatgttatcaggcgagcagacctgaacggcagcaacatggagacagtgatcgggcgagggctgaagaccactgacgggctggcagtggactgggtggccaggaacctgtactggacagacacaggtcgaaataccattgaggcgtccaggctggatggttcctgccgcaaagtactgatcaacaatagcctggatgagccccgggccattgctgttttccccaggaaggggtacctcttctggacagactggggccacattgccaagatcgaacgggcaaacttggatggttctgagcggaaggtcctcatcaacacagacctgggttggcccaatggccttaccctggactatgatacccgcaggatctactgggtggatgcgcatctggaccggatcgagagtgctgacctcaatgggaaactgcggcaggtcttggtcagccatgtgtcccacccctttgccctcacacagcaagacaggtggatctactggacagactggcagaccaagtcaatccagcgtgttgacaaatactcaggccggaacaaggagacagtgctggcaaatgtggaaggactcatggatatcatcgtggtttcccctcagcggcagacagggaccaatgcctgtggtgtgaacaatggtggctgcacccacctctgctttgccagagcctcggacttcgtatgtgcctgtcctgacgaacctgatagccggccctgctcccttgtgcctggcctggtaccaccagctcctagggctactggcatgagtgaaaagagcccagtgctacccaacacaccacctaccaccttgtattcttcaaccacccggacccgcacgtctctggaggaggtggaaggaagatgctctgaaagggatgccaggctgggcctctgtgcacgttccaatgacgctgttcctgctgctccaggggaaggacttcatatcagctacgccattggtggactcctcagtattctgctgattttggtggtgattgcagctttgatgctgtacagacacaaaaaatccaagttcactgatcctggaatggggaacctcacctacagcaacccctcctaccgaacatccacacaggaagtgaagattgaagcaatccccaaaccagccatgtacaaccagctgtgctataagaaagagggagggcctgaccataactacaccaaggagaagatcaagatcgtagagggaatctgcctcctgtctggggatgatgctgagtgggatgacctcaagcaactgcgaagctcacgggggggcctcctccgggatcatgtatgcatgaagacagacacggtgtccatccaggccagctctggctccctggatgacacagagacggagcagctgttacaggaagagcagtctgagtgtagcagcgtccatactgcagccactccagaaagacgaggctctctgccagacacgggctggaaacatgaacgcaagctctcctcagagagccaggtctaaatgcccacattctcttccctgcctgcctgttccttctcctttatggacgtctagtccttgtgctcgcttacaccgcaggccccgcttctgtgtgcttgtcctcctcctcctcccaccccataactgttcctaagccttcaccggagctgtttaccacgtgagtccataactacctgtgcacaagaaatgatggcacatcacgagaatttagacctggattttaccatgaacctcacatcttgtactccatcctgggccccctgaaactgcttattcgtgattcctcaccagcgtagagctccacctcccctttccccagtaccctcagtgcctgcttctcagtgctgatgcagctgatgacccaggactgcgctctgccccatcacagccagcatgactgcttctctgagagaacttgcccatcaggggctgggacatgggggtgtgggtaaagacagggatgaaggatagaggctgagagaagaaggaagaatcagcccagcaggtatgggcatctgggaaacctccagcctcaagtgtgttagtaacatgaaaaagctttggggggtagttggatctgggtgtctggtccattgctggcagtggacattattcttgccctaagagacactgccttttcagcagcagatactggtgagatgggggtggctcaggctgttcttcctcctcctagaatgtctggagctgtttctacattcagataactgggtcccctatcacaaggctactggctaataggaattccctcctggtgccaccactggccagtacctttcctaagtctttgctcaaattaaccaggttgtgagccagtggcttgagtgaatgttaggccttgggggctgagtctctgaaaagtctaagaagctctgcctagaccaaatatggtatacctcctgacccctctctccctcatgtcctgggattctggggaagagacctagaaacaagctttcaaagaaaaaccagaagttgtcataaatggtcagaaagaacgatcaggttggagacttgggaaacccagggcctaaagagaagtatccatgagggtcaaacttcctgttgaacttcctatgttctttctcaagtgctcagggatctaagttagtggacagcaagcctgtggctacggggtggtgatgttcctcttccagctgtcccctcagctaaggggcttagtttccatgtgggatgccatcacttggttcatgctcattcacacaaagggcacgtgtctcagcctggtatcagggaaattgagacttatttttgccctaaaacgtctccctagctgttcttcgtggggtttttttgtttgtttttttgcctaatttgctttttctgaccaagccttgtggcaccagcaatctccaaagtcctgtggtgggagggctgaataaataaaaatacaaagaggtgggtaaggagtaggaaggtagagagcaccactgatgaggccctcctagcccatggcagacccagacctcttctcccccaggaattagaagtggcaggagagaacaacaggggctgggaatggaggggagaatttctaggggaagtttcctgagttgaaacttctcctgtggttactggtattgagaaatcagctaccaaagtgaaaaaggacaagatcaattcttttctagtcagttctaagactgctagagagagataccaggcccttagccttgctctcagtagcgtcagccccagttctgagcctccccacattacacttaacaagcagtaaaggagtgagcactttgggtccttagactcacgtctggggaggaagagcaagtagaaaagtggcattttcttgattggaaagggggaaggatcttattgcacttgggctgttcagaatgtagaaaggacatatttgaggaagtatctatttgagcactgatttactctgtaaaaagcaaaatctctctgtcctaaactaatggaagcgattctcccatgctcatgtgtaatggttttaacgttactcactggagagattggactttctggagttatttaaccactatgttcagtattttaggactttatgataatttaatataaatttagcttttcttaatcaccttgcctggcttggagtcatgactaatcctgcacctgctctgtctggcagacccatgctgtggaaaacctgcttacagacatcacttttaagtcctttgtggatgtgggcacagtgaagagcaataaagagtgtgaggttcctgctgga

SEQ ID NO: 302 - DNA, 8155 bp, Homo sapiens
  source 1..8155: mol_type = genomic DNA
tccagcaggaacctcacactctttattgctcttcactgtgcccacatccacaaaggacttaaaagtgatgtctgtaagcaggttttccacagcatgggtctgccagacagagcaggtgcaggattagtcatgactccaagccaggcaaggtgattaagaaaagctaaatttatattaaattatcataaagtcctaaaatactgaacatagtggttaaataactccagaaagtccaatctctccagtgagtaacgttaaaaccattacacatgagcatgggagaatcgcttccattagtttaggacagagagattttgctttttacagagtaaatcagtgctcaaatagatacttcctcaaatatgtcctttctacattctgaacagcccaagtgcaataagatccttccccctttccaatcaagaaaatgccacttttctacttgctcttcctccccagacgtgagtctaaggacccaaagtgctcactcctttactgcttgttaagtgtaatgtggggaggctcagaactggggctgacgctactgagagcaaggctaagggcctggtatctctctctagcagtcttagaactgactagaaaagaattgatcttgtcctttttcactttggtagctgatttctcaataccagtaaccacaggagaagtttcaactcaggaaacttcccctagaaattctcccctccattcccagcccctgttgttctctcctgccacttctaattcctgggggagaagaggtctgggtctgccatgggctaggagggcctcatcagtggtgctctctaccttcctactccttacccacctctttgtatttttatttattcagccctcccaccacaggactttggagattgctggtgccacaaggcttggtcagaaaaagcaaattaggcaaaaaaacaaacaaaaaaaccccacgaagaacagctagggagacgttttagggcaaaaataagtctcaatttccctgataccaggctgagacacgtgccctttgtgtgaatgagcatgaaccaagtgatggcatcccacatggaaactaagccccttagctgaggggacagctggaagaggaacatcaccaccccgtagccacaggcttgctgtccactaacttagatccctgagcacttgagaaagaacataggaagttcaacaggaagtttgaccctcatggatacttctctttaggccctgggtttcccaagtctccaacctgatcgttctttctgaccatttatgacaacttctggtttttctttgaaagcttgtttctaggtctcttccccagaatcccaggacatgagggagagaggggtcaggaggtataccatatttggtctaggcagagcttcttagacttttcagagactcagcccccaaggcctaacattcactcaagccactggctcacaacctggttaatttgagcaaagacttaggaaaggtactggccagtggtggcaccaggagggaattcctattagccagtagccttgtgataggggacccagttatctgaatgtagaaacagctccagacattctaggaggaggaagaacagcctgagccacccccatctcaccagtatctgctgctgaaaaggcagtgtctcttagggcaagaataatgtccactgccagcaatggaccagacacccagatccaactaccccccaaagctttttcatgttactaacacacttgaggctggaggtttcccagatgcccatacctgctgggctgattcttccttcttctctcagcctctatccttcatccctgtctttacccacacccccatgtcccagcccctgatgggcaagttctctcagagaagcagtcatgctggctgtgatggggcagagcgcagtcctgggtcatcagctgcatcagcactgagaagcaggcactgagggtactggggaaaggggaggtggagctctacgctggtgaggaatcacgaataagcagtttcagggggcccaggatggagtacaagatgtgaggttcatggtaaaatccaggtctaaattctcgtgatgtgccatcatttcttgtgcacaggtagttatggactcacgtggtaaacagctccggtgaaggcttaggaacagttatggggtgggaggaggaggaggacaagcacacagaagcggggcctgcggtgtaagcgagcacaaggactagacgtccataaaggagaaggaacaggcaggcagggaagagaatgtgggcatttagacctggctctctgaggagagcttgcgttcatgtttccagcccgtgtctggcagagagcctcgtctttctggagtggctgcagtatggacgctgctacactcagactgctcttcctgtaacagctgctccgtctctgtgtcatccagggagccagagctggcctggatggacaccgtgtctgtcttcatgcatacatgatcccggaggaggcccccccgtgagcttcgcagttgcttgaggtcatcccactcagcatcatccccagacaggaggcagattccctctacgatcttgatcttctccttggtgtagttatggtcaggccctccctctttcttatagcacagctggttgtacatggctggtttggggattgcttcaatcttcacttcctgtgtggatgttcggtaggaggggttgctgtaggtgaggttccccattccaggatcagtgaacttggattttttgtgtctgtacagcatcaaagctgcaatcaccaccaaaatcagcagaatactgaggagtccaccaatggcgtagctgatatgaagtccttcccctggagcagcaggaacagcgtcattggaacgtgcacagaggcccagcctggcatccctttcagagcatcttccttccacctcctccagagacgtgcgggtccgggtggttgaagaatacaaggtggtaggtggtgtgttgggtagcactgggctcttttcactcatgccagtagccctaggagctggtggtaccaggccaggcacaagggagcagggccggctatcaggttcgtcaggacaggcacatacgaagtccgaggctctggcaaagcagaggtgggtgcagccaccattgttcacaccacaggcattggtccctgtctgccgctgaggggaaaccacgatgatatccatgagtccttccacatttgccagcactgtctccttgttccggcctgagtatttgtcaacacgctggattgacttggtctgccagtctgtccagtagatccacctgtcttgctgtgtgagggcaaaggggtgggacacatggctgaccaagacctgccgcagtttcccattgaggtcagcactctcgatccggtccagatgcgcatccacccagtagatcctgcgggtatcatagtccagggtaaggccattgggccaacccaggtctgtgttgatgaggaccttccgctcagaaccatccaagtttgcccgttcgatcttggcaatgtggccccagtctgtccagaagaggtaccccttcctggggaaaacagcaatggcccggggctcatccaggctattgttgatcagtactttgcggcaggaaccatccagcctggacgcctcaatggtatttcgacctgtgtctgtccagtacaggttcctggccacccagtccactgccagcccgtcagtggtcttcagccctcgcccgatcactgtctccatgttgctgccgttcaggtctgctcgcctgataacatccaggaacacatctgtgtaatagacctttccatccacgctgtcatagtccagggagatgacattgttgagctcaggaacagggacatgcacatcggtgtggtcactggtgtccagtgagatacgccggatggagccacggctggagaagagcaggtaggtctcaggagagggatcacaggtcttcccatctcccttcagctggatgccagtggggcaggcacaggagaagccagaaggccgaggcaagcagaggtgggagcagccgccatttctcgagccgcacttgttaaaacctagtggctgtgcccggtccacagcctgcatgtccatgaggcctggcaggttggacctcacgaggatgacattgctgccagtacccttgtcagcacggtggatgctccgagtctgccagtcagtccagtagatataggagtcgagcagggtgaggccatatgggtgctgcaccggtgacaccaatgtatgccgattggcaccattcaggtcagcagcctcaattcgctcggtgtgggcatcggcccatagcagttgggagctggccttgtccacagtcagtccattgggccatcctaggttgttgttgatgagcaccgcgcggtctgagccatccattccggaccgctctaacttggcattctccccccagtctgtccagtacataaaccccatctcatggtacagtacgatggcccggggactgtcaaggttctgccacaccaacactttccgcatggacccgtccaggttgcccacttcaatccggtttgttcccgtgtctgtccagtatactttccggccaatggcatcaaccgcgagcccatctgtggtctgtagccctgtggtgatgatgtcctcatgctgtgagccatccagattggcacgactgatcctgtgcagtgtgctgtcagaccagtacacctttccttcctgggggtctactccaatggcaatggtgttcttcatggtaatgttgattggtaccaccacatcagcaaaataagggatgtccagggagaccatgcgaatgtctatcctcctggcgaagatgaggaaactgttcatgcctggtgagcaggtcttgccatcagacagcaggttgatgcctgtggggcaggtacagctgaatccgcttggatttggggacctaagacacaggtggctacagccgccattctccatagcacatggtgtagacactgggggccggcggcggtggaagacatggatgtccattaggttttccaggttctcctgcagagtctcccggtccagccctgtcagccggtcagcgctctgtatgctcttggtctgccagtcagtccaatagatgcgctctccatagagggtcagcccaaatgggtgggggagctggcttccaatcagcaccttcctcttactgccatccagtccagcaaattcaattgtcttcatgccggcgtcagcccagtatagacgctgggacccataatcaatagctaacccattaggccaggtcagattagaagagataatgacttggcggcctgaggcatccatgccagctcgttcaatcttggggctcgcaccccagtcagtccaatacatgtacccgcccatgggttccaccacgatgtcccgaggacgatcaaggttctcccagatgagtactgttctcatgctgccatctgtgttggctacttcaatccggtctgtacctgcatctgtccagtacagtttgttggtgacccaatcaatggccaggccagctgggctctccaaactggtatccactaccacctcctgtcctgttccatcccacttggccctgctgatggtatcagtgctgacatctgtccagtacacgtggtcatcccgggagtcccagtcaagggccacagcactgcgcacgtcagccagtgggatgacatcatcagacaggtcctctgtgtcaaagctgattcgacggatgtccatccttcgggcaaaaagcaggaacttgtcaagactctgggcacaggcgtggctgctgatcttgcggaagccagtggggcaggcacaggtgtagttctggccactgggcagacacaggtgcgtgcagcctccgttgttgtccccacagcggtttttccctgcaggttggcgctgggggtgcaaggtgtggatgtccatagggaagtggagtttgttgcgaatgatttcctggttcttccccgtaaatttgttagcgctattgatgctcttggtgtgccagtctgtccagtacaggctgtcttcaaacactgtgatggcgaagggatgcgggaggccctggctaatgacagccttacggtgactcccatccagattggccctctcgatgacatggtgcttagcatccacccagtacatacggcgcccggcatagtcgatggtgaggccattgggccagaagagatgggtatcggcaatgatgcggcgtccagagccatccatgctggaggcctcaatacggggggtgttgccccagtctgtccagtaaatggtaccctccatgggatgcaaggcaatggcccggggcttctccaggttctgccacagcaacactttccggtgggccccatccagattggccacctcaatcctcgaggtgcctgagtcggtccagtagagtttgtcatggacccaatccacagccaggccccctgggctctccagcccagtagacacaacctcctccacgttgctgccgttgaggttggcacggaggatccggtccagggtgacatctgaccagaagacaagctcgcggcggtggtggaaatcaagggcaatggcattctccaggttgttaagcagcagtgtgtactcagagcggtgtggcagcacctgccggatgtcgatgcgattggcgaacagcagcacaggctctggccccagagccttgcagctgcgccggtcgggccgtagttcatagcctgtttcacaccagcattggaaagccccttcgctgttggtgcagccctggctgcaatacccctcctcggcacattcattcacatcttggcacgtgtgcccatcctctgtgagccggtagcctgtgtggcaggtacactgcactgccccccgcaccatctggcacttctgggcacagccaccgttgttaacattgcagttctcctcacccgtccggggccggcaattctgctgtgggctttcgtcgctgttgtcaccacagtcgttgaccccgttgcacagcttcctctgcccaatgcagcgcccattccaacacaggaactggtccaaggcacattgggggcttcctgtattctcacagttctcttcatcgctgttgtctgcacagtcgtcctccccatcacagcgccaggacaggcggacacagcggcctgagtgacagcggaactgttctgccgtacacatggaggtggtgcagttgcgctcatcagactggtcatcacagtccgcgtcaccatcgcagcgccagcctgcattgatgcacaggccactgtcacacatgaactccccagagcggcagggctggtgggaggagcagtcagactcgtctgaccagtctccacagtcatcgtcgccatcgcagtggtagatgtcgaggatgcagcgtccataggcacactggaactcctccaggttgcaggggggcgctggcactgctgagggacagttctcctcatcggagccatctttgcagtcggtgtcaccgtcgcagtaccaatgctcagcaatgcagcttccgtcactacagcggaactccttgtcggagcacttgcgcatgtcacactgctcatcgctgttgtcgccacagtcattgtcaccatcgcagtgccacagactccggatgcagtagccattctggcagggaaactcgtcctcctcacactcccgggggggacagtcctgctcatccgagtcatcctcacagtcgttgtccccgtcacacacccaggagcggcggatgcacttgccattgtcacagtgaaagtcaagaggggaacaggtaggtagtatacatccatcctcatcgctgtggtccccgcagtcattgtctccatcacactgccactgggcagggatgcaggtacactctccaagagcactcactgcacatgtgaagtggctccgaccacaagcacactcggggctgctggccaggccgtgtgcgcagagcagggcgccaagcagcagcgcgccccactgccgcctcatggtgccgcccgcgccgctcgcccggggtcccgccggctcccgccggacggcgcggcggagaagcccgcggagggtccccgagggggaagcgtcccgggtgcacggcggcctgcgcgccccgcaagtcgccctcgggccgccgccgcctccagtgctgccagagccgacgct

SEQ ID NO: 303 - DNA, 8028 bp, Mus musculus
  source 1..8028: mol_type = genomic DNA
aggaggcagcagcagcccggagggcgacttgcagggcgcgccggccgagctggacccgggacgcttttcaacccgggggaaccctccgctgattctctccgccccggcgtcccttgggagcccgcgggacccccgggccggcagggaacgccggcggcggccgcagcaccatgaggcggtggtggggcgcgctgctgcttggcgccctgctctgcgcacacggaatagccagcagtctggagtgtgcatgtggtcggagccacttcacatgtgcggtgagcgcgcttggcgaatgtacctgtatccccgcccagtggcagtgtgatggagacaatgactgtggagaccacagcgatgaggatggctgtacgctgcctacctgctcccctctggacttccactgtgacaacggcaagtgcatccgacgctcctgggtgtgtgacggggacaatgactgtgaagatgactctgatgagcaggactgtcccccccgggagtgtgaggaggacgaattcccctgccagaacggctactgcattcggagtctgtggcactgtgatggggacaacgactgtggtgacaacagtgacgagcaatgcgacatgcgcaagtgctcagacaaggaattccgctgcagcgacggcagctgcattgctgagcattggtactgcgatggtgacacagactgcaaagatggctctgatgaggaaagctgcccttcagcagtaccctctcctccttgcaacctggaagagttccagtgcgcctatggccgctgcatcctcgacatctaccactgtgacggagatgacgactgtggagactggtcagacgagtctgactgctcctcccaccagccctgccgctctggggaattcatgtgtgacagtggcctgtgcatcaactcgggctggcgctgtgatggtgatgcagactgtgatgaccagtctgatgaacgcaactgcaccacctccatgtgcacagccgaacagtttcgctgtcggtcaggccgttgcgtccgtctgtcctggcgctgtgatggggaggatgactgtgcggacaacagcgatgaagaaaactgtgagaacacaggaagcccccagtgcgcctctgaccagttcctgtgttggaacgggcgctgtattgggcagaggaagctgtgcaacgggatcaacgactgcggtgacagcagtgacgaaagtccacagcagaactgtcggccccggacgggtgaggagaactgcaatgttaacaacggtggctgtgcccagaagtgtcagatggtgcgaggggcagtgcagtgtacctgccacacaggctaccggctcacagaggatgggagaacgtgccaggatgtaaacgaatgtgctgaggaggggtactgcagccagggctgcacaaacactgaaggggctttccagtgctggtgtgaagcagggtatgagctacggcccgatcggcgcagctgcaaagctctggggccagaacctgtgctactgtttgccaatcgtatcgacatccggcaggtgctcccgcaccgctccgagtacacgctgctactgaacaacctggagaacgccattgccctcgactttcatcaccggcgggagctggtcttctggtcggatgtcaccctggaccgcatcctccgtgccaaccttaatggcagcaatgtagaggaggtggtgtctactgggctagagagcccagggggcctagcggtggattgggtccatgacaagctctactggaccgactctgggacgtcgaggattgaggtggctaatctggatggggcccaccggaaggtgctgctatggcagagcctagagaagcccagagccattgccctacaccccatggagggaaccatttattggacagactggggcaacaccccccgcattgaggcctccagcatggacggctctgggcgtcgcatcattgctgacactcatcttttctggcccaacggcctcaccatcgactacgctggtcgccgcatgtactgggtggatgctaagcaccacgtcatcgagagggccaatctagatgggagtcaccgcaaggctgtcattagccagggcctcccacatccctttgccatcacagtgtttgaagacagcttgtattggacagactggcacaccaagagcatcaatagtgccaacaagtttacggggaagaaccaggaaatcattcgcaacaagctccactttcctatggacattcataccttgcacccccagcgccagcccgcagggaaaaaccgctgtggggacaacaatggaggttgcactcacctgtgtctacccagtggccagaactacacctgtgcctgccccaccggcttccgcaagatcaacagccacgcctgtgcccagagtcttgacaagttcctgctttttgcccgaaggatggacatccgtcggatcagcttcgacacagaggacctgtccgacgatgtcatcccactggctgacgtgcgcagtgctgtggcccttgactgggactcccgggatgaccacgtgtattggacagatgtcagcactgataccatcagcagggccaagtgggatggaacaggacaggaggtggtagtggataccagtttggagagccctgctggcctggcaattgattgggtcaccaacaagctctactggacagatgcaggcacggacaggatcgaagtggccaacacagatggcagcatgaggacagtgctcatctgggagaaccttgaccgtcctcgggacatagtggtagagcccatgggcgggtacatgtattggactgactggggtgcaagtcccaagattgaacgggctggcatggacgcctccagccgacaagtcatcatctcttcgaacctgacctggcctaatggattggctattgactacggctctcagcggctgtactgggcggatgccggcatgaagactattgaatttgctgggctggatggcagcaagaggaaggtactaattggaagccagctcccccacccttttgggctgactctatatggacagcgcatctattggactgactggcagaccaagagtatacaaagtgctgaccggctgactgggctagaccgggagactctgcaggagaacctggagaacctcatggacattcatgtcttccaccgccagaggcctccagtgacgacgctgtgtgccgtggagaatggcggctgcagccatttgtgtctcaggtccccaaatccgagcggcttcagctgcacctgccccacaggtatcaacctgctacgagatggcaagacatgctcaccaggcatgaacagtttcctcatcttcgccaggaggattgatgttcgcatggtctccttggatatcccttattttgctgatgtggtggtacccatcaacatgaccatgaagaacaccatcgccattggagtggatccgctggaaggaaaagtgtactggtctgacagcacgctgcacaggatcagccgtgccagcctggatggctcacagcatgaggacatcatcactacaggtctgcagaccacagacgggcttgcagtggatgccatcggccggaaagtgtactggacagacacaggaacgaatcggattgaagttggcaacctggatgggtctatgcggaaagtgttggtgtggcagaaccttgacagtccccgggccattgtattataccatgaaatggggttcatgtactggacagactggggggagaacgccaaattagagcgttccggaatggatggctcagaccgtactgtgctcatcaacaacaacctagggtggcccaatggactgactgtggacaagaccagttcccaactgctgtgggctgatgcccatactgagagaattgaggtggcagacctgaatggcgctaatcggcatacactggtgtcaccagtccagcacccatatggcctcactctgcttgactcctatatctactggactgactggcagacccgcagcatccaccgggccgacaagagtactggcagcaatgtcatccttgtgaggtccaacctgccaggcctcatggacatccaagctgttgaccgggcacagccactgggttttaataaatgtggctcaagaaatggcggctgttcccacctctgtttacctcggccttctggtttctcctgtgcctgtcccactggcattcagctgaagggagacaggaagacctgtgacccctctccagaaacctacctgctcttctctagccgaggctctattcgccgtatctcactggacaccgatgaccacacagacgtgcacgttcctgttcctgggctcaacaatgtcatctccctagactatgacagtgtgcatggaaaggtctattacacagatgtgttcctggatgttatcaggcgagcagacctgaatggcagcaacatggagactgttattggacacgggcttaagaccactgacgggctggcagtggactgggttgccagaaacctgtactggacagataccggccgaaataccatcgaagcatctcggctagatggatcctgtcgcaaagtgctaatcaacaacagtctagacgagccccgggccattgctgttttccccagaaaggggtacctcttctggacagactggggccacattgccaagattgaacgggcaaacctggatggctctgagaggaaggtcctcatcaacacagacctaggctggcccaacggcctcaccttggactatgatacccgcaggatctactgggtagatgcacatctggatcggatcgagagtgctgacctcaatgggaagctgaggcaggtcttggtcagccatgtgtcccacccctttgccctcacacagcaggacaggtggatctactggacggactggcagaccaaatcgatccaacgtgtcgacaagtactcgggccgcaacaaggagacagtactggccaacgtggagggacttatggatattattgtggtgtcccctcagcggcagacagggaccaatgcctgcggtgtgaataatggtggctgtactcacctctgctttgcccgagcctctgactttgtgtgcgcgtgtcctgatgagcctgacggtcatccctgctcccttgtacctggcctcgtacctcctgctcccagagctaccagcatgaatgagaagagcccagtgctacccaacacgctgcccaccaccttacattcttctaccaccaagacccgcacctctctggagggggcaggaggaagatgctctgaaagggatgcccagctgggcctctgtgcacattccaatgaagccgtccctgctgctccaggtgaaggactgcacgtcagctatgccatcggtggactcctcagtatcctgctgattttgttggtgatcgcggctttgatgctatacagacacagaaaatccaagttcacggatcctggaatgggaaacctgacctatagcaacccctcctaccgaacttccactcaggaagtgaaacttgaagcagctcccaagccagccgtgtataatcagctgtgctataagaaagagggtggacctgaccacagctacaccaaggagaagatcaagattgtagagggaatccgcctcctggctggggatgacgctgaatggggtgacctcaagcaactgcgcagctccagggggggccttctacgggatcacgtatgcatgaagacagacacagtgtccatccaggccagctctggctccctagatgacacggagacagagcagctgcttcaggaagagcagtctgagtgtagcagtgttcacactgcagccactccggagagacggggctctctgccagacacaggctggaaacacgaacgcaagctctcctcagaaagccaggtctaagtgctgcccacattctcttccctgcctgcctgttcattctcctctgtggacttctgatccttgtgctcacataacaacgcgggccctttcccatgcacgcatcttcctcctcccaccccaaagtgctcccgagcccccatagaacctgttactcatctgagtccaaaactacctggggacaagaagtgagggcacatctcaagaatttagacctggattttaccatgaacttcacctcttgcactctatcctgggccccctgaagctgggctcagtgtgattccttgtcagcacagagctccgtctccctttgccctggcatcctatgtgcctgccccacagcaccgatgcaattcatgatataagactctggtcttccccatcacagctggcatgatggcctccctgtgaactggcctaccaggggctgggactggaggtcacaggttaaaaggtaatggacagaggttgagagaaggaagaagcagcccagctggtctgggtgcttgggaaacctccagcctcaagtgttggtaattatgaaaaaccttggggggcggggattcgagccctggaatcatgtccattgctggcagtggacattctcctcatccagaagtcactgctttgtcagttgtgatacaggtgaagtgtgggaatggcttaggctcttcttcctcctgctggaatgtctggggccatttctaccttggataactggatagctcctgccatggcaactcactaataggaattccctcctggtgctgtgatgggccgtacttttcttaagcctttagctatgctgtgagcttgagtgaacattgggtgggccttggagagcagacttgtagaacgtttaagaagctctgcaaagaaagcatagcatcctacccgagcttcacctattctactcttctctcttccattctgtgggattctaagggaaacaattctgtcacagcctttcaaagactggctcaacattttcctaaatggtcagaaagagcaactagagagacacaagacacccaggggctcaggaggagaattgtgaggttgaacctcttgagttcattctcaagtgctcagggatccaagttcatggacacagcctgtggctctcgggtggtaaaggtcatgtgccaactcttctcagcccctgtccacactaaagtgccagcattagcttcatgctcctttaggccaagggcttctctcaggggagctgagatttttttttttttttttttttttttttttttgtgctgccctagaatctcatcccagtttttctacttctgagagaggggagtctagccttgctttctctaaccggtcctgtgtcacctcaatcgctaatgtccaatgatgaggagggtcagtgaagatgtaaagtggtaagcaaggagtggagaggtggtgagaaccagtccagagcaagttcaggcacttctccatagaaaccgaagcacaggagagattggcaggtgctgagaatggaggagaggacttttaggggaagtttcctgacataaaacatctttcatggtttattgctattcagagatcagcagccaggcatcgcatgaacaaacaagatcaaatcttttctggtcagttattacgagtaagagacagatgtcaaaccattagtcttgttgtcattagctaggcccagatatatgtctgcacacagagccagagcaggccaatggccttttccagtaaaccaattgagaaaagtacagtgccacttctaagaggaaagatggacatttcacacagaatgaggcagcacttgagcctttaaatccatagttggggaggagggggggggggggaaacagaagcgtggtgtcctcctgagtggaaaggggcaaggatctttttgcacttgggctgttcagaatgtagaaaggacgaatttgaggaaatatctatttgagcactgatttactctgtaaaaagggcaaaaatctctctgtcctaaactaatggaagcgattttcccatgctcatgtgtaatgattttaacattactcactggagagattggactttctggagttatttaaccactatgttcagtattttagggctttatgataatttaatataaatttagctttcttaatta

SEQ ID NO: 304 - DNA, 8028 bp, Mus musculus
  source 1..8028: mol_type = genomic DNA
taattaagaaagctaaatttatattaaattatcataaagccctaaaatactgaacatagtggttaaataactccagaaagtccaatctctccagtgagtaatgttaaaatcattacacatgagcatgggaaaatcgcttccattagtttaggacagagagatttttgccctttttacagagtaaatcagtgctcaaatagatatttcctcaaattcgtcctttctacattctgaacagcccaagtgcaaaaagatccttgcccctttccactcaggaggacaccacgcttctgtttccccccccccccctcctccccaactatggatttaaaggctcaagtgctgcctcattctgtgtgaaatgtccatctttcctcttagaagtggcactgtacttttctcaattggtttactggaaaaggccattggcctgctctggctctgtgtgcagacatatatctgggcctagctaatgacaacaagactaatggtttgacatctgtctcttactcgtaataactgaccagaaaagatttgatcttgtttgttcatgcgatgcctggctgctgatctctgaatagcaataaaccatgaaagatgttttatgtcaggaaacttcccctaaaagtcctctcctccattctcagcacctgccaatctctcctgtgcttcggtttctatggagaagtgcctgaacttgctctggactggttctcaccacctctccactccttgcttaccactttacatcttcactgaccctcctcatcattggacattagcgattgaggtgacacaggaccggttagagaaagcaaggctagactcccctctctcagaagtagaaaaactgggatgagattctagggcagcacaaaaaaaaaaaaaaaaaaaaaaaaaaaaaaatctcagctcccctgagagaagcccttggcctaaaggagcatgaagctaatgctggcactttagtgtggacaggggctgagaagagttggcacatgacctttaccacccgagagccacaggctgtgtccatgaacttggatccctgagcacttgagaatgaactcaagaggttcaacctcacaattctcctcctgagcccctgggtgtcttgtgtctctctagttgctctttctgaccatttaggaaaatgttgagccagtctttgaaaggctgtgacagaattgtttcccttagaatcccacagaatggaagagagaagagtagaataggtgaagctcgggtaggatgctatgctttctttgcagagcttcttaaacgttctacaagtctgctctccaaggcccacccaatgttcactcaagctcacagcatagctaaaggcttaagaaaagtacggcccatcacagcaccaggagggaattcctattagtgagttgccatggcaggagctatccagttatccaaggtagaaatggccccagacattccagcaggaggaagaagagcctaagccattcccacacttcacctgtatcacaactgacaaagcagtgacttctggatgaggagaatgtccactgccagcaatggacatgattccagggctcgaatccccgccccccaaggtttttcataattaccaacacttgaggctggaggtttcccaagcacccagaccagctgggctgcttcttccttctctcaacctctgtccattaccttttaacctgtgacctccagtcccagcccctggtaggccagttcacagggaggccatcatgccagctgtgatggggaagaccagagtcttatatcatgaattgcatcggtgctgtggggcaggcacataggatgccagggcaaagggagacggagctctgtgctgacaaggaatcacactgagcccagcttcagggggcccaggatagagtgcaagaggtgaagttcatggtaaaatccaggtctaaattcttgagatgtgccctcacttcttgtccccaggtagttttggactcagatgagtaacaggttctatgggggctcgggagcactttggggtgggaggaggaagatgcgtgcatgggaaagggcccgcgttgttatgtgagcacaaggatcagaagtccacagaggagaatgaacaggcaggcagggaagagaatgtgggcagcacttagacctggctttctgaggagagcttgcgttcgtgtttccagcctgtgtctggcagagagccccgtctctccggagtggctgcagtgtgaacactgctacactcagactgctcttcctgaagcagctgctctgtctccgtgtcatctagggagccagagctggcctggatggacactgtgtctgtcttcatgcatacgtgatcccgtagaaggccccccctggagctgcgcagttgcttgaggtcaccccattcagcgtcatccccagccaggaggcggattccctctacaatcttgatcttctccttggtgtagctgtggtcaggtccaccctctttcttatagcacagctgattatacacggctggcttgggagctgcttcaagtttcacttcctgagtggaagttcggtaggaggggttgctataggtcaggtttcccattccaggatccgtgaacttggattttctgtgtctgtatagcatcaaagccgcgatcaccaacaaaatcagcaggatactgaggagtccaccgatggcatagctgacgtgcagtccttcacctggagcagcagggacggcttcattggaatgtgcacagaggcccagctgggcatccctttcagagcatcttcctcctgccccctccagagaggtgcgggtcttggtggtagaagaatgtaaggtggtgggcagcgtgttgggtagcactgggctcttctcattcatgctggtagctctgggagcaggaggtacgaggccaggtacaagggagcagggatgaccgtcaggctcatcaggacacgcgcacacaaagtcagaggctcgggcaaagcagaggtgagtacagccaccattattcacaccgcaggcattggtccctgtctgccgctgaggggacaccacaataatatccataagtccctccacgttggccagtactgtctccttgttgcggcccgagtacttgtcgacacgttggatcgatttggtctgccagtccgtccagtagatccacctgtcctgctgtgtgagggcaaaggggtgggacacatggctgaccaagacctgcctcagcttcccattgaggtcagcactctcgatccgatccagatgtgcatctacccagtagatcctgcgggtatcatagtccaaggtgaggccgttgggccagcctaggtctgtgttgatgaggaccttcctctcagagccatccaggtttgcccgttcaatcttggcaatgtggccccagtctgtccagaagaggtacccctttctggggaaaacagcaatggcccggggctcgtctagactgttgttgattagcactttgcgacaggatccatctagccgagatgcttcgatggtatttcggccggtatctgtccagtacaggtttctggcaacccagtccactgccagcccgtcagtggtcttaagcccgtgtccaataacagtctccatgttgctgccattcaggtctgctcgcctgataacatccaggaacacatctgtgtaatagacctttccatgcacactgtcatagtctagggagatgacattgttgagcccaggaacaggaacgtgcacgtctgtgtggtcatcggtgtccagtgagatacggcgaatagagcctcggctagagaagagcaggtaggtttctggagaggggtcacaggtcttcctgtctcccttcagctgaatgccagtgggacaggcacaggagaaaccagaaggccgaggtaaacagaggtgggaacagccgccatttcttgagccacatttattaaaacccagtggctgtgcccggtcaacagcttggatgtccatgaggcctggcaggttggacctcacaaggatgacattgctgccagtactcttgtcggcccggtggatgctgcgggtctgccagtcagtccagtagatataggagtcaagcagagtgaggccatatgggtgctggactggtgacaccagtgtatgccgattagcgccattcaggtctgccacctcaattctctcagtatgggcatcagcccacagcagttgggaactggtcttgtccacagtcagtccattgggccaccctaggttgttgttgatgagcacagtacggtctgagccatccattccggaacgctctaatttggcgttctccccccagtctgtccagtacatgaaccccatttcatggtataatacaatggcccggggactgtcaaggttctgccacaccaacactttccgcatagacccatccaggttgccaacttcaatccgattcgttcctgtgtctgtccagtacactttccggccgatggcatccactgcaagcccgtctgtggtctgcagacctgtagtgatgatgtcctcatgctgtgagccatccaggctggcacggctgatcctgtgcagcgtgctgtcagaccagtacacttttccttccagcggatccactccaatggcgatggtgttcttcatggtcatgttgatgggtaccaccacatcagcaaaataagggatatccaaggagaccatgcgaacatcaatcctcctggcgaagatgaggaaactgttcatgcctggtgagcatgtcttgccatctcgtagcaggttgatacctgtggggcaggtgcagctgaagccgctcggatttggggacctgagacacaaatggctgcagccgccattctccacggcacacagcgtcgtcactggaggcctctggcggtggaagacatgaatgtccatgaggttctccaggttctcctgcagagtctcccggtctagcccagtcagccggtcagcactttgtatactcttggtctgccagtcagtccaatagatgcgctgtccatatagagtcagcccaaaagggtgggggagctggcttccaattagtaccttcctcttgctgccatccagcccagcaaattcaatagtcttcatgccggcatccgcccagtacagccgctgagagccgtagtcaatagccaatccattaggccaggtcaggttcgaagagatgatgacttgtcggctggaggcgtccatgccagcccgttcaatcttgggacttgcaccccagtcagtccaatacatgtacccgcccatgggctctaccactatgtcccgaggacggtcaaggttctcccagatgagcactgtcctcatgctgccatctgtgttggccacttcgatcctgtccgtgcctgcatctgtccagtagagcttgttggtgacccaatcaattgccaggccagcagggctctccaaactggtatccactaccacctcctgtcctgttccatcccacttggccctgctgatggtatcagtgctgacatctgtccaatacacgtggtcatcccgggagtcccagtcaagggccacagcactgcgcacgtcagccagtgggatgacatcgtcggacaggtcctctgtgtcgaagctgatccgacggatgtccatccttcgggcaaaaagcaggaacttgtcaagactctgggcacaggcgtggctgttgatcttgcggaagccggtggggcaggcacaggtgtagttctggccactgggtagacacaggtgagtgcaacctccattgttgtccccacagcggtttttccctgcgggctggcgctgggggtgcaaggtatgaatgtccataggaaagtggagcttgttgcgaatgatttcctggttcttccccgtaaacttgttggcactattgatgctcttggtgtgccagtctgtccaatacaagctgtcttcaaacactgtgatggcaaagggatgtgggaggccctggctaatgacagccttgcggtgactcccatctagattggccctctcgatgacgtggtgcttagcatccacccagtacatgcggcgaccagcgtagtcgatggtgaggccgttgggccagaaaagatgagtgtcagcaatgatgcgacgcccagagccgtccatgctggaggcctcaatgcggggggtgttgccccagtctgtccaataaatggttccctccatggggtgtagggcaatggctctgggcttctctaggctctgccatagcagcaccttccggtgggccccatccagattagccacctcaatcctcgacgtcccagagtcggtccagtagagcttgtcatggacccaatccaccgctaggccccctgggctctctagcccagtagacaccacctcctctacattgctgccattaaggttggcacggaggatgcggtccagggtgacatccgaccagaagaccagctcccgccggtgatgaaagtcgagggcaatggcgttctccaggttgttcagtagcagcgtgtactcggagcggtgcgggagcacctgccggatgtcgatacgattggcaaacagtagcacaggttctggccccagagctttgcagctgcgccgatcgggccgtagctcataccctgcttcacaccagcactggaaagccccttcagtgtttgtgcagccctggctgcagtacccctcctcagcacattcgtttacatcctggcacgttctcccatcctctgtgagccggtagcctgtgtggcaggtacactgcactgcccctcgcaccatctgacacttctgggcacagccaccgttgttaacattgcagttctcctcacccgtccggggccgacagttctgctgtggactttcgtcactgctgtcaccgcagtcgttgatcccgttgcacagcttcctctgcccaatacagcgcccgttccaacacaggaactggtcagaggcgcactgggggcttcctgtgttctcacagttttcttcatcgctgttgtccgcacagtcatcctccccatcacagcgccaggacagacggacgcaacggcctgaccgacagcgaaactgttcggctgtgcacatggaggtggtgcagttgcgttcatcagactggtcatcacagtctgcatcaccatcacagcgccagcccgagttgatgcacaggccactgtcacacatgaattccccagagcggcagggctggtgggaggagcagtcagactcgtctgaccagtctccacagtcgtcatctccgtcacagtggtagatgtcgaggatgcagcggccataggcgcactggaactcttccaggttgcaaggaggagagggtactgctgaagggcagctttcctcatcagagccatctttgcagtctgtgtcaccatcgcagtaccaatgctcagcaatgcagctgccgtcgctgcagcggaattccttgtctgagcacttgcgcatgtcgcattgctcgtcactgttgtcaccacagtcgttgtccccatcacagtgccacagactccgaatgcagtagccgttctggcaggggaattcgtcctcctcacactcccgggggggacagtcctgctcatcagagtcatcttcacagtcattgtccccgtcacacacccaggagcgtcggatgcacttgccgttgtcacagtggaagtccagaggggagcaggtaggcagcgtacagccatcctcatcgctgtggtctccacagtcattgtctccatcacactgccactgggcggggatacaggtacattcgccaagcgcgctcaccgcacatgtgaagtggctccgaccacatgcacactccagactgctggctattccgtgtgcgcagagcagggcgccaagcagcagcgcgccccaccaccgcctcatggtgctgcggccgccgccggcgttccctgccggcccgggggtcccgcgggctcccaagggacgccggggcggagagaatcagcggagggttcccccgggttgaaaagcgtcccgggtccagctcggccggcgcgccctgcaagtcgccctccgggctgctgctgcctcct

SEQ ID NO: 305 - DNA, 7784 bp, Rattus norvegicus
  source 1..7784: mol_type = genomic DNA
cggccgcagcaccatgaggcggtggtggggcgcgctgctgctcggcgccctgctctgcgcacacggcacagccagcaatctggagtgtgcgtgtggtcggagccacttcacatgtgcagtgagcgcgctcggcgaatgtacctgcatccccgcccagtggcagtgtgatggtgacaatgactgtggagaccacagcgatgaggatggctgtacgctgcctacctgttcccctctggacttccactgtgacaacggcaagtgcatccgacgctcctgggtgtgtgatggggacaatgactgtgaagatgactccgatgagcaggactgtcccccccgggagtgtgaggaggacgagttcccctgccagaacggctactgcatccggagtctgtggcactgtgatggggacaatgactgtggtgacaacagtgacgaacagtgcgacatgcgcaagtgctcagacaaggaattccgctgcagtgatgggagctgcattgctgagcattggtactgtgatggagacacagactgcaaagacggctctgatgaggaaagctgcccctcagcagtaccctctcctccttgcaacctggaagagttccagtgtgcctacggccgccgcatccttgacatctaccactgtgacggggatgatgactgcggagactggtcagacgagtccgactgctcctcccaccagccctgccgctctggggaattcatgtgtgacagtggcctgtgcgtcaacgcaggctggcgctgtgatggtgatgcggactgcgatgaccagtctgatgaacgtaactgcaccacctccatgtgcacagctgaacagtttcgctgtcggtcaggccgctgtgtccgtctgtcctggcgctgtgatggggaggatgactgcgcggacaacagtgatgaagaaaactgtgagaacacaggaagcccccaatgcgcctctgaccagttcctgtgttggaatgggcgttgtattgggcagaggaagctctgcaatggggtcaatgactgcggcgacaacagtgacgaaagcccacagcagaactgtcggccccggacgggtgaggagaactgcaatgttaacaacggtggctgtgcccagaagtgtcagatgattcgaggggcagtgcagtgtacctgccacacaggctaccggctcacagaggatgggagaacgtgccaggatgtgaatgaatgtgctgaggagggatactgcagccagggctgcacaaacagcgaaggggctttccagtgctggtgcgaagccggttatgagctgcggcccgatcggcgcagctgcaaggctctggggccggaacctgtgctactgtttgccaatcgcatcgacatccggcaggtgctcccgcaccgctccgaatacacgctgctactgaacaacctggagaacgccattgcccttgactttcatcatcggcgggagctggtcttctggtctgatgtcaccctggaccgcatcctccgtgccaaccttaatggcagcaatgtggaggaggtggtgtctactgggctagagagcccaggcggcttggctgtggattgggtccatgacaagctctactggactgactccgggacgtcgaggattgaggtggctaatctggacggggcccaccggaaggtgctgctgtggcagagcctggagaagcccagggccattgccctgcaccccatggagggaaccatctattggacagactggggcaacaccccccgcatcgaggcctccagcatggacggctctggacgtcgcatcattgctgacactcatcttttctggcccaacggcctcaccatcgactacgctggacgccgtatgtactgggtggacgctaagcaccacgtcatcgagagagccaatctagatgggagtcaccgcaaggctgtcattagccagggcctcccacatccctttgccatcacagtgtttgaagacagcttgtattggacagactggcacaccaagagcatcaatagtgccaacaagttcactgggaagaaccaggagatcattcgcaacaagctccactttcctatggacattcataccttgcacccccagcgccagcctgcagggaaaaaccgctgcggggacaacaacggaggttgcactcacctgtgtctacccagtggccagaactacacttgtgcctgccccaccggcttccgaaaaatcaacagccacgcctgtgcccagagtcttgacaagttcctgctttttgcccgaaggatggacatccgtcggatcagcttcgacacagaggacctgtccgacgatgtcatcccactggctgacgtgcgcagtgctgtggcccttgactgggactcccgggatgaccacgtgtactggacagatgtcagcactgataccatcagcagggccaagtgggatggaacaggacagaaggtggtagttgacaccagtttggagagccctgctggcctggcaattgattgggtcaccaacaaactctactggacagatgcaggtacagaccggattgaagtggccaacacggacggcagcatgaggacagtgctcatctgggagaaccttgatcgtcctcgggacatcgtggtagaacccatgggcgggtacatgtattggactgactggggtgcaagtcccaagattgaacgagctggcatggatgcctccaaccgacaagtcatcatctcttcgaatctgacatggcctaatggattagctattgactatgggtcccagcggctgtactgggctgatgccggcatgaagactattgaatttgctgggctggatggcagcaagaggaaggtactaattggaagtcaactcccccaccctttcgggctgactctatacggacagcgcatctattggactgactggcagaccaaaagtatccaaagtgctgaccggctgactgggctagaccgggagactctgcaggagaacctggagaatcttatggacatccatgtcttccaccgccagaggcctccagtgacgacaccatgtgctgtggagaatggcggctgcagccatttgtgtcttcggtccccaagtccgagcggcttcagctgtacctgccccacaggtatcaacctgctgcttgatggcaagacatgctcaccaggcatgaacagtttcctcatcttcgccaggaggattgatgttcgcatggtctccttggacatcccttattttgctgatgtggtggtacccatcaacatgaccatgaagaacaccattgccattggagtggacccgctggaaggaaaagtgtactggtctgacagcacactgcacaggatcagccgtgccagcctggatggctcacagcacgaggacatcatcactacaggtttgcagaccacagatggacttgcagtggatgccatcggccggaaagtgtattggacagacacgggaacgaatcggattgaagttggcaacctggatgggtctatgcggaaagtgttggtgtggcagaaccttgacagtccccgggccattgtgctataccatgaaatggggttcatgtactggacagactggggggagaatgccaaactagagcgttccgggatggatggctcagaccgtactgtgctcatcaacaacaacctagggtggcctaacggactgactgtggacaagaccagctcccaactgctgtgggctgatgcccatactgagagaattgaggtggctgacctgaacggtgccaatcggcatacattggtgtcaccagtgcagcacccatatggcctcactctgcttgactcttacatctactggactgactggcagacccgtagcatccaccgggccgacaagagtactggcagcaatgttatcctcgtgaggtccaacctgccaggcctcatggacatccaagctgttgaccgggcacagccactgggttttaataagtgtggttcgagaaatggcggctgctcccacctctgtttacctcggccctctggtttctcctgtgcctgccccactggcattcagctgaagggggatgggaagacctgtgacccctctccggagacctacctgctcttctctagccggggctccattcgccgtatctcactggacaccgatgaccacacagacgtgcatgtccctgttcctgggctcaacaatgtcatctccctagactatgacagtgtggatggaaaggtctattacacagacgtgttcctggatgttatcaggcgagcagacctgaatggcagcaacatggagactgttattgggcatgggctgaagaccactgatgggctggcagtggactgggttgccagaaacctgtactggacagatacaggccgaaataccatcgaagcatctcggctagatggttcctgtcgcaaagtgctaatcaacaacagtctggacgagccccgggccattgctgttttccccagaaaggggtacctcttctggacagactggggccacattgccaagattgaacgggcaaacctggatggttctgagaggaaggtcctcatcaatgcagacctaggctggcccaatggccttaccttggactatgatacccgcaggatctactgggtagatgcacatctggatcggattgagagtgctgacctcaatgggaagctgaggcaggtcttggtcagccatgtgtcccacccctttgccctcacacagcaggacaggtggatctactggacagactggcagaccaaatccatccagcgtgtcgacaagtactcaggccgcaacaaggagacagtgctggccaatgtggagggactcatggatatcatcgtggtgtcccctcaacggcagacagggaccaatgcctgtggtgtgaacaatggtggctgtagccacctctgctttgccagagcctctgactttgtgtgcgcctgtcctgatgagccagacagtcatccctgctccctcgtgcctggcctcatgcctcctgctcccagagctaccagcctgaatgaaaagagcccagtgctccccaacacattgcccaccaccttacattcttctaccaccaggacccgcacatctccagagggggcagaaggaagatgctctgaaagggacgcccagctgggcctctgtgcacattccaatgaagctgtacctgctgctccaggtgaaggactgcatgtcagctacgccgttggtggactcctcagcgtcctgctgattttgttggtgactgcagctttgatgctatacagacacagaaaatccaaattcacggatcctggaatgggaaacctgacctacagcaacccctcctaccgaacttccactcaggaagtgaaaattgaagcagctcccaaaccagccatgtataatcagctgtgctataagaaagagggtggacctgaccacagctacaccaaggagaagatcaagattgtagagggaattcacctcctggctgggcatgatgctgaatggggtgacctcaagcaactgcgcagctccagggggggccttctacgggatcacgtatgcatgaagacagacacggtgtccatccaggccagctctggctccctagatgacacggagacagagcagctgctgcaggaagagcagtctgagtgtagcagtgttcacactgcaaccactccagagagacggggctctctgccagacacaggctggaaacatgaacgcaagctctcctcagaaagccaggtctaagtgcccacattctcttccctgcctgcctgttcgttcttctctgtggacttctgatccttgtgctcacaaagcaacgggccctttcccgtgcactcatcttcctcctcccacccaaaagtgttcccacgaccccatagaacctgttactcacctgagtctgaaactacctggggacaagaagtgagggcacatctcaagaatttagacctggattttaccatgaacttcacctcttgcactctatcctgggccccctgaagctgggctcagtgtaataccttgtcagcacagcatcttcctttgccctggcatcctatgtgtctgccccacggcaccgatgcaattggtgatgtaagactttggtcttccccatcacagctgacatgatggcctctctgtgaactggcctaccaggggctgggactggaggtcacaggtaaaaggtaatgaatggatagaggttgagagaaggaagaaccagcccagctggtctgggtgtttgggaaacctccagcctcaagtgttggtaattatgaaaaacctttgggggaaggcacttgagccctgggatctcgtccattgctggcagtggacgttctcacccaggtgaagtgtgggtatggcctaagttcttcttcctcctgctggaatgtctggggccactatctaccttcagtaactggaggcctctgtcatggcaactcactaataggaattccctcctggtgctgctactggccagtacttttcttaagcctttaactatgctgtgagcttgagtgaacattggtcgggccttggagagtaggcctctagaacgtttaagaagctctgcaaagatcaagaacagtatcttacctgagcctcactactctgcccttttttctcccattctctgggattctaagggaagcaattctatcacagcctttcaaagaatggctagacattttcctaaatggtcaggaagagcaactagagagacacaagacacccaggggctcaggagaagtatcgtgaggttgaacttcttgagttcattctcaggtgctcagggacccaagcctggggcactaaggtcatgtgccaactcttctcggcctctgcccacactaaagtgccaccattagctgcatgcttctttaggccaagggcttctctcaggggagctgagagtctttttgtgctgccctagaatttcatcctagtgtttcacttctgagagaggggaatctagacttgttttctctaaccgatcctgtatcaccttggtctccattgtccagtgatgagtgaggaggttcaatgaagatgcaaagtggtgagcagggagtggagaggtggtgagattaggtccagagcaagtctaggcacttctccatagaaactgaagcacaggagagattgacaggagctgaacatggaggggagggtttttaggggaagttttctgacttaaaacatctttcatggttattgctacacagagatcagcagccaggcatatgcatgaaaaacaggacaagatcaaatcttttctggtcagttattaggagtaggagacagatgtcaaaccattagtctcgttgtcactagctaggcccagacctatgtctacacatagagaaccaaggcaggccaaaggccttttccagtacaccaactgagaaaagaacagtgccatttttaagaggaaagacagacatttcacacagaatgaggcaacatttgagcctttaaacccgtagctggggaggaggaagaaaacaggagtgtggtgtcctcctgagtggaaagggcaaggttcttattgcactcgggctgttcagaatgtagaaaggacgcatttgagggaatatctatttgagcactgatttactctgtaaagagggcaaaatctctctgtcctaaactaatggaagtgattttcccatgctcatgtgtaatgattttaacattactcactggagagattggactttctggagttatttaaccactatgttcagtattttagggctttatgataatttaatataaatttagctttctt

SEQ ID NO: 306 - DNA, 7784 bp, Rattus norvegicus
  source 1..7784: mol_type = genomic DNA
aagaaagctaaatttatattaaattatcataaagccctaaaatactgaacatagtggttaaataactccagaaagtccaatctctccagtgagtaatgttaaaatcattacacatgagcatgggaaaatcacttccattagtttaggacagagagattttgccctctttacagagtaaatcagtgctcaaatagatattccctcaaatgcgtcctttctacattctgaacagcccgagtgcaataagaaccttgccctttccactcaggaggacaccacactcctgttttcttcctcctccccagctacgggtttaaaggctcaaatgttgcctcattctgtgtgaaatgtctgtctttcctcttaaaaatggcactgttcttttctcagttggtgtactggaaaaggcctttggcctgccttggttctctatgtgtagacataggtctgggcctagctagtgacaacgagactaatggtttgacatctgtctcctactcctaataactgaccagaaaagatttgatcttgtcctgtttttcatgcatatgcctggctgctgatctctgtgtagcaataaccatgaaagatgttttaagtcagaaaacttcccctaaaaaccctcccctccatgttcagctcctgtcaatctctcctgtgcttcagtttctatggagaagtgcctagacttgctctggacctaatctcaccacctctccactccctgctcaccactttgcatcttcattgaacctcctcactcatcactggacaatggagaccaaggtgatacaggatcggttagagaaaacaagtctagattcccctctctcagaagtgaaacactaggatgaaattctagggcagcacaaaaagactctcagctcccctgagagaagcccttggcctaaagaagcatgcagctaatggtggcactttagtgtgggcagaggccgagaagagttggcacatgaccttagtgccccaggcttgggtccctgagcacctgagaatgaactcaagaagttcaacctcacgatacttctcctgagcccctgggtgtcttgtgtctctctagttgctcttcctgaccatttaggaaaatgtctagccattctttgaaaggctgtgatagaattgcttcccttagaatcccagagaatgggagaaaaaagggcagagtagtgaggctcaggtaagatactgttcttgatctttgcagagcttcttaaacgttctagaggcctactctccaaggcccgaccaatgttcactcaagctcacagcatagttaaaggcttaagaaaagtactggccagtagcagcaccaggagggaattcctattagtgagttgccatgacagaggcctccagttactgaaggtagatagtggccccagacattccagcaggaggaagaagaacttaggccatacccacacttcacctgggtgagaacgtccactgccagcaatggacgagatcccagggctcaagtgccttcccccaaaggtttttcataattaccaacacttgaggctggaggtttcccaaacacccagaccagctgggctggttcttccttctctcaacctctatccattcattaccttttacctgtgacctccagtcccagcccctggtaggccagttcacagagaggccatcatgtcagctgtgatggggaagaccaaagtcttacatcaccaattgcatcggtgccgtggggcagacacataggatgccagggcaaaggaagatgctgtgctgacaaggtattacactgagcccagcttcagggggcccaggatagagtgcaagaggtgaagttcatggtaaaatccaggtctaaattcttgagatgtgccctcacttcttgtccccaggtagtttcagactcaggtgagtaacaggttctatggggtcgtgggaacacttttgggtgggaggaggaagatgagtgcacgggaaagggcccgttgctttgtgagcacaaggatcagaagtccacagagaagaacgaacaggcaggcagggaagagaatgtgggcacttagacctggctttctgaggagagcttgcgttcatgtttccagcctgtgtctggcagagagccccgtctctctggagtggttgcagtgtgaacactgctacactcagactgctcttcctgcagcagctgctctgtctccgtgtcatctagggagccagagctggcctggatggacaccgtgtctgtcttcatgcatacgtgatcccgtagaaggccccccctggagctgcgcagttgcttgaggtcaccccattcagcatcatgcccagccaggaggtgaattccctctacaatcttgatcttctccttggtgtagctgtggtcaggtccaccctctttcttatagcacagctgattatacatggctggtttgggagctgcttcaattttcacttcctgagtggaagttcggtaggaggggttgctgtaggtcaggtttcccattccaggatccgtgaatttggattttctgtgtctgtatagcatcaaagctgcagtcaccaacaaaatcagcaggacgctgaggagtccaccaacggcgtagctgacatgcagtccttcacctggagcagcaggtacagcttcattggaatgtgcacagaggcccagctgggcgtccctttcagagcatcttccttctgccccctctggagatgtgcgggtcctggtggtagaagaatgtaaggtggtgggcaatgtgttggggagcactgggctcttttcattcaggctggtagctctgggagcaggaggcatgaggccaggcacgagggagcagggatgactgtctggctcatcaggacaggcgcacacaaagtcagaggctctggcaaagcagaggtggctacagccaccattgttcacaccacaggcattggtccctgtctgccgttgaggggacaccacgatgatatccatgagtccctccacattggccagcactgtctccttgttgcggcctgagtacttgtcgacacgctggatggatttggtctgccagtctgtccagtagatccacctgtcctgctgtgtgagggcaaaggggtgggacacatggctgaccaagacctgcctcagcttcccattgaggtcagcactctcaatccgatccagatgtgcatctacccagtagatcctgcgggtatcatagtccaaggtaaggccattgggccagcctaggtctgcattgatgaggaccttcctctcagaaccatccaggtttgcccgttcaatcttggcaatgtggccccagtctgtccagaagaggtacccctttctggggaaaacagcaatggcccggggctcgtccagactgttgttgattagcactttgcgacaggaaccatctagccgagatgcttcgatggtatttcggcctgtatctgtccagtacaggtttctggcaacccagtccactgccagcccatcagtggtcttcagcccatgcccaataacagtctccatgttgctgccattcaggtctgctcgcctgataacatccaggaacacgtctgtgtaatagacctttccatccacactgtcatagtctagggagatgacattgttgagcccaggaacagggacatgcacgtctgtgtggtcatcggtgtccagtgagatacggcgaatggagccccggctagagaagagcaggtaggtctccggagaggggtcacaggtcttcccatcccccttcagctgaatgccagtggggcaggcacaggagaaaccagagggccgaggtaaacagaggtgggagcagccgccatttctcgaaccacacttattaaaacccagtggctgtgcccggtcaacagcttggatgtccatgaggcctggcaggttggacctcacgaggataacattgctgccagtactcttgtcggcccggtggatgctacgggtctgccagtcagtccagtagatgtaagagtcaagcagagtgaggccatatgggtgctgcactggtgacaccaatgtatgccgattggcaccgttcaggtcagccacctcaattctctcagtatgggcatcagcccacagcagttgggagctggtcttgtccacagtcagtccgttaggccaccctaggttgttgttgatgagcacagtacggtctgagccatccatcccggaacgctctagtttggcattctccccccagtctgtccagtacatgaaccccatttcatggtatagcacaatggcccggggactgtcaaggttctgccacaccaacactttccgcatagacccatccaggttgccaacttcaatccgattcgttcccgtgtctgtccaatacactttccggccgatggcatccactgcaagtccatctgtggtctgcaaacctgtagtgatgatgtcctcgtgctgtgagccatccaggctggcacggctgatcctgtgcagtgtgctgtcagaccagtacacttttccttccagcgggtccactccaatggcaatggtgttcttcatggtcatgttgatgggtaccaccacatcagcaaaataagggatgtccaaggagaccatgcgaacatcaatcctcctggcgaagatgaggaaactgttcatgcctggtgagcatgtcttgccatcaagcagcaggttgatacctgtggggcaggtacagctgaagccgctcggacttggggaccgaagacacaaatggctgcagccgccattctccacagcacatggtgtcgtcactggaggcctctggcggtggaagacatggatgtccataagattctccaggttctcctgcagagtctcccggtctagcccagtcagccggtcagcactttggatacttttggtctgccagtcagtccaatagatgcgctgtccgtatagagtcagcccgaaagggtgggggagttgacttccaattagtaccttcctcttgctgccatccagcccagcaaattcaatagtcttcatgccggcatcagcccagtacagccgctgggacccatagtcaatagctaatccattaggccatgtcagattcgaagagatgatgacttgtcggttggaggcatccatgccagctcgttcaatcttgggacttgcaccccagtcagtccaatacatgtacccgcccatgggttctaccacgatgtcccgaggacgatcaaggttctcccagatgagcactgtcctcatgctgccgtccgtgttggccacttcaatccggtctgtacctgcatctgtccagtagagtttgttggtgacccaatcaattgccaggccagcagggctctccaaactggtgtcaactaccaccttctgtcctgttccatcccacttggccctgctgatggtatcagtgctgacatctgtccagtacacgtggtcatcccgggagtcccagtcaagggccacagcactgcgcacgtcagccagtgggatgacatcgtcggacaggtcctctgtgtcgaagctgatccgacggatgtccatccttcgggcaaaaagcaggaacttgtcaagactctgggcacaggcgtggctgttgatttttcggaagccggtggggcaggcacaagtgtagttctggccactgggtagacacaggtgagtgcaacctccgttgttgtccccgcagcggtttttccctgcaggctggcgctgggggtgcaaggtatgaatgtccataggaaagtggagcttgttgcgaatgatctcctggttcttcccagtgaacttgttggcactattgatgctcttggtgtgccagtctgtccaatacaagctgtcttcaaacactgtgatggcaaagggatgtgggaggccctggctaatgacagccttgcggtgactcccatctagattggctctctcgatgacgtggtgcttagcgtccacccagtacatacggcgtccagcgtagtcgatggtgaggccgttgggccagaaaagatgagtgtcagcaatgatgcgacgtccagagccgtccatgctggaggcctcgatgcggggggtgttgccccagtctgtccaatagatggttccctccatggggtgcagggcaatggccctgggcttctccaggctctgccacagcagcaccttccggtgggccccgtccagattagccacctcaatcctcgacgtcccggagtcagtccagtagagcttgtcatggacccaatccacagccaagccgcctgggctctctagcccagtagacaccacctcctccacattgctgccattaaggttggcacggaggatgcggtccagggtgacatcagaccagaagaccagctcccgccgatgatgaaagtcaagggcaatggcgttctccaggttgttcagtagcagcgtgtattcggagcggtgcgggagcacctgccggatgtcgatgcgattggcaaacagtagcacaggttccggccccagagccttgcagctgcgccgatcgggccgcagctcataaccggcttcgcaccagcactggaaagccccttcgctgtttgtgcagccctggctgcagtatccctcctcagcacattcattcacatcctggcacgttctcccatcctctgtgagccggtagcctgtgtggcaggtacactgcactgcccctcgaatcatctgacacttctgggcacagccaccgttgttaacattgcagttctcctcacccgtccggggccgacagttctgctgtgggctttcgtcactgttgtcgccgcagtcattgaccccattgcagagcttcctctgcccaatacaacgcccattccaacacaggaactggtcagaggcgcattgggggcttcctgtgttctcacagttttcttcatcactgttgtccgcgcagtcatcctccccatcacagcgccaggacagacggacacagcggcctgaccgacagcgaaactgttcagctgtgcacatggaggtggtgcagttacgttcatcagactggtcatcgcagtccgcatcaccatcacagcgccagcctgcgttgacgcacaggccactgtcacacatgaattccccagagcggcagggctggtgggaggagcagtcggactcgtctgaccagtctccgcagtcatcatccccgtcacagtggtagatgtcaaggatgcggcggccgtaggcacactggaactcttccaggttgcaaggaggagagggtactgctgaggggcagctttcctcatcagagccgtctttgcagtctgtgtctccatcacagtaccaatgctcagcaatgcagctcccatcactgcagcggaattccttgtctgagcacttgcgcatgtcgcactgttcgtcactgttgtcaccacagtcattgtccccatcacagtgccacagactccggatgcagtagccgttctggcaggggaactcgtcctcctcacactcccgggggggacagtcctgctcatcggagtcatcttcacagtcattgtccccatcacacacccaggagcgtcggatgcacttgccgttgtcacagtggaagtccagaggggaacaggtaggcagcgtacagccatcctcatcgctgtggtctccacagtcattgtcaccatcacactgccactgggcggggatgcaggtacattcgccgagcgcgctcactgcacatgtgaagtggctccgaccacacgcacactccagattgctggctgtgccgtgtgcgcagagcagggcgccgagcagcagcgcgccccaccaccgcctcatggtgctgcggccg

SEQ ID NO: 307 - DNA, 8055 bp, Macaca fascicularis
  source 1..8055: mol_type = genomic DNA
gtcccctggcggggcagcgtcggctctggcagcactggaggaggcggcggcgtccggagggcgacttgcggggcgcgcaggccgccgtgcacccgggacgcttccccctcggggaccctccgcgggcttcgccaccgcgccgtcccgcgggagtcggcaggaccccgggcgggcggcgcgggcggcaccatgaggcggcagtggggcgcgctgctgcttggcgccctgctctgcgcacacggcctggccagcagccccgagtgtgcttgtggtcggagccacttcacatgtgcagtgagtgctcttggcgagtgtacctgcatccctgcccagtggcagtgtgatggagacaacgactgcggggaccacagcgatgaggacggatgtatgctacctacctgttcccctctcgactttcactgtgacaatggcaagtgcatccgccgctcctgggtgtgtgacggggacaacgactgtgaggatgactcggatgagcaggactgtcccccccgggagtgtgaggaggacgagtttccctgccagaacggctactgcatccggagtctgtggcactgcgatggtgacaatgactgtggtgacaacagcgatgagcagtgtgacatgcgcaagtgctccgacaaggagttccgctgcagtgacggaagctgcattgctgagcactggtactgcgacggtgacaccgactgcaaagatggctccgatgaggagagctgtccctcagcagtgccagcacccccctgcaacctggaggagttccagtgtgcctatggccgctgtatcctcgatatctaccactgcgatggcgacgatgactgcggagactggtcggacgagtctgactgctcctcccaccagccctgccgctctggggagttcatgtgtgacagcggcctgtgcatcaatgcaggctggcgctgcgatggtgacgcggactgtgatgaccagtctgatgagcgcaactgcaccacctccatgtgtacagcagaacagttccgctgtcgctcaggccgctgcgtccgcctgtcctggcgctgtgatggggaggacgactgtgcggacaatagcgatgaagagaactgtgagaatacaggaagcccccagtgtgcctcggaccagttcctgtgttggaatgggcgctgcattgggcagaggaagctgtgcaatggggtcaacgactgtggtgacaacagcgacgaaagcccacagcagaattgccggccccggacaggtgaggagaactgcaatgttaacaacggtggctgtgcccagaagtgccagatggtgcgaggggcagtgcagtgtacctgccacacaggctaccggctcacagaggatgggcacacgtgccaagatgtgaatgagtgtgccgacgaggggtattgcagccagggttgcaccaacagcgaaggggctttccagtgctggtgcgaaacaggctatgaactacggcccgaccggcgcagctgcaaggctctggggccagagcctgtgctgctgttcgccaatcgcatcgacatccggcaggtgctgccgcaccgctctgagtacacgctgctgcttaacaacctggagaacgccattgcccttgatttccaccaccgccgcgagcttgtcttctggtcagacgtcaccctggaccggatcctccgtgccaacctcaacggcagcaacgtggaggaggttgtgtctactgggctggagagcccagggggcctggctgtggattgggtccatgacaaactctactggaccgactcaggcacctcaaggattgaggtggccaatctggacggggcccaccggaaggtgctgctgtggcagaacctggagaagccccgggccattgccttgcatcccatggagggtaccatttactggacagactggggcaacaccccccgtattgaggcctccagcatggatggctctgggcgccgcatcattgctgatacccatctcttctggcccaatggcctcaccatcgactatgctgggcgccgtatgtactgggtggatgctaagcaccatgtcattgagagggccaatctggatgggagtcaccgtaaggctgtcattagccagggccttccgcatcccttcgccatcacagtgtttgaagacagcctgtactggacagactggcacaccaagagcatcaatagcgctaacaaatttacggggaagaaccaggaaatcattcgcaacaaactccacttccctatggacatccacaccttgcacccgcagcgccaacctgcagggaagaaccgctgtggggacaacaacggaggctgcacgcacctgtgtctgcccagtggccagaactacacctgtgcctgccccactggcttccgcaagatcagcagccacgcctgtgcccagagtcttgacaagttcctgctttttgcccgaaggatggacatccgtcgaatcagctttgacacagaggacctgtctgatgatgtcatcccactggctgacgtacgcagtgctgtggcccttgactgggactcccgggatgaccacgtgtactggacagatgtcagcactgataccatcagcagggccaagtgggatggaacaggacaggaggtggtagtggataccagtttggagagcccagctggcctggccattgattgggtcaccaacaaactgtactggacagatgcaggtacagaccggattgaagtagccaacacagatggcagcatgagaacagtactcatctgggagaaccttgatcgtcctcgggacatcgtggtggaacccatgggcgggtacatgtattggactgactggggtgcgagccccaagattgaacgagctggcatggatgcctcaggccgccaagtcattatctcttctaatctgacctggcctaacgggctagctattgattacggttcccagcggctatactgggctgacgccggcatgaagacaattgaatttgctggactggatggcagtaagaggaaggtactgatcggaagccagctcccccacccatttgggctgaccctctatggagagcgcatctattggactgactggcagactaagagtatacagagcgctgaccggctgacagggctggaccgggagactctgcaggagaacctggagaacctgatggacatccatgtcttccaccgccgccggcccccagtgtctacaccatgtgctatggagaatggcggctgtagccacctgtgtcttaggtccccaaatccaagcggcttcagctgtacctgccccacaggcatcaacctgctgcctgatggcaagacttgctcaccaggcatgaacagtttcctcatcttcgccaggaggatagacattcgcatggtctccctggacatcccttattttgctgatgtggtggtaccaatcaacattaccatgaagaacaccattgccattggagtagacccccaggaaggaaaagtgtactggtctgacagcacactgcacaggatcagccgtgccaatctggacggttcacagcacgaggacatcatcaccacagggctacagaccacagatgggctcgcggtggatgccattggccggaaagtgtactggacagacacgggaacaaaccggattgaagtgggcaacctggacgggtccatgcggaaagtgttggtgtggcagaaccttgacagtccccgggcaatcgtactgtaccatgagatggggtttatgtactggacagactggggggagaatgccaagttagagcggtctggaatggatggctcagaccgcacagtgctcatcagcaacaacctaggatggcccaatggactgactgtggacaaggccagctcccaactgctgtgggccgatgcccacaccgagcgaattgaggctgctgacctgaatggtgccaatcggcatacgttggtgtcaccagtgcagcacccatatggcctcaccctcctcgactcctatatatactggactgactggcagacccggagcatccaccgtgccgacaagggtaccggcagcaatgttatcctcgtgaggtccaacctgccaggcctcatggacatccaggctgtggaccgagcacagccactaggttttaacaagtgtggctccagaaatggcggctgctcccacctctgcttgcctcggccttctggcttctcctgtgcctgccccactggcatccagctgaagggagatgggaagacctgtgatccctctcctgagacctacctgctcttctccagccgtggctccatccggcgtatctcactggacaccagtgaccacaccgatgtgcacgtccctgttcctgagctcaacaatgtcatctccctggactatgacagcgtggatggaaaggtctattacacagatgtgttcctggatgttatcaggcgagcagacctgaatggcagcaacatggagacagtgatcgggcgtgggctgaagaccactgatgggctggcagtggactgggtggccaggaacctgtactggacagacacaggtcgaaataccattgaggcatccaggctggatggttcctgccgcaaagtgctgatcaacaatagcctggatgagccccgggccattgctgttttccccaggaaggggtacctcttctggacagactggggccacattgccaagatcgaacgggcgaacctggacggttctgagcggaaggtcctcatcaacacagacctgggctggcccaacggcctcaccctggactatgatacccgcaggatctactgggtagacgcccatctggaccggatcgagagtgctgacctcaacgggaaactgcggcaggtcttggtcagccatgtgtcccacccctttgccctcacacagcaagacaggtggatctactggacagactggcagaccaagtcaatccagcgtgttgacaaatactcaggccggaacaaggagacagtgctggcaaatgtggaaggactcatggatatcatcgtggtttcccctcagcggcagacagggaccaatgcctgtggcgtgaacaatggtggctgcacccacctctgctttgccagagcctcggacttcgtatgtgcctgtcctgacgaacgtgatagccggccctgctctcttgtgcctggcctggtaccaccagctcctaggtccactggcatgagtgaaaagagcccggtgctacccaacacactacctaccaccttgcgttcttcaaccacccggacccgcatgtctctggaggaggtggaaggaagatgctccgaaagggatgccaggctgggcctctgtgcacgttccaatgaggccgttcctgctgctccaggggaaggacttcatatcagctacgccattggtggactcctcagtattctgctgattttggtggtgattgcagctttgatgctgtacagacacaaaaaatccaagttcactgatcctggaatggggaacctcacctatagcaacccctcctaccgaacatccacacaggaagtgaagattgaagcaatccccaaaccagccatgtacaaccagctgtgctataagaaagagggagggcctgaccataactacaccaaggagaagatcaagatcgtagagggaatctgcctcctgtctggggatgatgctgagtgggatgacctcaagcaactgcgaagctcacgggggggcctcctccgggatcatgtatgcatgaagacagacacagtgtctatccaggccagctctggctccctggatgacacagagacggagcagctgttacaggaagagcagtccgagtgtagcagcgtccatactgcagccactccagaaagacgaggttctctgccagacacgggctggaaacatgaacgcaagctctcctcagagagccaggtctaaatgcccgcgttctcttccctgcctgcctgttccttctcctttatggacgtctagtccttgtgcttgcttacaccgcaggcccctcttctgtgtgctcgtcctcctcctcctcccaccccataactgctcctaagccctcactggagctgtttaccacctgagtccataactacctgtgcacaacaaatgatggtgcatctcgagaatttagacctggattttaccatgaacctcacatcttgtactccgtcctgggccccctgaaactgcttattcatgattcctcgccagcgtagagctccacctccccttcccccggtaccctcagtgcctgcttctcagtgctgatgcagctgatgacccaggactgtgctctgccccatcacagccagcatgactgcttctctgagagaacttgcccatcagaggctgggacaagggggtgtgggtaaagaggaatgaaggatagaggctgagagaagaaggaaaagtcagcccagcaggtatgggcatctgggaaccttcagcctcaagtgtgttggtaacatgaaaaagctttggggggtagttgggtctgggtgtctggtccattgctggcagtggacattattcttgccctaagagtcactgccttttcagcagcagatactggtgagatgggggtggctcaagctgttcttcctcctgctagaatgtgtggagctctttctaccttcggataactgggttccctatcacgaggctactggctaatatgaattccctcctggtgccaccactggccagtatctttcctaagtctttgatcagagtaaccaggttgtgagccagtggcttgaattaatgttaggccttgggggctgagtctctgaaaagtctaagaagctctgcctagaccaaacatggtataccacctgaaccctctcgccctcattccctgggattctagggaagagacctagaaacaagctttcaaagaaacccggaagttgtcataaatggtcagaaagaacaatcaggttggagacttgggacacccagggcctaaagagaagtatccatgagggtcaaacttcctgttgaacttcctgtgttctttctcaagtgctcagggatctaaattagtggacagcgagcctgtggctgtggggtggtgacgttcctcttccagctgtctcctcagctaaggggcttggtttccgtgtgggatgccatcacttggttcatgctcattcacacaaagggcatgtgtctcagcctagtatgagggaaactgagacttatttttgccctaaaacgtctccctagttgttcttcgtgggttggtttatttttttgttttttttttccgtttgttttttgcctaatttgctttttctgaccaagccttgtggcaccagcaatctccaaagtcctgtggtgggagggccgaataaataaagatgcaaagaggtgggcaaggagtaggaaggtagagagcaccactgatgaggccctcctagcccatggcagacccagacctcttctcccccaggaattagaagtggcaggagaggacaacaggggctgggaatggaggggagaatttctaggggaagtttcctgagttgaaacttctcctgtggttactggtattgagaaatcagctaccaaacatgggtgaaaaaggacaagatcaagtcagttctaagactgctagagagagataccaagcccttagccttgctctcagtagcatcagccccaggtctgagcttccccacattacagcctccccacattacacttgacaaagcagtaaaggagggagcactttgggtcctgacactcatgtctggggaggaagagcaagaagaaaagtggcatttccttaattggaaagggggaaggatcttattgcacttgggctgttcagaatgtagaaaggacatatttgaggaagtatctatttgagcactgatttactctgtaaaaagcaaaatctctctgtcctaaactaatggaagcgattctcccatgctcatgtgtaatggttttaacgttactcactggagagattggactttctggagttatttaaccactatgttcagtattttaggactttatgataatttaatataaatttagcttttcttaatcaccttg

SEQ ID NO: 308 - DNA, 8055 bp, Macaca fascicularis
  source 1..8055: mol_type = genomic DNA
caaggtgattaagaaaagctaaatttatattaaattatcataaagtcctaaaatactgaacatagtggttaaataactccagaaagtccaatctctccagtgagtaacgttaaaaccattacacatgagcatgggagaatcgcttccattagtttaggacagagagattttgctttttacagagtaaatcagtgctcaaatagatacttcctcaaatatgtcctttctacattctgaacagcccaagtgcaataagatccttccccctttccaattaaggaaatgccacttttcttcttgctcttcctccccagacatgagtgtcaggacccaaagtgctccctcctttactgctttgtcaagtgtaatgtggggaggctgtaatgtggggaagctcagacctggggctgatgctactgagagcaaggctaagggcttggtatctctctctagcagtcttagaactgacttgatcttgtcctttttcacccatgtttggtagctgatttctcaataccagtaaccacaggagaagtttcaactcaggaaacttcccctagaaattctcccctccattcccagcccctgttgtcctctcctgccacttctaattcctgggggagaagaggtctgggtctgccatgggctaggagggcctcatcagtggtgctctctaccttcctactccttgcccacctctttgcatctttatttattcggccctcccaccacaggactttggagattgctggtgccacaaggcttggtcagaaaaagcaaattaggcaaaaaacaaacggaaaaaaaaaacaaaaaaataaaccaacccacgaagaacaactagggagacgttttagggcaaaaataagtctcagtttccctcatactaggctgagacacatgccctttgtgtgaatgagcatgaaccaagtgatggcatcccacacggaaaccaagccccttagctgaggagacagctggaagaggaacgtcaccaccccacagccacaggctcgctgtccactaatttagatccctgagcacttgagaaagaacacaggaagttcaacaggaagtttgaccctcatggatacttctctttaggccctgggtgtcccaagtctccaacctgattgttctttctgaccatttatgacaacttccgggtttctttgaaagcttgtttctaggtctcttccctagaatcccagggaatgagggcgagagggttcaggtggtataccatgtttggtctaggcagagcttcttagacttttcagagactcagcccccaaggcctaacattaattcaagccactggctcacaacctggttactctgatcaaagacttaggaaagatactggccagtggtggcaccaggagggaattcatattagccagtagcctcgtgatagggaacccagttatccgaaggtagaaagagctccacacattctagcaggaggaagaacagcttgagccacccccatctcaccagtatctgctgctgaaaaggcagtgactcttagggcaagaataatgtccactgccagcaatggaccagacacccagacccaactaccccccaaagctttttcatgttaccaacacacttgaggctgaaggttcccagatgcccatacctgctgggctgacttttccttcttctctcagcctctatccttcattcctctttacccacacccccttgtcccagcctctgatgggcaagttctctcagagaagcagtcatgctggctgtgatggggcagagcacagtcctgggtcatcagctgcatcagcactgagaagcaggcactgagggtaccgggggaaggggaggtggagctctacgctggcgaggaatcatgaataagcagtttcagggggcccaggacggagtacaagatgtgaggttcatggtaaaatccaggtctaaattctcgagatgcaccatcatttgttgtgcacaggtagttatggactcaggtggtaaacagctccagtgagggcttaggagcagttatggggtgggaggaggaggaggacgagcacacagaagaggggcctgcggtgtaagcaagcacaaggactagacgtccataaaggagaaggaacaggcaggcagggaagagaacgcgggcatttagacctggctctctgaggagagcttgcgttcatgtttccagcccgtgtctggcagagaacctcgtctttctggagtggctgcagtatggacgctgctacactcggactgctcttcctgtaacagctgctccgtctctgtgtcatccagggagccagagctggcctggatagacactgtgtctgtcttcatgcatacatgatcccggaggaggcccccccgtgagcttcgcagttgcttgaggtcatcccactcagcatcatccccagacaggaggcagattccctctacgatcttgatcttctccttggtgtagttatggtcaggccctccctctttcttatagcacagctggttgtacatggctggtttggggattgcttcaatcttcacttcctgtgtggatgttcggtaggaggggttgctataggtgaggttccccattccaggatcagtgaacttggattttttgtgtctgtacagcatcaaagctgcaatcaccaccaaaatcagcagaatactgaggagtccaccaatggcgtagctgatatgaagtccttcccctggagcagcaggaacggcctcattggaacgtgcacagaggcccagcctggcatccctttcggagcatcttccttccacctcctccagagacatgcgggtccgggtggttgaagaacgcaaggtggtaggtagtgtgttgggtagcaccgggctcttttcactcatgccagtggacctaggagctggtggtaccaggccaggcacaagagagcagggccggctatcacgttcgtcaggacaggcacatacgaagtccgaggctctggcaaagcagaggtgggtgcagccaccattgttcacgccacaggcattggtccctgtctgccgctgaggggaaaccacgatgatatccatgagtccttccacatttgccagcactgtctccttgttccggcctgagtatttgtcaacacgctggattgacttggtctgccagtctgtccagtagatccacctgtcttgctgtgtgagggcaaaggggtgggacacatggctgaccaagacctgccgcagtttcccgttgaggtcagcactctcgatccggtccagatgggcgtctacccagtagatcctgcgggtatcatagtccagggtgaggccgttgggccagcccaggtctgtgttgatgaggaccttccgctcagaaccgtccaggttcgcccgttcgatcttggcaatgtggccccagtctgtccagaagaggtaccccttcctggggaaaacagcaatggcccggggctcatccaggctattgttgatcagcactttgcggcaggaaccatccagcctggatgcctcaatggtatttcgacctgtgtctgtccagtacaggttcctggccacccagtccactgccagcccatcagtggtcttcagcccacgcccgatcactgtctccatgttgctgccattcaggtctgctcgcctgataacatccaggaacacatctgtgtaatagacctttccatccacgctgtcatagtccagggagatgacattgttgagctcaggaacagggacgtgcacatcggtgtggtcactggtgtccagtgagatacgccggatggagccacggctggagaagagcaggtaggtctcaggagagggatcacaggtcttcccatctcccttcagctggatgccagtggggcaggcacaggagaagccagaaggccgaggcaagcagaggtgggagcagccgccatttctggagccacacttgttaaaacctagtggctgtgctcggtccacagcctggatgtccatgaggcctggcaggttggacctcacgaggataacattgctgccggtacccttgtcggcacggtggatgctccgggtctgccagtcagtccagtatatataggagtcgaggagggtgaggccatatgggtgctgcactggtgacaccaacgtatgccgattggcaccattcaggtcagcagcctcaattcgctcggtgtgggcatcggcccacagcagttgggagctggccttgtccacagtcagtccattgggccatcctaggttgttgctgatgagcactgtgcggtctgagccatccattccagaccgctctaacttggcattctccccccagtctgtccagtacataaaccccatctcatggtacagtacgattgcccggggactgtcaaggttctgccacaccaacactttccgcatggacccgtccaggttgcccacttcaatccggtttgttcccgtgtctgtccagtacactttccggccaatggcatccaccgcgagcccatctgtggtctgtagccctgtggtgatgatgtcctcgtgctgtgaaccgtccagattggcacggctgatcctgtgcagtgtgctgtcagaccagtacacttttccttcctgggggtctactccaatggcaatggtgttcttcatggtaatgttgattggtaccaccacatcagcaaaataagggatgtccagggagaccatgcgaatgtctatcctcctggcgaagatgaggaaactgttcatgcctggtgagcaagtcttgccatcaggcagcaggttgatgcctgtggggcaggtacagctgaagccgcttggatttggggacctaagacacaggtggctacagccgccattctccatagcacatggtgtagacactgggggccggcggcggtggaagacatggatgtccatcaggttctccaggttctcctgcagagtctcccggtccagccctgtcagccggtcagcgctctgtatactcttagtctgccagtcagtccaatagatgcgctctccatagagggtcagcccaaatgggtgggggagctggcttccgatcagtaccttcctcttactgccatccagtccagcaaattcaattgtcttcatgccggcgtcagcccagtatagccgctgggaaccgtaatcaatagctagcccgttaggccaggtcagattagaagagataatgacttggcggcctgaggcatccatgccagctcgttcaatcttggggctcgcaccccagtcagtccaatacatgtacccgcccatgggttccaccacgatgtcccgaggacgatcaaggttctcccagatgagtactgttctcatgctgccatctgtgttggctacttcaatccggtctgtacctgcatctgtccagtacagtttgttggtgacccaatcaatggccaggccagctgggctctccaaactggtatccactaccacctcctgtcctgttccatcccacttggccctgctgatggtatcagtgctgacatctgtccagtacacgtggtcatcccgggagtcccagtcaagggccacagcactgcgtacgtcagccagtgggatgacatcatcagacaggtcctctgtgtcaaagctgattcgacggatgtccatccttcgggcaaaaagcaggaacttgtcaagactctgggcacaggcgtggctgctgatcttgcggaagccagtggggcaggcacaggtgtagttctggccactgggcagacacaggtgcgtgcagcctccgttgttgtccccacagcggttcttccctgcaggttggcgctgcgggtgcaaggtgtggatgtccatagggaagtggagtttgttgcgaatgatttcctggttcttccccgtaaatttgttagcgctattgatgctcttggtgtgccagtctgtccagtacaggctgtcttcaaacactgtgatggcgaagggatgcggaaggccctggctaatgacagccttacggtgactcccatccagattggccctctcaatgacatggtgcttagcatccacccagtacatacggcgcccagcatagtcgatggtgaggccattgggccagaagagatgggtatcagcaatgatgcggcgcccagagccatccatgctggaggcctcaatacggggggtgttgccccagtctgtccagtaaatggtaccctccatgggatgcaaggcaatggcccggggcttctccaggttctgccacagcagcaccttccggtgggccccgtccagattggccacctcaatccttgaggtgcctgagtcggtccagtagagtttgtcatggacccaatccacagccaggccccctgggctctccagcccagtagacacaacctcctccacgttgctgccgttgaggttggcacggaggatccggtccagggtgacgtctgaccagaagacaagctcgcggcggtggtggaaatcaagggcaatggcgttctccaggttgttaagcagcagcgtgtactcagagcggtgcggcagcacctgccggatgtcgatgcgattggcgaacagcagcacaggctctggccccagagccttgcagctgcgccggtcgggccgtagttcatagcctgtttcgcaccagcactggaaagccccttcgctgttggtgcaaccctggctgcaatacccctcgtcggcacactcattcacatcttggcacgtgtgcccatcctctgtgagccggtagcctgtgtggcaggtacactgcactgcccctcgcaccatctggcacttctgggcacagccaccgttgttaacattgcagttctcctcacctgtccggggccggcaattctgctgtgggctttcgtcgctgttgtcaccacagtcgttgaccccattgcacagcttcctctgcccaatgcagcgcccattccaacacaggaactggtccgaggcacactgggggcttcctgtattctcacagttctcttcatcgctattgtccgcacagtcgtcctccccatcacagcgccaggacaggcggacgcagcggcctgagcgacagcggaactgttctgctgtacacatggaggtggtgcagttgcgctcatcagactggtcatcacagtccgcgtcaccatcgcagcgccagcctgcattgatgcacaggccgctgtcacacatgaactccccagagcggcagggctggtgggaggagcagtcagactcgtccgaccagtctccgcagtcatcgtcgccatcgcagtggtagatatcgaggatacagcggccataggcacactggaactcctccaggttgcaggggggtgctggcactgctgagggacagctctcctcatcggagccatctttgcagtcggtgtcaccgtcgcagtaccagtgctcagcaatgcagcttccgtcactgcagcggaactccttgtcggagcacttgcgcatgtcacactgctcatcgctgttgtcaccacagtcattgtcaccatcgcagtgccacagactccggatgcagtagccgttctggcagggaaactcgtcctcctcacactcccgggggggacagtcctgctcatccgagtcatcctcacagtcgttgtccccgtcacacacccaggagcggcggatgcacttgccattgtcacagtgaaagtcgagaggggaacaggtaggtagcatacatccgtcctcatcgctgtggtccccgcagtcgttgtctccatcacactgccactgggcagggatgcaggtacactcgccaagagcactcactgcacatgtgaagtggctccgaccacaagcacactcggggctgctggccaggccgtgtgcgcagagcagggcgccaagcagcagcgcgccccactgccgcctcatggtgccgcccgcgccgcccgcccggggtcctgccgactcccgcgggacggcgcggtggcgaagcccgcggagggtccccgagggggaagcgtcccgggtgcacggcggcctgcgcgccccgcaagtcgccctccggacgccgccgcctcctccagtgctgccagagccgacgctgccccgccaggggac

SEQ ID NO: 309 - DNA, 8099 bp, Macaca mulatta
  source 1..8099: mol_type = genomic DNA
ggggctgcggcgcggggggcggggcggccgggcccgggacaccccctcccggtcccctggcggggcagcgtcggctctggcagcactggaggaggcggcggcgtccggagggcgacttgcggggcgcgcaggccgccgtgcacccgggacgcttccccctcggggaccctccgcgggcttctccgccgcgccgtcccgcgggagtcggcaggaccccgggcgggcggcgcgggcggcaccatgaggcggcagtggggcgcgctgctgcttggcgccctgctctgcgcacacggcctggccagcagccccgagtgtgcttgtggtcggagccacttcacatgtgcagtgagtgctcttggcgagtgtacctgcatccctgcccagtggcagtgtgatggagacaacgactgcggggaccacagcgatgaggacggatgtatgctacctacctgttcccctctcgactttcactgtgacaatggcaagtgcatccgccgctcctgggtgtgtgatggggacaacgactgtgaggatgactcggatgagcaggactgtcccccccgggagtgtgaggaggacgagtttccctgccagaacggctactgcatccggagtctgtggcactgcgatggtgacaatgactgtggtgacaacagcgatgagcagtgtgacatgcgcaagtgctccgacaaggagttccgctgcagtgacggaagctgcattgctgagcactggtactgcgacggtgacaccgactgcaaagatggctccgatgaggagagctgtccctcagcagtgccagcacccccctgcaacctggaggagttccagtgtgcctatggccgctgtatcctcgatatctaccactgcgatggcgacgatgactgcggagactggtcggacgagtctgactgctcctcccaccagccctgccgctctggggagttcatgtgtgacagcggcctgtgcatcaatgcaggctggcgctgcgatggtgacgcggactgtgatgaccagtctgatgagcgcaactgcaccacctccatgtgtacagcagaacagttccgctgtcgctcaggccgctgcgtccgcctgtcctggcgctgtgatggggaggacgactgtgcggacaatagcgatgaagagaactgtgagaatacaggaagcccccagtgtgcctcggaccagttcctgtgttggaatgggcgctgcattgggcagaggaagctgtgcaatggggtcaacgactgtggtgacaacagcgacgaaagcccacagcagaattgccggccccggacaggtgaggagaactgcaatgttaacaacggtggctgtgcccagaagtgccagatggtgcgaggggcagtgcagtgtacctgccacacaggctaccggctcacagaggatgggcacacgtgccaagatgtgaatgagtgtgccgacgaggggtattgcagccagggttgcaccaacagcgaaggggctttccagtgctggtgcgaaacaggctatgaactacggcccgaccggcgcagctgcaaggctctggggccagagcctgtgctgctgttcgccaatcgcatcgacatccggcaggtgctgccgcaccgctctgagtacacgctgctgcttaacaacctggagaacgccattgcccttgatttccaccaccgccgcgagcttgtcttctggtcagacgtcaccctggaccggatcctccgtgccaacctcaacggcagcaacgtggaggaggttgtgtctactgggctggagagcccagggggcctggctgtggattgggtccatgacaaactctactggaccgactcaggcacctcaaggattgaggtggccaatctggacggggcccaccggaaggtgctgctgtggcagaacctggagaagccccgggccattgccttgcatcccatggagggtaccatttactggacagactggggcaacaccccccgtattgaggcctccagcatggatggctctggacgccgcatcattgctgatacccatctcttctggcccaatggcctcaccatcgactatgctgggcgccgtatgtactgggtggatgctaagcaccatgtcattgagagggccaatctggatgggagtcaccgtaaggctgtcattagccagggccttccgcatcccttcgccatcacagtgtttgaagacagcctgtactggacagactggcacaccaagagcatcaatagcgctaacaaatttacggggaagaaccaggaaatcattcgcaacaaactccacttccctatggacatccacaccttgcacccgcagcgccaacctgcagggaagaaccgctgtggggacaacaacggaggctgcacgcacctgtgtctgcccagtggccagaactacacctgtgcctgccccactggcttccgcaagatcagcagccacgcctgtgcccagagtcttgacaagttcctgctttttgcccgaaggatggacatccgtcgaatcagctttgacacagaggacctgtctgatgatgtcatcccactggctgacgtacgcagtgctgtggcccttgactgggactcccgggatgaccacgtgtactggacagatgtcagcactgataccatcagcagggccaagtgggatggaacaggacaggaggtggtagtggataccagtttggagagcccagctggcctggccattgattgggtcaccaacaaactgtactggacagatgcaggtacagaccggattgaagtagccaacacagatggcagcatgagaacagtactcatctgggagaaccttgatcgtcctcgggacatcgtggtggaacccatgggcgggtacatgtattggactgactggggtgcgagccccaagattgaacgagctggcatggatgcctcaggccgccaagtcattatctcttctaatctgacctggcctaacgggctagctattgattacggttcccagcggctatactgggctgacgccggcatgaagacaattgaatttgctggactggatggcagtaagaggaaggtactgatcggaagccagctcccccacccatttgggctgaccctctatggagagcgcatctattggactgactggcagactaagagtatacagagcgctgaccggctgacagggctggaccgggagactctgcaggagaacctggagaacctgatggacatccatgtcttccaccgccgccggcccccagtgtctacaccatgtgctatggagaatggcggctgtagccacctgtgtcttaggtccccaaatccaagcggcttcagctgtacctgccccacaggcatcaacctgctgcctgatggcaagacttgctcaccaggcatgaacagtttcctcatcttcgccaggaggatagacattcgcatggtctccctggacatcccttattttgctgatgtggtggtaccaatcaacattaccatgaagaacaccattgccattggagtagacccccaggaaggaaaagtgtactggtctgacagcacactgcacaggatcagccgtgccaatctggacggttcacagcacgaggacatcatcaccacagggctacagaccacagatgggctcgcggtggatgccattggccggaaagtgtactggacagacacgggaacaaaccggattgaagtgggcaacctggacgggtccatgcggaaagtgttggtgtggcagaaccttgacagtccccgggcaatcgtactgtaccatgagatggggtttatgtactggacagactggggggagaatgccaagttagagcggtccggaatggatggctcagaccgcacagtgctcatcagcaacaacctaggatggcccaatggactgactgtggacaaggccagctcccaactgctgtgggccgatgcccacaccgagcgaattgaggctgctgacctgaatggtgccaatcggcatacgttggtatcaccagtgcagcacccatatggcctcaccctcctcgactcctatatatactggactgactggcagacccggagcatccaccgtgccgacaagggtaccggcagcaatgttatcctcgtgaggtccaacctgccaggcctcatggacatccaggctgtggaccgagcacagccactaggttttaacaagtgtggctcgagaaatggcggctgctcccacctctgcttgcctcggccttctggcttctcctgtgcctgccccactggcatccagctgaagggagatgggaagacctgtgatccctctcctgagacctacctgctcttctccagccgtggctccatccggcgtatctcactggacaccagtgaccacaccgatgtgcacgtccctgttcctgagctcaacaatgtcatctccctggactatgacagcgtggatggaaaggtctattacacagatgtgttcctggatgttatcaggcgagcagacctgaatggcagcaacatggagacagtgatcgggcgtgggctgaagaccactgatgggctggcagtggactgggtggccaggaacctgtactggacagacacaggtcgaaataccattgaggcatccaggctggatggttcctgccgcaaagtgctgatcaacaatagcctggatgagccccgggccattgctgttttccccaggaaggggtacctcttctggacagactggggccacattgccaagatcgaacgggcgaacctggacggttctgagcggaaggtcctcatcaacacagacctgggctggcccaacggcctcaccctggactatgatacccgcaggatctactgggtagacgcccatctggaccggatcgagagtgctgacctcaacgggaaactgcggcaggtcttggtcagccatgtgtcccacccctttgccctcacacagcaagacaggtggatctactggacagactggcagaccaagtcaatccagcgtgttgacaaatactcaggccggaacaaggagacagtgctggcaaatgtggaaggactcatggatatcatcgtggtttcccctcagcggcagacagggaccaatgcctgtggcgtgaacaatggtggctgcacccacctctgctttgccagagcctcggacttcgtatgtgcctgtcctgacgaacgtgatagccggccctgctctcttgtgcctggcctggtaccaccagctcctaggtccactggcatgagtgaaaagagcccggtgctacccaacacactacctaccaccttgcgttcttcaaccacccggacccgcatgtctctggaggaggtggaaggaagatgctccgaaagggatgccaggctgggcctctgtgcacgttccaatgaggccgttcctgctgctccaggggaaggacttcatatcagctatgccattggtggactcctcagtattctgctgattttggtggtgattgcagctttgatgctgtacagacacaaaaaatccaagttcactgatcctggaatggggaacctcacctacagcaacccctcctaccgaacatccacacaggaagtgaagattgaagcaatccccaaaccagccatgtacaaccagctgtgctataagaaagagggagggcctgaccataactacaccaaggagaagatcaagatcgtagagggaatctgcctcctgtctggggatgatgctgagtgggatgacctcaagcaactgcgaagctcacgggggggcctcctccgggatcatgtatgcatgaagacagacacagtgtctatccaggccagctctggctccctggatgacacagagacggagcagctgttacaggaagagcagtccgagtgtagcagcgtccatactgcagccactccagaaagacgaggttctctgccagacacgggctggaaacatgaacgcaagctctcctcagagagccaggtctaaatgcccgcgttctcttccctgcctgcctgttccttctcctttatggacgtctagtccttgtgcttgcttacaccgcaggcccctcttctgtgtgctcgtcctcctcctcctcccaccccataactgctcctaagccctcactggagctgtttaccacctgagtccataactacctgtgcacaacaaatgatggtgcatctcgagaatttagacctggattttaccatgaacctcacatcttgtactccgtcctgggccccctgaaactgcttattcatgattcctcgccagcgtagagctccacctccccttcccccggtaccctcagtgcctgcttctcagtgctgatgcagctgatgacccaggactgtgctctgccccatcacagccagcatgactgcttctctgagagaacttgcccatcagaggctgggacaagggggtgtgggtaaagagggatgaaggatagaggctgagagaagaaggaaaagtcagcccagcaggtatgggcatctgggaaccttcagcctcaagtgtgttggtaacatgaaaaagctttggggggtagttgggtctgggtgtctggtccattgctggcagtggacattattcttgccctaagagtcactgccttttcagcagcagatactggtgagatgggggtggctcaagctgttcttcctcctgctagaatgtgtggagctctttctaccttcggataactgggttccctatcacgaggctactggctaatatgaattccctcctggtgccaccactggccagtatctttcctaagtctttgatcagagtaaccaggttgtgagccagtggcttgaatgaatgttaggccttggggctgagtctctgaaaagtctaagaagctctgcctagaccaaacatggtataccacctgaaccctctcgccctcattccctgggattctagggaagagacctagaaacaagctttcaaagaaacccggaagttgtcataaatggtcagaaagaacaatcaggttggagacttgggacacccagggcctaaagagaagtatccatgagggtcaaacttcctgttgaacttcctgtgttctttctcaagtgctcagggatctaaattagtggacagcgagcctgtggctgtggggtggtgacgttcctcttccagctgtctcctcagctaaggggcttggtttccatgtgggatgccatcacttggttcatgctcattcacacaaagggcatgtgtctcagcctagtatgagggaaactgagacttatttttgccctaaaacgtctccctagttgttcttcgtgggttggtttatttttttgttttttttttccgtttgtttttgcctaatttgctttttctgaccaagccttgtggcaccagcaatctccaaagtcctgtggtgggagggccgaataaataaagatgcaaagaggtgggcaaggagtaggaaggtagagagcaccactgatgaggccctcctagcccatggcagacccagacctcttctcccccaggaattagaagtggcaggagaggacaacaggggctgggaatggaggggagaatttctaggggaagtttcctgagttgaaacttctcctgtggttactggtattgagaaatcagctaccaaacatgggtgaaaaaggacaagatcaagtcagttctaagactgctagagagagataccaagcccttagccttgttctcagtagcatcagccccaggtctgagcttccccacattacagcctccccacattacacttgacaaagcagtaaaggagggagcactttgggtcctgacactcatgtctggggaggaagagcaagaagaaaagtggcatttccttaattggaaagggggaaggatcttattgcacttgggctgttcagaatgtagaaaggacatatttgaggaagtatctatttgagcactgatttactctgtaaaaagcaaaatctctctgtcctaaactaatggaagcgattctcccatgctcatgtgtaatggttttaacgttactcactggagagattggactttctggagttatttaaccactatgttcagtattttaggactttatgataatttaatataaatttagcttttcttaatca

SEQ ID NO: 310 - DNA, 8099 bp, Macaca mulatta
  source 1..8099: mol_type = genomic DNA
tgattaagaaaagctaaatttatattaaattatcataaagtcctaaaatactgaacatagtggttaaataactccagaaagtccaatctctccagtgagtaacgttaaaaccattacacatgagcatgggagaatcgcttccattagtttaggacagagagattttgctttttacagagtaaatcagtgctcaaatagatacttcctcaaatatgtcctttctacattctgaacagcccaagtgcaataagatccttccccctttccaattaaggaaatgccacttttcttcttgctcttcctccccagacatgagtgtcaggacccaaagtgctccctcctttactgctttgtcaagtgtaatgtggggaggctgtaatgtggggaagctcagacctggggctgatgctactgagaacaaggctaagggcttggtatctctctctagcagtcttagaactgacttgatcttgtcctttttcacccatgtttggtagctgatttctcaataccagtaaccacaggagaagtttcaactcaggaaacttcccctagaaattctcccctccattcccagcccctgttgtcctctcctgccacttctaattcctgggggagaagaggtctgggtctgccatgggctaggagggcctcatcagtggtgctctctaccttcctactccttgcccacctctttgcatctttatttattcggccctcccaccacaggactttggagattgctggtgccacaaggcttggtcagaaaaagcaaattaggcaaaaacaaacggaaaaaaaaaacaaaaaaataaaccaacccacgaagaacaactagggagacgttttagggcaaaaataagtctcagtttccctcatactaggctgagacacatgccctttgtgtgaatgagcatgaaccaagtgatggcatcccacatggaaaccaagccccttagctgaggagacagctggaagaggaacgtcaccaccccacagccacaggctcgctgtccactaatttagatccctgagcacttgagaaagaacacaggaagttcaacaggaagtttgaccctcatggatacttctctttaggccctgggtgtcccaagtctccaacctgattgttctttctgaccatttatgacaacttccgggtttctttgaaagcttgtttctaggtctcttccctagaatcccagggaatgagggcgagagggttcaggtggtataccatgtttggtctaggcagagcttcttagacttttcagagactcagccccaaggcctaacattcattcaagccactggctcacaacctggttactctgatcaaagacttaggaaagatactggccagtggtggcaccaggagggaattcatattagccagtagcctcgtgatagggaacccagttatccgaaggtagaaagagctccacacattctagcaggaggaagaacagcttgagccacccccatctcaccagtatctgctgctgaaaaggcagtgactcttagggcaagaataatgtccactgccagcaatggaccagacacccagacccaactaccccccaaagctttttcatgttaccaacacacttgaggctgaaggttcccagatgcccatacctgctgggctgacttttccttcttctctcagcctctatccttcatccctctttacccacacccccttgtcccagcctctgatgggcaagttctctcagagaagcagtcatgctggctgtgatggggcagagcacagtcctgggtcatcagctgcatcagcactgagaagcaggcactgagggtaccgggggaaggggaggtggagctctacgctggcgaggaatcatgaataagcagtttcagggggcccaggacggagtacaagatgtgaggttcatggtaaaatccaggtctaaattctcgagatgcaccatcatttgttgtgcacaggtagttatggactcaggtggtaaacagctccagtgagggcttaggagcagttatggggtgggaggaggaggaggacgagcacacagaagaggggcctgcggtgtaagcaagcacaaggactagacgtccataaaggagaaggaacaggcaggcagggaagagaacgcgggcatttagacctggctctctgaggagagcttgcgttcatgtttccagcccgtgtctggcagagaacctcgtctttctggagtggctgcagtatggacgctgctacactcggactgctcttcctgtaacagctgctccgtctctgtgtcatccagggagccagagctggcctggatagacactgtgtctgtcttcatgcatacatgatcccggaggaggcccccccgtgagcttcgcagttgcttgaggtcatcccactcagcatcatccccagacaggaggcagattccctctacgatcttgatcttctccttggtgtagttatggtcaggccctccctctttcttatagcacagctggttgtacatggctggtttggggattgcttcaatcttcacttcctgtgtggatgttcggtaggaggggttgctgtaggtgaggttccccattccaggatcagtgaacttggattttttgtgtctgtacagcatcaaagctgcaatcaccaccaaaatcagcagaatactgaggagtccaccaatggcatagctgatatgaagtccttcccctggagcagcaggaacggcctcattggaacgtgcacagaggcccagcctggcatccctttcggagcatcttccttccacctcctccagagacatgcgggtccgggtggttgaagaacgcaaggtggtaggtagtgtgttgggtagcaccgggctcttttcactcatgccagtggacctaggagctggtggtaccaggccaggcacaagagagcagggccggctatcacgttcgtcaggacaggcacatacgaagtccgaggctctggcaaagcagaggtgggtgcagccaccattgttcacgccacaggcattggtccctgtctgccgctgaggggaaaccacgatgatatccatgagtccttccacatttgccagcactgtctccttgttccggcctgagtatttgtcaacacgctggattgacttggtctgccagtctgtccagtagatccacctgtcttgctgtgtgagggcaaaggggtgggacacatggctgaccaagacctgccgcagtttcccgttgaggtcagcactctcgatccggtccagatgggcgtctacccagtagatcctgcgggtatcatagtccagggtgaggccgttgggccagcccaggtctgtgttgatgaggaccttccgctcagaaccgtccaggttcgcccgttcgatcttggcaatgtggccccagtctgtccagaagaggtaccccttcctggggaaaacagcaatggcccggggctcatccaggctattgttgatcagcactttgcggcaggaaccatccagcctggatgcctcaatggtatttcgacctgtgtctgtccagtacaggttcctggccacccagtccactgccagcccatcagtggtcttcagcccacgcccgatcactgtctccatgttgctgccattcaggtctgctcgcctgataacatccaggaacacatctgtgtaatagacctttccatccacgctgtcatagtccagggagatgacattgttgagctcaggaacagggacgtgcacatcggtgtggtcactggtgtccagtgagatacgccggatggagccacggctggagaagagcaggtaggtctcaggagagggatcacaggtcttcccatctcccttcagctggatgccagtggggcaggcacaggagaagccagaaggccgaggcaagcagaggtgggagcagccgccatttctcgagccacacttgttaaaacctagtggctgtgctcggtccacagcctggatgtccatgaggcctggcaggttggacctcacgaggataacattgctgccggtacccttgtcggcacggtggatgctccgggtctgccagtcagtccagtatatataggagtcgaggagggtgaggccatatgggtgctgcactggtgataccaacgtatgccgattggcaccattcaggtcagcagcctcaattcgctcggtgtgggcatcggcccacagcagttgggagctggccttgtccacagtcagtccattgggccatcctaggttgttgctgatgagcactgtgcggtctgagccatccattccggaccgctctaacttggcattctccccccagtctgtccagtacataaaccccatctcatggtacagtacgattgcccggggactgtcaaggttctgccacaccaacactttccgcatggacccgtccaggttgcccacttcaatccggtttgttcccgtgtctgtccagtacactttccggccaatggcatccaccgcgagcccatctgtggtctgtagccctgtggtgatgatgtcctcgtgctgtgaaccgtccagattggcacggctgatcctgtgcagtgtgctgtcagaccagtacacttttccttcctgggggtctactccaatggcaatggtgttcttcatggtaatgttgattggtaccaccacatcagcaaaataagggatgtccagggagaccatgcgaatgtctatcctcctggcgaagatgaggaaactgttcatgcctggtgagcaagtcttgccatcaggcagcaggttgatgcctgtggggcaggtacagctgaagccgcttggatttggggacctaagacacaggtggctacagccgccattctccatagcacatggtgtagacactgggggccggcggcggtggaagacatggatgtccatcaggttctccaggttctcctgcagagtctcccggtccagccctgtcagccggtcagcgctctgtatactcttagtctgccagtcagtccaatagatgcgctctccatagagggtcagcccaaatgggtgggggagctggcttccgatcagtaccttcctcttactgccatccagtccagcaaattcaattgtcttcatgccggcgtcagcccagtatagccgctgggaaccgtaatcaatagctagcccgttaggccaggtcagattagaagagataatgacttggcggcctgaggcatccatgccagctcgttcaatcttggggctcgcaccccagtcagtccaatacatgtacccgcccatgggttccaccacgatgtcccgaggacgatcaaggttctcccagatgagtactgttctcatgctgccatctgtgttggctacttcaatccggtctgtacctgcatctgtccagtacagtttgttggtgacccaatcaatggccaggccagctgggctctccaaactggtatccactaccacctcctgtcctgttccatcccacttggccctgctgatggtatcagtgctgacatctgtccagtacacgtggtcatcccgggagtcccagtcaagggccacagcactgcgtacgtcagccagtgggatgacatcatcagacaggtcctctgtgtcaaagctgattcgacggatgtccatccttcgggcaaaaagcaggaacttgtcaagactctgggcacaggcgtggctgctgatcttgcggaagccagtggggcaggcacaggtgtagttctggccactgggcagacacaggtgcgtgcagcctccgttgttgtccccacagcggttcttccctgcaggttggcgctgcgggtgcaaggtgtggatgtccatagggaagtggagtttgttgcgaatgatttcctggttcttccccgtaaatttgttagcgctattgatgctcttggtgtgccagtctgtccagtacaggctgtcttcaaacactgtgatggcgaagggatgcggaaggccctggctaatgacagccttacggtgactcccatccagattggccctctcaatgacatggtgcttagcatccacccagtacatacggcgcccagcatagtcgatggtgaggccattgggccagaagagatgggtatcagcaatgatgcggcgtccagagccatccatgctggaggcctcaatacggggggtgttgccccagtctgtccagtaaatggtaccctccatgggatgcaaggcaatggcccggggcttctccaggttctgccacagcagcaccttccggtgggccccgtccagattggccacctcaatccttgaggtgcctgagtcggtccagtagagtttgtcatggacccaatccacagccaggccccctgggctctccagcccagtagacacaacctcctccacgttgctgccgttgaggttggcacggaggatccggtccagggtgacgtctgaccagaagacaagctcgcggcggtggtggaaatcaagggcaatggcgttctccaggttgttaagcagcagcgtgtactcagagcggtgcggcagcacctgccggatgtcgatgcgattggcgaacagcagcacaggctctggccccagagccttgcagctgcgccggtcgggccgtagttcatagcctgtttcgcaccagcactggaaagccccttcgctgttggtgcaaccctggctgcaatacccctcgtcggcacactcattcacatcttggcacgtgtgcccatcctctgtgagccggtagcctgtgtggcaggtacactgcactgcccctcgcaccatctggcacttctgggcacagccaccgttgttaacattgcagttctcctcacctgtccggggccggcaattctgctgtgggctttcgtcgctgttgtcaccacagtcgttgaccccattgcacagcttcctctgcccaatgcagcgcccattccaacacaggaactggtccgaggcacactgggggcttcctgtattctcacagttctcttcatcgctattgtccgcacagtcgtcctccccatcacagcgccaggacaggcggacgcagcggcctgagcgacagcggaactgttctgctgtacacatggaggtggtgcagttgcgctcatcagactggtcatcacagtccgcgtcaccatcgcagcgccagcctgcattgatgcacaggccgctgtcacacatgaactccccagagcggcagggctggtgggaggagcagtcagactcgtccgaccagtctccgcagtcatcgtcgccatcgcagtggtagatatcgaggatacagcggccataggcacactggaactcctccaggttgcaggggggtgctggcactgctgagggacagctctcctcatcggagccatctttgcagtcggtgtcaccgtcgcagtaccagtgctcagcaatgcagcttccgtcactgcagcggaactccttgtcggagcacttgcgcatgtcacactgctcatcgctgttgtcaccacagtcattgtcaccatcgcagtgccacagactccggatgcagtagccgttctggcagggaaactcgtcctcctcacactcccgggggggacagtcctgctcatccgagtcatcctcacagtcgttgtccccatcacacacccaggagcggcggatgcacttgccattgtcacagtgaaagtcgagaggggaacaggtaggtagcatacatccgtcctcatcgctgtggtccccgcagtcgttgtctccatcacactgccactgggcagggatgcaggtacactcgccaagagcactcactgcacatgtgaagtggctccgaccacaagcacactcggggctgctggccaggccgtgtgcgcagagcagggcgccaagcagcagcgcgccccactgccgcctcatggtgccgcccgcgccgcccgcccggggtcctgccgactcccgcgggacggcgcggcggagaagcccgcggagggtccccgagggggaagcgtcccgggtgcacggcggcctgcgcgccccgcaagtcgccctccggacgccgccgcctcctccagtgctgccagagccgacgctgccccgccaggggaccgggagggggtgtcccgggcccggccgccccgccccccgcgccgcagcccc

SEQ ID NO: 311 - DNA, 8294 bp, Homo sapiens
  source 1..8294: mol_type = genomic DNA
agtcattagcagacaacccttttgcaacaaagtatgctttaaaatgtaaactgtggagccattttccttgcgttgtccagaaggaacttcgtcctgcgtgagcctggattaatcatgagagagctcgtcaacattccactggtacatattcttactctggttgccttcagcggaactgagaaacttccaaaagctcctgtcatcaccactcctcttgaaacagtggatgccttagttgaagaagtggctactttcatgtgtgcagtggaatcctacccccagcctgagatttcctggactagaaataaaattctcattaaactctttgacacccggtacagcatccgggagaatgggcagctcctcaccatcctgagtgtggaagacagtgatgatggcatttactgctgcacggccaacaatggtgtgggaggagctgtggagagttgtggagccctgcaagtgaagatgaaacctaaaataactcgtcctcccataaatgtgaaaataatagagggattaaaagcagtcctaccatgtactacaatgggtaatcccaaaccatcagtgtcttggataaagggagacagccctctcagggaaaattcccgaattgcagttcttgaatctgggagcttgaggattcataacgtacaaaaggaagatgcaggacagtatcgatgtgtggcaaaaaacagcctcgggacagcatattccaaagtggtgaagctggaagttgaggtttttgccaggatcctgcgggctcctgaatcccacaatgtcacctttggctcctttgtgaccctgcactgtacagcaacaggcattcctgtccccaccatcacctggattgaaaacggaaatgctgtttcttctgggtccattcaagagagtgtgaaagaccgagtgattgactcaagactgcagctgtttatcaccaagccaggactctacacatgcatagctaccaataagcatggggagaagttcagtactgccaaggctgcagccaccatcagcatagcagaatggagtaaaccacagaaagataacaaaggctactgcgcccagtacagaggggaggtgtgtaatgcagtcctggcaaaagatgctcttgtttttctcaacacctcctatgcggaccctgaggaggcccaagagctactggtccacacggcctggaatgaactgaaagtagtgagcccagtctgccggccagctgctgaggctttgttgtgtaaccacatcttccaggagtgcagtcctggagtagtgcctactcctattcccatttgcagagagtactgcttggcagtaaaggagctcttctgcgcaaaagaatggctggtaatggaagagaagacccacagaggactctacagatccgagatgcatttgctgtccgtgccagaatgcagcaagcttcccagcatgcattgggaccccacggcctgtgccagactgccacatctagattataacaaagaaaacctaaaaacattcccaccaatgacgtcctcaaagccaagtgtggacattccaaatctgccttcctcctcctcttcttccttctctgtctcacctacatactccatgactgtaataatctccatcatgtccagctttgcaatatttgtgcttcttaccataactactctctattgctgccgaagaagaaaacaatggaaaaataagaaaagagaatcagcagcagtaaccctcaccacactgccttctgagctcttactagatagacttcatcccaaccccatgtaccagaggatgccgctccttctgaaccccaaattgctcagcctggagtatccaaggaataacattgaatatgtgagagacatcggagagggagcgtttggaagggtgtttcaagcaagggcaccaggcttacttccctatgaacctttcactatggtggcagtaaagatgctcaaagaagaagcctcggcagatatgcaagcggactttcagagggaggcagccctcatggcagaatttgacaaccctaacattgtgaagctattaggagtgtgtgctgtcgggaagccaatgtgcctgctctttgaatacatggcctatggtgacctcaatgagttcctccgcagcatgtcccctcacaccgtgtgcagcctcagtcacagtgacttgtctatgagggctcaggtctccagccctgggcccccacccctctcctgtgctgagcagctttgcattgccaggcaggtggcagctggcatggcttacctctcagaacgtaagtttgttcaccgagatttagccaccaggaactgcctggtgggcgagaacatggtggtgaaaattgccgactttggcctctccaggaacatctactcagcagactactacaaagctaatgaaaacgacgctatccctatccgttggatgccaccagagtccattttttataaccgctacactacagagtctgatgtgtgggcctatggcgtggtcctctgggagatcttctcctatggcctgcagccctactatgggatggcccatgaggaggtcatttactacgtgcgagatggcaacatcctctcctgccctgagaactgccccgtggagctgtacaatctcatgcgtctatgttggagcaagctgcctgcagacagacccagtttcaccagtattcaccgaattctggaacgcatgtgtgagagggcagagggaactgtgagtgtctaaggttgaagacgttcaaataaaatgctgcagtttcctctcagactctgtgagccaggggaatcctacaccagaggcccaacaagacccacataggaaagagtaagagtaaacatgagtagtgtgttgtttgcttcccagggagagcaaagacagtgcaaaacccatgtggtagacggacccattgaaagccagtgattggaaacacaggctaggaaatgtgtcagataatggagacaactattcttcttcatgaaggtttgtaatacacactgcacagggaagaatgtcatcctgttcagtttccaaagtagctggtcacagagtaaagctctgctgtattaaattttaatatgaaatgggattcagagcttcattttttaattgagttaattcctgtccattgtgaaagtagcttaatcgtcatgtaagacacttaggtgaagtacagaaaactaaaaagaaggaaaagccactcattctgtctccccccaaagacgagtcttagtgttttattaaatctttcttgcatttaatgcataattttatatttgtttgtattctgcagagttgtggttacattttattgatagagggtttctaaggaatgaaacagcaaatcagcaagcctgtaactctgagttcccttttctgtcctgtgcccctccttttttcctttctgtgcatttgtcatgaattaagtctgcttattttattcctccagttttcttgaaacaagtttttgtatcttactgatttaccttttcctttaaaaattgtattggtatcttttccattgctttaatctttatttcttcttctttccaggacttctgtccttttttagttattaagctatttttttcttttatttcattcatgtaataaacactctggcagaaataataacattttaaataccattgtagattgatatgtatatgccttttgcaaagtattactatttttcctgcatttgcctttgaagccacacatttcaacattctcacctattaatattattactagagtctatttaaatctcttaaaccataatttataatatgagatttcacaagatacacttgtggctctgagttatttcaaaactgatatttctgtgcattctgacattttattccttttagaaacaaattcagttggctgtagaattaatatcgttctgcttaacaactttgtgcatgacatattaactgattttgttgtatttcatgatttaaaaaaaaaagcagcagctctggaactcagattcctgggggttcagattttttctcagtggatcctcacacaatacatctttatctaagtccatacatgatctgagtttatttctgatatagcaggaacccaaattctcctgaaaacgaacagggaagagaaaataacagtctactctataccagcttatcttaattcagactaattggtagttagggcattggaggaatggtgtgaattcttgaaagtagattttcgctgtctgctggaaaactctgcctgaaatccccaaatctgcctcatgtaacagcttgacatctttggtgggaaacctgccatttcttattcatagtgtctccaggcaaccaagacaaaaatgtagaaattttcctagactttgccctctctttcatcatcagttttctattagttttacttcctaaaatcctcctgctgacatcctcttcccttcaacccaagagccaatgactcaacctctaccgttgcccaccctgtctattagctggccttcctctcatttcagacctgaacagattctgtaggatacaacgacagtaaggcggtccttagtcacagttctggttcataaatagcgaggtcagcatttaggactgagacctaaagaagtgcttcagataaaaatcatgagtctaagtccaaaattgatactgtaatccaaatgactgaataaagaataaagttgcagcgtgtgtctaaagcagaaagtcaagatgccaacaaagcagaaaagttggagagggccaccagcaagtctagaacttgagcatagatatccatggcttattttagatggttcatgtatgctctgcaaaattcaaagacagcttcgggctttctccgctgataaagttttgttgtaaaagacagacatagaagtcaggctgacagaaaatagagtaacagtaatcataaaaattataatatcagctagcatttattgaaatcttaccatgtgtattctgaggcctttaaatatatgaacttaaacctcacaacatccctgtaatgttggtactatcattatatacattttagttttgctttgttttgttttgtttttgagacggagtctcgctctgtcgcccaggctggagtgcagtggcacgatcttggctcactgcaagctcagcctccaacagtcacagagagattgtgcaactggcccgagtgcacacagcaacagagcctactttttgaccaaaagaggccgaattctcaaccactatactgtagagcctctgtacatgatagaagcaataactgaacctcagtaactctgtggaagtgatttgtaatttgcatgtcgtttcaagcacactctatatctatattttattctattaacttcctaagtctttttaatgaatagcaaaaaaagtatatttcagcattatcaatttaagttaatcataacatctaataggtgacatgtttattttttcatgagttctaattacattttcaagttaagatcactgacttattccctaagtgctcgatctaatgttctgaatcacaggagtatagatgcattattcaccaatattgtttacttttttaaataagattttttttcatggtagaatcatcatatacattcaaaaaggtagacaaaagagagacactcacagtgtcactgttaccaagtgccaggacagatatcagtaaggcaccagcagtcatttttagtgatcaaataccaaacatggtaagataccagagtatttttcacatgacacccaaaaacatattctctgctatcgtggtagagcagaaaaagaacactttcttttcattttacagtatattacgaacctgttccacgtcattaaatattcttctaaaaacccaattttggaataatattctattttattcatatactgtaatttagctaatcaatcttgtatttttgaacatttaggttttttccaatttttatcattataaaaaatgctgtaattaacatccttatttgttcatgtccacatttctttttatgaaaattcagagaaaggaaatgtctggaccaaatggcatgtacaatattaacacttctgttatgtggtttcatattctgcagaaatattactgccacttctacattgtacaagagatctcatagccctaaacatttgctttcatagataattttctgttttttagaaatcttttgtctctttggttatagaaaaagagaacctctttttaattttattttttaaattactagtcaggttgaatgtttcttgttcctaggtcattaacagtttttattttggcaattgtctacagcccatttttctgctgtgttcattttctaatcgaattatgggatttatcttgtaaaaagcctattaagcctttttcatactttacacaagagatcacatctacttactttaccttaaaataacatttacttattttcttataaaagtaatatattatgtttgaaaagaaaaataatatgcaataatatacaataatatgtataatcataatagacaataataaaaatgaaaaaacaccaaccagaggtaattaacattaacatcataatattcttccaggctttttcagatagacaggtaggtaagtaggttggtaggtaaatagatagatagatgatacatagagagagatagatagataatttaaacaaaaataagatcatactgctacattacttcaagccttgcttttatcacttaatatatcttaaacatcttctacatgaacaagtattcatgtgcaacattaattttgatggttgaatagtattatacagatttatcgtaattgacataactattctactgttagacatttggtttatttctatttttccattataaaatgtaatgtttggatcatcctgttgctaaattttgtaagcatttatcttaagtgatttctttagctataactcctagaagtgaaatttctagattaaaggataaatgcacttttaatactttttaaatatattaaaaaattaccttcctgaattattttattaacatgtacctctcctagtcagataagacagcccatttatttcagtctcaccaatactgagtatagcattttaatcattgccaatataatagctaatagcttaaagttatttcatagcttatatttacacttctttaaatactaataaaattgaacattgtttaatgttttgaggatacttgattggtgatttgcctcctactattatttttctactgggtatatctttttcttgttgctttgtaagagcactttatatattaaggagttaaattttgtgatatatgtttcaactacttttatcatgttaaaaatatagacttctatttgtcttttattgtaggttttatcaatcagaaaagaatgttgacttttccgtccattcagatgattgtggcttttttccctaatggatttgttaatatgttcaattgtatgaatttatttcctaatgtagcgatatccttgtcttctaggaataaactttttgggcgaatcatatcaatcttctacttaactaccaaattaatttacatatatttgcatcaatattaagttcataaaattaaaagtttatcattttcatctctgttagagttttgtattggcattagcatttgtattagcattgtattaggaaaaactcaggagtttttctctataatcttggttagtttatttttaaataattgttatttatgaaagtaatacataaaaatgttgtttaaaaaaactcacaagagggtaaaaattaaaaaaataataaaagttcccttcttccttttcatctctagtcccagcctaagtgctaaccacttcacccatttatagtgttagttcttctggtgattaccagtgcaattctaacaaataggtttgcatttctctttctgaattgatcaattttttaaaaatatgcagcactctgactcaaactccctttctttttcctgagatatgttaacttctaatgttatattgtttatcacaactttcacaaatatttctaaataaaggttacctactgattctggattgtgctacataaaattagagcttccaaatttccctccatcacttctccctgctctctactctcacaatcagtcaactatacacctatttctacgctgtcaactatatgttcatttctatgaatctgtaatatttgcattttgttctggaacaaattaagatttaggtgctttgactagattgattctaaacatcaaaaaacaaaaataaaatatctgcaattatgtgatcatgta

SEQ ID NO: 312 - DNA, 8294 bp, Homo sapiens
  source 1..8294: mol_type = genomic DNA
tacatgatcacataattgcagatattttatttttgttttttgatgtttagaatcaatctagtcaaagcacctaaatcttaatttgttccagaacaaaatgcaaatattacagattcatagaaatgaacatatagttgacagcgtagaaataggtgtatagttgactgattgtgagagtagagagcagggagaagtgatggagggaaatttggaagctctaattttatgtagcacaatccagaatcagtaggtaacctttatttagaaatatttgtgaaagttgtgataaacaatataacattagaagttaacatatctcaggaaaaagaaagggagtttgagtcagagtgctgcatatttttaaaaaattgatcaattcagaaagagaaatgcaaacctatttgttagaattgcactggtaatcaccagaagaactaacactataaatgggtgaagtggttagcacttaggctgggactagagatgaaaaggaagaagggaacttttattatttttttaatttttaccctcttgtgagtttttttaaacaacatttttatgtattactttcataaataacaattatttaaaaataaactaaccaagattatagagaaaaactcctgagtttttcctaatacaatgctaatacaaatgctaatgccaatacaaaactctaacagagatgaaaatgataaacttttaattttatgaacttaatattgatgcaaatatatgtaaattaatttggtagttaagtagaagattgatatgattcgcccaaaaagtttattcctagaagacaaggatatcgctacattaggaaataaattcatacaattgaacatattaacaaatccattagggaaaaaagccacaatcatctgaatggacggaaaagtcaacattcttttctgattgataaaacctacaataaaagacaaatagaagtctatatttttaacatgataaaagtagttgaaacatatatcacaaaatttaactccttaatatataaagtgctcttacaaagcaacaagaaaaagatatacccagtagaaaaataatagtaggaggcaaatcaccaatcaagtatcctcaaaacattaaacaatgttcaattttattagtatttaaagaagtgtaaatataagctatgaaataactttaagctattagctattatattggcaatgattaaaatgctatactcagtattggtgagactgaaataaatgggctgtcttatctgactaggagaggtacatgttaataaaataattcaggaaggtaattttttaatatatttaaaaagtattaaaagtgcatttatcctttaatctagaaatttcacttctaggagttatagctaaagaaatcacttaagataaatgcttacaaaatttagcaacaggatgatccaaacattacattttataatggaaaaatagaaataaaccaaatgtctaacagtagaatagttatgtcaattacgataaatctgtataatactattcaaccatcaaaattaatgttgcacatgaatacttgttcatgtagaagatgtttaagatatattaagtgataaaagcaaggcttgaagtaatgtagcagtatgatcttatttttgtttaaattatctatctatctctctctatgtatcatctatctatctatttacctaccaacctacttacctacctgtctatctgaaaaagcctggaagaatattatgatgttaatgttaattacctctggttggtgttttttcatttttattattgtctattatgattatacatattattgtatattattgcatattatttttcttttcaaacataatatattacttttataagaaaataagtaaatgttattttaaggtaaagtaagtagatgtgatctcttgtgtaaagtatgaaaaaggcttaataggctttttacaagataaatcccataattcgattagaaaatgaacacagcagaaaaatgggctgtagacaattgccaaaataaaaactgttaatgacctaggaacaagaaacattcaacctgactagtaatttaaaaaataaaattaaaaagaggttctctttttctataaccaaagagacaaaagatttctaaaaaacagaaaattatctatgaaagcaaatgtttagggctatgagatctcttgtacaatgtagaagtggcagtaatatttctgcagaatatgaaaccacataacagaagtgttaatattgtacatgccatttggtccagacatttcctttctctgaattttcataaaaagaaatgtggacatgaacaaataaggatgttaattacagcattttttataatgataaaaattggaaaaaacctaaatgttcaaaaatacaagattgattagctaaattacagtatatgaataaaatagaatattattccaaaattgggtttttagaagaatatttaatgacgtggaacaggttcgtaatatactgtaaaatgaaaagaaagtgttctttttctgctctaccacgatagcagagaatatgtttttgggtgtcatgtgaaaaatactctggtatcttaccatgtttggtatttgatcactaaaaatgactgctggtgccttactgatatctgtcctggcacttggtaacagtgacactgtgagtgtctctcttttgtctacctttttgaatgtatatgatgattctaccatgaaaaaaaatcttatttaaaaaagtaaacaatattggtgaataatgcatctatactcctgtgattcagaacattagatcgagcacttagggaataagtcagtgatcttaacttgaaaatgtaattagaactcatgaaaaaataaacatgtcacctattagatgttatgattaacttaaattgataatgctgaaatatactttttttgctattcattaaaaagacttaggaagttaatagaataaaatatagatatagagtgtgcttgaaacgacatgcaaattacaaatcacttccacagagttactgaggttcagttattgcttctatcatgtacagaggctctacagtatagtggttgagaattcggcctcttttggtcaaaaagtaggctctgttgctgtgtgcactcgggccagttgcacaatctctctgtgactgttggaggctgagcttgcagtgagccaagatcgtgccactgcactccagcctgggcgacagagcgagactccgtctcaaaaacaaaacaaaacaaagcaaaactaaaatgtatataatgatagtaccaacattacagggatgttgtgaggtttaagttcatatatttaaaggcctcagaatacacatggtaagatttcaataaatgctagctgatattataatttttatgattactgttactctattttctgtcagcctgacttctatgtctgtcttttacaacaaaactttatcagcggagaaagcccgaagctgtctttgaattttgcagagcatacatgaaccatctaaaataagccatggatatctatgctcaagttctagacttgctggtggccctctccaacttttctgctttgttggcatcttgactttctgctttagacacacgctgcaactttattctttattcagtcatttggattacagtatcaattttggacttagactcatgatttttatctgaagcacttctttaggtctcagtcctaaatgctgacctcgctatttatgaaccagaactgtgactaaggaccgccttactgtcgttgtatcctacagaatctgttcaggtctgaaatgagaggaaggccagctaatagacagggtgggcaacggtagaggttgagtcattggctcttgggttgaagggaagaggatgtcagcaggaggattttaggaagtaaaactaatagaaaactgatgatgaaagagagggcaaagtctaggaaaatttctacatttttgtcttggttgcctggagacactatgaataagaaatggcaggtttcccaccaaagatgtcaagctgttacatgaggcagatttggggatttcaggcagagttttccagcagacagcgaaaatctactttcaagaattcacaccattcctccaatgccctaactaccaattagtctgaattaagataagctggtatagagtagactgttattttctcttccctgttcgttttcaggagaatttgggttcctgctatatcagaaataaactcagatcatgtatggacttagataaagatgtattgtgtgaggatccactgagaaaaaatctgaacccccaggaatctgagttccagagctgctgcttttttttttaaatcatgaaatacaacaaaatcagttaatatgtcatgcacaaagttgttaagcagaacgatattaattctacagccaactgaatttgtttctaaaaggaataaaatgtcagaatgcacagaaatatcagttttgaaataactcagagccacaagtgtatcttgtgaaatctcatattataaattatggtttaagagatttaaatagactctagtaataatattaataggtgagaatgttgaaatgtgtggcttcaaaggcaaatgcaggaaaaatagtaatactttgcaaaaggcatatacatatcaatctacaatggtatttaaaatgttattatttctgccagagtgtttattacatgaatgaaataaaagaaaaaaatagcttaataactaaaaaaggacagaagtcctggaaagaagaagaaataaagattaaagcaatggaaaagataccaatacaatttttaaaggaaaaggtaaatcagtaagatacaaaaacttgtttcaagaaaactggaggaataaaataagcagacttaattcatgacaaatgcacagaaaggaaaaaaggaggggcacaggacagaaaagggaactcagagttacaggcttgctgatttgctgtttcattccttagaaaccctctatcaataaaatgtaaccacaactctgcagaatacaaacaaatataaaattatgcattaaatgcaagaaagatttaataaaacactaagactcgtctttggggggagacagaatgagtggcttttccttctttttagttttctgtacttcacctaagtgtcttacatgacgattaagctactttcacaatggacaggaattaactcaattaaaaaatgaagctctgaatcccatttcatattaaaatttaatacagcagagctttactctgtgaccagctactttggaaactgaacaggatgacattcttccctgtgcagtgtgtattacaaaccttcatgaagaagaatagttgtctccattatctgacacatttcctagcctgtgtttccaatcactggctttcaatgggtccgtctaccacatgggttttgcactgtctttgctctccctgggaagcaaacaacacactactcatgtttactcttactctttcctatgtgggtcttgttgggcctctggtgtaggattcccctggctcacagagtctgagaggaaactgcagcattttatttgaacgtcttcaaccttagacactcacagttccctctgccctctcacacatgcgttccagaattcggtgaatactggtgaaactgggtctgtctgcaggcagcttgctccaacatagacgcatgagattgtacagctccacggggcagttctcagggcaggagaggatgttgccatctcgcacgtagtaaatgacctcctcatgggccatcccatagtagggctgcaggccataggagaagatctcccagaggaccacgccataggcccacacatcagactctgtagtgtagcggttataaaaaatggactctggtggcatccaacggatagggatagcgtcgttttcattagctttgtagtagtctgctgagtagatgttcctggagaggccaaagtcggcaattttcaccaccatgttctcgcccaccaggcagttcctggtggctaaatctcggtgaacaaacttacgttctgagaggtaagccatgccagctgccacctgcctggcaatgcaaagctgctcagcacaggagaggggtgggggcccagggctggagacctgagccctcatagacaagtcactgtgactgaggctgcacacggtgtgaggggacatgctgcggaggaactcattgaggtcaccataggccatgtattcaaagagcaggcacattggcttcccgacagcacacactcctaatagcttcacaatgttagggttgtcaaattctgccatgagggctgcctccctctgaaagtccgcttgcatatctgccgaggcttcttctttgagcatctttactgccaccatagtgaaaggttcatagggaagtaagcctggtgcccttgcttgaaacacccttccaaacgctccctctccgatgtctctcacatattcaatgttattccttggatactccaggctgagcaatttggggttcagaaggagcggcatcctctggtacatggggttgggatgaagtctatctagtaagagctcagaaggcagtgtggtgagggttactgctgctgattctcttttcttatttttccattgttttcttcttcggcagcaatagagagtagttatggtaagaagcacaaatattgcaaagctggacatgatggagattattacagtcatggagtatgtaggtgagacagagaaggaagaagaggaggaggaaggcagatttggaatgtccacacttggctttgaggacgtcattggtgggaatgtttttaggttttctttgttataatctagatgtggcagtctggcacaggccgtggggtcccaatgcatgctgggaagcttgctgcattctggcacggacagcaaatgcatctcggatctgtagagtcctctgtgggtcttctcttccattaccagccattcttttgcgcagaagagctcctttactgccaagcagtactctctgcaaatgggaataggagtaggcactactccaggactgcactcctggaagatgtggttacacaacaaagcctcagcagctggccggcagactgggctcactactttcagttcattccaggccgtgtggaccagtagctcttgggcctcctcagggtccgcataggaggtgttgagaaaaacaagagcatcttttgccaggactgcattacacacctcccctctgtactgggcgcagtagcctttgttatctttctgtggtttactccattctgctatgctgatggtggctgcagccttggcagtactgaacttctccccatgcttattggtagctatgcatgtgtagagtcctggcttggtgataaacagctgcagtcttgagtcaatcactcggtctttcacactctcttgaatggacccagaagaaacagcatttccgttttcaatccaggtgatggtggggacaggaatgcctgttgctgtacagtgcagggtcacaaaggagccaaaggtgacattgtgggattcaggagcccgcaggatcctggcaaaaacctcaacttccagcttcaccactttggaatatgctgtcccgaggctgttttttgccacacatcgatactgtcctgcatcttccttttgtacgttatgaatcctcaagctcccagattcaagaactgcaattcgggaattttccctgagagggctgtctccctttatccaagacactgatggtttgggattacccattgtagtacatggtaggactgcttttaatccctctattattttcacatttatgggaggacgagttattttaggtttcatcttcacttgcagggctccacaactctccacagctcctcccacaccattgttggccgtgcagcagtaaatgccatcatcactgtcttccacactcaggatggtgaggagctgcccattctcccggatgctgtaccgggtgtcaaagagtttaatgagaattttatttctagtccaggaaatctcaggctgggggtaggattccactgcacacatgaaagtagccacttcttcaactaaggcatccactgtttcaagaggagtggtgatgacaggagcttttggaagtttctcagttccgctgaaggcaaccagagtaagaatatgtaccagtggaatgttgacgagctctctcatgattaatccaggctcacgcaggacgaagttccttctggacaacgcaaggaaaatggctccacagtttacattttaaagcatactttgttgcaaaagggttgtctgctaatgact

SEQ ID NO: 313 - DNA, 3422 bp, Mus musculus
  source 1..3422: mol_type = genomic DNA
gcagacacaaacagtccttagcggacaactctattgtaacaaaccatgctttaaaatgtaaacccgggagcgtgttttttgttttttttttttttttttttttcctcacgttgtccagaagcaacctttcttcctgagcctggattaatcatgagagagcttgtcaacattccactgttacagatgctcaccctggttgccttcagcgggactgagaaacttccaaaagcccctgtcatcaccacgcctcttgaaactgtagatgccttggttgaagaagtagcgactttcatgtgtgccgtggaatcctaccctcagcccgagatttcttggaccagaaataaaattctcattaagctgtttgacacccgctacagcatccgggagaatggtcagctcctcaccattctgagcgtggaagacagtgatgatggcatctactgctgcatagccaacaatggagtgggaggagccgtggagagttgtggtgccctgcaagtgaagatgaaacctaaaataactcgtcctcccattaatgtaaaaataatagagggattgaaggcagttctgccgtgcactacgatgggtaaccccaaaccatctgtgtcctggatcaagggggacaatgctctcagggaaaattccagaatcgcagttcttgaatctgggagcttaaggatccataatgtgcaaaaggaagatgcaggacagtaccgctgtgtggccaaaaacagcctgggcacagcttactccaaactggtgaagctggaagtggaggaagacagagaacctgagcaggacgctaaagtttttgcaagaatcctgcgtgctcctgaatcccacaatgtcacctttggttcctttgtaaccctacgctgcacagcaataggcatccctgtccccaccatcagctggattgaaaacggaaatgctgtttcttcaggttccattcaagagagtgtgaaagaccgagtgattgactcaagactccagctcttcatcacaaagccaggactctacacatgcatagctaccaataagcacggagaaaagttcagtaccgcaaaggctgcagccactgtcagcatagcagtccctcctccgtggttttctatggatacttctttcctatggacagaatggagtaagtcacagaaagacagccaaggctactgtgcccagtacagaggggaggtgtgtgatgcagtcctggcgaaagatgctcttgtcttcttcaacacctcctaccgggaccccgaggacgcccaggagctgctgatccacactgcgtggaatgagctgaaggctgtgagtccactgtgccggccagctgctgaggctctgctgtgtaaccacctcttccaagagtgcagccctggagtggtacctactcccatgcccatttgcagagagtactgcctggcggtaaaggagctcttctgtgcaaaggaatggcaggcaatggaaggaaaggcccaccggggcctctacagatctgggatgcatctccttccggtaccagagtgcagcaagcttcccagcatgcaccgggaccccacagcctgcacaagactgccatatttagattataaaaaagaaaacataacaacattcccgtcaataacgtcctccaggccgagcgcggacattccaaacctgcctgcctccacctcttcctttgccgtctcgcctgcgtactccatgaccgtcatcatctccatcgtgtccagctttgccctgtttgctcttctcaccatcgctactctctattgctgccgaaggaggaaagaatggaaaaataagaaaagagagtcgaccgcggtgaccctcaccacgttgccttccgagctcctgctggataggctccatcccaaccccatgtaccagaggatgccactccttctgaatcctaagttgctcagcctggagtatccgaggaataacattgagtatgtccgagacatcggagagggggcgtttggaagagtcttccaagcaagggcccctggcttgctgccttatgaacctttcactatggtggccgtgaagatgcttaaggaagaggcctctgcagacatgcaagcggactttcagagggaggcggccctcatggcagagtttgacaaccccaacattgtgaaactcttaggtgtgtgtgccgttgggaagccgatgtgtctgctctttgaatatatggcctatggtgacctcaatgagttcctccgaagtatgtccccgcacactgtttgcagcctcagccacagtgacctgtccacgagggctcgggtgtctagccctggtcctccaccactgtcctgtgcagaacagctctgcattgccaggcaggtggcagctggcatggcctacctttcagagcgcaagtttgtccaccgggacttagctaccaggaactgcctggttggggagaccatggtggtgaaaattgcagactttggcctctccaggaacatctattccgcagactactacaaagctgatggaaatgacgccatccctatccgctggatgccgcccgagtctatcttctacaaccgctacaccactgagtcggatgtatgggcctatggtgtggtcctctgggagatcttctcctatgggctgcagccctactatggaatggcccacgaggaggtcatttactatgtgagagatggcaacatcctcgcctgccctgagaactgccccttggaactgtacaacctcatgcgcctgtgttggagcaagctgcctgctgatagacccagcttctgcagtatccacaggatcctgcagcgcatgtgcgagagagcagagggaacggtgggtgtctaaagttgaccattctcaaacaacacccaggaggctcttttcagactgtgagctggaggaaccctaccgcagaggccgtgtaagaccagataggaggagtttaactcagacatcacgtgccagttgattgtttgccaggagaaacagatggtgaatatcccacagggttaaagagtcacatcaaaataggttggagatacaggctaggaaagaggacagcaggtagctcctctccctcacagggaccgtttctaatatatattgcataataagaacatcccggttacgttcctacataatctctcagagcgagactgcagtgcttaggttgaatccaaaactggatgggcaacttcatttttaacagaagacatcctgcccattgcaaaagcaatgtgtctttgtgtatatttaggtaaaggactgaaaactaaagataggaatcccttcttccaccagtcaagacacgtggcagggtcttgctgttgtttagttcttccttgcacagaatatgtaacgttgtatttgcattctggaattgagtatctattttactgatagacttttgaagaataaaaagtggaaagcctgca

SEQ ID NO: 314 - DNA, 3422 bp, Mus musculus
  source 1..3422: mol_type = genomic DNA
tgcaggctttccactttttattcttcaaaagtctatcagtaaaatagatactcaattccagaatgcaaatacaacgttacatattctgtgcaaggaagaactaaacaacagcaagaccctgccacgtgtcttgactggtggaagaagggattcctatctttagttttcagtcctttacctaaatatacacaaagacacattgcttttgcaatgggcaggatgtcttctgttaaaaatgaagttgcccatccagttttggattcaacctaagcactgcagtctcgctctgagagattatgtaggaacgtaaccgggatgttcttattatgcaatatatattagaaacggtccctgtgagggagaggagctacctgctgtcctctttcctagcctgtatctccaacctattttgatgtgactctttaaccctgtgggatattcaccatctgtttctcctggcaaacaatcaactggcacgtgatgtctgagttaaactcctcctatctggtcttacacggcctctgcggtagggttcctccagctcacagtctgaaaagagcctcctgggtgttgtttgagaatggtcaactttagacacccaccgttccctctgctctctcgcacatgcgctgcaggatcctgtggatactgcagaagctgggtctatcagcaggcagcttgctccaacacaggcgcatgaggttgtacagttccaaggggcagttctcagggcaggcgaggatgttgccatctctcacatagtaaatgacctcctcgtgggccattccatagtagggctgcagcccataggagaagatctcccagaggaccacaccataggcccatacatccgactcagtggtgtagcggttgtagaagatagactcgggcggcatccagcggatagggatggcgtcatttccatcagctttgtagtagtctgcggaatagatgttcctggagaggccaaagtctgcaattttcaccaccatggtctccccaaccaggcagttcctggtagctaagtcccggtggacaaacttgcgctctgaaaggtaggccatgccagctgccacctgcctggcaatgcagagctgttctgcacaggacagtggtggaggaccagggctagacacccgagccctcgtggacaggtcactgtggctgaggctgcaaacagtgtgcggggacatacttcggaggaactcattgaggtcaccataggccatatattcaaagagcagacacatcggcttcccaacggcacacacacctaagagtttcacaatgttggggttgtcaaactctgccatgagggccgcctccctctgaaagtccgcttgcatgtctgcagaggcctcttccttaagcatcttcacggccaccatagtgaaaggttcataaggcagcaagccaggggcccttgcttggaagactcttccaaacgccccctctccgatgtctcggacatactcaatgttattcctcggatactccaggctgagcaacttaggattcagaaggagtggcatcctctggtacatggggttgggatggagcctatccagcaggagctcggaaggcaacgtggtgagggtcaccgcggtcgactctcttttcttatttttccattctttcctccttcggcagcaatagagagtagcgatggtgagaagagcaaacagggcaaagctggacacgatggagatgatgacggtcatggagtacgcaggcgagacggcaaaggaagaggtggaggcaggcaggtttggaatgtccgcgctcggcctggaggacgttattgacgggaatgttgttatgttttcttttttataatctaaatatggcagtcttgtgcaggctgtggggtcccggtgcatgctgggaagcttgctgcactctggtaccggaaggagatgcatcccagatctgtagaggccccggtgggcctttccttccattgcctgccattcctttgcacagaagagctcctttaccgccaggcagtactctctgcaaatgggcatgggagtaggtaccactccagggctgcactcttggaagaggtggttacacagcagagcctcagcagctggccggcacagtggactcacagccttcagctcattccacgcagtgtggatcagcagctcctgggcgtcctcggggtcccggtaggaggtgttgaagaagacaagagcatctttcgccaggactgcatcacacacctcccctctgtactgggcacagtagccttggctgtctttctgtgacttactccattctgtccataggaaagaagtatccatagaaaaccacggaggagggactgctatgctgacagtggctgcagcctttgcggtactgaacttttctccgtgcttattggtagctatgcatgtgtagagtcctggctttgtgatgaagagctggagtcttgagtcaatcactcggtctttcacactctcttgaatggaacctgaagaaacagcatttccgttttcaatccagctgatggtggggacagggatgcctattgctgtgcagcgtagggttacaaaggaaccaaaggtgacattgtgggattcaggagcacgcaggattcttgcaaaaactttagcgtcctgctcaggttctctgtcttcctccacttccagcttcaccagtttggagtaagctgtgcccaggctgtttttggccacacagcggtactgtcctgcatcttccttttgcacattatggatccttaagctcccagattcaagaactgcgattctggaattttccctgagagcattgtcccccttgatccaggacacagatggtttggggttacccatcgtagtgcacggcagaactgccttcaatccctctattatttttacattaatgggaggacgagttattttaggtttcatcttcacttgcagggcaccacaactctccacggctcctcccactccattgttggctatgcagcagtagatgccatcatcactgtcttccacgctcagaatggtgaggagctgaccattctcccggatgctgtagcgggtgtcaaacagcttaatgagaattttatttctggtccaagaaatctcgggctgagggtaggattccacggcacacatgaaagtcgctacttcttcaaccaaggcatctacagtttcaagaggcgtggtgatgacaggggcttttggaagtttctcagtcccgctgaaggcaaccagggtgagcatctgtaacagtggaatgttgacaagctctctcatgattaatccaggctcaggaagaaaggttgcttctggacaacgtgaggaaaaaaaaaaaaaaaaaaaaaacaaaaaacacgctcccgggtttacattttaaagcatggtttgttacaatagagttgtccgctaaggactgtttgtgtctgc

SEQ ID NO: 315 - DNA, 2855 bp, Rattus norvegicus
  source 1..2855: mol_type = genomic DNA
caaacagtcattagtggacgactctattgtaataaactgtgctttaaaatgtaaaccagggagcgtttttttcctcacattgtccagaagcaacctttcttcctgagcctggattaatcatgagagagctcgtcaacattccactgttacagatgctcaccctggttgccttcagcgggaccgagaaacttccaaaagcccctgtcatcaccacgcctcttgaaactgtagatgccttagttgaagaagtggcgactttcatgtgcgccgtggaatcctaccctcagcctgaaatttcttggaccagaaataaaattctcatcaagctgtttgacacccgctacagcatccgagagaacggtcagctcctcaccatcctgagtgtggaggacagtgatgatggcatctactgctgcacagccaacaatggagtgggaggagcggtggaaagttgtggcgccctgcaagtgaagatgaagcctaaaataactcgtcctcccatcaatgtaaaaataattgagggattgaaagcagtcctaccgtgcactacgatgggtaaccccaagccatccgtgtcctggattaagggggacagtgctctcagggaaaattccaggattgcagttcttgaatctgggagtttaaggatccataatgtgcaaaaggaagacgcaggacagtaccgatgtgtggcaaaaaacagcctgggcacagcttactccaaactggtgaagctggaagtggaggtttttgcaagaatcctgcgtgctcctgaatcccacaatgtcacctttggttcctttgtaaccctacgctgcacagcaataggcatgcctgtccccaccatcagctggattgaaaacggaaatgctgtttcttcaggttccattcaagagaatgtgaaagaccgagtgattgactcaagactccagctctttatcacaaagccaggactctacacatgcatagctaccaataagcatggagagaaattcagtaccgcaaaggctgcagccactgtcagtatagcagaatggagcaaatcacagaaagaaagcaaaggctactgtgcccagtacagaggggaggtgtgtgatgccgtcctggtgaaagactctcttgtcttcttcaacacctcctatcccgaccctgaggaggcccaagagctgctgatccacactgcgtggaatgaactcaaggctgtgagcccactctgccgaccagctgccgaggctctgctgtgtaatcacctcttccaggagtgcagctctggagtgctacctactcctatgcccatttgcagagagtactgcttggcagtaaaggagctcttctgtgcaaaggaatggctggcaatggaagggaagacccaccgcggactctacagatccgggatgcatttcctcccggtcccggagtgcagcaagcttcccagcatgcaccaggaccccacagcctgcacaagactgccgtatttagattataaaaaagaaaacataacaacattcccgtccataacgtcctccaagccgagcgtggacattccaaacctgcctgcctccacgtcttccttcgccgtctcgcctgcgtactccatgactgtcatcatctccatcatgtcctgctttgcggtgtttgctctcctcaccatcactactctctattgctgccgaaggaggagagagtggaaaaataagaaaagagagtcggcagcggtgaccctcaccacattgccttccgagctcctgctggacaggctgcatcccaaccccatgtaccagaggatgccactccttctgaatcccaagttgctcagcctggagtatccgaggaataacatcgagtatgtcagagacatcggagagggagcgtttggaagggtctttcaagcgagggccccaggcttgcttccttatgaacccttcactatggtggctgtgaagatgctgaaggaggaggcctccgcagatatgcaggcagactttcagagggaggcagccctcatggcggagtttgacaaccccaacattgtgaagctcttaggtgtgtgtgctgttgggaagccaatgtgcctgctctttgaatatatggcctatggtgacctcaatgagttcctccgaagcatgtcccctcacactgtgtgcagcctcagccacagtgacctgtccacgagggctcgggtgtccagccctggtcctccacccctgtcttgtgcggaacagctctgtattgccaggcaagtggcagctggcatggcctacctgtcggagcgcaagtttgtccatcgggacttagctaccaggaactgcctggttggagagaacatggtggtgaaaattgcagactttggcctctctaggaacatctactccgcagactactacaaagctgatggaaacgatgctatacctatccgctggatgccacccgagtctatcttctacaaccgctacaccacggagtcagatgtgtgggcttatggcgtggtcctctgggagatcttctcctatggactgcagccctactatggaatggcccatgaggaggtcatttactatgtgagagatggtaacatccttgcctgccctgagaactgtcccttggaactgtacaaccttatgcgcctatgttggagcaagctgcctgcagacagacccagcttctgcagtatccaccggatcctgcagcgcatgtgcgagagagcagagggaacggtaggcgtctaaggttgaccgtgctcaaacaacacccaggaggatcttttcagactgcgagctggagggatcctaaagcagaggccggataagaccagataggaagagtttaactcaggcagcacgtgccagttgattgtt

SEQ ID NO: 316 - DNA, 2855 bp, Rattus norvegicus
  source 1..2855: mol_type = genomic DNA
aacaatcaactggcacgtgctgcctgagttaaactcttcctatctggtcttatccggcctctgctttaggatccctccagctcgcagtctgaaaagatcctcctgggtgttgtttgagcacggtcaaccttagacgcctaccgttccctctgctctctcgcacatgcgctgcaggatccggtggatactgcagaagctgggtctgtctgcaggcagcttgctccaacataggcgcataaggttgtacagttccaagggacagttctcagggcaggcaaggatgttaccatctctcacatagtaaatgacctcctcatgggccattccatagtagggctgcagtccataggagaagatctcccagaggaccacgccataagcccacacatctgactccgtggtgtagcggttgtagaagatagactcgggtggcatccagcggataggtatagcatcgtttccatcagctttgtagtagtctgcggagtagatgttcctagagaggccaaagtctgcaattttcaccaccatgttctctccaaccaggcagttcctggtagctaagtcccgatggacaaacttgcgctccgacaggtaggccatgccagctgccacttgcctggcaatacagagctgttccgcacaagacaggggtggaggaccagggctggacacccgagccctcgtggacaggtcactgtggctgaggctgcacacagtgtgaggggacatgcttcggaggaactcattgaggtcaccataggccatatattcaaagagcaggcacattggcttcccaacagcacacacacctaagagcttcacaatgttggggttgtcaaactccgccatgagggctgcctccctctgaaagtctgcctgcatatctgcggaggcctcctccttcagcatcttcacagccaccatagtgaagggttcataaggaagcaagcctggggccctcgcttgaaagacccttccaaacgctccctctccgatgtctctgacatactcgatgttattcctcggatactccaggctgagcaacttgggattcagaaggagtggcatcctctggtacatggggttgggatgcagcctgtccagcaggagctcggaaggcaatgtggtgagggtcaccgctgccgactctcttttcttatttttccactctctcctccttcggcagcaatagagagtagtgatggtgaggagagcaaacaccgcaaagcaggacatgatggagatgatgacagtcatggagtacgcaggcgagacggcgaaggaagacgtggaggcaggcaggtttggaatgtccacgctcggcttggaggacgttatggacgggaatgttgttatgttttcttttttataatctaaatacggcagtcttgtgcaggctgtggggtcctggtgcatgctgggaagcttgctgcactccgggaccgggaggaaatgcatcccggatctgtagagtccgcggtgggtcttcccttccattgccagccattcctttgcacagaagagctcctttactgccaagcagtactctctgcaaatgggcataggagtaggtagcactccagagctgcactcctggaagaggtgattacacagcagagcctcggcagctggtcggcagagtgggctcacagccttgagttcattccacgcagtgtggatcagcagctcttgggcctcctcagggtcgggataggaggtgttgaagaagacaagagagtctttcaccaggacggcatcacacacctcccctctgtactgggcacagtagcctttgctttctttctgtgatttgctccattctgctatactgacagtggctgcagcctttgcggtactgaatttctctccatgcttattggtagctatgcatgtgtagagtcctggctttgtgataaagagctggagtcttgagtcaatcactcggtctttcacattctcttgaatggaacctgaagaaacagcatttccgttttcaatccagctgatggtggggacaggcatgcctattgctgtgcagcgtagggttacaaaggaaccaaaggtgacattgtgggattcaggagcacgcaggattcttgcaaaaacctccacttccagcttcaccagtttggagtaagctgtgcccaggctgttttttgccacacatcggtactgtcctgcgtcttccttttgcacattatggatccttaaactcccagattcaagaactgcaatcctggaattttccctgagagcactgtcccccttaatccaggacacggatggcttggggttacccatcgtagtgcacggtaggactgctttcaatccctcaattatttttacattgatgggaggacgagttattttaggcttcatcttcacttgcagggcgccacaactttccaccgctcctcccactccattgttggctgtgcagcagtagatgccatcatcactgtcctccacactcaggatggtgaggagctgaccgttctctcggatgctgtagcgggtgtcaaacagcttgatgagaattttatttctggtccaagaaatttcaggctgagggtaggattccacggcgcacatgaaagtcgccacttcttcaactaaggcatctacagtttcaagaggcgtggtgatgacaggggcttttggaagtttctcggtcccgctgaaggcaaccagggtgagcatctgtaacagtggaatgttgacgagctctctcatgattaatccaggctcaggaagaaaggttgcttctggacaatgtgaggaaaaaaacgctccctggtttacattttaaagcacagtttattacaatagagtcgtccactaatgactgtttg

SEQ ID NO: 317 - DNA, 3975 bp, Macaca fascicularis
  source 1..3975: mol_type = genomic DNA
gatagagaatggttaagacccaagacagagagaagttacaaggactatttggttgataaaatctgtaggaattggaatgggctgaatgtgggagtgggggtggggtgagagatggggaggagtgaggactaaataaacccagatttctggtttgagtccaggagagtgggctgctgaatccaaaggccaggacacctatacctctgggaatacagtgatggttgcaaaaggcatctggtattgtccttctgccactgtcttaaaagggattctaaaaggattttcttgcccttgttcctctagccctacacttgcgttactggcctacgtggatactcaccagctggctgtgtccatcattgcagccaagtctgagaattcctgattatacttagagcctgtggagctgctgacacaaacagtcattagcagacgacccttttgcaacaaagtatgctttaaaatgtaaaccgtggaggcattttccttgcgttgtccagaaggaactttgtcctgcgtgagcctggattaatcatgagagagctcgtcaacattccactggtacatattcttactctggttgccttcagcggaactgagaaacttccaaaagctcctgtcatcaccactcctcttgaaactgtggatgccttagttgaagaagtggctactttcatgtgtgcagtggaatcctacccccagcctgagatttcctggaccagaaataaaattctcattaagctctttgacacccggtacagcatccgggagaatggtcagctcctcaccatcctgagtgtggaagacagtgatgatggcatttactgctgcacggccaacaatggtgtgggaggagctgtggagagttgtggagccctgcaagtgaagatgaaacctaaaataactcgtcctcccataaatgtgaaaataatagagggattaaaagcagtcctaccatgtactacaatgggtaatcccaaaccatcagtgtcttggataaagggagacagccctctcagggaaaattcccgaactgcagttcttgaatctgggagcttgaggattcataacgtacaaaaggaagatgcaggacagtatcgatgtgtggcaaaaaacagccttgggacagcatattcaaaagtggtgaagctggaagttgaggtttttgccaggatcctgcgggctcctgaatcccacaatgtcacctttggctcctttgtgaccctgcactgtacagcaacaggcattcctgtccccaccatcacctggattgaaaacggaaatgctgtttcttctgggtccattcaagagagtgtaaaagaccgagtgattgactcaagactgcagctgtttatcaccaagccaggactctacacatgcatagctaccaataagcatggggagaagttcagtactgccaaggctgcagccactatcagcatagcagaatggagtaaaccacagaaagataacaaaggctactgcgcccagtatagaggggaggtgtgtaatgcagtcctggcaaaagacgctcttgtttttctcaacacctcctatgcggaccctgaggaggcccaagagctgctggtccacacggcctggaatgaactgaaagtagtgagcccactctgcaggccagctgctgaggctttgttgtgtaaccacgtcttccaggagtgcagtcctggagtagtgccgactcctattcccatttgcagagagtactgtttggcagtaaaggagctcttctgtgcaaaagaatggctggcaatggaagagaagacccacagaggactctacagatctgagatgcatttgctgtcggtgccagaatgcagcaagcttcccagcatgcactgggaccctacagcctgtgccagactgccacatttagattataacaaagaaaacccaaaaacattcccaccaatgacatcctcaaagccaagtgtggacattccaaatttgccttcctcctcctcttcttccttctctgtctcacctacatactccatgactgtaataatctccatcatgtccagctttgcaatatttgcgcttcttaccatcactactctctattgctgccgaagaagaaaacaatggaaaaataagaaaagagaatcagcagcagtaaccctcaccacactgccttctgagctcttactagatagacttcatcccaaccccatgtaccagaggatgccgctccttctgaaccccaaattgctcagcctggagtatccaagaaataacattgaatatgtgagagacattggagagggagcgtttggaagggtgtttcaagcaagggcaccaggtttacttccctatgaacctttcactatggtggcagtaaagatgctcaaagaagaagcctcggcagatatgcaagcggactttcagagggaggcagccctcatggcagaatttgacaaccctaacattgtgaagctcttaggcgtgtgtgctgtcgggaagccaatgtgcctgctctttgaatacatggcctatggtgatctcaatgagttcctccgcagcatgtcccctcacaccgtgtgcagcctcagtcacagtgacttgtctatgagggcccaggtctccagccctggacccccacccctctcctgtgctgagcagctttgcattgccaggcaagtggcagctggtatggcttacctctcagaacgtaagtttgttcaccgagatttagccaccaggaactgcctggtgggcgagaacatggtggtaaaaattgccgactttggcctctccaggaacatctactcagcagactactacaaagctaatgaaaacgacgctatccctatccgttggatgccaccagagtccattttttataaccgctacactacagagtctgatgtgtgggcctacggcgtggtcctctgggagatcttctcctatggcctgcagccctactatgggatggcccatgaggaggtcatttactacgtgcgagatggcaacatcctctcctgccctgagaactgccccgtggagctgtacaatctcatgcgtctatgttggagcaagctgcctgcagacagacccagtttcaccagtattcaccgaattctggaacgcatgtgtgagagggcagagggaactgtgagtgtctaaggttgaagacgttcaaataaaatgctgcagtttcctctcagactctgtgagccaggggaatcctacaccagaggcccgacaagacccacataggaaagagtaagagtagacatgagtagcatgttttttcccagggagagcaaagacagtgcaaaacccatgtggtagacggacctgttgaaggccagtgattggaaacacaggctaggtaatgtgtcagataatggagacaactatttttctttatgaaggtttgtaatatacactgcacagggaagaaggtcatcttgttcagtttccaaattagctggtcacagagtaaagctctcctgtattaaattttaatatgaaatgggattcagagcttcattttttaatcgagttaattcctgtccattgtgaaaatagcttaatcttcatgtaagacacttaggtgaagtacagaaaactaaaaagaaggaaaagccactcattttctctccacccaaagatgagtctcagtgttttgttaaatctttcttgcatttaatgcataattttatatttgtttgtattctgcggagttgtggttatattttattgatagagggtttctaaggaatgaaacagcaaatcagcaaggctgtgactttgagttcacttttctgtcctgtgtccctccttttttcctttctgtgcacttgtcataaattaaatctgcttattttattcctccagtttccttgaaacaagtttttgtatcttactgatttaccttttcctttaaaaattgtattggtgtcttttccattgctttaatctttatttcttcttctttccagaacttctgtc

SEQ ID NO: 318 - DNA, 3975 bp, Macaca fascicularis
  source 1..3975: mol_type = genomic DNA
gacagaagttctggaaagaagaagaaataaagattaaagcaatggaaaagacaccaatacaatttttaaaggaaaaggtaaatcagtaagatacaaaaacttgtttcaaggaaactggaggaataaaataagcagatttaatttatgacaagtgcacagaaaggaaaaaaggagggacacaggacagaaaagtgaactcaaagtcacagccttgctgatttgctgtttcattccttagaaaccctctatcaataaaatataaccacaactccgcagaatacaaacaaatataaaattatgcattaaatgcaagaaagatttaacaaaacactgagactcatctttgggtggagagaaaatgagtggcttttccttctttttagttttctgtacttcacctaagtgtcttacatgaagattaagctattttcacaatggacaggaattaactcgattaaaaaatgaagctctgaatcccatttcatattaaaatttaatacaggagagctttactctgtgaccagctaatttggaaactgaacaagatgaccttcttccctgtgcagtgtatattacaaaccttcataaagaaaaatagttgtctccattatctgacacattacctagcctgtgtttccaatcactggccttcaacaggtccgtctaccacatgggttttgcactgtctttgctctccctgggaaaaaacatgctactcatgtctactcttactctttcctatgtgggtcttgtcgggcctctggtgtaggattcccctggctcacagagtctgagaggaaactgcagcattttatttgaacgtcttcaaccttagacactcacagttccctctgccctctcacacatgcgttccagaattcggtgaatactggtgaaactgggtctgtctgcaggcagcttgctccaacatagacgcatgagattgtacagctccacggggcagttctcagggcaggagaggatgttgccatctcgcacgtagtaaatgacctcctcatgggccatcccatagtagggctgcaggccataggagaagatctcccagaggaccacgccgtaggcccacacatcagactctgtagtgtagcggttataaaaaatggactctggtggcatccaacggatagggatagcgtcgttttcattagctttgtagtagtctgctgagtagatgttcctggagaggccaaagtcggcaatttttaccaccatgttctcgcccaccaggcagttcctggtggctaaatctcggtgaacaaacttacgttctgagaggtaagccataccagctgccacttgcctggcaatgcaaagctgctcagcacaggagaggggtgggggtccagggctggagacctgggccctcatagacaagtcactgtgactgaggctgcacacggtgtgaggggacatgctgcggaggaactcattgagatcaccataggccatgtattcaaagagcaggcacattggcttcccgacagcacacacgcctaagagcttcacaatgttagggttgtcaaattctgccatgagggctgcctccctctgaaagtccgcttgcatatctgccgaggcttcttctttgagcatctttactgccaccatagtgaaaggttcatagggaagtaaacctggtgcccttgcttgaaacacccttccaaacgctccctctccaatgtctctcacatattcaatgttatttcttggatactccaggctgagcaatttggggttcagaaggagcggcatcctctggtacatggggttgggatgaagtctatctagtaagagctcagaaggcagtgtggtgagggttactgctgctgattctcttttcttatttttccattgttttcttcttcggcagcaatagagagtagtgatggtaagaagcgcaaatattgcaaagctggacatgatggagattattacagtcatggagtatgtaggtgagacagagaaggaagaagaggaggaggaaggcaaatttggaatgtccacacttggctttgaggatgtcattggtgggaatgtttttgggttttctttgttataatctaaatgtggcagtctggcacaggctgtagggtcccagtgcatgctgggaagcttgctgcattctggcaccgacagcaaatgcatctcagatctgtagagtcctctgtgggtcttctcttccattgccagccattcttttgcacagaagagctcctttactgccaaacagtactctctgcaaatgggaataggagtcggcactactccaggactgcactcctggaagacgtggttacacaacaaagcctcagcagctggcctgcagagtgggctcactactttcagttcattccaggccgtgtggaccagcagctcttgggcctcctcagggtccgcataggaggtgttgagaaaaacaagagcgtcttttgccaggactgcattacacacctcccctctatactgggcgcagtagcctttgttatctttctgtggtttactccattctgctatgctgatagtggctgcagccttggcagtactgaacttctccccatgcttattggtagctatgcatgtgtagagtcctggcttggtgataaacagctgcagtcttgagtcaatcactcggtcttttacactctcttgaatggacccagaagaaacagcatttccgttttcaatccaggtgatggtggggacaggaatgcctgttgctgtacagtgcagggtcacaaaggagccaaaggtgacattgtgggattcaggagcccgcaggatcctggcaaaaacctcaacttccagcttcaccacttttgaatatgctgtcccaaggctgttttttgccacacatcgatactgtcctgcatcttccttttgtacgttatgaatcctcaagctcccagattcaagaactgcagttcgggaattttccctgagagggctgtctccctttatccaagacactgatggtttgggattacccattgtagtacatggtaggactgcttttaatccctctattattttcacatttatgggaggacgagttattttaggtttcatcttcacttgcagggctccacaactctccacagctcctcccacaccattgttggccgtgcagcagtaaatgccatcatcactgtcttccacactcaggatggtgaggagctgaccattctcccggatgctgtaccgggtgtcaaagagcttaatgagaattttatttctggtccaggaaatctcaggctgggggtaggattccactgcacacatgaaagtagccacttcttcaactaaggcatccacagtttcaagaggagtggtgatgacaggagcttttggaagtttctcagttccgctgaaggcaaccagagtaagaatatgtaccagtggaatgttgacgagctctctcatgattaatccaggctcacgcaggacaaagttccttctggacaacgcaaggaaaatgcctccacggtttacattttaaagcatactttgttgcaaaagggtcgtctgctaatgactgtttgtgtcagcagctccacaggctctaagtataatcaggaattctcagacttggctgcaatgatggacacagccagctggtgagtatccacgtaggccagtaacgcaagtgtagggctagaggaacaagggcaagaaaatccttttagaatcccttttaagacagtggcagaaggacaataccagatgccttttgcaaccatcactgtattcccagaggtataggtgtcctggcctttggattcagcagcccactctcctggactcaaaccagaaatctgggtttatttagtcctcactcctccccatctctcaccccacccccactcccacattcagcccattccaattcctacagattttatcaaccaaatagtccttgtaacttctctctgtcttgggtcttaaccattctctatc

SEQ ID NO: 319 - DNA, 3687 bp, Macaca mulatta
  source 1..3687: mol_type = genomic DNA
ctcaccagctggctgtgtccatcattgcagccaagtctgagaattcctgattatacttagagcctgtggagctgctgacacaaacagtcattagcagacgacccttttgcaacaaagtatgctttaaaatgtaaaccgtggaggcattttccttgcgttgtccagaaggaactttgtcctgcgtgagcctggattaatcatgagagagctcgtcaacattccactggtacatattcttactctggttgccttcagcggaactgagaaacttccaaaagctcctgtcatcaccactcctcttgaaactgtggatgccttagttgaagaagtggctactttcatgtgtgcagtggaatcctacccccagcctgagatttcctggaccagaaataaaattctcattaagctctttgacacccggtacagcatccgggagaatggtcagctcctcaccatcctgagtgtggaagacagtgatgatggcatttactgctgcacggccaacaatggtgtgggaggagctgtggagagttgtggagccctgcaagtgaagatgaaacctaaaataactcgtcctcccataaatgtgaaaataatagagggattaaaagcagtcctaccatgtactacaatgggtaatcccaaaccatcagtgtcttggataaagggagacagccctctcagggaaaattcccgaactgcagttcttgaatctgggagcttgaggattcataacgtacaaaaggaagatgcaggacagtatcgatgtgtggcaaaaaacagccttgggacagcatattcaaaagtggtgaagctggaagttgaggaagaaagtgaacctgaacaagatactaaagtttttgccaggatcctgcgggctcctgaatcccacaatgtcacctttggctcctttgtgaccctgcactgtacagcaacaggcattcctgtccccaccatcacctggattgaaaacggaaatgctgtttcttctgggtccattcaagagagtgtaaaagaccgagtaattgactcaagactgcagctgtttatcaccaagccaggactctacacatgcatagctaccaataagcatggggagaagttcagtactgccaaggctgcagccactgtcagcatagcagaatggagtaaaccacagaaagataacaaaggctactgcgcccagtatagaggggaggtgtgtaatgcagtcctggcaaaagacgctcttgtttttctcaacacctcctatgcggaccctgaggaggcccaagagctgctggtccacacggcctggaatgaactgaaagtagtgagcccactctgcaggccagctgctgaggctttgttgtgtaaccacgtcttccaggagtgcagtcctggagtagtgccgactcctattcccatttgcagagagtactgcttggcagtaaaggagctcttctgtgcaaaagagtggctggcaatggaagagaagacccacagaggactctacagatctgagatgcatttgctgtcggtgccagaatgcagcaagcttcccagcatgcactgggaccctacagcctgtgccagactgccacatttagattataacaaagaaaacccaaaaacattcccaccaatgacatcctcaaagccaagtgtggacattccaaatttgccttcctcctcctcttcttccttctctgtctcacctacatactccatgactgtaataatctccatcatgtccagctttgcaatatttgcgcttcttaccatcactactctctattgctgccgaagaagaaaacaatggaaaaataagaaaagagaatcagcagcagtaaccctcaccacactgccttctgagctcttactagatagacttcatcccaaccccatgtaccagaggatgccgctccttctgaaccccaaattgctcagcctggagtatccaagaaataacattgaatatgtgagagacattggagagggagcgtttggaagggtgtttcaagcaagggcaccaggtttacttccctatgaacctttcactatggtggcagtaaagatgctcaaagaagaagcctcggcagatatgcaagcggactttcagagggaggcagccctcatggcagaatttgacaaccctaacattgtgaagctcttaggcgtgtgtgctgtcgggaagccaatgtgcctgctctttgaatacatggcctatggtgatctcaatgagttcctccgcagcatgtcccctcacaccgtgtgcagcctcagtcacagtgacttgtctatgagggcccaggtctccagccctggacccccacccctctcctgtgctgagcagctttgcattgccaggcaagtggcagctggtatggcttacctctcagaacgtaagtttgttcaccgagatttagccaccaggaactgcctggtgggcgagaacatggtggtaaaaattgccgactttggcctctccaggaacatctactcagcagactactacaaagctaatgaaaacgacgctatccctatccgttggatgccaccagagtccattttttataaccgctacactacagagtctgatgtgtgggcctacggcgtggtcctctgggagatcttctcctatggcctgcagccctactatgggatggcccatgaggaggtcatttactacgtgcgagatggcaacatcctctcctgccctgagaactgccctgtggagctgtacaatctcatgcgtctatgttggagcaagctgcctgcagacagacccagtttcaccagtattcaccgaattctggaacgcatgtgtgagagggcagagggaactgtgagtgtctaaggttgaagacgttcaaataaaatgctgcagtttcctctcagactctgtgagccaggggaatcctacaccagaggcccgacaagacccacataggaaagagtaagagtagacatgagtagcatgttttttcccagggagagcaaagacagtgcaaaacccatgtggtagacggacctgttgaaggccagtgattggaaacacaggctaggtaatgtgtcagataatggagacaactatttttctttatgaaggtttgtaatatacactgcacagggaagaaggtcatcttgttcagtttccaaattagctggtcacagagtaaagctctcctgtattaaattttaatatgaaatgggattcagagcttcattttttaatcgagttaattcctgtccattgtgaaaatagcttaatcttcatgtaagacacttaggtgaagtacagaaaactaaaaagaaggaaaagccactcattttctctccacccaaagatgagtctcagtgttttgttaaatctttcttgcatttaatgcataattttatatttgtttgtattctgcggagttgtggttatattttattgatagagggtttctaaggaatgaaacagcaaatcagcaaggctgtgactttgagttcacttttctgtcctgtgtccctccttttttcctttctgtgcacttgtcataaattaaatctgcttattttattcctccagtttccttgaaacaagtttttgtatcttactgatttaccttttcctttaaaaattgtattggtgtcttttccattgctttaatctttatttcttcttctttccagaacttctgtccttttttagttatttag

SEQ ID NO: 320 - DNA, 3687 bp, Macaca mulatta
  source 1..3687: mol_type = genomic DNA
ctaaataactaaaaaaggacagaagttctggaaagaagaagaaataaagattaaagcaatggaaaagacaccaatacaatttttaaaggaaaaggtaaatcagtaagatacaaaaacttgtttcaaggaaactggaggaataaaataagcagatttaatttatgacaagtgcacagaaaggaaaaaaggagggacacaggacagaaaagtgaactcaaagtcacagccttgctgatttgctgtttcattccttagaaaccctctatcaataaaatataaccacaactccgcagaatacaaacaaatataaaattatgcattaaatgcaagaaagatttaacaaaacactgagactcatctttgggtggagagaaaatgagtggcttttccttctttttagttttctgtacttcacctaagtgtcttacatgaagattaagctattttcacaatggacaggaattaactcgattaaaaaatgaagctctgaatcccatttcatattaaaatttaatacaggagagctttactctgtgaccagctaatttggaaactgaacaagatgaccttcttccctgtgcagtgtatattacaaaccttcataaagaaaaatagttgtctccattatctgacacattacctagcctgtgtttccaatcactggccttcaacaggtccgtctaccacatgggttttgcactgtctttgctctccctgggaaaaaacatgctactcatgtctactcttactctttcctatgtgggtcttgtcgggcctctggtgtaggattcccctggctcacagagtctgagaggaaactgcagcattttatttgaacgtcttcaaccttagacactcacagttccctctgccctctcacacatgcgttccagaattcggtgaatactggtgaaactgggtctgtctgcaggcagcttgctccaacatagacgcatgagattgtacagctccacagggcagttctcagggcaggagaggatgttgccatctcgcacgtagtaaatgacctcctcatgggccatcccatagtagggctgcaggccataggagaagatctcccagaggaccacgccgtaggcccacacatcagactctgtagtgtagcggttataaaaaatggactctggtggcatccaacggatagggatagcgtcgttttcattagctttgtagtagtctgctgagtagatgttcctggagaggccaaagtcggcaatttttaccaccatgttctcgcccaccaggcagttcctggtggctaaatctcggtgaacaaacttacgttctgagaggtaagccataccagctgccacttgcctggcaatgcaaagctgctcagcacaggagaggggtgggggtccagggctggagacctgggccctcatagacaagtcactgtgactgaggctgcacacggtgtgaggggacatgctgcggaggaactcattgagatcaccataggccatgtattcaaagagcaggcacattggcttcccgacagcacacacgcctaagagcttcacaatgttagggttgtcaaattctgccatgagggctgcctccctctgaaagtccgcttgcatatctgccgaggcttcttctttgagcatctttactgccaccatagtgaaaggttcatagggaagtaaacctggtgcccttgcttgaaacacccttccaaacgctccctctccaatgtctctcacatattcaatgttatttcttggatactccaggctgagcaatttggggttcagaaggagcggcatcctctggtacatggggttgggatgaagtctatctagtaagagctcagaaggcagtgtggtgagggttactgctgctgattctcttttcttatttttccattgttttcttcttcggcagcaatagagagtagtgatggtaagaagcgcaaatattgcaaagctggacatgatggagattattacagtcatggagtatgtaggtgagacagagaaggaagaagaggaggaggaaggcaaatttggaatgtccacacttggctttgaggatgtcattggtgggaatgtttttgggttttctttgttataatctaaatgtggcagtctggcacaggctgtagggtcccagtgcatgctgggaagcttgctgcattctggcaccgacagcaaatgcatctcagatctgtagagtcctctgtgggtcttctcttccattgccagccactcttttgcacagaagagctcctttactgccaagcagtactctctgcaaatgggaataggagtcggcactactccaggactgcactcctggaagacgtggttacacaacaaagcctcagcagctggcctgcagagtgggctcactactttcagttcattccaggccgtgtggaccagcagctcttgggcctcctcagggtccgcataggaggtgttgagaaaaacaagagcgtcttttgccaggactgcattacacacctcccctctatactgggcgcagtagcctttgttatctttctgtggtttactccattctgctatgctgacagtggctgcagccttggcagtactgaacttctccccatgcttattggtagctatgcatgtgtagagtcctggcttggtgataaacagctgcagtcttgagtcaattactcggtcttttacactctcttgaatggacccagaagaaacagcatttccgttttcaatccaggtgatggtggggacaggaatgcctgttgctgtacagtgcagggtcacaaaggagccaaaggtgacattgtgggattcaggagcccgcaggatcctggcaaaaactttagtatcttgttcaggttcactttcttcctcaacttccagcttcaccacttttgaatatgctgtcccaaggctgttttttgccacacatcgatactgtcctgcatcttccttttgtacgttatgaatcctcaagctcccagattcaagaactgcagttcgggaattttccctgagagggctgtctccctttatccaagacactgatggtttgggattacccattgtagtacatggtaggactgcttttaatccctctattattttcacatttatgggaggacgagttattttaggtttcatcttcacttgcagggctccacaactctccacagctcctcccacaccattgttggccgtgcagcagtaaatgccatcatcactgtcttccacactcaggatggtgaggagctgaccattctcccggatgctgtaccgggtgtcaaagagcttaatgagaattttatttctggtccaggaaatctcaggctgggggtaggattccactgcacacatgaaagtagccacttcttcaactaaggcatccacagtttcaagaggagtggtgatgacaggagcttttggaagtttctcagttccgctgaaggcaaccagagtaagaatatgtaccagtggaatgttgacgagctctctcatgattaatccaggctcacgcaggacaaagttccttctggacaacgcaaggaaaatgcctccacggtttacattttaaagcatactttgttgcaaaagggtcgtctgctaatgactgtttgtgtcagcagctccacaggctctaagtataatcaggaattctcagacttggctgcaatgatggacacagccagctggtgag

SEQ ID NO: 321 - DNA, 1622 bp, Homo sapiens
  source 1..1622: mol_type = genomic DNA
gttcccagggtggcgcctgctctccatccaggccccattccggctcccacccgacgctgcttttgttcccacgtttcggggggcagctggcactgtgattcctgccccatgagtgcctagaggcacggagccaccagggatcaccccacgtgggacacagggcttggggaggatggggcaggaccagaccaagcagcagatcgagaaggggctccagctgtaccagtccaaccagacagagaaggcattgcaggtgtggacaaaggtgctggagaagagctcggacctcatggggcgcttccgcgtgctgggctgcctggtcacagcccactcggagatgggccgctacaaggagatgctgaagttcgctgtggtccagatcgacacggcccgggagctggaggatgccgacttcctcctggagagctacctgaacctggcacgcagcaacgagaagctgtgcgagtttcacaagaccatctcctactgcaagacctgccttgggctgcctggtaccagggcaggtgcccagctcggaggccaggtcagcctgagcatgggcaatgccttcctgggcctcagcgtcttccagaaggccctggagagcttcgagaaggccctgcgctatgcccacaacaatgatgacgccatgctcgagtgccgcgtgtgctgcagcctgggcagcttctatgcccaggtcaaggactacgagaaagccctgttcttcccctgcaaggcggcagagcttgtcaacaactatggcaaaggctggagcctgaagtaccgggccatgagccagtaccacatggccgtggcctatcgcctgctgggccgcctgggcagtgccatggagtgttgtgaggagtctatgaagatcgcgctgcagcacggggaccggccactgcaggcgctctgcctgctctgcttcgctgacatccaccggagccgtggggacctggagacagccttccccaggtacgactccgccatgagcatcatgaccgagatcggaaaccgcctggggcaggtgcaggcgctgctgggtgtggccaagtgctgggtggccaggaaggcgctggacaaggctctggatgccatcgagagagcccaggatctggccgaggaggtggggaacaagctgagccagctcaagctgcactgtctgagcgagagcatttaccgcagcaaagggctgcagcgggaactgcgggcgcacgttgtgaggttccacgagtgcgtggaggagacggagctctactgcggcctgtgcggcgagtccataggcgagaagaacagccggctgcaggccctaccttgctcccacatcttccacctcaggtgcctgcagaacaacgggacccggagctgtcccaactgccgccgctcatccatgaagcctggctttgtatgactcctggcagcaggcgtgggcttcctcctcgccactcctgctctttctccactgcacgccagaggcccatttactcctggggcagctgccaggtcgtcctcaccatagccaaggccttggggcctgcccagggctgctcccctgggcccagctcccctccctgcctctttgtactttgctctttatagaaaaataaactgtttgtacctgg

SEQ ID NO: 322 - DNA, 1622 bp, Homo sapiens
  source 1..1622: mol_type = genomic DNA
ccaggtacaaacagtttatttttctataaagagcaaagtacaaagaggcagggaggggagctgggcccaggggagcagccctgggcaggccccaaggccttggctatggtgaggacgacctggcagctgccccaggagtaaatgggcctctggcgtgcagtggagaaagagcaggagtggcgaggaggaagcccacgcctgctgccaggagtcatacaaagccaggcttcatggatgagcggcggcagttgggacagctccgggtcccgttgttctgcaggcacctgaggtggaagatgtgggagcaaggtagggcctgcagccggctgttcttctcgcctatggactcgccgcacaggccgcagtagagctccgtctcctccacgcactcgtggaacctcacaacgtgcgcccgcagttcccgctgcagccctttgctgcggtaaatgctctcgctcagacagtgcagcttgagctggctcagcttgttccccacctcctcggccagatcctgggctctctcgatggcatccagagccttgtccagcgccttcctggccacccagcacttggccacacccagcagcgcctgcacctgccccaggcggtttccgatctcggtcatgatgctcatggcggagtcgtacctggggaaggctgtctccaggtccccacggctccggtggatgtcagcgaagcagagcaggcagagcgcctgcagtggccggtccccgtgctgcagcgcgatcttcatagactcctcacaacactccatggcactgcccaggcggcccagcaggcgataggccacggccatgtggtactggctcatggcccggtacttcaggctccagcctttgccatagttgttgacaagctctgccgccttgcaggggaagaacagggctttctcgtagtccttgacctgggcatagaagctgcccaggctgcagcacacgcggcactcgagcatggcgtcatcattgttgtgggcatagcgcagggccttctcgaagctctccagggccttctggaagacgctgaggcccaggaaggcattgcccatgctcaggctgacctggcctccgagctgggcacctgccctggtaccaggcagcccaaggcaggtcttgcagtaggagatggtcttgtgaaactcgcacagcttctcgttgctgcgtgccaggttcaggtagctctccaggaggaagtcggcatcctccagctcccgggccgtgtcgatctggaccacagcgaacttcagcatctccttgtagcggcccatctccgagtgggctgtgaccaggcagcccagcacgcggaagcgccccatgaggtccgagctcttctccagcacctttgtccacacctgcaatgccttctctgtctggttggactggtacagctggagccccttctcgatctgctgcttggtctggtcctgccccatcctccccaagccctgtgtcccacgtggggtgatccctggtggctccgtgcctctaggcactcatggggcaggaatcacagtgccagctgccccccgaaacgtgggaacaaaagcagcgtcgggtgggagccggaatggggcctggatggagagcaggcgccaccctgggaac

SEQ ID NO: 323 - DNA, 1620 bp, Mus musculus
  source 1..1620: mol_type = genomic DNA
gttcccagggtggcgcccgttgtccatccaggccctgcttagctttttgcctggtgtgctccccccacccccactccccagagatcagccgacaccgtgggtccaacaccatgagggtctaaagacacctagccagccacggtctttccgagtggccaggctgtgggaagatggggcaggaccagacaaagcaacagattgaaaaaggactgcagctgtaccagtccaaccagacagagaaggcactgcaggtgtggatgaaggtgctggagaagggctctgacctcgtgggccgcttccgggtactgggctgcttggtaacagctcactcggagatgggccgctacaaagagatgctgaagtttgccgtggtccagattgatactgctcggggactggaggatgctgacttcctgctcgaaagctacctgaacctggcgcgcagcaatgagaagctatgtgagttccacaaaaccatctcctactgcaagacctgcctcggcctgcctggcaccagggctggtgcccagcttgggggtcaggtcagcctgagcatgggcaatgctttcctgggcctcagcctcttccagaaggccctggagagctttgagaaggccctgcgctatgcccacaacaacgatgacaccatgctggagtgccgtgtctgctgcagcctgggcagtttctacgcccaggtcaaggactatgagaaagccctgttctttccctgcaaggctgcagagcttgtcaacgactatggcaaaggctggagcctcaaatatcgggccatgagccagtaccacatggctgtggcctaccgcctgctgggccacctgggcagtgccatggagtgttgtgaggagtccatgaagattgccctgcagcacggtgaccgcccgctacaggcactctgtctgctctgctttgccgatatccatcggagccgaggggacctggagacagccttccctcggtacgactccgctatgagcatcatgactgagatcggaaaccgcctcgggcaggtgcacgtgctgctgggtgtggccaagtgctggatggcccggaaggtgcaagacaaggctttggatgccattgagaaagcccaggacttagctgaagaggttggcaataagctgagccagctcaagctgcattgcctgagtgagagcatctaccgcagcaaagggctgcagcgtgagctgcgcacgcacgtagtgaggttccacgagtgcgtggaggagactgagctctactgcggcctctgtggtgagtccatcggggagaggaacagccggctgcaggccctgccctgctcccacatctttcatctcagatgcctgcaaaacaatggcactaggagctgccccaactgccgccgctcctccatgaagccgggctttgtgtgacttcagcggccatcttgggtttccacacaacctcccctggctccttctccaccatcaagcccgaggccctggtgaaattctagggtatcggccaggtcctccatagccaactcagggccagaggcctgcttgctgctcctctgggcctagctcccctcccctgcctctttctacgttgttctttatagaaaaataaaatgtttgtacctgg

SEQ ID NO: 324 - DNA, 1620 bp, Mus musculus
  source 1..1620: mol_type = genomic DNA
ccaggtacaaacattttatttttctataaagaacaacgtagaaagaggcaggggaggggagctaggcccagaggagcagcaagcaggcctctggccctgagttggctatggaggacctggccgataccctagaatttcaccagggcctcgggcttgatggtggagaaggagccaggggaggttgtgtggaaacccaagatggccgctgaagtcacacaaagcccggcttcatggaggagcggcggcagttggggcagctcctagtgccattgttttgcaggcatctgagatgaaagatgtgggagcagggcagggcctgcagccggctgttcctctccccgatggactcaccacagaggccgcagtagagctcagtctcctccacgcactcgtggaacctcactacgtgcgtgcgcagctcacgctgcagccctttgctgcggtagatgctctcactcaggcaatgcagcttgagctggctcagcttattgccaacctcttcagctaagtcctgggctttctcaatggcatccaaagccttgtcttgcaccttccgggccatccagcacttggccacacccagcagcacgtgcacctgcccgaggcggtttccgatctcagtcatgatgctcatagcggagtcgtaccgagggaaggctgtctccaggtcccctcggctccgatggatatcggcaaagcagagcagacagagtgcctgtagcgggcggtcaccgtgctgcagggcaatcttcatggactcctcacaacactccatggcactgcccaggtggcccagcaggcggtaggccacagccatgtggtactggctcatggcccgatatttgaggctccagcctttgccatagtcgttgacaagctctgcagccttgcagggaaagaacagggctttctcatagtccttgacctgggcgtagaaactgcccaggctgcagcagacacggcactccagcatggtgtcatcgttgttgtgggcatagcgcagggccttctcaaagctctccagggccttctggaagaggctgaggcccaggaaagcattgcccatgctcaggctgacctgacccccaagctgggcaccagccctggtgccaggcaggccgaggcaggtcttgcagtaggagatggttttgtggaactcacatagcttctcattgctgcgcgccaggttcaggtagctttcgagcaggaagtcagcatcctccagtccccgagcagtatcaatctggaccacggcaaacttcagcatctctttgtagcggcccatctccgagtgagctgttaccaagcagcccagtacccggaagcggcccacgaggtcagagcccttctccagcaccttcatccacacctgcagtgccttctctgtctggttggactggtacagctgcagtcctttttcaatctgttgctttgtctggtcctgccccatcttcccacagcctggccactcggaaagaccgtggctggctaggtgtctttagaccctcatggtgttggacccacggtgtcggctgatctctggggagtgggggtggggggagcacaccaggcaaaaagctaagcagggcctggatggacaacgggcgccaccctgggaac

SEQ ID NO: 325 - DNA, 1430 bp, Rattus norvegicus
  source 1..1430: mol_type = genomic DNA
tgttcccagggtggcgcccgttgtccatccaggccctgcttagcttttgcctggtgttgcttttccctcccagagatcagctggcactgtgggtccaacaccatgaaggtctaaagacacctagccaaccacggtctttccgagtggccagactgtgggaggatggggcaggaccagacaaagcaacagatcgaaaaaggactgcagctgtaccagtccaaccagacagagaaggcactgcaagtgtggatgaaggtgctggagaagggctctgacctcgtgggccgcttccgggtgctgggctgcttggtaacagctcactcggagatgggccgctacaaagagatgctgaagtttgccgtggtccagatcgacactgctcgggaactggaggatgcggatttcctgctcgaaagctacctgaacctggcacgcagcaatgagaagctatgtgagtttcacaaaaccatctcctactgcaagacctgcctcggcctgcctggcaccagggctggtgcccagcttgggggtcaggtcagcctgagcatgggcaatgctttcctgggcctcagcctcttccagaaggccctagagagctttgagaaggccctgcgctatgcccacaacaatgatgacaccatgctggagtgccgcgtctgctgcagcctgggcagtttctacgcccaggtcaaggagtccatgaagattgccctgcagcatggtgaccgcccactgcaagcactctgtctgctctgctttgccgatatccaccggagccgtggggacctggagacagccttccctaggtacgattccgctatgagcatcatgaccgagatcggaaaccgcctggggcaagtgcatgtgctgctgggtgtggccaagtgctggatagccaggaaagtgctggacaaggctttggatgccattgagaaagcccaggacctggctgaagaggttggaaataagctgagccagctcaagctgcactgcctgagtgagggcatctgccgcagcaaggggctgcagcgtgagctgcgcgcgcatgtagtgaggttccacgagtgcgtggaggagactgagctctactgtggcctctgtggtgagtccattggggagaagaacagccggctgcaggccctgccctgctcccacatctttcatctcagatgcctgcaaaacaacggcactaggagttgccccaactgccgccgctcctccatgaagccaggctttgtgtgacctcagtggccatcttggcacctccaccatcaagctggaggccctggtgaaatcctagggtagcagccaggacctccacagccaactcagggccagaggcctgcctgctgctcctctgggcctacctcccctcccttgcctctttgtactttgttctttatagaaaaataaaatgtttctacctggtg

SEQ ID NO: 326 - DNA, 1430 bp, Rattus norvegicus
  source 1..1430: mol_type = genomic DNA
caccaggtagaaacattttatttttctataaagaacaaagtacaaagaggcaagggaggggaggtaggcccagaggagcagcaggcaggcctctggccctgagttggctgtggaggtcctggctgctaccctaggatttcaccagggcctccagcttgatggtggaggtgccaagatggccactgaggtcacacaaagcctggcttcatggaggagcggcggcagttggggcaactcctagtgccgttgttttgcaggcatctgagatgaaagatgtgggagcagggcagggcctgcagccggctgttcttctccccaatggactcaccacagaggccacagtagagctcagtctcctccacgcactcgtggaacctcactacatgcgcgcgcagctcacgctgcagccccttgctgcggcagatgccctcactcaggcagtgcagcttgagctggctcagcttatttccaacctcttcagccaggtcctgggctttctcaatggcatccaaagccttgtccagcactttcctggctatccagcacttggccacacccagcagcacatgcacttgccccaggcggtttccgatctcggtcatgatgctcatagcggaatcgtacctagggaaggctgtctccaggtccccacggctccggtggatatcggcaaagcagagcagacagagtgcttgcagtgggcggtcaccatgctgcagggcaatcttcatggactccttgacctgggcgtagaaactgcccaggctgcagcagacgcggcactccagcatggtgtcatcattgttgtgggcatagcgcagggccttctcaaagctctctagggccttctggaagaggctgaggcccaggaaagcattgcccatgctcaggctgacctgacccccaagctgggcaccagccctggtgccaggcaggccgaggcaggtcttgcagtaggagatggttttgtgaaactcacatagcttctcattgctgcgtgccaggttcaggtagctttcgagcaggaaatccgcatcctccagttcccgagcagtgtcgatctggaccacggcaaacttcagcatctctttgtagcggcccatctccgagtgagctgttaccaagcagcccagcacccggaagcggcccacgaggtcagagcccttctccagcaccttcatccacacttgcagtgccttctctgtctggttggactggtacagctgcagtcctttttcgatctgttgctttgtctggtcctgccccatcctcccacagtctggccactcggaaagaccgtggttggctaggtgtctttagaccttcatggtgttggacccacagtgccagctgatctctgggagggaaaagcaacaccaggcaaaagctaagcagggcctggatggacaacgggcgccaccctgggaaca

SEQ ID NO: 327 - DNA, 2116 bp, Macaca fascicularis
  source 1..2116: mol_type = genomic DNA
tgatgggggagaagcagggctgggcgctcacctggcttccccagacctgcaggtccagccttgctctccttcccccgagcacctctggcccaaggcctgcccacttgctggagctggccccttggcgaggctgctgggagggcccgtgctgccagggcggtcagagtcagtgttggaggtgccgcagggacgcccaagggggtgcccaggtggcaagatgcctgtatgttcagggaagccacgtcccagctcgcgagtgggtgcacagaggcccgcgtgaccttgctgctgacattcctcagaggccacgtggccccaactggcagggacagctgtggacagggactgaaccagccttgttcccagggtggcgcctgctctccatccaggccccactcccgctcccacccgatgctgcttttgttcccaggtttcagggggcagccggcactgtgattcctgtgctatgagtgcctagaggcacggagccacgaggggtcaccccacgtggggcacagggcttggggagcatggggcaggaccagaccaagcagcagatcgagaaggggctccagctgtatcagtccaaccagacagagaaagcactgcaggtgtggatgaaggtgctggagaagagctcggacctcatggggcgcttccgcgtgctgggctgcctggtcacggcccactcagagatgggccgatacaaggagatgctgaagttcgctgtggtccagatcgacacggcccgggagctggaggatgccgacttcctcctggagagctacctgaacctggcccgcagcaacgagaagctgtgcgagtttcacaagaccatctcctactgcaagacctgccttgggctgcctggtaccagggcaggtgcccagctcggaggccaggtcagcctgagcatgggcaatgccttcctgggcctcagcgtcttccagaaggccctggagagcttcgagaaggccctgcgctacgcccacaacaacgatgacgccatgctcgagtgccgcgtgtgctgcagcctgggcagcttctatgcccaggtcaaggactacgagaaagccctgttcttcccctgcaaagccgcagagctcgtcaacgactatggcaaaggctggagcctgaagtaccgggccatgagccagtaccacatggccgtggcctatcgcctgctgggccacctgggcagtgccatggagtgttgcgaggagtctatgaagatcgcactgcagcatggggaccggccactgcaggcgctctgcctactttgcttcgctgacatccaccggagccgtggggacctggagacagccttccccaggtatgactccgccatgagcatcatgaccgagattggaaaccgcctggggcaagtgcaggcgctgctgggtgtggccaagtgctgggtagccagaaaggcgctggacaaggctctggacgtcatcgagagagcccaggatctggctgaggaggtggggaacaaggaagcaaggtcccagagagggcaggacgttttcccgaggtccatcaggaagacagggaagtggctgagactggagcctgcctgcactgactttgctctcatcccccactgccactctccactcccgcgggccccagctgagccagctcaagctgcactgtctgagcgagagcatttaccgcagcaaagggctgcagcgggaactgcgggcgcatgtcgtgaggttccacgagtgtgtggaggagacggagctctactgcggcctgtgtggcgagtccataggcgagaagaacagccggctgcaggccctgccctgctcccacatcttccacctcaggtgcctgcaaaacaacgggacccggagctgtcccaactgccgccgctcatccatgaagcctggctttgtgtgactcccggcagcaggtgtgggcttcctcctcgccgctcctgctccttctccactgcacactggagacccatttactcctggggcagctgccagcatgtcgtcaccacagccagggccttgggacctgcccacggctgctcccctgggcccagctcccctccctgcctctttgtactttgctcttcatagaaaaataaaccgtttgtacctgg

SEQ ID NO: 328 - DNA, 2116 bp, Macaca fascicularis
  source 1..2116: mol_type = genomic DNA
ccaggtacaaacggtttatttttctatgaagagcaaagtacaaagaggcagggaggggagctgggcccaggggagcagccgtgggcaggtcccaaggccctggctgtggtgacgacatgctggcagctgccccaggagtaaatgggtctccagtgtgcagtggagaaggagcaggagcggcgaggaggaagcccacacctgctgccgggagtcacacaaagccaggcttcatggatgagcggcggcagttgggacagctccgggtcccgttgttttgcaggcacctgaggtggaagatgtgggagcagggcagggcctgcagccggctgttcttctcgcctatggactcgccacacaggccgcagtagagctccgtctcctccacacactcgtggaacctcacgacatgcgcccgcagttcccgctgcagccctttgctgcggtaaatgctctcgctcagacagtgcagcttgagctggctcagctggggcccgcgggagtggagagtggcagtgggggatgagagcaaagtcagtgcaggcaggctccagtctcagccacttccctgtcttcctgatggacctcgggaaaacgtcctgccctctctgggaccttgcttccttgttccccacctcctcagccagatcctgggctctctcgatgacgtccagagccttgtccagcgcctttctggctacccagcacttggccacacccagcagcgcctgcacttgccccaggcggtttccaatctcggtcatgatgctcatggcggagtcatacctggggaaggctgtctccaggtccccacggctccggtggatgtcagcgaagcaaagtaggcagagcgcctgcagtggccggtccccatgctgcagtgcgatcttcatagactcctcgcaacactccatggcactgcccaggtggcccagcaggcgataggccacggccatgtggtactggctcatggcccggtacttcaggctccagcctttgccatagtcgttgacgagctctgcggctttgcaggggaagaacagggctttctcgtagtccttgacctgggcatagaagctgcccaggctgcagcacacgcggcactcgagcatggcgtcatcgttgttgtgggcgtagcgcagggccttctcgaagctctccagggccttctggaagacgctgaggcccaggaaggcattgcccatgctcaggctgacctggcctccgagctgggcacctgccctggtaccaggcagcccaaggcaggtcttgcagtaggagatggtcttgtgaaactcgcacagcttctcgttgctgcgggccaggttcaggtagctctccaggaggaagtcggcatcctccagctcccgggccgtgtcgatctggaccacagcgaacttcagcatctccttgtatcggcccatctctgagtgggccgtgaccaggcagcccagcacgcggaagcgccccatgaggtccgagctcttctccagcaccttcatccacacctgcagtgctttctctgtctggttggactgatacagctggagccccttctcgatctgctgcttggtctggtcctgccccatgctccccaagccctgtgccccacgtggggtgacccctcgtggctccgtgcctctaggcactcatagcacaggaatcacagtgccggctgccccctgaaacctgggaacaaaagcagcatcgggtgggagcgggagtggggcctggatggagagcaggcgccaccctgggaacaaggctggttcagtccctgtccacagctgtccctgccagttggggccacgtggcctctgaggaatgtcagcagcaaggtcacgcgggcctctgtgcacccactcgcgagctgggacgtggcttccctgaacatacaggcatcttgccacctgggcacccccttgggcgtccctgcggcacctccaacactgactctgaccgccctggcagcacgggccctcccagcagcctcgccaaggggccagctccagcaagtgggcaggccttgggccagaggtgctcgggggaaggagagcaaggctggacctgcaggtctggggaagccaggtgagcgcccagccctgcttctcccccatca

SEQ ID NO: 329 - DNA, 2075 bp, Macaca mulatta
  source 1..2075: mol_type = genomic DNA
cagacctgcaggtccagccttgctctccttcccccgagcacctctggcccaaggcctgcccacttgctggagctggccccttggcgaggctgctgggagggcccgtgctgccaggggggtcagagtcagtgttggaggtgccgcagggacgcccaagggggtgcccaggtggcaagatgcctgtatgttcagggaagccacgtcccagctcgcgagtgggtgcacagaggcccgcgtgaccttgctgctgacattcctcagaggccacgtggccccaactggcagggacagctgtggacagggactgaaccagccttgttcccagggtggcgcctgctctccatccaggccccactcccgctcccacccgatgctgcttttgttcccaggtttcagggggcagccggcactgtgattcctgtgctatgagtgcctagaggcacggagccacgaggggtcaccccacgtggggcacagggcttggggagcatggggcaggaccagaccaagcagcagattgagaaggggctccagctgtatcagtccaaccagacagagaaagcactgcaggtgtggatgaaggtgctggagaagagctcggacctcatggggcgcttccgcgtgctgggctgcctggtcacggcccactcagagatgggccgatacaaggagatgctgaagttcgctgtggtccagatcgacacggcccgggagctggaggatgccgacttcctcctggagagctacctgaacctggcccgcagcaacgagaagctgtgcgagtttcacaagaccatctcctactgcaagacctgccttgggctgcctggtaccagggcaggtgcccagctcggaggccaggtcagcctgagcatgggcaatgccttcctgggcctcagcgtcttccagaaggccctggagagcttcgagaaggccctgcgctacgcccacaacaacgatgacgccatgctcgagtgccgcgtgtgctgcagcctgggcagcttctatgcccaggtcaaggactacgagaaagccctgttcttcccctgcaaagccgcagagctcgtcaacgactatggcaaaggctggagcctgaagtaccgggccatgagccagtaccacatggccgtggcctatcgcctgctgggccacctgggcagtgccatggagtgttgcgaggagtctatgaagatcgcactgcagcatggggaccggccactgcaggctctctgcctactttgcttcgctgacatccaccggagccgtggggacctggagacagccttccccaggtatgactccgccatgagcatcatgaccgagattggaaaccgcctggggcaagtgcaggcgctgctgggtgtggccaagtgctgggtagccagaaagacgctggacaaggctctggacgtcatcgagagagcccaggatctggctgaggaggtggggaacaaggaagcaaggtcccagagagggcaggacgttttcccgaggtccatcaggaagacagggaagtggctgagactggagcctgcctgcactgactttgctctcatcccccactgccactctccactcccgcgggccccagctgagccagctcaagctgcactgtctgagcgagagcatttaccgcagcaaagggctgcagcgggaactgcgggcgcatgtcgtgaggttccacgagtgtgtggaggagacggagctctactgcggcctgtgtggcgagtccataggcgagaagaacagccggctgcaggccctgccctgctcccacatcttccacctcaggtgcctgcaaaacaacgggacccggagctgtcccaactgccgccgctcatccatgaagcctggctttgtgtgactcccggcagcaggtgtgggcttcctcctcgccgctcctgctccttctccactgcacactggagacccatttactcctggggcagctgccagcatgtcgtcaccacagccagggccttgggacctgcccacggctgctcccctgggcccagctcccctccctgcctctttgtactttgctcttcatagaaaaataaaccgtttgtacctgg

SEQ ID NO: 330 - DNA, 2075 bp, Macaca mulatta
  source 1..2075: mol_type = genomic DNA
ccaggtacaaacggtttatttttctatgaagagcaaagtacaaagaggcagggaggggagctgggcccaggggagcagccgtgggcaggtcccaaggccctggctgtggtgacgacatgctggcagctgccccaggagtaaatgggtctccagtgtgcagtggagaaggagcaggagcggcgaggaggaagcccacacctgctgccgggagtcacacaaagccaggcttcatggatgagcggcggcagttgggacagctccgggtcccgttgttttgcaggcacctgaggtggaagatgtgggagcagggcagggcctgcagccggctgttcttctcgcctatggactcgccacacaggccgcagtagagctccgtctcctccacacactcgtggaacctcacgacatgcgcccgcagttcccgctgcagccctttgctgcggtaaatgctctcgctcagacagtgcagcttgagctggctcagctggggcccgcgggagtggagagtggcagtgggggatgagagcaaagtcagtgcaggcaggctccagtctcagccacttccctgtcttcctgatggacctcgggaaaacgtcctgccctctctgggaccttgcttccttgttccccacctcctcagccagatcctgggctctctcgatgacgtccagagccttgtccagcgtctttctggctacccagcacttggccacacccagcagcgcctgcacttgccccaggcggtttccaatctcggtcatgatgctcatggcggagtcatacctggggaaggctgtctccaggtccccacggctccggtggatgtcagcgaagcaaagtaggcagagagcctgcagtggccggtccccatgctgcagtgcgatcttcatagactcctcgcaacactccatggcactgcccaggtggcccagcaggcgataggccacggccatgtggtactggctcatggcccggtacttcaggctccagcctttgccatagtcgttgacgagctctgcggctttgcaggggaagaacagggctttctcgtagtccttgacctgggcatagaagctgcccaggctgcagcacacgcggcactcgagcatggcgtcatcgttgttgtgggcgtagcgcagggccttctcgaagctctccagggccttctggaagacgctgaggcccaggaaggcattgcccatgctcaggctgacctggcctccgagctgggcacctgccctggtaccaggcagcccaaggcaggtcttgcagtaggagatggtcttgtgaaactcgcacagcttctcgttgctgcgggccaggttcaggtagctctccaggaggaagtcggcatcctccagctcccgggccgtgtcgatctggaccacagcgaacttcagcatctccttgtatcggcccatctctgagtgggccgtgaccaggcagcccagcacgcggaagcgccccatgaggtccgagctcttctccagcaccttcatccacacctgcagtgctttctctgtctggttggactgatacagctggagccccttctcaatctgctgcttggtctggtcctgccccatgctccccaagccctgtgccccacgtggggtgacccctcgtggctccgtgcctctaggcactcatagcacaggaatcacagtgccggctgccccctgaaacctgggaacaaaagcagcatcgggtgggagcgggagtggggcctggatggagagcaggcgccaccctgggaacaaggctggttcagtccctgtccacagctgtccctgccagttggggccacgtggcctctgaggaatgtcagcagcaaggtcacgcgggcctctgtgcacccactcgcgagctgggacgtggcttccctgaacatacaggcatcttgccacctgggcacccccttgggcgtccctgcggcacctccaacactgactctgacccccctggcagcacgggccctcccagcagcctcgccaaggggccagctccagcaagtgggcaggccttgggccagaggtgctcgggggaaggagagcaaggctggacctgcaggtctg

SEQ ID NO: 331 - DNA, 7805 bp, Homo sapiens
  source 1..7805: mol_type = genomic DNA
ccagcaccccggggctgcgcactgcagctccccaggccacccaccacccttctggtctctgagcccaggatgcgaggatggccagaccatctctgtgcaccctggtgcctctgggccctgagtgcttgcgccccttcacccgggagtcactggcagccatagaacagcgggcggtggaggaggaggcccggctgcagcggaataagcagatggagattgaggagcccgaacggaagccacgaagtgacttggaggctggcaagaacctacccatgatctacggagaccccccgccggaggtcatcggcatccccctggaggacctggatccctactacagcaataagaagaccttcatcgtactcaacaagggcaaggccatcttccgcttctccgccacacctgctctctacctgctgagccccttcagcgtagtcaggcgcggggccatcaaggtgctcatccatgcgctgttcagcatgttcatcatgatcaccatcttgaccaactgcgtattcatgaccatgagtgacccgcctccctggtccaagaatgtggagtacaccttcacagggatctacacctttgagtccctcatcaagatactggcccgaggcttctgtgtcgacgacttcacattcctccgggacccctggaactggctggacttcagtgtcatcatgatggcgtacctgacagagtttgtggacttgggcaacatctcagccctgaggaccttccgggtgctgcgggccctcaaaaccatcacggtcatcccagggctgaagacgatcgtgggggccctgatccagtcggtgaaaaagctgtcggatgtgatgatcctcactgtcttctgcctgagcgtctttgcgctggtaggactgcagctcttcatgggaaacctgaggcagaagtgtgtgcgctggcccccgccgttcaacgacaccaacaccacgtggtacagcaatgacacgtggtacggcaatgacacatggtatggcaatgagatgtggtacggcaatgactcatggtatgccaacgacacgtggaacagccatgcaagctgggccaccaacgatacctttgattgggacgcctacatcagtgatgaagggaacttctacttcctggagggctccaacgatgccctgctctgtgggaacagcagtgatgctgggcactgccctgagggttatgagtgcatcaagaccgggcggaaccccaactatggctacaccagctatgacaccttcagctgggccttcttggctctcttccgcctcatgacacaggactattgggagaacctcttccagctgacccttcgagcagctggcaagacctacatgatcttcttcgtggtcatcatcttcctgggctctttctacctcatcaatctgatcctggccgtggtggccatggcatatgccgagcagaatgaggccaccctggccgaggataaggagaaagaggaggagtttcagcagatgcttgagaagttcaaaaagcaccaggaggagctggagaaggccaaggccgcccaagctctggaaggtggggaggcagatggggacccagcccatggcaaagactgcaatggcagcctggacacatcgcaaggggagaagggagccccgaggcagagcagcagcggagacagcggcatctccgacgccatggaagaactggaagaggcccaccaaaagtgcccaccatggtggtacaagtgcgcccacaaagtgctcatatggaactgctgcgccccgtggctgaagttcaagaacatcatccacctgatcgtcatggacccgttcgtggacctgggcatcaccatctgcatcgtgctcaacaccctcttcatggccatggaacattaccccatgacggagcactttgacaacgtgctcactgtgggcaacctggtcttcacaggcatcttcacagcagagatggttctgaagctgattgccatggacccctacgagtatttccagcagggttggaatatcttcgacagcatcatcgtcaccctcagcctggtagagctaggcctggccaacgtacagggactgtctgtgctacgctccttccgtctgctgcgggtcttcaagctggccaagtcgtggccaacgctgaacatgctcatcaagatcattggcaattcagtgggggcgctgggtaacctgacgctggtgctggctatcatcgtgttcatcttcgccgtggtgggcatgcagctgtttggcaagagctacaaggagtgcgtgtgcaagattgccttggactgcaacctgccgcgctggcacatgcatgatttcttccactccttcctcatcgtcttccgcatcctgtgcggggagtggatcgagaccatgtgggactgcatggaggtggccggccaagccatgtgcctcaccgtcttcctcatggtcatggtcatcggcaatcttgtggtcctgaacctgttcctggctctgctgctgagctccttcagcgccgacagtctggcagcctcggatgaggatggcgagatgaacaacctgcagattgccatcgggcgcatcaagttgggcatcggctttgccaaggccttcctcctggggctgctgcatggcaagatcctgagccccaaggacatcatgctcagcctcggggaggctgacggggccggggaggctggagaggcgggggagactgcccccgaggatgagaagaaggagccgcccgaggaggacctgaagaaggacaatcacatcctgaaccacatgggcctggctgacggccccccatccagcctcgagctggaccaccttaacttcatcaacaacccctacctgaccatacaggtgcccatcgcctccgaggagtccgacctggagatgcccaccgaggaggaaaccgacactttctcagagcctgaggatagcaagaagccgccgcagcctctctatgatgggaactcgtccgtctgcagcacagctgactacaagccccccgaggaggaccctgaggagcaggcagaggagaaccccgagggggagcagcctgaggagtgcttcactgaggcctgcgtgcagcgctggccctgcctctacgtggacatctcccagggccgtgggaagaagtggtggactctgcgcagggcctgcttcaagattgtcgagcacaactggttcgagaccttcattgtcttcatgatcctgctcagcagtggggctctggccttcgaggacatctacattgagcagcggcgagtcattcgcaccatcctagaatatgccgacaaggtcttcacctacatcttcatcatggagatgctgctcaaatgggtggcctacggctttaaggtgtacttcaccaacgcctggtgctggctcgacttcctcatcgtggatgtctccatcatcagcttggtggccaactggctgggctactcggagctgggacccatcaaatccctgcggacactgcgggccctgcgtcccctgagggcactgtcccgattcgagggcatgagggtggtggtgaacgccctcctaggcgccatcccctccatcatgaatgtgctgcttgtctgcctcatcttctggctgatcttcagcatcatgggtgtcaacctgtttgccggcaagttctactactgcatcaacaccaccacctctgagaggttcgacatctccgaggtcaacaacaagtctgagtgcgagagcctcatgcacacaggccaggtccgctggctcaatgtcaaggtcaactacgacaacgtgggtctgggctacctctccctcctgcaggtggccaccttcaagggttggatggacatcatgtatgcagccgtggactcccgggagaaggaggagcagccgcagtacgaggtgaacctctacatgtacctctactttgtcatcttcatcatctttggctccttcttcaccctcaacctcttcattggcgtcatcattgacaacttcaaccagcagaagaagaagttaggggggaaagacatctttatgacggaggaacagaagaaatactataacgccatgaagaagcttggctccaagaagcctcagaagccaattccccggccccagaacaagatccagggcatggtgtatgacctcgtgacgaagcaggccttcgacatcaccatcatgatcctcatctgcctcaacatggtcaccatgatggtggagacagacaaccagagccagctcaaggtggacatcctgtacaacatcaacatgatcttcatcatcatcttcacaggggagtgcgtgctcaagatgctcgccctgcgccagtactacttcaccgttggctggaacatctttgacttcgtggtcgtcatcctgtccattgtgggccttgccctctctgacctgatccagaagtacttcgtgtcacccacgctgttccgtgtgatccgcctggcgcggattgggcgtgtcctgcggctgatccgcggggccaagggcatccggacgctgctgttcgccctcatgatgtcgctgcctgccctcttcaacatcggcctcctcctcttcctggtcatgttcatctactccatcttcggcatgtccaactttgcctacgtcaagaaggagtcgggcatcgatgatatgttcaacttcgagaccttcggcaacagcatcatctgcctgttcgagatcaccacgtcggccggctgggacgggctcctcaaccccatcctcaacagcgggcccccagactgtgaccccaacctggagaacccgggcaccagtgtcaagggtgactgcggcaacccctccatcggcatctgcttcttctgcagctatatcatcatctccttcctcatcgtggtcaacatgtacatcgccatcatcctggagaacttcaatgtggccacagaggagagcagcgagccccttggtgaagatgactttgagatgttctacgagacatgggagaagttcgaccccgacgccacccagttcatcgcctacagccgcctctcagacttcgtggacaccctgcaggaaccgctgaggattgccaagcccaacaagatcaagctcatcacactggacttgcccatggtgccaggggacaagatccactgcctggacatcctctttgccctgaccaaagaggtcctgggtgactctggggaaatggacgccctcaagcagaccatggaggagaagttcatggcagccaacccctccaaggtgtcctacgagcccatcaccaccaccctcaagaggaagcacgaggaggtgtgcgccatcaagatccagagggcctaccgccggcacctgctacagcgctccatgaagcaggcatcctacatgtaccgccacagccacgacggcagcggggatgacgcccctgagaaggaggggctgcttgccaacaccatgagcaagatgtatggccacgagaatgggaacagcagctcgccaagcccggaggagaagggcgaggcaggggacgccggacccactatggggctgatgcccatcagcccctcagacactgcctggcctcccgcccctcccccagggcagactgtgcgcccaggtgtcaaggagtctcttgtctagcaggcagcatcggggtggcccactgagtctcggcatagtccccagagctcccccgtggtgcctgcacacagagtgagggaggagggctttgaatctgggactgtgcctggctccctgatgggggacaggatttggccacactggggctgacacccaggcccgagcgcctgcgttcccagaccatgggaaatgggaattgcgctcaggggctccatgctgggtctgaggcccctgcctccaagatttaacctgcaagttgctctgacctcctctgggccctgtcgcccctccttttggcctgggggaggtcagaacattcgaatctctgcccctcacttgaggaggagctggcctgcggtggagggatcagttgccccccatcaccagagtcttaagggtcactggcctctccccaggaagtggctcagacccctcagccccagcccagacaaagatgtcttaacctcagggagtgcagacacctaaccccagggcactgccagcccaccccctttgactctggggtgcagcttcacccaccaggccagctcaggaattccctggaaaagggaaatgtgactggttcagaaatagctcctcaaagcctcaaaacctgattggccactggatcctgctgctttgggctgggatggtgactcctgaaacctcttcctaggccacgtccaggtccgtagctcccctggctggctcctaggggaagagcagaaggaaggatgccacttgggaatgaattgtccttttctaggaagcacgggggagtgagacaggctgggtcctgccagctggatcgctgcacatggcctgagcatccagacctgagcgggagtcagggacctgctgctcagtaagaagattctcgccccttccctctctccctgcctcactcctccgtgagcaccaccagggctccaggagcctcatccagcctcagagatctcccttctcatctccccacgcccgtctctttctcacctttcccacctctctccccaaagtgatcctaagaatgtacagttgagctcaggttagatatttcgaccctggggcgtgcagcagggaaggcccaactggttcaggctcaaccttccaacttcctgtggcctgaagaagcacttctgctgcatcgctgttctgggcatggcagggccaggcctctgctggctcaggaggaggggtgagagacctgctcaggcgtcgctggatttattcacttgtgtgtgtacctgtggctgtgtgtctgcttgtatgcttttataggcctgtgtgtatagctgtgtgtgtgttcaagtgcgtgactgtatgtgtgtgtgtgaaccactgtgtactggagcctgcattatgcacgtgtctgggtatctttgtatatatgtgtatatatgtgtgccctggactgtttcaaggtccatggagtacggctggtgtgtcatactgtgcaggcctgtccctgggagtgttcccgtgcctgggagagtggacctgtgctgtgagtgtgtggatgcgtgtgaacgcatgtggtaaggtgtgtactcagggcattctgttggcctaagtgcctcttctttttcttcttgtttctcatgaaaagtttgattaaaattcaggaagcagcaaaaccttcaaaacaagacatgtatgtgtgcttgagtgtgtgaacacgtgtgtgtgtgtgcacatctacatgccatgcctatgggccagagttgtctttattgtccaccatgctctctcacctgctcccagtcctgcctgaacagccctctctctcactcccctctcctccccttcctgtttctcgttgtcacacccatggcctcagccctgctccctgcctcctgcctatgtctcctctatggaaggaggcctccactccttccatctcttccttcagaagtttcgtctaatgggggcagtctccccttcctggcacattgcccctctgccttgccctcctgggccctgggctggcacagcccctggagcctcagaaatctgtttgattggatattctcctcggactgtgtgcaggttgcagaggaagagtagatgagccgggtccggcctctccctgcctgtggcccctcccctgcagacggatgcccattcctgcctggtccagtggggaacaggtcccacgccaggccagcaggcgggctcctttgtacagttcttacaataaaccctccttggtgcctctgg

SEQ ID NO: 332 - DNA, 7805 bp, Homo sapiens
  source 1..7805: mol_type = genomic DNA
ccagaggcaccaaggagggtttattgtaagaactgtacaaaggagcccgcctgctggcctggcgtgggacctgttccccactggaccaggcaggaatgggcatccgtctgcaggggaggggccacaggcagggagaggccggacccggctcatctactcttcctctgcaacctgcacacagtccgaggagaatatccaatcaaacagatttctgaggctccaggggctgtgccagcccagggcccaggagggcaaggcagaggggcaatgtgccaggaaggggagactgcccccattagacgaaacttctgaaggaagagatggaaggagtggaggcctccttccatagaggagacataggcaggaggcagggagcagggctgaggccatgggtgtgacaacgagaaacaggaaggggaggagaggggagtgagagagagggctgttcaggcaggactgggagcaggtgagagagcatggtggacaataaagacaactctggcccataggcatggcatgtagatgtgcacacacacacacgtgttcacacactcaagcacacatacatgtcttgttttgaaggttttgctgcttcctgaattttaatcaaacttttcatgagaaacaagaagaaaaagaagaggcacttaggccaacagaatgccctgagtacacaccttaccacatgcgttcacacgcatccacacactcacagcacaggtccactctcccaggcacgggaacactcccagggacaggcctgcacagtatgacacaccagccgtactccatggaccttgaaacagtccagggcacacatatatacacatatatacaaagatacccagacacgtgcataatgcaggctccagtacacagtggttcacacacacacatacagtcacgcacttgaacacacacacagctatacacacaggcctataaaagcatacaagcagacacacagccacaggtacacacacaagtgaataaatccagcgacgcctgagcaggtctctcacccctcctcctgagccagcagaggcctggccctgccatgcccagaacagcgatgcagcagaagtgcttcttcaggccacaggaagttggaaggttgagcctgaaccagttgggccttccctgctgcacgccccagggtcgaaatatctaacctgagctcaactgtacattcttaggatcactttggggagagaggtgggaaaggtgagaaagagacgggcgtggggagatgagaagggagatctctgaggctggatgaggctcctggagccctggtggtgctcacggaggagtgaggcagggagagagggaaggggcgagaatcttcttactgagcagcaggtccctgactcccgctcaggtctggatgctcaggccatgtgcagcgatccagctggcaggacccagcctgtctcactcccccgtgcttcctagaaaaggacaattcattcccaagtggcatccttccttctgctcttcccctaggagccagccaggggagctacggacctggacgtggcctaggaagaggtttcaggagtcaccatcccagcccaaagcagcaggatccagtggccaatcaggttttgaggctttgaggagctatttctgaaccagtcacatttcccttttccagggaattcctgagctggcctggtgggtgaagctgcaccccagagtcaaagggggtgggctggcagtgccctggggttaggtgtctgcactccctgaggttaagacatctttgtctgggctggggctgaggggtctgagccacttcctggggagaggccagtgacccttaagactctggtgatggggggcaactgatccctccaccgcaggccagctcctcctcaagtgaggggcagagattcgaatgttctgacctcccccaggccaaaaggaggggcgacagggcccagaggaggtcagagcaacttgcaggttaaatcttggaggcaggggcctcagacccagcatggagcccctgagcgcaattcccatttcccatggtctgggaacgcaggcgctcgggcctgggtgtcagccccagtgtggccaaatcctgtcccccatcagggagccaggcacagtcccagattcaaagccctcctccctcactctgtgtgcaggcaccacgggggagctctggggactatgccgagactcagtgggccaccccgatgctgcctgctagacaagagactccttgacacctgggcgcacagtctgccctgggggaggggcgggaggccaggcagtgtctgaggggctgatgggcatcagccccatagtgggtccggcgtcccctgcctcgcccttctcctccgggcttggcgagctgctgttcccattctcgtggccatacatcttgctcatggtgttggcaagcagcccctccttctcaggggcgtcatccccgctgccgtcgtggctgtggcggtacatgtaggatgcctgcttcatggagcgctgtagcaggtgccggcggtaggccctctggatcttgatggcgcacacctcctcgtgcttcctcttgagggtggtggtgatgggctcgtaggacaccttggaggggttggctgccatgaacttctcctccatggtctgcttgagggcgtccatttccccagagtcacccaggacctctttggtcagggcaaagaggatgtccaggcagtggatcttgtcccctggcaccatgggcaagtccagtgtgatgagcttgatcttgttgggcttggcaatcctcagcggttcctgcagggtgtccacgaagtctgagaggcggctgtaggcgatgaactgggtggcgtcggggtcgaacttctcccatgtctcgtagaacatctcaaagtcatcttcaccaaggggctcgctgctctcctctgtggccacattgaagttctccaggatgatggcgatgtacatgttgaccacgatgaggaaggagatgatgatatagctgcagaagaagcagatgccgatggaggggttgccgcagtcacccttgacactggtgcccgggttctccaggttggggtcacagtctgggggcccgctgttgaggatggggttgaggagcccgtcccagccggccgacgtggtgatctcgaacaggcagatgatgctgttgccgaaggtctcgaagttgaacatatcatcgatgcccgactccttcttgacgtaggcaaagttggacatgccgaagatggagtagatgaacatgaccaggaagaggaggaggccgatgttgaagagggcaggcagcgacatcatgagggcgaacagcagcgtccggatgcccttggccccgcggatcagccgcaggacacgcccaatccgcgccaggcggatcacacggaacagcgtgggtgacacgaagtacttctggatcaggtcagagagggcaaggcccacaatggacaggatgacgaccacgaagtcaaagatgttccagccaacggtgaagtagtactggcgcagggcgagcatcttgagcacgcactcccctgtgaagatgatgatgaagatcatgttgatgttgtacaggatgtccaccttgagctggctctggttgtctgtctccaccatcatggtgaccatgttgaggcagatgaggatcatgatggtgatgtcgaaggcctgcttcgtcacgaggtcatacaccatgccctggatcttgttctggggccggggaattggcttctgaggcttcttggagccaagcttcttcatggcgttatagtatttcttctgttcctccgtcataaagatgtctttcccccctaacttcttcttctgctggttgaagttgtcaatgatgacgccaatgaagaggttgagggtgaagaaggagccaaagatgatgaagatgacaaagtagaggtacatgtagaggttcacctcgtactgcggctgctcctccttctcccgggagtccacggctgcatacatgatgtccatccaacccttgaaggtggccacctgcaggagggagaggtagcccagacccacgttgtcgtagttgaccttgacattgagccagcggacctggcctgtgtgcatgaggctctcgcactcagacttgttgttgacctcggagatgtcgaacctctcagaggtggtggtgttgatgcagtagtagaacttgccggcaaacaggttgacacccatgatgctgaagatcagccagaagatgaggcagacaagcagcacattcatgatggaggggatggcgcctaggagggcgttcaccaccaccctcatgccctcgaatcgggacagtgccctcaggggacgcagggcccgcagtgtccgcagggatttgatgggtcccagctccgagtagcccagccagttggccaccaagctgatgatggagacatccacgatgaggaagtcgagccagcaccaggcgttggtgaagtacaccttaaagccgtaggccacccatttgagcagcatctccatgatgaagatgtaggtgaagaccttgtcggcatattctaggatggtgcgaatgactcgccgctgctcaatgtagatgtcctcgaaggccagagccccactgctgagcaggatcatgaagacaatgaaggtctcgaaccagttgtgctcgacaatcttgaagcaggccctgcgcagagtccaccacttcttcccacggccctgggagatgtccacgtagaggcagggccagcgctgcacgcaggcctcagtgaagcactcctcaggctgctccccctcggggttctcctctgcctgctcctcagggtcctcctcggggggcttgtagtcagctgtgctgcagacggacgagttcccatcatagagaggctgcggcggcttcttgctatcctcaggctctgagaaagtgtcggtttcctcctcggtgggcatctccaggtcggactcctcggaggcgatgggcacctgtatggtcaggtaggggttgttgatgaagttaaggtggtccagctcgaggctggatggggggccgtcagccaggcccatgtggttcaggatgtgattgtccttcttcaggtcctcctcgggcggctccttcttctcatcctcgggggcagtctcccccgcctctccagcctccccggccccgtcagcctccccgaggctgagcatgatgtccttggggctcaggatcttgccatgcagcagccccaggaggaaggccttggcaaagccgatgcccaacttgatgcgcccgatggcaatctgcaggttgttcatctcgccatcctcatccgaggctgccagactgtcggcgctgaaggagctcagcagcagagccaggaacaggttcaggaccacaagattgccgatgaccatgaccatgaggaagacggtgaggcacatggcttggccggccacctccatgcagtcccacatggtctcgatccactccccgcacaggatgcggaagacgatgaggaaggagtggaagaaatcatgcatgtgccagcgcggcaggttgcagtccaaggcaatcttgcacacgcactccttgtagctcttgccaaacagctgcatgcccaccacggcgaagatgaacacgatgatagccagcaccagcgtcaggttacccagcgcccccactgaattgccaatgatcttgatgagcatgttcagcgttggccacgacttggccagcttgaagacccgcagcagacggaaggagcgtagcacagacagtccctgtacgttggccaggcctagctctaccaggctgagggtgacgatgatgctgtcgaagatattccaaccctgctggaaatactcgtaggggtccatggcaatcagcttcagaaccatctctgctgtgaagatgcctgtgaagaccaggttgcccacagtgagcacgttgtcaaagtgctccgtcatggggtaatgttccatggccatgaagagggtgttgagcacgatgcagatggtgatgcccaggtccacgaacgggtccatgacgatcaggtggatgatgttcttgaacttcagccacggggcgcagcagttccatatgagcactttgtgggcgcacttgtaccaccatggtgggcacttttggtgggcctcttccagttcttccatggcgtcggagatgccgctgtctccgctgctgctctgcctcggggctcccttctccccttgcgatgtgtccaggctgccattgcagtctttgccatgggctgggtccccatctgcctccccaccttccagagcttgggcggccttggccttctccagctcctcctggtgctttttgaacttctcaagcatctgctgaaactcctcctctttctccttatcctcggccagggtggcctcattctgctcggcatatgccatggccaccacggccaggatcagattgatgaggtagaaagagcccaggaagatgatgaccacgaagaagatcatgtaggtcttgccagctgctcgaagggtcagctggaagaggttctcccaatagtcctgtgtcatgaggcggaagagagccaagaaggcccagctgaaggtgtcatagctggtgtagccatagttggggttccgcccggtcttgatgcactcataaccctcagggcagtgcccagcatcactgctgttcccacagagcagggcatcgttggagccctccaggaagtagaagttcccttcatcactgatgtaggcgtcccaatcaaaggtatcgttggtggcccagcttgcatggctgttccacgtgtcgttggcataccatgagtcattgccgtaccacatctcattgccataccatgtgtcattgccgtaccacgtgtcattgctgtaccacgtggtgttggtgtcgttgaacggcgggggccagcgcacacacttctgcctcaggtttcccatgaagagctgcagtcctaccagcgcaaagacgctcaggcagaagacagtgaggatcatcacatccgacagctttttcaccgactggatcagggcccccacgatcgtcttcagccctgggatgaccgtgatggttttgagggcccgcagcacccggaaggtcctcagggctgagatgttgcccaagtccacaaactctgtcaggtacgccatcatgatgacactgaagtccagccagttccaggggtcccggaggaatgtgaagtcgtcgacacagaagcctcgggccagtatcttgatgagggactcaaaggtgtagatccctgtgaaggtgtactccacattcttggaccagggaggcgggtcactcatggtcatgaatacgcagttggtcaagatggtgatcatgatgaacatgctgaacagcgcatggatgagcaccttgatggccccgcgcctgactacgctgaaggggctcagcaggtagagagcaggtgtggcggagaagcggaagatggccttgcccttgttgagtacgatgaaggtcttcttattgctgtagtagggatccaggtcctccagggggatgccgatgacctccggcggggggtctccgtagatcatgggtaggttcttgccagcctccaagtcacttcgtggcttccgttcgggctcctcaatctccatctgcttattccgctgcagccgggcctcctcctccaccgcccgctgttctatggctgccagtgactcccgggtgaaggggcgcaagcactcagggcccagaggcaccagggtgcacagagatggtctggccatcctcgcatcctgggctcagagaccagaagggtggtgggtggcctggggagctgcagtgcgcagccccggggtgctgg

SEQ ID NO: 333 - DNA, 6598 bp, Mus musculus
  source 1..6598: mol_type = genomic DNA
gatggccagctcatctctgcccaccctggtcccccctggtccccactgcctgcgccccttcaccccagagtccctggcagccatagaacagcgggcaatggaggaggaagcccggctgcagcggaacaagcaaatggagattgaagagcctgagcggaagccacgcagtgacctggaagctggcaagaacctcccactcatctatggggaccccccacctgaagtcattggcgtccccctggaggacctggacccttactacagtgacaagaagaccttcattgtgctcaacaaaggaaaggccatcttccgattctctgccacccctgccctctacatgctgagccccttcagcatcgtccggcgggtggctatcaaggtgctcatccacgcgctgttcagcatgttcatcatgatcaccatcttgaccaactgcgtgttcatgaccatgagcaacccgccttcttggtccaaggacgtggagtacaccttcacagggatctacacctttgagtccctcattaagatgctggcccgaggcttttgcattgatgacttcacattcctccgagacccctggaactggctggacttcagtgtcatcacaatggcgtacgtgacagagtttgtggacttgggcaacatctcagccctgaggaccttccgtgtgctgcgggccctgaaaaccatcacggtcatcccagggctgaagacgatcgtgggagccctgatccagtctgtgaaaaagctctcggatgtgatgatcctcactgtcttctgcctgagcgtctttgccctggtggggctgcagcttttcatgggaaacctgcgtcagaagtgcgtgcgttggcccccgcccatgaatgacaccaacaccacgtggtatggtaatgatacgtggtacggcaatgacacctggtacggcaatgacacctggtatggcaatgacacttggaacagccaggagagctgggtcagcaactctacctttgactgggaggcctacatcaatgacgaagggaacttctatttcttggagggctccaatgatgccctgctctgtgggaatagcagtgatgccgggcactgccctgagggctacgaatgcatgaaggctgggaggaaccccaactatggctacaccagctacgacaccttcagctgggccttcctggctctcttccgtctcatgacgcaggactactgggagaaccttttccagctgacccttcgagccgctggcaagacctacatgatcttctttgtggtcatcatcttcctgggttccttctacctcatcaatctgatcctggcggtggtggccatggcatatgctgagcagaatgaggctaccctggccgaagaccaggagaaagaggaggagttccaacagatgcttgaaaaattcaaaaaacatcaggaggaactggaaaaggcgaaggctgcccaggctctggaaggtggagaggaggcagatggggacccaacccacagcaaagactgcaatggtagcctggatacatccggggagaaggggcccccaaggccaagctgcagcgcagagagtgccatctcagatgctatggaggagctggaagaggcccatcagaagtgccccccatggtggtacaagtgtgcacacaaagtgctcatctggaactgctgtgccccgtgggtgaagttcaagcatattatcctcctgattgtcatggacccctttgtggacctgggcatcaccatctgcatcgtgctcaacaccctcttcatggccatggagcactaccccatgactgagcactttgacaacgtgctctctgtgggcaacttggtcttcacgggcatcttcactgcagagatggtgctgaagttgattgctatggacccctacgaatatttccaacagggctggaacatcttcgacagcttcatcgtcaccctcagcctggtggagctgggcctggccaacgtgcagggcctatcagtgctccgttctttccgtctgctgcgtgtcttcaagctggccaagtcatggccaacactcaacatgctcatcaaaatcattggcaactcagtgggtgcgctgggcaacctgaccctggtgttggccatcatcgtcttcatcttcgccgtggtgggcatgcagctgtttggcaagagctataaggaatgcgtgtgcaagattgcctcagactgcagcctgccccgctggcacatgcacgatttcttccactccttcctcatcgtcttccgcatcctctgtggggagtggatcgagaccatgtgggactgcatggaagtggccggccaggccatgtgcctcaccgtcttcctcatggtcatggtcattggcaacctggtggtcctgaatctgttcctggctctcctgttgagttccttcagcgctgacagtctggcagcgtcagatgaagatggtgagatgaacaacctacagatcgccatcgggcgtatcaagtggggcatcgcctttgccaaaaccttcctcttggggctgttgcatggcaagatcctgagcctcaaagacataatgctcagtctcggggagcctgggggtgctggggaaaacggggagagccctcccgaggatgagaagaaggaaccacctccggaagatgggaacaaggagctgaaagacaatcatatcctgaaccacgtgggcctgactgatggaccccgctccagcatcgagatggaccaccttaacttcatcaacaacccctacctcactatccatgtgcccattgcctccgaggagtccgacttggaaatgcccacagaggaggagactgacaccttctcggagcctgaggacatcaagaagccactacagcctctgtacgacgggaactcctccgtctgcagcacagctgactacaagccccccgaagaggaccctgaggagcaggctgaggagaaccctgagggggagctacctgaggagtgtttcacagaggcctgtgtgaagcgctgcccctgcctctatgtggacatctcccagggccgcgggaaaatgtggtggacactccgcagggcctgcttcaagattgttgagcacaactggtttgagaccttcatcgtcttcatgatcttgctcagcagcggggccctggccttcgaggacatctacattgaacagcggcgagtcatccaaaccatcctggaatatgctgacaaggtcttcacctacatcttcatcctggagatgctgctaaagtgggtggcctacggcttcaaggtgtacttcaccaacgcctggtgctggctcgacttcctcattgtggatgtctccatcatcagtctggtggctaactggctgggctactctgagctggggcccatcaaatccctgcgcacgctccgggccctgcgacctctgagggcactgtcccgatttgaaggcatgagggtggtggtgaacgcccttctgggagccatcccttccatcatgaacgtgctccttgtctgcctcatcttctggctcatcttcagcatcatgggggtcaacttgtttgctggaaagttctactactgcatcaacacaaccacctccgagagattcgacatctctgtggtcaacaacaagtccgagtgtgagagcctcatgtacaccggccaggtccgctggatgaacgtcaaggtcaactatgacaacgtgggtctcggctacctctctcttcttcaggtggccactttcaagggttggatggacatcatgtatgcagctgtggactcccgggagaaagaggagcagccagactacgaggtgaacctctacatgtacctttacttcgtcatctttatcatcttcggctccttcttcaccctcaatctcttcattggcgtcatcattgacaacttcaaccaacagaagaagaagtttggagggaaagacatcttcatgacagaggaacagaagaaatactacaatgcgatgaagaagcttggctccaagaagccccagaagccaatcccccggcctcagaacaagatccaaggcatggtgtacgacttcgtgacaaagcaggtgtttgacatctctatcatgatcctcatctgcctcaacatggtgacgatgatggtggagacggatgaccagagccagctcaaggtggacatcctgtataacatcaacatggtcttcattatcgtcttcacaggggagtgtgtgctcaagatgtttgccctgcgccattactacttcaccattggctggaatatcttcgacttcgtggttgtcatcttgtccattgtgggtctcgcactctctgacttgatacagaaatactttgtgtcacccacactgttccgtgtgatccgattggctcggatcgggcgtgtcttgcgtctgatccgtggggccaagggcatccggacgctgctgttcgccctgatgatgtccctgcccgccctcttcaacatcggcctccttctctttctggtcatgttcatttactccatcttcggcatgtctaacttcgcctacgtcaagaaagagtcgggcatcgacgacatgttcaactttgagacctttggcaacagtatcatctgcctcttcgagatcaccacgtcagctggctgggacgggcttctgaaccccatcctcaacagtgggcccccagactgtgacccgacattggagaacccaggcaccaatatcaagggtgactgcggcaacccatccatcggcatctgtttcttctgcagctacatcatcatctccttcctcatcgtggtcaacatgtacattgccatcatcctagagaatttcaatgtggccactgaagagagcagtgagcccctctgtgaggatgacttcgagatgttctatgagacctgggagaagtttgaccccgatgcaactcagttcatcgactacagccgcctttctgactttgtggacaccctgcaggagcccttgaaaattgccaagcccaataagatcaagcttatcacattagacctgcccatggtacccggggacaagatccactgcctggacatcctctttgccctgaccaaagaggtactgggtgactctggggaaatggatgctctcaaacagaccatggaggagaagttcatggcagctaacccctccaaggtctcctatgagcccatcaccaccaccctcaagaggaagcaggaggaggtgtgtgctatcaaaatccagagggcttaccgccgccatctgctgcagcgctctgtgaagcaggcctcttacatgtaccgccacagccaggaaggcaatggcgatggggcccctgagaaggagggattgcttgccaacaccatgaacaagatgtatggctctgagaaagaggacaacggtgtgcagagccagggggagaaagagaaagactcaacagaggatgctggacccaccacggaggtcacagcccccagcagctcggacactgccctgactcctcctcctccttctcctcctccaccatcatcaccaccacaagggcagacagtgcgcccaggggtcaaagagtctcttgtctagagagcagcatcaaggctgcatgcagagttggggaacggggctttgagatggaggagggtggggctctacagggcttgacacctgggctgagggaaatggagattgtgctcagggtcaggtggctctgaagatcccgcctcctgatttaatctttacgatgctctaacattctctcggccagggggaatactgttggtatgaaggggttggtcaccttcctgtcactactttaagagcccaggtcccccagctctagccaggacaaagacaaactttaacccccaaacttacactgaccctagagcttagctactcctctcacccccatgattctgggacacagctccccccacccctcgccggctcaggaatgccctgaaaaggggaaccggttctggtacagaaattgctgcaccaagtcaattggccgctggatccggatgtatcaggctggaaacatgacttctgaaacctttcgcccagtcatatccaggccggtggacagctcccctggctggcccctgggggaagaactgtggaaggattgtcctgaggaatctctagattgcatggatgggtcacacaggctgggtcctgccagctgcattcatgcacttgagcctgagcacccacatctgcctgaggtcaggttggaagctctctaataagactctgtctgttccctcctccttgtctccacgccttcttcctttgaccgccagggctcatgggagccccatcacgcccgagagacctccttcttcctgtttaatctctgcccatctcttccctgtcccttctctgcttcctcaagtgactctgagaatgttagaactcagcacacggggagatatgttgatgctggggcgtgcagtaagaaggctcgctagactcggtctcagtcttcctgctacctggaaagccacttttccccctgagacagggtttcttttctctgtgtatccctggtcatcctggaattcattctgtagatctggctagcctcaaactcagggatccgcccacctctgcctcccacgtgctgaaattaaaggcttgcgccaccactgc

SEQ ID NO: 334 - DNA, 6598 bp, Mus musculus
  source 1..6598: mol_type = genomic DNA
gcagtggtggcgcaagcctttaatttcagcacgtgggaggcagaggtgggcggatccctgagtttgaggctagccagatctacagaatgaattccaggatgaccagggatacacagagaaaagaaaccctgtctcagggggaaaagtggctttccaggtagcaggaagactgagaccgagtctagcgagccttcttactgcacgccccagcatcaacatatctccccgtgtgctgagttctaacattctcagagtcacttgaggaagcagagaagggacagggaagagatgggcagagattaaacaggaagaaggaggtctctcgggcgtgatggggctcccatgagccctggcggtcaaaggaagaaggcgtggagacaaggaggagggaacagacagagtcttattagagagcttccaacctgacctcaggcagatgtgggtgctcaggctcaagtgcatgaatgcagctggcaggacccagcctgtgtgacccatccatgcaatctagagattcctcaggacaatccttccacagttcttcccccaggggccagccaggggagctgtccaccggcctggatatgactgggcgaaaggtttcagaagtcatgtttccagcctgatacatccggatccagcggccaattgacttggtgcagcaatttctgtaccagaaccggttccccttttcagggcattcctgagccggcgaggggtggggggagctgtgtcccagaatcatgggggtgagaggagtagctaagctctagggtcagtgtaagtttgggggttaaagtttgtctttgtcctggctagagctgggggacctgggctcttaaagtagtgacaggaaggtgaccaaccccttcataccaacagtattccccctggccgagagaatgttagagcatcgtaaagattaaatcaggaggcgggatcttcagagccacctgaccctgagcacaatctccatttccctcagcccaggtgtcaagccctgtagagccccaccctcctccatctcaaagccccgttccccaactctgcatgcagccttgatgctgctctctagacaagagactctttgacccctgggcgcactgtctgcccttgtggtggtgatgatggtggaggaggagaaggaggaggaggagtcagggcagtgtccgagctgctgggggctgtgacctccgtggtgggtccagcatcctctgttgagtctttctctttctccccctggctctgcacaccgttgtcctctttctcagagccatacatcttgttcatggtgttggcaagcaatccctccttctcaggggccccatcgccattgccttcctggctgtggcggtacatgtaagaggcctgcttcacagagcgctgcagcagatggcggcggtaagccctctggattttgatagcacacacctcctcctgcttcctcttgagggtggtggtgatgggctcataggagaccttggaggggttagctgccatgaacttctcctccatggtctgtttgagagcatccatttccccagagtcacccagtacctctttggtcagggcaaagaggatgtccaggcagtggatcttgtccccgggtaccatgggcaggtctaatgtgataagcttgatcttattgggcttggcaattttcaagggctcctgcagggtgtccacaaagtcagaaaggcggctgtagtcgatgaactgagttgcatcggggtcaaacttctcccaggtctcatagaacatctcgaagtcatcctcacagaggggctcactgctctcttcagtggccacattgaaattctctaggatgatggcaatgtacatgttgaccacgatgaggaaggagatgatgatgtagctgcagaagaaacagatgccgatggatgggttgccgcagtcacccttgatattggtgcctgggttctccaatgtcgggtcacagtctgggggcccactgttgaggatggggttcagaagcccgtcccagccagctgacgtggtgatctcgaagaggcagatgatactgttgccaaaggtctcaaagttgaacatgtcgtcgatgcccgactctttcttgacgtaggcgaagttagacatgccgaagatggagtaaatgaacatgaccagaaagagaaggaggccgatgttgaagagggcgggcagggacatcatcagggcgaacagcagcgtccggatgcccttggccccacggatcagacgcaagacacgcccgatccgagccaatcggatcacacggaacagtgtgggtgacacaaagtatttctgtatcaagtcagagagtgcgagacccacaatggacaagatgacaaccacgaagtcgaagatattccagccaatggtgaagtagtaatggcgcagggcaaacatcttgagcacacactcccctgtgaagacgataatgaagaccatgttgatgttatacaggatgtccaccttgagctggctctggtcatccgtctccaccatcatcgtcaccatgttgaggcagatgaggatcatgatagagatgtcaaacacctgctttgtcacgaagtcgtacaccatgccttggatcttgttctgaggccgggggattggcttctggggcttcttggagccaagcttcttcatcgcattgtagtatttcttctgttcctctgtcatgaagatgtctttccctccaaacttcttcttctgttggttgaagttgtcaatgatgacgccaatgaagagattgagggtgaagaaggagccgaagatgataaagatgacgaagtaaaggtacatgtagaggttcacctcgtagtctggctgctcctctttctcccgggagtccacagctgcatacatgatgtccatccaacccttgaaagtggccacctgaagaagagagaggtagccgagacccacgttgtcatagttgaccttgacgttcatccagcggacctggccggtgtacatgaggctctcacactcggacttgttgttgaccacagagatgtcgaatctctcggaggtggttgtgttgatgcagtagtagaactttccagcaaacaagttgacccccatgatgctgaagatgagccagaagatgaggcagacaaggagcacgttcatgatggaagggatggctcccagaagggcgttcaccaccaccctcatgccttcaaatcgggacagtgccctcagaggtcgcagggcccggagcgtgcgcagggatttgatgggccccagctcagagtagcccagccagttagccaccagactgatgatggagacatccacaatgaggaagtcgagccagcaccaggcgttggtgaagtacaccttgaagccgtaggccacccactttagcagcatctccaggatgaagatgtaggtgaagaccttgtcagcatattccaggatggtttggatgactcgccgctgttcaatgtagatgtcctcgaaggccagggccccgctgctgagcaagatcatgaagacgatgaaggtctcaaaccagttgtgctcaacaatcttgaagcaggccctgcggagtgtccaccacattttcccgcggccctgggagatgtccacatagaggcaggggcagcgcttcacacaggcctctgtgaaacactcctcaggtagctccccctcagggttctcctcagcctgctcctcagggtcctcttcggggggcttgtagtcagctgtgctgcagacggaggagttcccgtcgtacagaggctgtagtggcttcttgatgtcctcaggctccgagaaggtgtcagtctcctcctctgtgggcatttccaagtcggactcctcggaggcaatgggcacatggatagtgaggtaggggttgttgatgaagttaaggtggtccatctcgatgctggagcggggtccatcagtcaggcccacgtggttcaggatatgattgtctttcagctccttgttcccatcttccggaggtggttccttcttctcatcctcgggagggctctccccgttttccccagcacccccaggctccccgagactgagcattatgtctttgaggctcaggatcttgccatgcaacagccccaagaggaaggttttggcaaaggcgatgccccacttgatacgcccgatggcgatctgtaggttgttcatctcaccatcttcatctgacgctgccagactgtcagcgctgaaggaactcaacaggagagccaggaacagattcaggaccaccaggttgccaatgaccatgaccatgaggaagacggtgaggcacatggcctggccggccacttccatgcagtcccacatggtctcgatccactccccacagaggatgcggaagacgatgaggaaggagtggaagaaatcgtgcatgtgccagcggggcaggctgcagtctgaggcaatcttgcacacgcattccttatagctcttgccaaacagctgcatgcccaccacggcgaagatgaagacgatgatggccaacaccagggtcaggttgcccagcgcacccactgagttgccaatgattttgatgagcatgttgagtgttggccatgacttggccagcttgaagacacgcagcagacggaaagaacggagcactgataggccctgcacgttggccaggcccagctccaccaggctgagggtgacgatgaagctgtcgaagatgttccagccctgttggaaatattcgtaggggtccatagcaatcaacttcagcaccatctctgcagtgaagatgcccgtgaagaccaagttgcccacagagagcacgttgtcaaagtgctcagtcatggggtagtgctccatggccatgaagagggtgttgagcacgatgcagatggtgatgcccaggtccacaaaggggtccatgacaatcaggaggataatatgcttgaacttcacccacggggcacagcagttccagatgagcactttgtgtgcacacttgtaccaccatggggggcacttctgatgggcctcttccagctcctccatagcatctgagatggcactctctgcgctgcagcttggccttgggggccccttctccccggatgtatccaggctaccattgcagtctttgctgtgggttgggtccccatctgcctcctctccaccttccagagcctgggcagccttcgccttttccagttcctcctgatgttttttgaatttttcaagcatctgttggaactcctcctctttctcctggtcttcggccagggtagcctcattctgctcagcatatgccatggccaccaccgccaggatcagattgatgaggtagaaggaacccaggaagatgatgaccacaaagaagatcatgtaggtcttgccagcggctcgaagggtcagctggaaaaggttctcccagtagtcctgcgtcatgagacggaagagagccaggaaggcccagctgaaggtgtcgtagctggtgtagccatagttggggttcctcccagccttcatgcattcgtagccctcagggcagtgcccggcatcactgctattcccacagagcagggcatcattggagccctccaagaaatagaagttcccttcgtcattgatgtaggcctcccagtcaaaggtagagttgctgacccagctctcctggctgttccaagtgtcattgccataccaggtgtcattgccgtaccaggtgtcattgccgtaccacgtatcattaccataccacgtggtgttggtgtcattcatgggcgggggccaacgcacgcacttctgacgcaggtttcccatgaaaagctgcagccccaccagggcaaagacgctcaggcagaagacagtgaggatcatcacatccgagagctttttcacagactggatcagggctcccacgatcgtcttcagccctgggatgaccgtgatggttttcagggcccgcagcacacggaaggtcctcagggctgagatgttgcccaagtccacaaactctgtcacgtacgccattgtgatgacactgaagtccagccagttccaggggtctcggaggaatgtgaagtcatcaatgcaaaagcctcgggccagcatcttaatgagggactcaaaggtgtagatccctgtgaaggtgtactccacgtccttggaccaagaaggcgggttgctcatggtcatgaacacgcagttggtcaagatggtgatcatgatgaacatgctgaacagcgcgtggatgagcaccttgatagccacccgccggacgatgctgaaggggctcagcatgtagagggcaggggtggcagagaatcggaagatggcctttcctttgttgagcacaatgaaggtcttcttgtcactgtagtaagggtccaggtcctccagggggacgccaatgacttcaggtggggggtccccatagatgagtgggaggttcttgccagcttccaggtcactgcgtggcttccgctcaggctcttcaatctccatttgcttgttccgctgcagccgggcttcctcctccattgcccgctgttctatggctgccagggactctggggtgaaggggcgcaggcagtggggaccaggggggaccagggtgggcagagatgagctggccatc

SEQ ID NO: 335 - DNA, 6959 bp, Rattus norvegicus
  source 1..6959: mol_type = genomic DNA
acggcacccggggctcgtccgccaccgctcttctctgcttctggccaacagctgaagtcacgcagttcctggagtctgaacccaggagacagttcgggacactggggcgttggccccaagctcctcaggctggagaagatctggttcactttctgttgatcccgaaggtggcacaatctattgctgagaagagaacactgcggggcctggagtgggggaatgcaccgtgcccagtgtcctgggcatcagcacgcccaggtcttgcaggcacatctcccagccccaacaagaccaggacacccacctccctgacccaactcctgggcaggcagagagtgaggagtacacagtagaccccgggcattggtgaccacccaaaacccaagggctgcgggctgtagcggctctgttacctaccaccctctggcccctgagcccagaatgcaaggatggccagctcatctctgcccaacctggtccccccgggtccccactgcctgcgccccttcaccccagagtccctggcagccatagagcagcgggcggtggaggaggaggcccggctgcagcggaacaagcagatggagattgaggagcctgagcggaagccacgcagtgacctggaagctggcaagaacctcccactcatctatggggaccccccacccgaagtcattggcatccccctggaggacctggatccttactacagtgacaagaagaccttcattgtgctcaacaaaggaaaggccatcttccgattctctgccacgcctgccctctacctgctgagccccttcagcatcgtcaggagggtggctatcaaggtgctcattcacgcgctgttcagcatgtttatcatgatcaccatcctgaccaactgtgtgttcatgaccatgagcaatccgccttcttggtccaaacacgtggagtacaccttcacggggatctatacctttgagtccctcattaagatgctggcccgaggcttttgcattgatgacttcacattcctccgagacccctggaactggctggacttcagtgtcatcacaatggcgtatgtgacagagtttgtggacttgggcaacatctcagccctgaggaccttccgtgtgctgcgggccctgaagaccatcacggttatcccagggctgaagacaattgtgggagccctgatccagtctgtgaaaaagctgtcggatgtgatgatcctcactgtcttctgcctgagtgtctttgccctggtggggctgcagcttttcatgggaaacctgcgtcagaagtgcgtgcgttggcccccgcccatgaatgacaccaacaccacgtggtatggcaatgacacttggtacagcaatgacacttggtacggcaatgacacttggtacatcaatgacacttggaacagccaggagagctgggccggcaactctacctttgactgggaggcctacatcaatgacgaagggaacttctatttcttggagggctccaatgatgctctgctctgtgggaatagcagtgatgctgggcactgccctgagggctacgaatgcataaaggctgggcggaaccccaactatggctacaccagctatgacaccttcagctgggctttcctggctctcttccggctcatgacgcaggactactgggagaaccttttccagctgaccctacgagctgctggcaagacctacatgatcttcttcgtggtcatcatcttcctgggctccttctacctcatcaatctgatcctggccgtggtggccatggcgtacgctgagcagaatgaggctaccctggccgaagaccaggagaaagaggaggagttccaacagatgcttgagaaatacaaaaaacatcaggaggaagtggaaaaggctaaggctgcccaggctctggaaagtggagaggaggcagatggggacccaacccacaacaaagactgcaatgggagcctggatgcatccggggagaaggggcccccaaggccaagctgcagcgcagacagtgccatctcagatgctatggaggagctggaagaggcccatcagaagtgcccaccgtggtggtacaagtgtgcacacaaagtcctcatctggaactgctgtgccccgtgggtgaagttcaaacatataatctacctgatcgtcatggacccctttgtggacctgggtatcaccatctgcattgtgctcaacaccctcttcatggccatggagcactaccccatgaccgagcactttgacaacgtgctctccgtgggcaacttggtcttcacaggcatcttcactgcggagatggtgttgaagctgattgccatggacccctacgagtatttccaacagggctggaacatctttgacagtttcatcgtcaccctcagcctggtggagctgggcctggccaacgtacaggggctgtcagtgctccgttccttccgcctgctgcgtgtcttcaagctggccaagtcatggccaacactcaacatgctcatcaaaatcattggcaactcagtgggcgcgctgggcaacctgaccctggtgctggccatcatcgtcttcatcttcgccgtggtgggcatgcagctgttcggcaagagctataaggagtgtgtgtgcaagatcgcctcagactgcaacctgcctcgctggcacatgaacgacttcttccactccttcctcatcgtcttccgcatcctctgcggggaatggatcgagaccatgtgggactgcatggaggtggccggccaggccatgtgcctcaccgtcttcctcatggtcatggtcattggcaacctggtggtcctgaatctgttcctggctctcctgctgagttccttcagtgctgacagcctggcggcctcggatgaggatggcgagatgaacaacctacagattgccatcgggcgtatcaagtggggcatcggttttgccaaaaccttcctcctggggctgttgcgtggcaagatcctgagccccaaggaaataatactcagcctcggtgagcccgggggtgccggggaaaatgccgaggagagtactcccgaggatgagaagaaggagccgccaccggaagataaggagctgaaagacaatcatatcctgaaccacgtgggcctgaccgatggcccccgctccagcatcgagctggaccaccttaacttcatcaacaacccctacctcaccatccacgtgcccattgcctccgaggagtctgacctggagatgcccacagaggaggagacagacgccttctcggagcctgaggatatcaagaagcccctacagcccctctacgacgggaactcctccgtctgcagcacagctgactacaagccccctgaagaggaccccgaggagcaggctgaggagaaccccgagggggagcagcctgaggaatgcttcacggaagcctgtgtgaagcgctgcccctgcctctatgtggacatctcccagggccgtgggaaaatgtggtggacactgcgcagggcctgtttcaagattgttgagcacaactggtttgagaccttcattgtcttcatgatcttgctcagcagtggagccctggccttcgaagacatctacattgaacagcgacgagtcatccgcaccatcctggaatacgccgacaaggtcttcacctacatcttcatcctggagatgttgctaaagtgggtcgcctacggcttcaaggtgtatttcaccaatgcctggtgctggctcgacttcctcatcgtggacgtctccatcatcagcctggtggcaaactggctgggctactctgagctggggcccatcaaatccctgcgcacactccgggccctgcgacctctgagggcactgtctcgatttgagggtatgagggtggtggtgaacgccctcctgggagctatcccctccatcatgaacgtcctcctcgtctgcctcatcttctggctcatcttcagcatcatgggggtcaacttgtttgctggaaagttctactactgcgtcaacaccaccacctctgagagattcgacatctcggtggtcaacaacaagtccgagtgtgagagcctcatgtatacaggccaggtccgctggatgaatgtcaaggtcaactacgacaacgtgggtctgggctatctctccctccttcaggtggccacattcaagggttggatggatatcatgtatgcagctgtggactcccgggagaaagaggagcagccagactatgaggtgaacctctacatgtacctctacttcgtcatcttcatcatcttcggctccttcttcaccctcaacctcttcatcggtgtcatcatcgacaacttcaaccaacagaagaagaagtttggagggaaagacatcttcatgacagaggaacagaagaaatactacaacgcgatgaagaagcttggctccaagaagccccagaagccaattccccggcctcagaacaagatccagggcatggtgtacgacttcgtgacgaagcaggtgtttgacatctccatcatgatcctcatctgcctcaacatggttactatgatggtggagacagatgaccagagccagctcaaggtggacatcctgtacaacatcaacatggtcttcattatcatcttcacaggggagtgtgtgctgaagatgtttgccctacgccattactacttcaccattggctggaacatctttgactttgtggttgtcatcttgtccatcgtgggccttgcgctctctgacttgatacagaaatactttgtgtcacccacgctgttccgtgtgatccgcttggctcggatcgggcgtgtcctgcgtctgatccgcggggccaagggcatccggacgctgctgttcgccctgatgatgtccctgcccgccctcttcaacatcggcctccttctctttctggtcatgttcatctactcgatcttcggcatgtctaacttcgcctacgtcaagaaagagtcaggcatcgacgacatgtttaactttgagacctttggcaacagtatcatctgcctcttcgagatcaccacgtcagccggctgggacgggcttctgaaccccatcctcaacagtgggcccccagactgtgacccgacgttggagaacccgggtaccaatgtcaggggggactgcggcaacccttccatcggcatctgtttcttctgcagctacatcatcatctccttcctcatcgtggtcaacatgtacattgctatcatcctggagaatttcaacgtggccaccgaagagagcagcgagcccctcagtgaggatgacttcgagatgttctatgagacctgggagaagttcgacccggacgccactcagttcatcgactacagccgcctctcggactttgtggacaccctgcaggagccgctgaaaatcgccaaacccaataagatcaagcttatcacgttagacctgcccatggtgcccggcgacaagatccactgcttggacatcctctttgccctgaccaaagaggtactgggtgactctggggagatggacgccctcaagcagaccatggaggagaagtttatggcagctaacccttccaaggtctcctatgagcccatcaccaccaccctcaagaggaagcaggaggaggtgtgtgctatcaaaatccagagggcctaccgccgccacctgctgcagcgctccgtgaagcaggcctcttacatgtaccgtcacagccaggacggcaatggcgacggggcccccgagaaggagggattgcttgccaacaccatgaacaagatgtatggccatgagaaagagggtgatggtgtgcagagccagggggaggaagagaaggcctctacagaggatgctggacccaccgtggagcccaaacccaccagcagctcagatactgccctgactccttctcctccaccactacccccctcatcatcaccgccacaagggcagacagttcgcccaggggtcaaagagtctcttgtctagatggcagcgtcaaggctgcacgcagagttggaggggaagggctttgagatgggggctatacaggacttgacacctgggctgaggggtatggaaattgtgctcagggttcaggtgggtcggaagcccctgctgcctgatttcatctttacgatgctctgacattctgttggccaggggaggccaggacatctgaatgctgtttccttcttgggggagagccagcataccttggaggggttggccaccttcctgtcactactttaagggcccaggaccccagctctagccaagacaaagacgaatcttaacccccaaacctacacctgacccccagagcttagctatccctctcgcccccataattctagggtgcagcttccccctgacagctcaggaatgccctgtaaaaggggaaatggttctggtacagaaccaattggccgctggatccggatgtatcaggctggaaacatgacttctgaaacctttcacccagtcagatccaggccggtgggcagctcccctggctggcccctgggggaagaactaaggaaggattgccctgagaaattacctttctctagattgcgtggatgggtcaaacaggctgggtcctgccagctgcattcatgcccttgagcctgagcgcccacatctgcctggggtcaggttggaagctctctatcaagaatctgcccgttcccgcctccctgccttctttctttgaataccagggctcctgggagccccatcaaacacgaaagactgccttcctcctgtctaatctctgcccccccccttccctgccccttccctgcttcctcaagtgactctgagaatgctagaactcagcacacgggagatgagttgatactggggcatgcagtgagaaggctcaccaggcttggctttggtcttctcattgcctgaaagcaagttttcccctgagacagggtttcttttctccgtgtagccctggctgcctgg

SEQ ID NO: 336 - DNA, 6959 bp, Rattus norvegicus
  source 1..6959: mol_type = genomic DNA
ccaggcagccagggctacacggagaaaagaaaccctgtctcaggggaaaacttgctttcaggcaatgagaagaccaaagccaagcctggtgagccttctcactgcatgccccagtatcaactcatctcccgtgtgctgagttctagcattctcagagtcacttgaggaagcagggaaggggcagggaagggggggggcagagattagacaggaggaaggcagtctttcgtgtttgatggggctcccaggagccctggtattcaaagaaagaaggcagggaggcgggaacgggcagattcttgatagagagcttccaacctgaccccaggcagatgtgggcgctcaggctcaagggcatgaatgcagctggcaggacccagcctgtttgacccatccacgcaatctagagaaaggtaatttctcagggcaatccttccttagttcttcccccaggggccagccaggggagctgcccaccggcctggatctgactgggtgaaaggtttcagaagtcatgtttccagcctgatacatccggatccagcggccaattggttctgtaccagaaccatttccccttttacagggcattcctgagctgtcagggggaagctgcaccctagaattatgggggcgagagggatagctaagctctgggggtcaggtgtaggtttgggggttaagattcgtctttgtcttggctagagctggggtcctgggcccttaaagtagtgacaggaaggtggccaacccctccaaggtatgctggctctcccccaagaaggaaacagcattcagatgtcctggcctcccctggccaacagaatgtcagagcatcgtaaagatgaaatcaggcagcaggggcttccgacccacctgaaccctgagcacaatttccatacccctcagcccaggtgtcaagtcctgtatagcccccatctcaaagcccttcccctccaactctgcgtgcagccttgacgctgccatctagacaagagactctttgacccctgggcgaactgtctgcccttgtggcggtgatgatgaggggggtagtggtggaggagaaggagtcagggcagtatctgagctgctggtgggtttgggctccacggtgggtccagcatcctctgtagaggccttctcttcctccccctggctctgcacaccatcaccctctttctcatggccatacatcttgttcatggtgttggcaagcaatccctccttctcgggggccccgtcgccattgccgtcctggctgtgacggtacatgtaagaggcctgcttcacggagcgctgcagcaggtggcggcggtaggccctctggattttgatagcacacacctcctcctgcttcctcttgagggtggtggtgatgggctcataggagaccttggaagggttagctgccataaacttctcctccatggtctgcttgagggcgtccatctccccagagtcacccagtacctctttggtcagggcaaagaggatgtccaagcagtggatcttgtcgccgggcaccatgggcaggtctaacgtgataagcttgatcttattgggtttggcgattttcagcggctcctgcagggtgtccacaaagtccgagaggcggctgtagtcgatgaactgagtggcgtccgggtcgaacttctcccaggtctcatagaacatctcgaagtcatcctcactgaggggctcgctgctctcttcggtggccacgttgaaattctccaggatgatagcaatgtacatgttgaccacgatgaggaaggagatgatgatgtagctgcagaagaaacagatgccgatggaagggttgccgcagtcccccctgacattggtacccgggttctccaacgtcgggtcacagtctgggggcccactgttgaggatggggttcagaagcccgtcccagccggctgacgtggtgatctcgaagaggcagatgatactgttgccaaaggtctcaaagttaaacatgtcgtcgatgcctgactctttcttgacgtaggcgaagttagacatgccgaagatcgagtagatgaacatgaccagaaagagaaggaggccgatgttgaagagggcgggcagggacatcatcagggcgaacagcagcgtccggatgcccttggccccgcggatcagacgcaggacacgcccgatccgagccaagcggatcacacggaacagcgtgggtgacacaaagtatttctgtatcaagtcagagagcgcaaggcccacgatggacaagatgacaaccacaaagtcaaagatgttccagccaatggtgaagtagtaatggcgtagggcaaacatcttcagcacacactcccctgtgaagatgataatgaagaccatgttgatgttgtacaggatgtccaccttgagctggctctggtcatctgtctccaccatcatagtaaccatgttgaggcagatgaggatcatgatggagatgtcaaacacctgcttcgtcacgaagtcgtacaccatgccctggatcttgttctgaggccggggaattggcttctggggcttcttggagccaagcttcttcatcgcgttgtagtatttcttctgttcctctgtcatgaagatgtctttccctccaaacttcttcttctgttggttgaagttgtcgatgatgacaccgatgaagaggttgagggtgaagaaggagccgaagatgatgaagatgacgaagtagaggtacatgtagaggttcacctcatagtctggctgctcctctttctcccgggagtccacagctgcatacatgatatccatccaacccttgaatgtggccacctgaaggagggagagatagcccagacccacgttgtcgtagttgaccttgacattcatccagcggacctggcctgtatacatgaggctctcacactcggacttgttgttgaccaccgagatgtcgaatctctcagaggtggtggtgttgacgcagtagtagaactttccagcaaacaagttgacccccatgatgctgaagatgagccagaagatgaggcagacgaggaggacgttcatgatggaggggatagctcccaggagggcgttcaccaccaccctcataccctcaaatcgagacagtgccctcagaggtcgcagggcccggagtgtgcgcagggatttgatgggccccagctcagagtagcccagccagtttgccaccaggctgatgatggagacgtccacgatgaggaagtcgagccagcaccaggcattggtgaaatacaccttgaagccgtaggcgacccactttagcaacatctccaggatgaagatgtaggtgaagaccttgtcggcgtattccaggatggtgcggatgactcgtcgctgttcaatgtagatgtcttcgaaggccagggctccactgctgagcaagatcatgaagacaatgaaggtctcaaaccagttgtgctcaacaatcttgaaacaggccctgcgcagtgtccaccacattttcccacggccctgggagatgtccacatagaggcaggggcagcgcttcacacaggcttccgtgaagcattcctcaggctgctccccctcggggttctcctcagcctgctcctcggggtcctcttcagggggcttgtagtcagctgtgctgcagacggaggagttcccgtcgtagaggggctgtaggggcttcttgatatcctcaggctccgagaaggcgtctgtctcctcctctgtgggcatctccaggtcagactcctcggaggcaatgggcacgtggatggtgaggtaggggttgttgatgaagttaaggtggtccagctcgatgctggagcgggggccatcggtcaggcccacgtggttcaggatatgattgtctttcagctccttatcttccggtggcggctccttcttctcatcctcgggagtactctcctcggcattttccccggcacccccgggctcaccgaggctgagtattatttccttggggctcaggatcttgccacgcaacagccccaggaggaaggttttggcaaaaccgatgccccacttgatacgcccgatggcaatctgtaggttgttcatctcgccatcctcatccgaggccgccaggctgtcagcactgaaggaactcagcaggagagccaggaacagattcaggaccaccaggttgccaatgaccatgaccatgaggaagacggtgaggcacatggcctggccggccacctccatgcagtcccacatggtctcgatccattccccgcagaggatgcggaagacgatgaggaaggagtggaagaagtcgttcatgtgccagcgaggcaggttgcagtctgaggcgatcttgcacacacactccttatagctcttgccgaacagctgcatgcccaccacggcgaagatgaagacgatgatggccagcaccagggtcaggttgcccagcgcgcccactgagttgccaatgattttgatgagcatgttgagtgttggccatgacttggccagcttgaagacacgcagcaggcggaaggaacggagcactgacagcccctgtacgttggccaggcccagctccaccaggctgagggtgacgatgaaactgtcaaagatgttccagccctgttggaaatactcgtaggggtccatggcaatcagcttcaacaccatctccgcagtgaagatgcctgtgaagaccaagttgcccacggagagcacgttgtcaaagtgctcggtcatggggtagtgctccatggccatgaagagggtgttgagcacaatgcagatggtgatacccaggtccacaaaggggtccatgacgatcaggtagattatatgtttgaacttcacccacggggcacagcagttccagatgaggactttgtgtgcacacttgtaccaccacggtgggcacttctgatgggcctcttccagctcctccatagcatctgagatggcactgtctgcgctgcagcttggccttgggggccccttctccccggatgcatccaggctcccattgcagtctttgttgtgggttgggtccccatctgcctcctctccactttccagagcctgggcagccttagccttttccacttcctcctgatgttttttgtatttctcaagcatctgttggaactcctcctctttctcctggtcttcggccagggtagcctcattctgctcagcgtacgccatggccaccacggccaggatcagattgatgaggtagaaggagcccaggaagatgatgaccacgaagaagatcatgtaggtcttgccagcagctcgtagggtcagctggaaaaggttctcccagtagtcctgcgtcatgagccggaagagagccaggaaagcccagctgaaggtgtcatagctggtgtagccatagttggggttccgcccagcctttatgcattcgtagccctcagggcagtgcccagcatcactgctattcccacagagcagagcatcattggagccctccaagaaatagaagttcccttcgtcattgatgtaggcctcccagtcaaaggtagagttgccggcccagctctcctggctgttccaagtgtcattgatgtaccaagtgtcattgccgtaccaagtgtcattgctgtaccaagtgtcattgccataccacgtggtgttggtgtcattcatgggcgggggccaacgcacgcacttctgacgcaggtttcccatgaaaagctgcagccccaccagggcaaagacactcaggcagaagacagtgaggatcatcacatccgacagctttttcacagactggatcagggctcccacaattgtcttcagccctgggataaccgtgatggtcttcagggcccgcagcacacggaaggtcctcagggctgagatgttgcccaagtccacaaactctgtcacatacgccattgtgatgacactgaagtccagccagttccaggggtctcggaggaatgtgaagtcatcaatgcaaaagcctcgggccagcatcttaatgagggactcaaaggtatagatccccgtgaaggtgtactccacgtgtttggaccaagaaggcggattgctcatggtcatgaacacacagttggtcaggatggtgatcatgataaacatgctgaacagcgcgtgaatgagcaccttgatagccaccctcctgacgatgctgaaggggctcagcaggtagagggcaggcgtggcagagaatcggaagatggcctttcctttgttgagcacaatgaaggtcttcttgtcactgtagtaaggatccaggtcctccagggggatgccaatgacttcgggtggggggtccccatagatgagtgggaggttcttgccagcttccaggtcactgcgtggcttccgctcaggctcctcaatctccatctgcttgttccgctgcagccgggcctcctcctccaccgcccgctgctctatggctgccagggactctggggtgaaggggcgcaggcagtggggacccggggggaccaggttgggcagagatgagctggccatccttgcattctgggctcaggggccagagggtggtaggtaacagagccgctacagcccgcagcccttgggttttgggtggtcaccaatgcccggggtctactgtgtactcctcactctctgcctgcccaggagttgggtcagggaggtgggtgtcctggtcttgttggggctgggagatgtgcctgcaagacctgggcgtgctgatgcccaggacactgggcacggtgcattcccccactccaggccccgcagtgttctcttctcagcaatagattgtgccaccttcgggatcaacagaaagtgaaccagatcttctccagcctgaggagcttggggccaacgccccagtgtcccgaactgtctcctgggttcagactccaggaactgcgtgacttcagctgttggccagaagcagagaagagcggtggcggacgagccccgggtgccgt

SEQ ID NO: 337 - DNA, 6061 bp, Macaca fascicularis
  source 1..6061: mol_type = genomic DNA
gcagctgtcctcgccggcccggccccccagccaagtcccccagagttccagccccagcctgaggtgggcacggcgctctgggcttgtcagcaaccgctctgctcccgtccaatagctgaagccacacagttcctggagcttgagcccaggaggcagtcgaaggcacgagggtgttggtcccaagtcccaaggccacaaagaatctggttggtttgccgtcggtcctgggggcggcccctgccactgctggggaaagcgtggtgtggggccaggggtgatgctctgtgcccagcacccgtgtagcagcagcacctgggccttgcaggtacatctcccagtcccgacagagcctgcacgcccacctccccggctcagccactgggcaagcaggaggtgaggagtggacggccggcccagggaggggcggccgcccagcactccagggctgcgcactgcagctcccctggccactcaccaccctcctggtctctgagcccaggatgcgaggatggccagaccatctctgtgcaccctggtgcctctgggccctgattgcttgcgccccttcacccgggagtccctggcagccatagaacagcgggcggtggaggaggaagcccggctgcagcggaacaagcagatggagatcgaggagcccgaacggaagccacgaagtgacttggaggctggcaagaacctacctatgatctatggggaccccccaccggaggtcatcggcatccccctggaggacctggatccctactacagtgacaagaagaccttcatcgtactcaacaagggcaaggccatcttccgcttctccgccacacccgctctctacctgctgagccccttcagcctggtcaggcgtggggccatcaaggtgctcatccacgcgctgttcagcatgttcatcatgatcaccatcttgaccaactgcgtcttcatgaccatgagtgacccgcctccctggtccaagaatgtggagtacaccttcacggggatctacacctttgagtctctcatcaagatactggcccgaggcttctgtgtcgacgacttcacattcctccgggacccctggaactggctggacttcagcgtcatcatgatggcgtacctgacagagtttgtggacttgggcaacatctcagccttgaggaccttccgggtgctgcgggccctcaaaaccatcacggtcatcccagggctaaagacgattgtgggggccctgatccagtcggtgaaaaagctgtcagatgtgatgatcctcactgtcttctgcctgagcgtctttgcgctggtgggactgcagctcttcatgggaaacctgaggcagaagtgtgtgcgctggcccccgccgttcaacgacaccaacaccacgtggtacagtaatgacacgtggtacggcaatgacacatggtatggcaatgagatgtggtatggcaatgactcatggtatgccaacgacacgtggaacagccatgcaagctgggccaccaacgatacctttgactgggacgcctacatcaatgatgaagggaacttctacttcctggagggctccagcgatgccctactctgtgggaacagcagtgatgctgggcactgccccgagggttatgagtgcatcaagaccgggcggaaccccaactatggctacaccagctacgacaccttcagctgggccttcctggctctcttccgcctcatgacacaggactattgggagaacctcttccagctgacccttcgagcagctggcaagacctacatgatcttcttcgtggtcatcatcttcctgggctctttctacctcatcaatctgatcctggccgtggtagccatggcgtatgccgagcagaacgaggccaccctggccgaggataaggagaaagaggaggagtttcagcagatgctcgagaagttcaaaaagcaccaggaggagctggagaaggccaaggccgcccaagctctggaaggtggggaggcagatggggacccagcccatggcaaagactgcaatggcagcctggacgcatcgccagggcagaagggagccccaaggcagagcggcagcggagacagcggcatctctgatgccatggaagaactggaagaggcccaccagaagtgcccaccatggtggtacaagtgcgcccacaaagtgctcatatgggactgctgcgccccgtggatgaagttcaagaacatcatccacctgatcgtcatggacccgttcgtggacctgggcatcaccatctgcatcgtgctcaacaccctcttcatggccatggaacattaccccatgacggagcactttgaccacgtgctcactgtgggcaacctggtcttcacaggcatcttcacagcagagatggttctgaagctgatcgcaatggacccctatgagtatttccagcagggctggaatatcttcgacagcatcatcgtcaccctcagcctggtagagctaggcctggccaacgtacagggactgtctgtgctccgctccttccgtctgctgcgggtcttcaagctggccaagtcatggccgacgctgaacatgctcatcaagatcattggcaactctgtgggggcgctgggcaacctgacgctggtgctggccatcatcgtgttcatcttcgccgtggtgggcatgcagctgtttggcaagagctacaaggattgcgtgtgcaagatcgccttggactgcagcctgcctcgctggcacatgtatgatttcttccactccttcctcatcgtcttccgcatcctgtgcggggagtggatcgagaccatgtgggactgcatggaggtggctggccaagccatgtgcctcaccgtcttcctcatggtcatggtcatcggcaacctcgtggtcctgaacctgttcctggctctgctgctgagctccttcagcgccgacagtctggcagcctcggatgaggacggtgagatgaacaacctgcagattgccatcgggcgcatcaagttgggcatcagctttgccaaggccttcctcctggggctgctgcatggcaagatcctgagccccaaggacatcatgctcagcctcggggagcctgtcggggccggggaggctggagaggccggggagactgcccccgtggatgagaagaaggagccgcccgaggaggacctgaagaaggacagtcacatcctgaaccacatgagcctggctgatgacccaccatccagcatcgagctggaccaccttaacttcatcaacaacccctacctgaccatacaggtgcccatcgcctctgaggagtccgacctggagatgcccaccgaggaggaaacagacactttctcggagcctgaggatagcaagaagccgccgcagcccctctatgatgggaactcctccgtctgcagcacagctgactacaagccccccgaggaggaccctgaggagcaggcagaggagaaccccgagggggagcagcctgaggagtgcttcaccgaggcctgtgtgcagcgctggccctgcctctacgtggacatctctcagggccgcgggaagaagtggtggactctgcgcagggcctgcttcaagatcgtcgagcacaattggttcgagaccttcattgtcttcatgatcctgctcagcagcggggctctggccttcgaggacatctacatcgagcagcggcgagtcatccgcaccatcctcgaatatgctgacaaggtcttcacctacatcttcatcatggagatgctgctcaaatgggtggcctacggctttaaggtgtacttcaccaacgcctggtgctggctcgacttcctcatcgtggatgtctccatcatcagcttggtggccaactggctgggctactcggagctgggacccatcaaatccctgcggacactgcgggccctgcgtcccctgagggcactgtcccgattcgagggcatgagggtggtggtgaacgccctcctgggcgccatcccctccatcatgaacgtgctgctcgtctgcctcatcttctggctgatcttcagcatcatgggtgtcaacctgtttgctggcaagttctactactgcatcaacaccaccacctctgagaggttcgacatctccgaggtcaacaacaagtctgagtgcgagagcctcatgcacacgggccaggtccgctggctcaacgtcaaggtcaactacgacaacgtgggcctgggctatctctccctcctgcaggtggccaccttcaagggttggatggacatcatgtatgcagccgtggactcccgggagaaggaggagcagccgcagtacgaggtgaacctctacatgtacctctactttgtcatcttcatcatcttcggctccttcttcaccctcaacctcttcattggtgtcatcattgacaacttcaaccagcagaagaagaagtttggagggaaagacatctttatgacggaggaacagaagaaatactataacgccatgaagaagcttggctccaagaagcctcagaaaccaattccccggccccagaacaagatccagggcatggtgtatgacctcgtgacgaagcaggccttcgacatcaccatcatgatcctcatctgcctcaacatggtcaccatgatggtggagacagacgaccagagccagctcaaggtggacatcctgtacaacatcaacatgatcttcatcatcatcttcacaggggagtgcgtgctcaagatgctcgccctgcgccagtactacttcaccgtcggctggaacatcttcgacttcgtggtcgtcatcctgtccattgtgggccttgcactctccgacctgatccagaagtacttcgtgtcacccacactgttccgtgtgatccgcctggcgcggatcgggcgtgtcctgcgactgatccgtggggccaagggcatccggacgctgctgttcgccctcatgatgtcgctgcctgccctcttcaacatcggcctcctcctcttcctggtcatgttcatctactccatctttggcatgtccaactttgcctatgtcaagaaggagtcgggcatcgatgatatgttcaacttcgagaccttcggcaacagcatcatctgcctgtttgagatcaccacgtcggctggctgggatgggctcctcaaccccatcctcaacagcgggcccccagactgtgaccccaacctggagaacccgggcaccagtgtcaagggtgactgcggcaacccctccatcggcatctgcttcttctgcagctacatcatcatctccttcctcatcgtggtcaacatgtacatcgccatcatcctggagaacttcaacgtggccacagaggagagcagcgagccccttggtgaggatgactttgagatgttctacgagacatgggagaagttcgacccggatgccacccagttcattgcctacagccgcctctcggactttgtggacaccctgcaggaaccgctgaggatcgccaagcccaacaagatcaagctcatcacgctggacctgcccatggtgccgggggacaagatccactgcctggacatcctctttgccctgaccaaagaggtcctgggtgactctggggaaatggacgccctcaagcagaccatggaggagaagttcatggcagccaacccctccaaggtgtcctacgagcccatcaccaccaccctcaagaggaagcacgaggaggtgtgcgccatcaagatccagagggcctaccgccggcacctgctacagcgctccgtgaagcaggcatcctacatgtaccgccacagccacgacggcagcggggacaacgcccctgagaaggaggggctgcttgccaacaccatgagcaagatgtatggccacgagaacgggaacagcagctcgcagagcccagaggagaagggcgaggcaggggatgccataccaactatggggctgatgcccatcagcccctcagacactgcccagcctcccacctctcccccggggcatatagtgcgcccaggcgtcaaggagtctcttgtctagcaggcagcatcgaggtggccctctgagtctcagcacagtccc

SEQ ID NO: 338 - DNA, 6061 bp, Macaca fascicularis
  source 1..6061: mol_type = genomic DNA
gggactgtgctgagactcagagggccacctcgatgctgcctgctagacaagagactccttgacgcctgggcgcactatatgccccgggggagaggtgggaggctgggcagtgtctgaggggctgatgggcatcagccccatagttggtatggcatcccctgcctcgcccttctcctctgggctctgcgagctgctgttcccgttctcgtggccatacatcttgctcatggtgttggcaagcagcccctccttctcaggggcgttgtccccgctgccgtcgtggctgtggcggtacatgtaggatgcctgcttcacggagcgctgtagcaggtgccggcggtaggccctctggatcttgatggcgcacacctcctcgtgcttcctcttgagggtggtggtgatgggctcgtaggacaccttggaggggttggctgccatgaacttctcctccatggtctgcttgagggcgtccatttccccagagtcacccaggacctctttggtcagggcaaagaggatgtccaggcagtggatcttgtcccccggcaccatgggcaggtccagcgtgatgagcttgatcttgttgggcttggcgatcctcagcggttcctgcagggtgtccacaaagtccgagaggcggctgtaggcaatgaactgggtggcatccgggtcgaacttctcccatgtctcgtagaacatctcaaagtcatcctcaccaaggggctcgctgctctcctctgtggccacgttgaagttctccaggatgatggcgatgtacatgttgaccacgatgaggaaggagatgatgatgtagctgcagaagaagcagatgccgatggaggggttgccgcagtcacccttgacactggtgcccgggttctccaggttggggtcacagtctgggggcccgctgttgaggatggggttgaggagcccatcccagccagccgacgtggtgatctcaaacaggcagatgatgctgttgccgaaggtctcgaagttgaacatatcatcgatgcccgactccttcttgacataggcaaagttggacatgccaaagatggagtagatgaacatgaccaggaagaggaggaggccgatgttgaagagggcaggcagcgacatcatgagggcgaacagcagcgtccggatgcccttggccccacggatcagtcgcaggacacgcccgatccgcgccaggcggatcacacggaacagtgtgggtgacacgaagtacttctggatcaggtcggagagtgcaaggcccacaatggacaggatgacgaccacgaagtcgaagatgttccagccgacggtgaagtagtactggcgcagggcgagcatcttgagcacgcactcccctgtgaagatgatgatgaagatcatgttgatgttgtacaggatgtccaccttgagctggctctggtcgtctgtctccaccatcatggtgaccatgttgaggcagatgaggatcatgatggtgatgtcgaaggcctgcttcgtcacgaggtcatacaccatgccctggatcttgttctggggccggggaattggtttctgaggcttcttggagccaagcttcttcatggcgttatagtatttcttctgttcctccgtcataaagatgtctttccctccaaacttcttcttctgctggttgaagttgtcaatgatgacaccaatgaagaggttgagggtgaagaaggagccgaagatgatgaagatgacaaagtagaggtacatgtagaggttcacctcgtactgcggctgctcctccttctcccgggagtccacggctgcatacatgatgtccatccaacccttgaaggtggccacctgcaggagggagagatagcccaggcccacgttgtcgtagttgaccttgacgttgagccagcggacctggcccgtgtgcatgaggctctcgcactcagacttgttgttgacctcggagatgtcgaacctctcagaggtggtggtgttgatgcagtagtagaacttgccagcaaacaggttgacacccatgatgctgaagatcagccagaagatgaggcagacgagcagcacgttcatgatggaggggatggcgcccaggagggcgttcaccaccaccctcatgccctcgaatcgggacagtgccctcaggggacgcagggcccgcagtgtccgcagggatttgatgggtcccagctccgagtagcccagccagttggccaccaagctgatgatggagacatccacgatgaggaagtcgagccagcaccaggcgttggtgaagtacaccttaaagccgtaggccacccatttgagcagcatctccatgatgaagatgtaggtgaagaccttgtcagcatattcgaggatggtgcggatgactcgccgctgctcgatgtagatgtcctcgaaggccagagccccgctgctgagcaggatcatgaagacaatgaaggtctcgaaccaattgtgctcgacgatcttgaagcaggccctgcgcagagtccaccacttcttcccgcggccctgagagatgtccacgtagaggcagggccagcgctgcacacaggcctcggtgaagcactcctcaggctgctccccctcggggttctcctctgcctgctcctcagggtcctcctcggggggcttgtagtcagctgtgctgcagacggaggagttcccatcatagaggggctgcggcggcttcttgctatcctcaggctccgagaaagtgtctgtttcctcctcggtgggcatctccaggtcggactcctcagaggcgatgggcacctgtatggtcaggtaggggttgttgatgaagttaaggtggtccagctcgatgctggatggtgggtcatcagccaggctcatgtggttcaggatgtgactgtccttcttcaggtcctcctcgggcggctccttcttctcatccacgggggcagtctccccggcctctccagcctccccggccccgacaggctccccgaggctgagcatgatgtccttggggctcaggatcttgccatgcagcagccccaggaggaaggccttggcaaagctgatgcccaacttgatgcgcccgatggcaatctgcaggttgttcatctcaccgtcctcatccgaggctgccagactgtcggcgctgaaggagctcagcagcagagccaggaacaggttcaggaccacgaggttgccgatgaccatgaccatgaggaagacggtgaggcacatggcttggccagccacctccatgcagtcccacatggtctcgatccactccccgcacaggatgcggaagacgatgaggaaggagtggaagaaatcatacatgtgccagcgaggcaggctgcagtccaaggcgatcttgcacacgcaatccttgtagctcttgccaaacagctgcatgcccaccacggcgaagatgaacacgatgatggccagcaccagcgtcaggttgcccagcgcccccacagagttgccaatgatcttgatgagcatgttcagcgtcggccatgacttggccagcttgaagacccgcagcagacggaaggagcggagcacagacagtccctgtacgttggccaggcctagctctaccaggctgagggtgacgatgatgctgtcgaagatattccagccctgctggaaatactcataggggtccattgcgatcagcttcagaaccatctctgctgtgaagatgcctgtgaagaccaggttgcccacagtgagcacgtggtcaaagtgctccgtcatggggtaatgttccatggccatgaagagggtgttgagcacgatgcagatggtgatgcccaggtccacgaacgggtccatgacgatcaggtggatgatgttcttgaacttcatccacggggcgcagcagtcccatatgagcactttgtgggcgcacttgtaccaccatggtgggcacttctggtgggcctcttccagttcttccatggcatcagagatgccgctgtctccgctgccgctctgccttggggctcccttctgccctggcgatgcgtccaggctgccattgcagtctttgccatgggctgggtccccatctgcctccccaccttccagagcttgggcggccttggccttctccagctcctcctggtgctttttgaacttctcgagcatctgctgaaactcctcctctttctccttatcctcggccagggtggcctcgttctgctcggcatacgccatggctaccacggccaggatcagattgatgaggtagaaagagcccaggaagatgatgaccacgaagaagatcatgtaggtcttgccagctgctcgaagggtcagctggaagaggttctcccaatagtcctgtgtcatgaggcggaagagagccaggaaggcccagctgaaggtgtcgtagctggtgtagccatagttggggttccgcccggtcttgatgcactcataaccctcggggcagtgcccagcatcactgctgttcccacagagtagggcatcgctggagccctccaggaagtagaagttcccttcatcattgatgtaggcgtcccagtcaaaggtatcgttggtggcccagcttgcatggctgttccacgtgtcgttggcataccatgagtcattgccataccacatctcattgccataccatgtgtcattgccgtaccacgtgtcattactgtaccacgtggtgttggtgtcgttgaacggcgggggccagcgcacacacttctgcctcaggtttcccatgaagagctgcagtcccaccagcgcaaagacgctcaggcagaagacagtgaggatcatcacatctgacagctttttcaccgactggatcagggcccccacaatcgtctttagccctgggatgaccgtgatggttttgagggcccgcagcacccggaaggtcctcaaggctgagatgttgcccaagtccacaaactctgtcaggtacgccatcatgatgacgctgaagtccagccagttccaggggtcccggaggaatgtgaagtcgtcgacacagaagcctcgggccagtatcttgatgagagactcaaaggtgtagatccccgtgaaggtgtactccacattcttggaccagggaggcgggtcactcatggtcatgaagacgcagttggtcaagatggtgatcatgatgaacatgctgaacagcgcgtggatgagcaccttgatggccccacgcctgaccaggctgaaggggctcagcaggtagagagcgggtgtggcggagaagcggaagatggccttgcccttgttgagtacgatgaaggtcttcttgtcactgtagtagggatccaggtcctccagggggatgccgatgacctccggtggggggtccccatagatcataggtaggttcttgccagcctccaagtcacttcgtggcttccgttcgggctcctcgatctccatctgcttgttccgctgcagccgggcttcctcctccaccgcccgctgttctatggctgccagggactcccgggtgaaggggcgcaagcaatcagggcccagaggcaccagggtgcacagagatggtctggccatcctcgcatcctgggctcagagaccaggagggtggtgagtggccaggggagctgcagtgcgcagccctggagtgctgggcggccgcccctccctgggccggccgtccactcctcacctcctgcttgcccagtggctgagccggggaggtgggcgtgcaggctctgtcgggactgggagatgtacctgcaaggcccaggtgctgctgctacacgggtgctgggcacagagcatcacccctggccccacaccacgctttccccagcagtggcaggggccgcccccaggaccgacggcaaaccaaccagattctttgtggccttgggacttgggaccaacaccctcgtgccttcgactgcctcctgggctcaagctccaggaactgtgtggcttcagctattggacgggagcagagcggttgctgacaagcccagagcgccgtgcccacctcaggctggggctggaactctgggggacttggctggggggccgggccggcgaggacagctgc

SEQ ID NO: 339 - DNA, 8281 bp, Macaca mulatta
  source 1..8281: mol_type = genomic DNA
gtgtacacccaggcaggcactcagtaagagtcttgtgtctgtgcgatatggcatttgagttgctggggacacaagtgtgcctgtgggcgcaactagaagccatgtgtatatgcacaagactgctgcgtgggtgcaagtgtgtttgtgcatgtgagctggaggcgtgtgtgtgaacgggtataacagcagaggaagcatctgcgtgaacgtatgaagggtgatttgcacatgactgagcctgtgggagcacagcttttgtgtgggtgtgtctgtgagtgtgcactcgagtgactgagtgtgagccagtgtgtacctcaggagtgcttctgggaataagtgtggagattcgagtgtgaggtgcgtgtgcccgggagtctgtcactcctagagcagtgaggctggagcccaagcggtgaggccggagccaagcaggctgagtccagagcacacccggcgagggaagtgtgaccgaggctcccacctgaagattggcccagtcctcaggtttcactcatgaccctgtgacatcagcggcagcagctgtcctcgccggcccggccccccagccaagtcccccagagttccagccccagcctgaggtgggcacggcgctctgggcttgtcagcaaccgctctgctcccgtccaatagctgaagccacacagttcctggagcttgagcccaggaggcagtcgaaggcacgagggtgttggtcccaagtcccaaggccacaaagaatctggttggtttgccgtcggtcctgggggtggcccctgccactgctggggaaagcgtggtgtggggccaggggtgatgctctgtgcccagcacccgtgtagcagcagcacctgggccttgcaggtacatctcccagtcccgacagagcctgcacgcccacctccccggctcagccactgggcaagcaggaggtgaggagtggacggccggcccagggaggggcggccgcccagcactccagggctgcgcactgcagctcccctggccactcaccaccctcctggtctctgagcccaggatgcgaggatggccagaccatctctgtgcaccctggtgcctctgggccctgattgcttgcgccccttcacccgggagtccctggcagccatagaacagcgggcggtggaggaggaagcccggctgcagcggaacaagcagatggagatcgaggagcccgaacggaagccacgaagtgacttggaggctggcaagaacctacctatgatctatggggaccccccaccggaggtcatcggcatccccctggaggacctggatccctactacagtgacaagaagaccttcatcgtactcaacaagggcaaggccatcttccgcttctccgccacacccgctctctacctgctgagccccttcagcctggtcaggcgtggggccatcaaggtgctcatccacgcgctgttcagcatgttcatcatgatcaccatcttgaccaactgcgtcttcatgaccatgagtgacccgcctccctggtccaagaatgtggagtacaccttcacggggatctacacctttgagtctctcatcaagatactggcccgaggcttctgtgtcgacgacttcacattcctccgggacccctggaactggctggacttcagcgtcatcatgatggcgtacctgacagagtttgtggacttgggcaacatctcagccttgaggaccttccgggtgctgcgggccctcaaaaccatcacggtcatcccagggctaaagacgattgtgggggccctgatccagtcggtgaaaaagctgtcagatgtgatgatcctcactgtcttctgcctgagcgtctttgcgctggtgggactgcagctcttcatgggaaacctgaggcagaagtgtgtgcgctggcccccgccgttcaacgacaccaacaccacgtggtacagtaatgacacgtggtacggcaatgacacatggtatggcaatgagatgtggtatggcaatgactcatggtatgccaacgacacgtggaacagccatgcaagctgggccaccaacgatacctttgactgggacgcctacatcaatgatgaagggaacttctacttcctggagggctccagcgatgccctactctgtgggaacagcagtgatgctgggcactgccccgagggttatgagtgcatcaagaccgggcggaaccccaactatggctacaccagctacgacaccttcagctgggccttcctggctctcttccgcctcatgacacaggactattgggagaacctcttccagctgacccttcgagcagctggcaagacctacatgatcttcttcgtggtcatcatcttcctgggctccttctacctcatcaatctgatcctggccgtggtagccatggcgtatgccgagcagaacgaggccaccctggccgaggataaggagaaagaggaggagtttcagcagatgctcgagaagttcaaaaagcaccaggaggagctggagaaggccaaggccgcccaagctctggaaggtggggaggcagatggggacccagcccatggcaaagactgcaatggcagcctggacgcatcgccagggcagaagggagccccaaggcagagcggcagcggagacagcagcatctctgatgccatggaagaactggaagaggcccaccagaagtgcccaccatggtggtacaagtgcgcccacaaagtgctcatatgggactgctgcgccccgtggatgaagttcaagaacatcatccacctgatcgtcatggacccgttcgtggacctgggcatcaccatctgcatcgtgctcaacaccctcttcatggccatggaacattaccctatgacggagcactttgaccacgtgctcactgtgggcaacctggtcttcacaggcatcttcacagcagagatggttctgaagctgatcgcaatggacccctatgagtatttccagcagggctggaatatcttcgacagcatcatcgtcaccctcagcctggtagagctaggcctggccaacgtacagggactgtctgtgctccgctccttccgtctgctgcgggtcttcaagctggccaagtcatggccgacgctgaacatgctcatcaagatcattggcaactctgtgggggcgctaggcaacctgacgctggtgctggccatcatcgtgttcatcttcgccgtggtgggcatgcagctgtttggcaagagctacaaggattgcgtgtgcaagatcgccttggactgcagcctgcctcgctggcacatgtatgatttcttccactccttcctcatcgtcttccgcatcctgtgcggggagtggatcgagaccatgtgggactgcatggaggtggctggccaagccatgtgcctcaccgtcttcctcatggtcatggtcatcggcaacctcgtggtcctgaacctgttcctggctctgctgctgagctccttcagcgccgacagtctggcagcctcggatgaggacggtgagatgaacaacctgcagattgccatcgggcgcatcaagttgggcatcagctttgccaaggccttcctcctggggctgctgcatggcaagatcctgagccccaaggacatcatgctcagcctcggggagcctgtcggggccggggaggctggagaggccggggagactgcccctgtggatgagaagaaggagccgcccgaggaggacctgaagaaggacagtcacatcctgaaccacatgagcctggctgatgacccaccatccagcatcgagctggaccaccttaacttcatcaacaacccctacctgaccatacaggtgcccatcgcctctgaggagtccgacctggagatgcccaccgaggaggaaacagacactttctcggagcctgaggatagcaagaagccgccgcagcccctctatgatgggaactcctccgtctgcagcacagctgactacaagccccccgaggaggaccctgaggagcaggcagaggagaaccccgagggggagcagcctgaggagtgcttcactgaggcctgtgtgcagcgctggccctgcctctacgtggacatctctcagggccgcgggaagaagtggtggactctgcgcagggcctgcttcaagatcgtcgagcacaattggttcgagaccttcattgtcttcatgatcctgctcagcagcggggctctggccttcgaggacatctacatcgagcagcggcgagtcatccgcaccatcctcgaatatgctgacaaggtcttcacctacatcttcatcatggagatgctgctcaaatgggtggcctacggctttaaggtgtacttcaccaacgcctggtgctggctcgacttcctcatcgtggatgtctccatcatcagcttggtggccaactggctgggctactcggagctgggacccatcaaatccctgcggacactgcgggccctgcgtcccctgagggcactgtcccgattcgagggcatgagggtggtggtgaacgccctcctgggcgccatcccctccatcatgaacgtgctgctcgtctgcctcatcttctggctgatcttcagcatcatgggtgtcaacctgtttgctggcaagttctactactgcatcaacaccaccacctctgagaggttcgacatctccgaggtcaacaacaagtctgagtgcgagagcctcatgcacacgggccaggtccgctggctcaacgtcaaggtcaactacgacaacgtgggcctgggctacctctccctcctgcaggtggccaccttcaagggttggatggacatcatgtatgcagccgtggactcccgggagaaggaggagcagccgcagtacgaggtgaacctctacatgtacctctactttgtcatcttcatcatcttcggctccttcttcaccctcaacctcttcattggtgtcatcattgacaacttcaaccagcagaagaagaagtttggagggaaagacatctttatgacggaggaacagaagaaatactataacgccatgaagaagcttggctccaagaagcctcagaaaccaattccccggccccagaacaagatccagggcatggtgtatgacctcgtgacgaagcaggccttcgacatcaccatcatgatcctcatctgcctcaacatggtcaccatgatggtggagacagacgaccagagccagctcaaggtggacatcctgtacaacatcaacatgatcttcatcatcatcttcacaggggagtgcgtgctcaagatgctcgccctgcgccagtactacttcaccgtcggctggaacatcttcgacttcgtggtcgtcatcctgtccattgtgggccttgcactctccgacctgatccagaagtacttcgtgtcacccacactgttccgtgtgatccgcctggcgcggatcgggcgtgtcctgcgactgatccgtggggccaagggcatccggacgctgctgttcgccctcatgatgtcgctgcctgccctcttcaacatcggcctcctcctcttcctggtcatgttcatctactccatctttggcatgtccaactttgcctatgtcaagaaggagtcgggcatcgatgatatgttcaacttcgagaccttcggcaacagcatcatctgcctgtttgagatcaccacgtcggctggctgggatgggctcctcaaccccatcctcaacagcgggcccccagactgtgaccccaacctggagaacccgggcaccagtgtcaagggtgactgcggcaatccctccatcggcatctgcttcttctgcagctacatcatcatctccttcctcatcgtggtcaacatgtacatcgccatcatcctggagaacttcaacgtggccacagaggagagcagcgagccccttggtgaggatgactttgagatgttctacgagacatgggagaagttcgacccggatgccacccagttcattgcctacagccgcctctcggactttgtggacaccctgcaggaaccgctgaggatcgccaagcccaacaagatcaagctcatcacgctggacctgcccatggtgccgggggacaagatccactgcctggacatcctctttgccctgaccaaagaggtcctgggtgactctggggaaatggacgccctcaagcagaccatggaggagaagttcatggcagccaacccctccaaggtgtcctacgagcccatcaccaccaccctcaagaggaagcatgaggaggtgtgcgccatcaagatccagagggcctaccgccggcacctgctacagcgctccgtgaagcaggcatcctacatgtaccgccacagccacgacggcagcggggacaacgcccctgagaaggaggggctgcttgccaacaccatgagcaagatgtatggccacgagaacgggaacagcagctcgcagagcccagaggagaagggcgaggcaggggatgccatacccactatggggctgatgcccatcagcccctcagacactgcccagcctcccacctctcccccggggcatatagtgcgcccaggcgtcaaggagtctcttgtctagcaggcagcatcgaggtggccctctgagtctcagcacagtccccagagctcccccgtggtgcctgcatacagagtgagggaggagggctttggttctgggactgcgtctggctccctgatgggggacaggatttggccacactggggctgacacccaggcccaagcgcctgcatctccagacccgagcgtctgtgtctctagaccatgggaaatgggcattgcactcaggggctccatgctgggcctgaggcccctgcctccatgatttaaccttcaagttgctctgacctcctcctgggccctgtcgcccctccttttggcctgggggagatcagaacgttggaattgctcgctgcccctcacttggggaggagctggcctgcggtggagccctcagttgctgccccatcaccagagtcttaagggtcactggcctctccccaggaagtggctcagacccctcagccccagcccagacaaagatgtcttaacctcagggagtgcagacacctaaccccagggcactgccagcccgcccgctctgactctggggtgcaacttcgcccaccaggccagctcaggaattccctggacaagggaaatgtgactggttcagaaatagctcctcaagcctcaaaacctgattggccactggatcctgctgctttgggctgggatggtgactcctgaaaccttttcccaggccatatccaggtccatagctcccctggctggcccctaggggaagaacagaaggaaggatgccacttgggaattgtccttttctaggaagcacgggtgagacaggctgggtcctgccagctggatcgctgcacatggcctgagcatccagacctgagcgggggtcggggacctgctgctcagtaagaagattcttgccccttccctctctccctgcctcactcctccgtgagcaccaccagggctccaggagcctcatccagcctcagagatcccccttctcatctcgccaggcctgtctcattctctctcctcatttttcccacctctctcctcaaagtgatcctaagaatgtacagtttagctcaggttagatattttgaccctggggcgtgcagcaggaaaggcccgactggctcaggctcaaccttccaacctcccgtggcctgaaaaagcacttcttctgcactgcggttctgggcatggcagggccaggcctctgctggctcctggagaacagaggctgtgtccagaggaggaggggtgagagacctgctcaggcgtcactggatttattcactgtgtatgtacctgtggctgtgtgtctgcttgtatgcttgtaggcctgtgtgtatagccgtgtgtatgttcaagtgcgtgactgtacatgtgtgtgtgaaccactgtgtactggtgcctgcattatgcacgtgtgtctgggtatctttgtatatatgtgtgtcagtgtgccctggagtgtttcaaggtccatggagtatggctggtgtgtcgtactgtgcaggcctgtccctgggagtgttcctgtgtctgggagagtggacctgtggatgagtgtgaatgcgtatggtaaggtgtgtactcagggcattctgttggcctaagtgcctcttctttttcttcttgtttctcatgaaaagtttgattaaaattcaggaagcagcaaaaccttcaaaacaagacatgtatgtgtgcttgtgtgtgtgcacaggtgtgtgtgtgtgtg

SEQ ID NO: 340 - DNA, 8281 bp, Macaca mulatta
  source 1..8281: mol_type = genomic DNA
cacacacacacacacctgtgcacacacacaagcacacatacatgtcttgttttgaaggttttgctgcttcctgaattttaatcaaacttttcatgagaaacaagaagaaaaagaagaggcacttaggccaacagaatgccctgagtacacaccttaccatacgcattcacactcatccacaggtccactctcccagacacaggaacactcccagggacaggcctgcacagtacgacacaccagccatactccatggaccttgaaacactccagggcacactgacacacatatatacaaagatacccagacacacgtgcataatgcaggcaccagtacacagtggttcacacacacatgtacagtcacgcacttgaacatacacacggctatacacacaggcctacaagcatacaagcagacacacagccacaggtacatacacagtgaataaatccagtgacgcctgagcaggtctctcacccctcctcctctggacacagcctctgttctccaggagccagcagaggcctggccctgccatgcccagaaccgcagtgcagaagaagtgctttttcaggccacgggaggttggaaggttgagcctgagccagtcgggcctttcctgctgcacgccccagggtcaaaatatctaacctgagctaaactgtacattcttaggatcactttgaggagagaggtgggaaaaatgaggagagagaatgagacaggcctggcgagatgagaagggggatctctgaggctggatgaggctcctggagccctggtggtgctcacggaggagtgaggcagggagagagggaaggggcaagaatcttcttactgagcagcaggtccccgacccccgctcaggtctggatgctcaggccatgtgcagcgatccagctggcaggacccagcctgtctcacccgtgcttcctagaaaaggacaattcccaagtggcatccttccttctgttcttcccctaggggccagccaggggagctatggacctggatatggcctgggaaaaggtttcaggagtcaccatcccagcccaaagcagcaggatccagtggccaatcaggttttgaggcttgaggagctatttctgaaccagtcacatttcccttgtccagggaattcctgagctggcctggtgggcgaagttgcaccccagagtcagagcgggcgggctggcagtgccctggggttaggtgtctgcactccctgaggttaagacatctttgtctgggctggggctgaggggtctgagccacttcctggggagaggccagtgacccttaagactctggtgatggggcagcaactgagggctccaccgcaggccagctcctccccaagtgaggggcagcgagcaattccaacgttctgatctcccccaggccaaaaggaggggcgacagggcccaggaggaggtcagagcaacttgaaggttaaatcatggaggcaggggcctcaggcccagcatggagcccctgagtgcaatgcccatttcccatggtctagagacacagacgctcgggtctggagatgcaggcgcttgggcctgggtgtcagccccagtgtggccaaatcctgtcccccatcagggagccagacgcagtcccagaaccaaagccctcctccctcactctgtatgcaggcaccacgggggagctctggggactgtgctgagactcagagggccacctcgatgctgcctgctagacaagagactccttgacgcctgggcgcactatatgccccgggggagaggtgggaggctgggcagtgtctgaggggctgatgggcatcagccccatagtgggtatggcatcccctgcctcgcccttctcctctgggctctgcgagctgctgttcccgttctcgtggccatacatcttgctcatggtgttggcaagcagcccctccttctcaggggcgttgtccccgctgccgtcgtggctgtggcggtacatgtaggatgcctgcttcacggagcgctgtagcaggtgccggcggtaggccctctggatcttgatggcgcacacctcctcatgcttcctcttgagggtggtggtgatgggctcgtaggacaccttggaggggttggctgccatgaacttctcctccatggtctgcttgagggcgtccatttccccagagtcacccaggacctctttggtcagggcaaagaggatgtccaggcagtggatcttgtcccccggcaccatgggcaggtccagcgtgatgagcttgatcttgttgggcttggcgatcctcagcggttcctgcagggtgtccacaaagtccgagaggcggctgtaggcaatgaactgggtggcatccgggtcgaacttctcccatgtctcgtagaacatctcaaagtcatcctcaccaaggggctcgctgctctcctctgtggccacgttgaagttctccaggatgatggcgatgtacatgttgaccacgatgaggaaggagatgatgatgtagctgcagaagaagcagatgccgatggagggattgccgcagtcacccttgacactggtgcccgggttctccaggttggggtcacagtctgggggcccgctgttgaggatggggttgaggagcccatcccagccagccgacgtggtgatctcaaacaggcagatgatgctgttgccgaaggtctcgaagttgaacatatcatcgatgcccgactccttcttgacataggcaaagttggacatgccaaagatggagtagatgaacatgaccaggaagaggaggaggccgatgttgaagagggcaggcagcgacatcatgagggcgaacagcagcgtccggatgcccttggccccacggatcagtcgcaggacacgcccgatccgcgccaggcggatcacacggaacagtgtgggtgacacgaagtacttctggatcaggtcggagagtgcaaggcccacaatggacaggatgacgaccacgaagtcgaagatgttccagccgacggtgaagtagtactggcgcagggcgagcatcttgagcacgcactcccctgtgaagatgatgatgaagatcatgttgatgttgtacaggatgtccaccttgagctggctctggtcgtctgtctccaccatcatggtgaccatgttgaggcagatgaggatcatgatggtgatgtcgaaggcctgcttcgtcacgaggtcatacaccatgccctggatcttgttctggggccggggaattggtttctgaggcttcttggagccaagcttcttcatggcgttatagtatttcttctgttcctccgtcataaagatgtctttccctccaaacttcttcttctgctggttgaagttgtcaatgatgacaccaatgaagaggttgagggtgaagaaggagccgaagatgatgaagatgacaaagtagaggtacatgtagaggttcacctcgtactgcggctgctcctccttctcccgggagtccacggctgcatacatgatgtccatccaacccttgaaggtggccacctgcaggagggagaggtagcccaggcccacgttgtcgtagttgaccttgacgttgagccagcggacctggcccgtgtgcatgaggctctcgcactcagacttgttgttgacctcggagatgtcgaacctctcagaggtggtggtgttgatgcagtagtagaacttgccagcaaacaggttgacacccatgatgctgaagatcagccagaagatgaggcagacgagcagcacgttcatgatggaggggatggcgcccaggagggcgttcaccaccaccctcatgccctcgaatcgggacagtgccctcaggggacgcagggcccgcagtgtccgcagggatttgatgggtcccagctccgagtagcccagccagttggccaccaagctgatgatggagacatccacgatgaggaagtcgagccagcaccaggcgttggtgaagtacaccttaaagccgtaggccacccatttgagcagcatctccatgatgaagatgtaggtgaagaccttgtcagcatattcgaggatggtgcggatgactcgccgctgctcgatgtagatgtcctcgaaggccagagccccgctgctgagcaggatcatgaagacaatgaaggtctcgaaccaattgtgctcgacgatcttgaagcaggccctgcgcagagtccaccacttcttcccgcggccctgagagatgtccacgtagaggcagggccagcgctgcacacaggcctcagtgaagcactcctcaggctgctccccctcggggttctcctctgcctgctcctcagggtcctcctcggggggcttgtagtcagctgtgctgcagacggaggagttcccatcatagaggggctgcggcggcttcttgctatcctcaggctccgagaaagtgtctgtttcctcctcggtgggcatctccaggtcggactcctcagaggcgatgggcacctgtatggtcaggtaggggttgttgatgaagttaaggtggtccagctcgatgctggatggtgggtcatcagccaggctcatgtggttcaggatgtgactgtccttcttcaggtcctcctcgggcggctccttcttctcatccacaggggcagtctccccggcctctccagcctccccggccccgacaggctccccgaggctgagcatgatgtccttggggctcaggatcttgccatgcagcagccccaggaggaaggccttggcaaagctgatgcccaacttgatgcgcccgatggcaatctgcaggttgttcatctcaccgtcctcatccgaggctgccagactgtcggcgctgaaggagctcagcagcagagccaggaacaggttcaggaccacgaggttgccgatgaccatgaccatgaggaagacggtgaggcacatggcttggccagccacctccatgcagtcccacatggtctcgatccactccccgcacaggatgcggaagacgatgaggaaggagtggaagaaatcatacatgtgccagcgaggcaggctgcagtccaaggcgatcttgcacacgcaatccttgtagctcttgccaaacagctgcatgcccaccacggcgaagatgaacacgatgatggccagcaccagcgtcaggttgcctagcgcccccacagagttgccaatgatcttgatgagcatgttcagcgtcggccatgacttggccagcttgaagacccgcagcagacggaaggagcggagcacagacagtccctgtacgttggccaggcctagctctaccaggctgagggtgacgatgatgctgtcgaagatattccagccctgctggaaatactcataggggtccattgcgatcagcttcagaaccatctctgctgtgaagatgcctgtgaagaccaggttgcccacagtgagcacgtggtcaaagtgctccgtcatagggtaatgttccatggccatgaagagggtgttgagcacgatgcagatggtgatgcccaggtccacgaacgggtccatgacgatcaggtggatgatgttcttgaacttcatccacggggcgcagcagtcccatatgagcactttgtgggcgcacttgtaccaccatggtgggcacttctggtgggcctcttccagttcttccatggcatcagagatgctgctgtctccgctgccgctctgccttggggctcccttctgccctggcgatgcgtccaggctgccattgcagtctttgccatgggctgggtccccatctgcctccccaccttccagagcttgggcggccttggccttctccagctcctcctggtgctttttgaacttctcgagcatctgctgaaactcctcctctttctccttatcctcggccagggtggcctcgttctgctcggcatacgccatggctaccacggccaggatcagattgatgaggtagaaggagcccaggaagatgatgaccacgaagaagatcatgtaggtcttgccagctgctcgaagggtcagctggaagaggttctcccaatagtcctgtgtcatgaggcggaagagagccaggaaggcccagctgaaggtgtcgtagctggtgtagccatagttggggttccgcccggtcttgatgcactcataaccctcggggcagtgcccagcatcactgctgttcccacagagtagggcatcgctggagccctccaggaagtagaagttcccttcatcattgatgtaggcgtcccagtcaaaggtatcgttggtggcccagcttgcatggctgttccacgtgtcgttggcataccatgagtcattgccataccacatctcattgccataccatgtgtcattgccgtaccacgtgtcattactgtaccacgtggtgttggtgtcgttgaacggcgggggccagcgcacacacttctgcctcaggtttcccatgaagagctgcagtcccaccagcgcaaagacgctcaggcagaagacagtgaggatcatcacatctgacagctttttcaccgactggatcagggcccccacaatcgtctttagccctgggatgaccgtgatggttttgagggcccgcagcacccggaaggtcctcaaggctgagatgttgcccaagtccacaaactctgtcaggtacgccatcatgatgacgctgaagtccagccagttccaggggtcccggaggaatgtgaagtcgtcgacacagaagcctcgggccagtatcttgatgagagactcaaaggtgtagatccccgtgaaggtgtactccacattcttggaccagggaggcgggtcactcatggtcatgaagacgcagttggtcaagatggtgatcatgatgaacatgctgaacagcgcgtggatgagcaccttgatggccccacgcctgaccaggctgaaggggctcagcaggtagagagcgggtgtggcggagaagcggaagatggccttgcccttgttgagtacgatgaaggtcttcttgtcactgtagtagggatccaggtcctccagggggatgccgatgacctccggtggggggtccccatagatcataggtaggttcttgccagcctccaagtcacttcgtggcttccgttcgggctcctcgatctccatctgcttgttccgctgcagccgggcttcctcctccaccgcccgctgttctatggctgccagggactcccgggtgaaggggcgcaagcaatcagggcccagaggcaccagggtgcacagagatggtctggccatcctcgcatcctgggctcagagaccaggagggtggtgagtggccaggggagctgcagtgcgcagccctggagtgctgggcggccgcccctccctgggccggccgtccactcctcacctcctgcttgcccagtggctgagccggggaggtgggcgtgcaggctctgtcgggactgggagatgtacctgcaaggcccaggtgctgctgctacacgggtgctgggcacagagcatcacccctggccccacaccacgctttccccagcagtggcaggggccacccccaggaccgacggcaaaccaaccagattctttgtggccttgggacttgggaccaacaccctcgtgccttcgactgcctcctgggctcaagctccaggaactgtgtggcttcagctattggacgggagcagagcggttgctgacaagcccagagcgccgtgcccacctcaggctggggctggaactctgggggacttggctggggggccgggccggcgaggacagctgctgccgctgatgtcacagggtcatgagtgaaacctgaggactgggccaatcttcaggtgggagcctcggtcacacttccctcgccgggtgtgctctggactcagcctgcttggctccggcctcaccgcttgggctccagcctcactgctctaggagtgacagactcccgggcacacgcacctcacactcgaatctccacacttattcccagaagcactcctgaggtacacactggctcacactcagtcactcgagtgcacactcacagacacacccacacaaaagctgtgctcccacaggctcagtcatgtgcaaatcacccttcatacgttcacgcagatgcttcctctgctgttatacccgttcacacacacgcctccagctcacatgcacaaacacacttgcacccacgcagcagtcttgtgcatatacacatggcttctagttgcgcccacaggcacacttgtgtccccagcaactcaaatgccatatcgcacagacacaagactcttactgagtgcctgcctgggtgtacac

SEQ ID NO: 341 - DNA, 1710 bp, Homo sapiens
  source 1..1710: mol_type = genomic DNA
atggccctcccgacaccctcggacagcaccctccccgcggaagcccggggacgaggacggcgacggagactcgtttggaccccgagccaaagcgaggccctgcgagcctgctttgagcggaacccgtacccgggcatcgccaccagagaacggctggcccaggccatcggcattccggagcccagggtccagatttggtttcagaatgagaggtcacgccagctgaggcagcaccggcgggaatctcggccctggcccgggagacgcggcccgccagaaggccggcgaaagcggaccgccgtcaccggatcccagaccgccctgctcctccgagcctttgagaaggatcgctttccaggcatcgccgcccgggaggagctggccagagagacgggcctcccggagtccaggattcagatctggtttcagaatcgaagggccaggcacccgggacagggtggcagggcgcccgcgcaggcaggcggcctgtgcagcgcggcccccggcgggggtcaccctgctccctcgtgggtcgccttcgcccacaccggcgcgtggggaacggggcttcccgcaccccacgtgccctgcgcgcctggggctctcccacagggggctttcgtgagccaggcagcgagggccgcccccgcgctgcagcccagccaggccgcgccggcagaggggatctcccaacctgccccggcgcgcggggatttcgcctacgccgccccggctcctccggacggggcgctctcccaccctcaggctcctcggtggcctccgcacccgggcaaaagccgggaggaccgggacccgcagcgcgacggcctgccgggcccctgcgcggtggcacagcctgggcccgctcaagcggggccgcagggccaaggggtgcttgcgccacccacgtcccaggggagtccgtggtggggctggggccggggtccccaggtcgccggggcggcgtgggaaccccaagccggggcagctccacctccccagcccgcgcccccggacgcctccgcctccgcgcggcaggggcagatgcaaggcatcccggcgccctcccaggcgctccaggagccggcgccctggtctgcactcccctgcggcctgctgctggatgagctcctggcgagcccggagtttctgcagcaggcgcaacctctcctagaaacggaggccccgggggagctggaggcctcggaagaggccgcctcgctggaagcacccctcagcgaggaagaataccgggctctgctggaggagctttaggacgcggggttgggacggggtcgggtggttcggggcagggcggtggcctctctttcgcggggaacacctggctggctacggaggggcgtgtctccgccccgccccctccaccgggctgaccggcctgggattcctgccttctaggtctaggcccggtgagagactccactccgcggagaactgcctttctttcctgggcatcccggggatcccagagccggcccaggtaccagcagacctgcgcgcagtgcgcaccccggctgacgtgcaagggagctcgctggcctctctgtgcccttgttcttccgtgaaattctggctgaatgtctccccccaccttccgacgctgtctaggcaaacctggattagagttacatctcctggatgattagttcagagatatattaaaatgccccctccctgtggatcctatag

SEQ ID NO: 342 - DNA, 1710 bp, Homo sapiens
  source 1..1710: mol_type = genomic DNA
ctataggatccacagggagggggcattttaatatatctctgaactaatcatccaggagatgtaactctaatccaggtttgcctagacagcgtcggaaggtggggggagacattcagccagaatttcacggaagaacaagggcacagagaggccagcgagctcccttgcacgtcagccggggtgcgcactgcgcgcaggtctgctggtacctgggccggctctgggatccccgggatgcccaggaaagaaaggcagttctccgcggagtggagtctctcaccgggcctagacctagaaggcaggaatcccaggccggtcagcccggtggagggggcggggcggagacacgcccctccgtagccagccaggtgttccccgcgaaagagaggccaccgccctgccccgaaccacccgaccccgtcccaaccccgcgtcctaaagctcctccagcagagcccggtattcttcctcgctgaggggtgcttccagcgaggcggcctcttccgaggcctccagctcccccggggcctccgtttctaggagaggttgcgcctgctgcagaaactccgggctcgccaggagctcatccagcagcaggccgcaggggagtgcagaccagggcgccggctcctggagcgcctgggagggcgccgggatgccttgcatctgcccctgccgcgcggaggcggaggcgtccgggggcgcgggctggggaggtggagctgccccggcttggggttcccacgccgccccggcgacctggggaccccggccccagccccaccacggactcccctgggacgtgggtggcgcaagcaccccttggccctgcggccccgcttgagcgggcccaggctgtgccaccgcgcaggggcccggcaggccgtcgcgctgcgggtcccggtcctcccggcttttgcccgggtgcggaggccaccgaggagcctgagggtgggagagcgccccgtccggaggagccggggcggcgtaggcgaaatccccgcgcgccggggcaggttgggagatcccctctgccggcgcggcctggctgggctgcagcgcgggggcggccctcgctgcctggctcacgaaagccccctgtgggagagccccaggcgcgcagggcacgtggggtgcgggaagccccgttccccacgcgccggtgtgggcgaaggcgacccacgagggagcagggtgacccccgccgggggccgcgctgcacaggccgcctgcctgcgcgggcgccctgccaccctgtcccgggtgcctggcccttcgattctgaaaccagatctgaatcctggactccgggaggcccgtctctctggccagctcctcccgggcggcgatgcctggaaagcgatccttctcaaaggctcggaggagcagggcggtctgggatccggtgacggcggtccgctttcgccggccttctggcgggccgcgtctcccgggccagggccgagattcccgccggtgctgcctcagctggcgtgacctctcattctgaaaccaaatctggaccctgggctccggaatgccgatggcctgggccagccgttctctggtggcgatgcccgggtacgggttccgctcaaagcaggctcgcagggcctcgctttggctcggggtccaaacgagtctccgtcgccgtcctcgtccccgggcttccgcggggagggtgctgtccgagggtgtcgggagggccat

SEQ ID NO: 343 - DNA, 2025 bp, Mus musculus
  source 1..2025: mol_type = genomic DNA
atggcagaagctggcagccctgttggtggcagtggtgtggcacgggaatcccggcggcgcaggaagacggtttggcaggcctggcaagagcaggccctgctatcaactttcaagaagaagagatacctgagcttcaaggagaggaaggagctggccaagcgaatgggggtctcagattgccgcatccgcgtgtggtttcagaaccgcaggaatcgcagtggagaggaggggcatgcctcaaagaggtccatcagaggctccaggcggctagcctcgccacagctccaggaagagcttggatccaggccacagggtagaggcatgcgctcatctggcagaaggcctcgcactcgactcacctcgctacagctcaggatcctagggcaagcctttgagaggaacccacgaccaggctttgctaccagggaggagctggcgcgtgacacagggttgcccgaggacacgatccacatatggtttcaaaaccgaagagctcggcggcgccacaggaggggcaggcccacagctcaagatcaagacttgctggcgtcacaagggtcggatggggcccctgcaggtccggaaggcagagagcgtgaaggtgcccaggagaacttgttgccacaggaagaagcaggaagtacgggcatggatacctcgagccctagcgacttgccctccttctgcggagagtcccagcctttccaagtggcacagccccgtggagcaggccaacaagaggcccccactcgagcaggcaacgcaggctctctggaacccctccttgatcagctgctggatgaagtccaagtagaagagcctgctccagcccctctgaatttggatggagaccctggtggcagggtgcatgaaggttcccaggagagcttttggccacaggaagaagcaggaagtacaggcatggatacttctagccccagcgactcaaactccttctgcagagagtcccagccttcccaagtggcacagccctgtggagcgggccaagaagatgcccgcactcaagcagacagcacaggccctctggaactcctcctccttgatcaactgctggacgaagtccaaaaggaagagcatgtgccagtcccactggattggggtagaaatcctggcagcagggagcatgaaggttcccaggacagcttactgcccctggaggaagcagtaaattcgggcatggatacctcgatccctagcatctggccaaccttctgcagagaatcccagcctccccaagtggcacagccctctggaccaggccaagcacaggcccccactcaaggtgggaacacggaccccctggagctcttcctctatcaactgttggatgaagtccaagtagaagagcatgctccagcccctctgaattgggatgtagatcctggtggcagggtgcatgaaggttcgtgggagagcttttggccacaggaagaagcaggaagtacaggcctggatacttcaagccccagcgactcaaactccttcttcagagagtccaagccttcccaagtggcacagcgccgtggagcgggccaagaagatgcccgcactcaagcagacagcacaggccctctggaactcctcctctttgatcaactgctggacgaagtccaaaaggaagagcatgtgccagccccactggattggggtagaaatcctggcagcatggagcatgaaggttcccaggacagcttactgcccctggaggaagcagcaaattcgggcagggatacctcgatccctagcatctggccagccttctgcagaaaatcccagcctccccaagtggcacagccctctggaccaggccaagcacaggcccccattcaaggtgggaacacggaccccctggagctcttccttgatcaactgctgaccgaagtccaacttgaggagcaggggcctgcccctgtgaatgtggaggaaacatgggagcaaatggacacaacacctgatctgcctctcacttcagaagaatatcagactcttctagatatgctctga

SEQ ID NO: 344 - DNA, 2025 bp, Mus musculus
  source 1..2025: mol_type = genomic DNA
tcagagcatatctagaagagtctgatattcttctgaagtgagaggcagatcaggtgttgtgtccatttgctcccatgtttcctccacattcacaggggcaggcccctgctcctcaagttggacttcggtcagcagttgatcaaggaagagctccagggggtccgtgttcccaccttgaatgggggcctgtgcttggcctggtccagagggctgtgccacttggggaggctgggattttctgcagaaggctggccagatgctagggatcgaggtatccctgcccgaatttgctgcttcctccaggggcagtaagctgtcctgggaaccttcatgctccatgctgccaggatttctaccccaatccagtggggctggcacatgctcttccttttggacttcgtccagcagttgatcaaagaggaggagttccagagggcctgtgctgtctgcttgagtgcgggcatcttcttggcccgctccacggcgctgtgccacttgggaaggcttggactctctgaagaaggagtttgagtcgctggggcttgaagtatccaggcctgtacttcctgcttcttcctgtggccaaaagctctcccacgaaccttcatgcaccctgccaccaggatctacatcccaattcagaggggctggagcatgctcttctacttggacttcatccaacagttgatagaggaagagctccagggggtccgtgttcccaccttgagtgggggcctgtgcttggcctggtccagagggctgtgccacttggggaggctgggattctctgcagaaggttggccagatgctagggatcgaggtatccatgcccgaatttactgcttcctccaggggcagtaagctgtcctgggaaccttcatgctccctgctgccaggatttctaccccaatccagtgggactggcacatgctcttccttttggacttcgtccagcagttgatcaaggaggaggagttccagagggcctgtgctgtctgcttgagtgcgggcatcttcttggcccgctccacagggctgtgccacttgggaaggctgggactctctgcagaaggagtttgagtcgctggggctagaagtatccatgcctgtacttcctgcttcttcctgtggccaaaagctctcctgggaaccttcatgcaccctgccaccagggtctccatccaaattcagaggggctggagcaggctcttctacttggacttcatccagcagctgatcaaggaggggttccagagagcctgcgttgcctgctcgagtgggggcctcttgttggcctgctccacggggctgtgccacttggaaaggctgggactctccgcagaaggagggcaagtcgctagggctcgaggtatccatgcccgtacttcctgcttcttcctgtggcaacaagttctcctgggcaccttcacgctctctgccttccggacctgcaggggccccatccgacccttgtgacgccagcaagtcttgatcttgagctgtgggcctgcccctcctgtggcgccgccgagctcttcggttttgaaaccatatgtggatcgtgtcctcgggcaaccctgtgtcacgcgccagctcctccctggtagcaaagcctggtcgtgggttcctctcaaaggcttgccctaggatcctgagctgtagcgaggtgagtcgagtgcgaggccttctgccagatgagcgcatgcctctaccctgtggcctggatccaagctcttcctggagctgtggcgaggctagccgcctggagcctctgatggacctctttgaggcatgcccctcctctccactgcgattcctgcggttctgaaaccacacgcggatgcggcaatctgagacccccattcgcttggccagctccttcctctccttgaagctcaggtatctcttcttcttgaaagttgatagcagggcctgctcttgccaggcctgccaaaccgtcttcctgcgccgccgggattcccgtgccacaccactgccaccaacagggctgccagcttctgccat

SEQ ID NO: 345 - DNA, 7257 bp, Rattus norvegicus
  source 1..7257: mol_type = genomic DNA
cccggctcccagcactcagggagggggcgcctccgctgagctcccgcccctaaaacttcccagccggcccacgtccgacccgccccctctgcatctgcgtctggtagcgggctgtcactctggctctatggcagagtggccccatgctctctgacttgtgactgactgttccttgttttcagagtcccagagtagcctggtctcaaacaatagatcctttctccgctaggcatctggtgcagcactcctgaagcaccgggttgggtaggggtttggatgccgggattggatgcaggattttttttttttttccgcagctaacgggccccaccggaggaggcattatttcccctccccccttccctctcccccctggattaaggcttgctagtactgagggtttatcctgcagctgggactgccagtcttttgtcaccaaggctgacaggcttacgagtggttggggctctgactcttctttccccctgcggcgattggggctgcagattgcttccgcctgtccttgccttagtttttctattttaccgtcctttttcatctgtcttgtcacctctttctgatgctcattctttctttccgtcccgaggatatggtctatcctttgttactctgactcttctatctcggagttgaatggaggaagcgtccaatccgccatcttaccccagaaagcaaacattttcccttctgatacagtggggaagtgggtatgtggagtggggagaggaggagactacgaagaggacgaggtagtatcagtgggacaccaagttgctgctggagagatgttctccacatccttcagtttcagatgcgagtgccctaattaggtaatttctgctgcttgactgaaacacccaggctcgatccctgattcctgtaattgcaattacatgggaggggaggaacggctactgggtctttccttgctttgccgttcgggtaggttcctgtgggtcgaggtagtatttttccacacacgtattttttttcattagtttagtcacgtggcttttttaaaactaacactcgtatcatacacagatatctgtaacacactccataaaggttaattaatgcaaccaattgcatctaggtacaggggctcccagggtttttgctttttttttttttaacttttgctttcttaattattttttaagtgaacacaacaatgtgttttatcccaagccacaagaatattatcttttgtcgacaaaatatatatatatatatatttttaacattacgtgcgtatgaaatgtaagttttggctacagtcagtagaaaattggcaatattaaggggtcagcaagtaatctttaagacattaatgtctgactataatataaaacatactagaaaactcaacggtagaacagaccccctgtggtaaagccttagctttcgtaggattgctgtgattgaatggatcacctctacaggtttggtacgcacctagaaggaaaaagcctgacacatctgtgagcgattctctcgattaggttactaaagcgagaaggcccacttcaagcagggtactccattcccgggacatagtgcttgggttctggactgcgttaaaacggagaagtggctccgagcagcggcgcccatggctgtcttcctcctgacttcggaaacagtatgaccagctgcttcaggctcctgctgccccgacatccctgcatggtggactgtgccctggaactgtgagccaaaatgaactcttcctttcttaaattgcttgcgtcagggtagatttatcacacccagaaaggtaactaagtttgtttctcaaatatcccgagcctattagactcaccgaagcaccaactgtctctttcttctttagcagcagagacaactgaaattattcctcactagcagttttaattcaactgttgctttcaacagaggcacaatagccatgcaaacttggcatgcctatgtctcttctaagctattcatagatgcatataaaaacagcaagatcatagttctatctgtctatacttctcccctgcgaacacatttactcaggaggacaaggctcttgggtgaggttcattctttccttaccaaacgtagaatgtggctatgtaaagttatttattctttcattcactcattcctttgcttgcgtgtgtatggggtggggcacattggtgctatggcatctgtaaatgtcagaggacctcttgtgggagttgcctctctcagattgtcaggatttagcagcaagcaccttgacctgctcagccacctcgcaggcctctggagttatctgttattaatatacggtgtatcgctagagaaggtaatggaagagtctttcaagtctgcatataagcatgctcataaagcacgtatatataatgtgcacacatatgcacatgtatagcagcaggacaggctaagaaaggagagggaagcaggctgggacttggccagagccacagtgctggtggctctacatccttgaccctctccaggtgaggtcttcagctatactgtttccccttcctacttagacggttaaccccaccctactggattaaggaacctagttcttctctttaatcacatttcccaagcccattcacggcacacccacactgaggttgagtcaataccccagagagcttaggctggcttcttgggtgtacaatcaggtcagcaagggcagaacaaaagcagaaatgtgttctagcagaagatgagaaaaagttgaaacataaggaaaaaggggagactcctagtatattacacaatatggccaagtccaggtgattaagagataagacaaccggaaaggaataggagggcccaggactgcagctcagtgacagaagacttccttacccagcctgtctgagactggcttccatcccaagcacagcaaacaatggggagggggaggaggaggaggagatcaaggattatagaaataacatgcaggtacaacctagagagctcagaagtaaaacatggagaggtgttatggaggaggcagaattacccagaagaatctgtactttcctccaaattcagcttctcctttgtggtaattacttcaaattcctcttaggtggctgttttagtcaaattttacattgctctaacaagtgcccccacagagacagcttaagagaggaagaattcatttcttgctcactagttcagagctctatctgtgatcatggggggtccattgctgtgggcccaaggtcaggcagaatatcatggcattgtggtagtgagtctgaggttcatttttcttggatatgtagaagagggagagagggagagagggagagagggagagagggagagagggagggagggagagagggagagagggagggagaggaagagggagagggagagggagagggagagggagagggagagggagagggagagggagagggagagggagagggagaaaagaatgcattattccagggccaagacctgtcctttaaagtcacacagcatccatagttcattgtctgtcaggagtcctaaacttcagtccatcagagggttaaaccagtgattagctcaactctcttatgatctaatcttcactggagacaccttagacacacccagaggccggtttcactaatctcccaggaacctcttaatccaatcaagttgactgtcaagattggccagtgctgtcgcatatttaatgaagggattaaacaacaggtatttaagggatgggtgggccactctgggctttgctacatcctgtgtctctgtgaatagctctcttgggcctcgtgggatccaggtggctgcagcatggatctgaactgcactggtggcctactggaaaaagaagcccggagaaggaggattattctaaaccagagtcaaaaggacacccttcgtgtgtggtttgaaaagaatcccaatcctgacttagctaccaggggacatctggctaagaaactcggcatctctgagtctcaaataatgacttggtttcagaagcacagaaaaatacggaaacaagtagagtttgaatgttgctctgaagaaagccaagagcaaggacaggataaacccagagttaaagaagctgggaggagcaggacgcatttcacaaagtttcagattgatattctaatcgaagcttttgagaagaatcgattcccagggatcgttaccagggaaaaactggctcaagaaacaggcatcccagaatccagaattcatatatggtttcagaaccggagagcacggcacccagacccaaaacagggtactcgggcaacttctcatccgcctgagagcagccagtgccctgcccagaagactactggtcaacttgctccttccaaagatcccaccagcagctgttccgttatattgcctctctctccaccccacacgccaaatggtcctttggatctctctaggggccgtcagaagcagttaccagagaccacagtactacagccctcccaggttgtacagcgaaggggcgatgatcaaaatccctcactgtttattgatcacttatcagaggtaaaaagtccaggagagaaggagggcttccatactcaggctcctttacagctcccaatccaaaaaagagggcataatcccagtgagaacagtggtttgtctgtaccgcccttagaagattctactcaggtttcagctgtcaatcaacacttccggaaaccggaccaaaaagatctcgcctttctccaacactgggacgaatggttccaatccatgcttgccgagtggatgcctgacaaaggatactgggccgtgaaaactgacctgcacccgtggcaggcacagctgctgcagctcctctatgtgtctgagcagacagaccaaactccacagcagccggtttaagcctcaagcctttttcgttaattcctcttggacatggattttctattctttctgcatccaagtccccaacatgggttcctgcacatggctcggggagcttctcagaagagtttcaggttcttcttcacatggggagaagtacatcagtgagtcagattcaggagaaacctgtccttgggcatgaaatcagtggatttattgaagcctaggtatgcagaattacagaacaagttcaagttagtatatgcataaacctcatggacacacaaagggagccattatttttattcttaatttattcttgagatctgatcttgctgttattccggttggccttgagctcctgcgcttaagtcagtctcctgcctccgcctcctcaagagtcagcactacaaatacatccatgtccaccttggtctcaattttaattatggtttaaaaaaaaatcatatagaaaagtcacggtttcatttaccatctgttgtgtttttaatctgaagtgtctctcacaagttcatgctttgaaatcttgcctctcagccgatggcggtttgaatctgtggagtttttacatgggtcctgacaggcagacataggccagggtgataccttgaaagttatacccagggctggggatttagctcagtggtagagcgcttgcctagcaaacacaaggccctgggtacggtccccagctctgaaaaaaatagaaaaaagaaagttatacccaccacgtgaatagcatgtaccacacactcccgaagtgtagacagattcacatcaccatgcctctctgtgatgatggactgaaacattctgaaaagaatcccaataaacactcttctgtcaagttgcttctggtagatgttttggtcacagtgagttagaagtaactaatacttactggctaccagcctaaccgtcactcagtgtgtggcacggtagtgttaactatgtgcttattcctgacggtatgtacctgtaactttcatcttgcaacctgaaactccacagtccttgagtcacttgaacgaccatagcaatgccacagacggaacgtcccaagtcatagaaaatgtctattttcacagctgtagagggcagaagcccaattggcaggtgcctgcagttctgggggctcttcattgcttggggagaaatagagaaactgttctctattttcaaaagatatttatttattttgtatgtatgtatgtatgaatgcatgtgtatatgtatgtctgtatgcatgcatgtatgtatgtatgcatgtgtgtattatgtatgcatgtgtgtatgtatgtatatgtgtctgggtggcagtggttatagtcccatgaaggcaagtgcttgtggaggcctggggttttaggtgctctgaatctagacctgtgagccacctgacagagatgttgaaactatactcaagttctctggaagaatatttgctcctaatcactgagccatctcgctagtccatccaccgtattttgtgaggcagagtctctcgctgaagctagagcttgctgattgagagactgtctagccaggcagcaccagggattttcctcactctggtctcctcagctgaattccctgggtttcagggatgctctcagcatcggcccctgggtttttaacatagattctggagatgccaagtcaggtcctcaggcttgcagagcaagcacgttaccaagggaaccaattcctcagccctactgctcctgtgagcttgactactctaggtaccgtgggtaggtgaattcgtacaatatttgcttttgtacttggcttatttttattgtcataatgtcttcatggtgtgttattgtgtgacttgtgttaggattttcttttctttttgaagataaataatttacattatatgtggggtccacactttgcccacctccagtggacactgggtagcccctacctcttagacagaggaaatggtgttacagcgaatggcggcatgaagataatataaagatagaattcttttgcacacttcattgagaccttcttcccaagtgattctaggttgggttatgttgatgatcaatgccaacttcagagctggatcctgatgtctgcttaagctgttatcctcttctccatagtaactccatccctttccacttcccacaaagcacagggccgtttgttgacattctcaccagggcctcttagttctccttgctttgataatggctgttctaatgggtgagaggtggggtttggtaatggtgctgttttcctctccatgtaaccgcagatttgctctccttgttgaattctaaatgcttttaaaatacactcttcttttgtgtgtgtatttat

SEQ ID NO: 346 - DNA, 7257 bp, Rattus norvegicus
  source 1..7257: mol_type = genomic DNA
ataaatacacacacaaaagaagagtgtattttaaaagcatttagaattcaacaaggagagcaaatctgcggttacatggagaggaaaacagcaccattaccaaaccccacctctcacccattagaacagccattatcaaagcaaggagaactaagaggccctggtgagaatgtcaacaaacggccctgtgctttgtgggaagtggaaagggatggagttactatggagaagaggataacagcttaagcagacatcaggatccagctctgaagttggcattgatcatcaacataacccaacctagaatcacttgggaagaaggtctcaatgaagtgtgcaaaagaattctatctttatattatcttcatgccgccattcgctgtaacaccatttcctctgtctaagaggtaggggctacccagtgtccactggaggtgggcaaagtgtggaccccacatataatgtaaattatttatcttcaaaaagaaaagaaaatcctaacacaagtcacacaataacacaccatgaagacattatgacaataaaaataagccaagtacaaaagcaaatattgtacgaattcacctacccacggtacctagagtagtcaagctcacaggagcagtagggctgaggaattggttcccttggtaacgtgcttgctctgcaagcctgaggacctgacttggcatctccagaatctatgttaaaaacccaggggccgatgctgagagcatccctgaaacccagggaattcagctgaggagaccagagtgaggaaaatccctggtgctgcctggctagacagtctctcaatcagcaagctctagcttcagcgagagactctgcctcacaaaatacggtggatggactagcgagatggctcagtgattaggagcaaatattcttccagagaacttgagtatagtttcaacatctctgtcaggtggctcacaggtctagattcagagcacctaaaaccccaggcctccacaagcacttgccttcatgggactataaccactgccacccagacacatatacatacatacacacatgcatacataatacacacatgcatacatacatacatgcatgcatacagacatacatatacacatgcattcatacatacatacatacaaaataaataaatatcttttgaaaatagagaacagtttctctatttctccccaagcaatgaagagcccccagaactgcaggcacctgccaattgggcttctgccctctacagctgtgaaaatagacattttctatgacttgggacgttccgtctgtggcattgctatggtcgttcaagtgactcaaggactgtggagtttcaggttgcaagatgaaagttacaggtacataccgtcaggaataagcacatagttaacactaccgtgccacacactgagtgacggttaggctggtagccagtaagtattagttacttctaactcactgtgaccaaaacatctaccagaagcaacttgacagaagagtgtttattgggattcttttcagaatgtttcagtccatcatcacagagaggcatggtgatgtgaatctgtctacacttcgggagtgtgtggtacatgctattcacgtggtgggtataactttcttttttctatttttttcagagctggggaccgtacccagggccttgtgtttgctaggcaagcgctctaccactgagctaaatccccagccctgggtataactttcaaggtatcaccctggcctatgtctgcctgtcaggacccatgtaaaaactccacagattcaaaccgccatcggctgagaggcaagatttcaaagcatgaacttgtgagagacacttcagattaaaaacacaacagatggtaaatgaaaccgtgacttttctatatgatttttttttaaaccataattaaaattgagaccaaggtggacatggatgtatttgtagtgctgactcttgaggaggcggaggcaggagactgacttaagcgcaggagctcaaggccaaccggaataacagcaagatcagatctcaagaataaattaagaataaaaataatggctccctttgtgtgtccatgaggtttatgcatatactaacttgaacttgttctgtaattctgcatacctaggcttcaataaatccactgatttcatgcccaaggacaggtttctcctgaatctgactcactgatgtacttctccccatgtgaagaagaacctgaaactcttctgagaagctccccgagccatgtgcaggaacccatgttggggacttggatgcagaaagaatagaaaatccatgtccaagaggaattaacgaaaaaggcttgaggcttaaaccggctgctgtggagtttggtctgtctgctcagacacatagaggagctgcagcagctgtgcctgccacgggtgcaggtcagttttcacggcccagtatcctttgtcaggcatccactcggcaagcatggattggaaccattcgtcccagtgttggagaaaggcgagatctttttggtccggtttccggaagtgttgattgacagctgaaacctgagtagaatcttctaagggcggtacagacaaaccactgttctcactgggattatgccctcttttttggattgggagctgtaaaggagcctgagtatggaagccctccttctctcctggactttttacctctgataagtgatcaataaacagtgagggattttgatcatcgccccttcgctgtacaacctgggagggctgtagtactgtggtctctggtaactgcttctgacggcccctagagagatccaaaggaccatttggcgtgtggggtggagagagaggcaatataacggaacagctgctggtgggatctttggaaggagcaagttgaccagtagtcttctgggcagggcactggctgctctcaggcggatgagaagttgcccgagtaccctgttttgggtctgggtgccgtgctctccggttctgaaaccatatatgaattctggattctgggatgcctgtttcttgagccagtttttccctggtaacgatccctgggaatcgattcttctcaaaagcttcgattagaatatcaatctgaaactttgtgaaatgcgtcctgctcctcccagcttctttaactctgggtttatcctgtccttgctcttggctttcttcagagcaacattcaaactctacttgtttccgtatttttctgtgcttctgaaaccaagtcattatttgagactcagagatgccgagtttcttagccagatgtcccctggtagctaagtcaggattgggattcttttcaaaccacacacgaagggtgtccttttgactctggtttagaataatcctccttctccgggcttctttttccagtaggccaccagtgcagttcagatccatgctgcagccacctggatcccacgaggcccaagagagctattcacagagacacaggatgtagcaaagcccagagtggcccacccatcccttaaatacctgttgtttaatcccttcattaaatatgcgacagcactggccaatcttgacagtcaacttgattggattaagaggttcctgggagattagtgaaaccggcctctgggtgtgtctaaggtgtctccagtgaagattagatcataagagagttgagctaatcactggtttaaccctctgatggactgaagtttaggactcctgacagacaatgaactatggatgctgtgtgactttaaaggacaggtcttggccctggaataatgcattcttttctccctctccctctccctctccctctccctctccctctccctctccctctccctctccctctccctctccctcttcctctccctccctctctccctctctccctccctccctctctccctctctccctctctccctctctccctctctccctcttctacatatccaagaaaaatgaacctcagactcactaccacaatgccatgatattctgcctgaccttgggcccacagcaatggaccccccatgatcacagatagagctctgaactagtgagcaagaaatgaattcttcctctcttaagctgtctctgtgggggcacttgttagagcaatgtaaaatttgactaaaacagccacctaagaggaatttgaagtaattaccacaaaggagaagctgaatttggaggaaagtacagattcttctgggtaattctgcctcctccataacacctctccatgttttacttctgagctctctaggttgtacctgcatgttatttctataatccttgatctcctcctcctcctccccctccccattgtttgctgtgcttgggatggaagccagtctcagacaggctgggtaaggaagtcttctgtcactgagctgcagtcctgggccctcctattcctttccggttgtcttatctcttaatcacctggacttggccatattgtgtaatatactaggagtctcccctttttccttatgtttcaactttttctcatcttctgctagaacacatttctgcttttgttctgcccttgctgacctgattgtacacccaagaagccagcctaagctctctggggtattgactcaacctcagtgtgggtgtgccgtgaatgggcttgggaaatgtgattaaagagaagaactaggttccttaatccagtagggtggggttaaccgtctaagtaggaaggggaaacagtatagctgaagacctcacctggagagggtcaaggatgtagagccaccagcactgtggctctggccaagtcccagcctgcttccctctcctttcttagcctgtcctgctgctatacatgtgcatatgtgtgcacattatatatacgtgctttatgagcatgcttatatgcagacttgaaagactcttccattaccttctctagcgatacaccgtatattaataacagataactccagaggcctgcgaggtggctgagcaggtcaaggtgcttgctgctaaatcctgacaatctgagagaggcaactcccacaagaggtcctctgacatttacagatgccatagcaccaatgtgccccaccccatacacacgcaagcaaaggaatgagtgaatgaaagaataaataactttacatagccacattctacgtttggtaaggaaagaatgaacctcacccaagagccttgtcctcctgagtaaatgtgttcgcaggggagaagtatagacagatagaactatgatcttgctgtttttatatgcatctatgaatagcttagaagagacataggcatgccaagtttgcatggctattgtgcctctgttgaaagcaacagttgaattaaaactgctagtgaggaataatttcagttgtctctgctgctaaagaagaaagagacagttggtgcttcggtgagtctaataggctcgggatatttgagaaacaaacttagttacctttctgggtgtgataaatctaccctgacgcaagcaatttaagaaaggaagagttcattttggctcacagttccagggcacagtccaccatgcagggatgtcggggcagcaggagcctgaagcagctggtcatactgtttccgaagtcaggaggaagacagccatgggcgccgctgctcggagccacttctccgttttaacgcagtccagaacccaagcactatgtcccgggaatggagtaccctgcttgaagtgggccttctcgctttagtaacctaatcgagagaatcgctcacagatgtgtcaggctttttccttctaggtgcgtaccaaacctgtagaggtgatccattcaatcacagcaatcctacgaaagctaaggctttaccacagggggtctgttctaccgttgagttttctagtatgttttatattatagtcagacattaatgtcttaaagattacttgctgaccccttaatattgccaattttctactgactgtagccaaaacttacatttcatacgcacgtaatgttaaaaatatatatatatatatattttgtcgacaaaagataatattcttgtggcttgggataaaacacattgttgtgttcacttaaaaaataattaagaaagcaaaagttaaaaaaaaaaaaagcaaaaaccctgggagcccctgtacctagatgcaattggttgcattaattaacctttatggagtgtgttacagatatctgtgtatgatacgagtgttagttttaaaaaagccacgtgactaaactaatgaaaaaaaatacgtgtgtggaaaaatactacctcgacccacaggaacctacccgaacggcaaagcaaggaaagacccagtagccgttcctcccctcccatgtaattgcaattacaggaatcagggatcgagcctgggtgtttcagtcaagcagcagaaattacctaattagggcactcgcatctgaaactgaaggatgtggagaacatctctccagcagcaacttggtgtcccactgatactacctcgtcctcttcgtagtctcctcctctccccactccacatacccacttccccactgtatcagaagggaaaatgtttgctttctggggtaagatggcggattggacgcttcctccattcaactccgagatagaagagtcagagtaacaaaggatagaccatatcctcgggacggaaagaaagaatgagcatcagaaagaggtgacaagacagatgaaaaaggacggtaaaatagaaaaactaaggcaaggacaggcggaagcaatctgcagccccaatcgccgcagggggaaagaagagtcagagccccaaccactcgtaagcctgtcagccttggtgacaaaagactggcagtcccagctgcaggataaaccctcagtactagcaagccttaatccaggggggagagggaaggggggaggggaaataatgcctcctccggtggggcccgttagctgcggaaaaaaaaaaaaaatcctgcatccaatcccggcatccaaacccctacccaacccggtgcttcaggagtgctgcaccagatgcctagcggagaaaggatctattgtttgagaccaggctactctgggactctgaaaacaaggaacagtcagtcacaagtcagagagcatggggccactctgccatagagccagagtgacagcccgctaccagacgcagatgcagagggggcgggtcggacgtgggccggctgggaagttttaggggcgggagctcagcggaggcgccccctccctgagtgctgggagccggg

SEQ ID NO: 347 - DNA, 1290 bp, Macaca mulatta
  misc_feature 691..692: note = n is a, c, g, or t
  misc_feature 760: note = n is a, c, g, or t
  misc_feature 1000..1001: note = n is a, c, g, or t
  misc_feature 1156: note = n is a, c, g, or t
  source 1..1290: mol_type = genomic DNA
caaggatctgctacttctcagattcttccacatgaccagcactgacaactgtccgcgaaattccggccaggtctcccctccatggctctcccgacaccttccgacagcacccttcccgcggaagcccgaggacgaggacggcgaaggagactcgtttggaccccgagccaaagggaggccctgcgagcctgctttgagcggaaccagtacccgggcatcgccaccagagaacagctggcccaggccatcggcattccagagcccagggtccagatctggtttcagaatgagagatcacgccagctgaggcagcacctgcgggaatctcggccctggcccgggaaacgaggccagcaagaaggcaggcgaaagcggaccgccgtcacccggtcccagactaccctgctcctcagagccttccggcagcgtcgctttccaggcatcgccaccagggaagaactggccagagagacgggcctcccggagtcccgcattcagatttggtttcagaaccggagggccaggcatctgggccagggtagcagggcaccggcgcacgcaggcggcctgtgcaaggcggcccccggggggtgtccccccgttccctcgtcagtagccttcacccacctcggggcgtggggaacggggcttcccgcactccacatgccctgcgcgcctggggctcaggggnnacaggggcccctgctccagcccagccaggctgcgcaggcagcaggaatctctgcacctgcccctgcanctcggggctttgtgttgggtgccctggctcctctggaagtgggactgtcccaccctccggctcctcggtggcctctgcaccgcaacaaatgccagaaagaccaggacccgcagcgcggtggcctgctgggtgcgtgctcggtgggacagcctgggcccgctcgagctgagtcacaggaccaaggtgtgcttgagccacccacgtcccaggggagtcgctggtggggctggagccccaggnntcgctgcagggcagctccacctcctgagccccagaccccggacgcctccgcgtgtcaggcacagatgcaagccatccaggcgccctcccaaccgctccaaaagcttcagcgctagtctgcactcccctccagcctgttagatgagctcctgtcgncagagtttcagcaaaatgcacaacctttcctagatccggcgccactgggggagctgaaggacgtggaagagcccgctccgctggaatcactcctcaaccaggaggcacaccgggctctgctggaggagctttag

SEQ ID NO: 348 - DNA, 1290 bp, Macaca mulatta
  misc_feature 135: note = n is a, c, g, or t
  misc_feature 290..291: note = n is a, c, g, or t
  misc_feature 531: note = n is a, c, g, or t
  misc_feature 599..600: note = n is a, c, g, or t
  source 1..1290: mol_type = genomic DNA
ctaaagctcctccagcagagcccggtgtgcctcctggttgaggagtgattccagcggagcgggctcttccacgtccttcagctcccccagtggcgccggatctaggaaaggttgtgcattttgctgaaactctgncgacaggagctcatctaacaggctggaggggagtgcagactagcgctgaagcttttggagcggttgggagggcgcctggatggcttgcatctgtgcctgacacgcggaggcgtccggggtctggggctcaggaggtggagctgccctgcagcganncctggggctccagccccaccagcgactcccctgggacgtgggtggctcaagcacaccttggtcctgtgactcagctcgagcgggcccaggctgtcccaccgagcacgcacccagcaggccaccgcgctgcgggtcctggtctttctggcatttgttgcggtgcagaggccaccgaggagccggagggtgggacagtcccacttccagaggagccagggcacccaacacaaagccccgagntgcaggggcaggtgcagagattcctgctgcctgcgcagcctggctgggctggagcaggggcccctgtnncccctgagccccaggcgcgcagggcatgtggagtgcgggaagccccgttccccacgccccgaggtgggtgaaggctactgacgagggaacggggggacaccccccgggggccgccttgcacaggccgcctgcgtgcgccggtgccctgctaccctggcccagatgcctggccctccggttctgaaaccaaatctgaatgcgggactccgggaggcccgtctctctggccagttcttccctggtggcgatgcctggaaagcgacgctgccggaaggctctgaggagcagggtagtctgggaccgggtgacggcggtccgctttcgcctgccttcttgctggcctcgtttcccgggccagggccgagattcccgcaggtgctgcctcagctggcgtgatctctcattctgaaaccagatctggaccctgggctctggaatgccgatggcctgggccagctgttctctggtggcgatgcccgggtactggttccgctcaaagcaggctcgcagggcctccctttggctcggggtccaaacgagtctccttcgccgtcctcgtcctcgggcttccgcgggaagggtgctgtcggaaggtgtcgggagagccatggaggggagacctggccggaatttcgcggacagttgtcagtgctggtcatgtggaagaatctgagaagtagcagatccttg

SEQ ID NO: 349 - DNA, 2989 bp, Homo sapiens
  source 1..2989: mol_type = genomic DNA
ataaactgggtgacagagtcagaaaactccccagctaaacacccgtaagacttcatacaacacaatactctatactgtgatgatcacagctgccaaggctacctaaaagaagacagttatctcatatttggctgccagctttttatctttctctcgaccacttaaaacttcagacttcctgtcctgctggtatcatggagaaagtccaatacctcactcgctcagctataagaagagcctcaaccattgaaatgcctcaacaagcacgtcaaaagctacagaatctatttatcaatttctgtctcatcttaatatgtctcttgctgatctgtatcatcgtgatgcttctctgaagttctgctacaacctctagatctgcagcttgccacatcagcttaaaatctgtcatcccatgcagacaggaaaacaatattgtataacagaccacttcctgagtagaagagtttctttgtgaaaaggtcaagattaagactaaaacttattgttaccatatgtattcatctgttggatcttgtaaacatgaaaagggctttattttcaaaaattaacttcaaaataagtgtataaaatgcaactgttgatttcctcaacatggctcacaaatttctatcccaaatcttttctgaagatgaagagtttagttttaaaactgcactgccaacaagttcacttcatatataaagcattatttttactcttttgaggtgaatataatttatattacaatgtaaaagcttctttaatactaagtatttttcaggtcttcaccaagtatcaaagtaataacacaaatgaagtgtcattattcaaaatagtccactgactcctcacatctgttatcttattataaagaactatttgtagtaactatcagaatctacattctaaaacagaaattgtattttttctatgccacattaacatcttttaaagttgatgagaatcaagtatggaaaagtaaggccatactcttacataataaaattccttttaagtaattttttcaaagaatcacagaattctagtacatgtaggtaaatcataaatctgttctaagacatatgatcaacagatgagaactggtggttaatatgtgacagtgagattagtcatatcactaatatactaacaacagaatctaatcttcatttaaggcactgtagtgaattatctgagctagagttacctagcttaccatactatatctttggaatcatgaaaccttaagacttcagaatgattttgcaggttgtcttccattccagcctaacatccaatgcaggcaaggaaaataaaagatttccagtgacagaaaaatatattatctcaagtattttttaaaaatatatgaattctctctccaaatattaactaattattagattatattttgaaatgaacttgttggcccatctattacatctacagctgacccttgaacatgggggttaggggagctgacaattcgtgggtccgcaaaatcttaactacctaatagcctactattgaccataaaccttactgataacataaacagtaaattaacacatattttgcgtgttatatgtattatacactatattcctacaataaagtaagctagagaaaatgttatttagaaaatcataagaaagagaaaatatatttactattcattaaatggaagtgggtcaacataaaagtcttcattctcattgtcttcacattgagtaggcagaggaggagaaagatggggaggaagagaaggcgttggtcttgcagtcttgtcttaggggtgtggggagtgggggaaagaatattcatgtataagtggacccttgcaattcaagcccttgttgttcaagggtcaactgtaataggatatagctatttttcttcctctatcaaccaaatggtaagcatctattttgcagtccactctactgagctaaattatagatccagctatgctatttataattattttcttgatgaataaattttcaatttctcctctgaccatttcagaacatcttccaataactcataaaacaactgaagtaaaattgagtgctggaaaatatattcaccaaactttggtaatttaagttgactaaagtttaaaattaagtctaaaatagtttacacctatactgcataatccaacaattttaatttcagttgaagacatgttactaatataactattattaaaagagtagaggatgtgtaattaaccatatcttctaaaacatggttactaaaagaatatgtaacatcaatattgaccttggtttcttacacaagtgttgctaactcaatagtgaaggagacactattaaattttctgaacccatgagagatactagagatggggagtggaaagtgtttggttcagggatatctgaagaacagaagggcagagatttcttaagtgacgcctcatctacaagctggaaattcctaaaaacaagtagaaagcttataaacaacaggtgatacactcacctcactggttttagtaaattaccaatacagaaagtatccctagtcttaaaaacaagtggaaaatttgaactgattagtcatattcctttgattacactgtttgttacaatatttttctcagtaaacagaaataactaatttttttgttcttcattctttgatagaaattaaaatcttattctgtgaggattacagaatactataactcaaattataaagtagaataaactctttaaataattattcttcatcataaagtgtaaagaataagatataagaaaacaatttatttttaaaatttaatatactaaatgctcaaatatgttctactatagaataagttcttatcttaatttacagggcactaaaaacaattttaaaatgcttaatgttgccttttatattttaattggttaagaatatatatttgtttaatgcaaatcagaatcactatattaaaatgaatgttcttgaaaactca

SEQ ID NO: 350 - DNA, 2989 bp, Homo sapiens
  source 1..2989: mol_type = genomic DNA
tgagttttcaagaacattcattttaatatagtgattctgatttgcattaaacaaatatatattcttaaccaattaaaatataaaaggcaacattaagcattttaaaattgtttttagtgccctgtaaattaagataagaacttattctatagtagaacatatttgagcatttagtatattaaattttaaaaataaattgttttcttatatcttattctttacactttatgatgaagaataattatttaaagagtttattctactttataatttgagttatagtattctgtaatcctcacagaataagattttaatttctatcaaagaatgaagaacaaaaaaattagttatttctgtttactgagaaaaatattgtaacaaacagtgtaatcaaaggaatatgactaatcagttcaaattttccacttgtttttaagactagggatactttctgtattggtaatttactaaaaccagtgaggtgagtgtatcacctgttgtttataagctttctacttgtttttaggaatttccagcttgtagatgaggcgtcacttaagaaatctctgcccttctgttcttcagatatccctgaaccaaacactttccactccccatctctagtatctctcatgggttcagaaaatttaatagtgtctccttcactattgagttagcaacacttgtgtaagaaaccaaggtcaatattgatgttacatattcttttagtaaccatgttttagaagatatggttaattacacatcctctactcttttaataatagttatattagtaacatgtcttcaactgaaattaaaattgttggattatgcagtataggtgtaaactattttagacttaattttaaactttagtcaacttaaattaccaaagtttggtgaatatattttccagcactcaattttacttcagttgttttatgagttattggaagatgttctgaaatggtcagaggagaaattgaaaatttattcatcaagaaaataattataaatagcatagctggatctataatttagctcagtagagtggactgcaaaatagatgcttaccatttggttgatagaggaagaaaaatagctatatcctattacagttgacccttgaacaacaagggcttgaattgcaagggtccacttatacatgaatattctttcccccactccccacacccctaagacaagactgcaagaccaacgccttctcttcctccccatctttctcctcctctgcctactcaatgtgaagacaatgagaatgaagacttttatgttgacccacttccatttaatgaatagtaaatatattttctctttcttatgattttctaaataacattttctctagcttactttattgtaggaatatagtgtataatacatataacacgcaaaatatgtgttaatttactgtttatgttatcagtaaggtttatggtcaatagtaggctattaggtagttaagattttgcggacccacgaattgtcagctcccctaacccccatgttcaagggtcagctgtagatgtaatagatgggccaacaagttcatttcaaaatataatctaataattagttaatatttggagagagaattcatatatttttaaaaaatacttgagataatatatttttctgtcactggaaatcttttattttccttgcctgcattggatgttaggctggaatggaagacaacctgcaaaatcattctgaagtcttaaggtttcatgattccaaagatatagtatggtaagctaggtaactctagctcagataattcactacagtgccttaaatgaagattagattctgttgttagtatattagtgatatgactaatctcactgtcacatattaaccaccagttctcatctgttgatcatatgtcttagaacagatttatgatttacctacatgtactagaattctgtgattctttgaaaaaattacttaaaaggaattttattatgtaagagtatggccttacttttccatacttgattctcatcaactttaaaagatgttaatgtggcatagaaaaaatacaatttctgttttagaatgtagattctgatagttactacaaatagttctttataataagataacagatgtgaggagtcagtggactattttgaataatgacacttcatttgtgttattactttgatacttggtgaagacctgaaaaatacttagtattaaagaagcttttacattgtaatataaattatattcacctcaaaagagtaaaaataatgctttatatatgaagtgaacttgttggcagtgcagttttaaaactaaactcttcatcttcagaaaagatttgggatagaaatttgtgagccatgttgaggaaatcaacagttgcattttatacacttattttgaagttaatttttgaaaataaagcccttttcatgtttacaagatccaacagatgaatacatatggtaacaataagttttagtcttaatcttgaccttttcacaaagaaactcttctactcaggaagtggtctgttatacaatattgttttcctgtctgcatgggatgacagattttaagctgatgtggcaagctgcagatctagaggttgtagcagaacttcagagaagcatcacgatgatacagatcagcaagagacatattaagatgagacagaaattgataaatagattctgtagcttttgacgtgcttgttgaggcatttcaatggttgaggctcttcttatagctgagcgagtgaggtattggactttctccatgataccagcaggacaggaagtctgaagttttaagtggtcgagagaaagataaaaagctggcagccaaatatgagataactgtcttcttttaggtagccttggcagctgtgatcatcacagtatagagtattgtgttgtatgaagtcttacgggtgtttagctggggagttttctgactctgtcacccagtttat

SEQ ID NO: 351 - DNA, 2480 bp, Mus musculus
  source 1..2480: mol_type = genomic DNA
acctactgcagctgctcccataaacctgggaacagaaaactgcccagctaagctcccataagacttcatacagcttcatgctctgcactgtgacgatcaccgaagccaagacagaagcaggtgaagagactctgacgcttcagtctgcacaacaaagctgggaccaaaggaacttgccagcttacaattctgcagtcttaaaggggcttcatcccagtgagctttcctgcgtaacaggtctcctaaaagaagacagctcacatttggctgcctgttgtcaactttttatctttctcttgaccacttagaaaaacttgtctccctacttttgccttcctggcataatggaaaaagtgcaatacctcactcgctcggctatcaggagagcctccactattgaaatgcctcagcaagcacgtcagaatctccagaacctatttatcaatttctgcctcatcttgatatgtctgctgctgatctgcatcattgtgatgcttctgtgaagagctgccgccactccagacctgcaacatgccaactcagcttaaagccgagcactccgtcatgggggaagcaacgcaccgctgccttccggctgagaacagctttgtgagggtcacgattaagagtgaaactaattgttagccagtgtattcatctgctggatcttgtaaacaaactttacagtggctaagtgtgcataatgtagctgccaatttcctcaacatggctcataaatttctttcctaaatatttctgacaatgaagtatgagttttaattttgaaacaccactaccaaaaaagttcactttctatatccaactctagcaaggtcactttatagctccagtctggggaataaatggaatatatactgcattgccactaccttttttataggaactaagtgttcttcagttctccacaaagtagaaaatagtcatttaaatgaagtgttcttattgaaaatagctcactgggtcctcacatagatgacacaatgatgacgatgatgatgatgacgacgatgatgatgatgacgacgattcaaatctcttggtcactactgtcagaacaaataccttgaaaaaatgttgtgccctttttctacacactagtatttttaagcttatgagagttaaagggggaaatgtaagaacatattctcatataaaattattcactaattttgctcaagggctgtgtacatgtacatgtacattaaccacaaatctgctctctctagggtttgatcaacaagcaggaacatcttgctgtgttggctgtgataatcactaaagatccagagtctcacctgaagcttgtcgctctcatgtatctccttggtttaatagcgtttctcaaataatgaagataacagtaataaccaagctgtagtaagacacagctctttcttttcctgatctcccagagaggaagtggttgtcccctaactttagaagtagaactagagagctagtgtataattcttactgaccatggtttcaatttccctttctaagtttctactatctctcaataactactaaaatagaagcaaaaaatagattggaaaatatattcaccaaaatttagtgacttaaactggatcaagtacaaaacagtttatgcctaactttgcaaacccacaatttttaagtccagttcaaaacatgctactaacatagcaattattaaggaagagaattgtaattagatatattttccataaccattactacaaagacataaaacatcagtattcactttggtctttagcagagcagctgaaggctgctgatttaaactgtttgaacccctggtagaaaggaagctgttcgggttcagaaattatctaaagagtagcccctaaaggagtccaatggtaacagggggtctcttcataaaggctggaggggcccatcacagaaactataaaacatggatgacatcatctctaactcagtggtatttaacgttccctttctgacgctgtggcccttttatatagttcctcatgttgtggtgatacccaacaataaaatcatttttgttgctatttcataactgtaatttcgcctccttacctccactatgaattgtaaatattttggaaacaggtttgcatgaggggttgcaacccacaggttgagaaccactggtaagaggtctgtaaaaaatacataagttgtgtagttggccatgctgagagaaacgtgacgctgaagctgaaaagcaccaggcatttgttatattgctcactaccacatcaacttcaaggtataaactgtcagctcataaggctcttctcattaaacatttaatgctgccttttacatttttagtagtttatttgtagtttatctgtaactgtttatctgtaaaatgaaattggaatgacctatattcaaatggagttttgattttggtgaaattactatacaattatattctattgactataaaatgttgtcttgtt

SEQ ID NO: 352 - DNA, 2480 bp, Mus musculus
  source 1..2480: mol_type = genomic DNA
aacaagacaacattttatagtcaatagaatataattgtatagtaatttcaccaaaatcaaaactccatttgaatataggtcattccaatttcattttacagataaacagttacagataaactacaaataaactactaaaaatgtaaaaggcagcattaaatgtttaatgagaagagccttatgagctgacagtttataccttgaagttgatgtggtagtgagcaatataacaaatgcctggtgcttttcagcttcagcgtcacgtttctctcagcatggccaactacacaacttatgtattttttacagacctcttaccagtggttctcaacctgtgggttgcaacccctcatgcaaacctgtttccaaaatatttacaattcatagtggaggtaaggaggcgaaattacagttatgaaatagcaacaaaaatgattttattgttgggtatcaccacaacatgaggaactatataaaagggccacagcgtcagaaagggaacgttaaataccactgagttagagatgatgtcatccatgttttatagtttctgtgatgggcccctccagcctttatgaagagaccccctgttaccattggactcctttaggggctactctttagataatttctgaacccgaacagcttcctttctaccaggggttcaaacagtttaaatcagcagccttcagctgctctgctaaagaccaaagtgaatactgatgttttatgtctttgtagtaatggttatggaaaatatatctaattacaattctcttccttaataattgctatgttagtagcatgttttgaactggacttaaaaattgtgggtttgcaaagttaggcataaactgttttgtacttgatccagtttaagtcactaaattttggtgaatatattttccaatctattttttgcttctattttagtagttattgagagatagtagaaacttagaaagggaaattgaaaccatggtcagtaagaattatacactagctctctagttctacttctaaagttaggggacaaccacttcctctctgggagatcaggaaaagaaagagctgtgtcttactacagcttggttattactgttatcttcattatttgagaaacgctattaaaccaaggagatacatgagagcgacaagcttcaggtgagactctggatctttagtgattatcacagccaacacagcaagatgttcctgcttgttgatcaaaccctagagagagcagatttgtggttaatgtacatgtacatgtacacagcccttgagcaaaattagtgaataattttatatgagaatatgttcttacatttccccctttaactctcataagcttaaaaatactagtgtgtagaaaaagggcacaacattttttcaaggtatttgttctgacagtagtgaccaagagatttgaatcgtcgtcatcatcatcatcgtcgtcatcatcatcatcgtcatcattgtgtcatctatgtgaggacccagtgagctattttcaataagaacacttcatttaaatgactattttctactttgtggagaactgaagaacacttagttcctataaaaaaggtagtggcaatgcagtatatattccatttattccccagactggagctataaagtgaccttgctagagttggatatagaaagtgaacttttttggtagtggtgtttcaaaattaaaactcatacttcattgtcagaaatatttaggaaagaaatttatgagccatgttgaggaaattggcagctacattatgcacacttagccactgtaaagtttgtttacaagatccagcagatgaatacactggctaacaattagtttcactcttaatcgtgaccctcacaaagctgttctcagccggaaggcagcggtgcgttgcttcccccatgacggagtgctcggctttaagctgagttggcatgttgcaggtctggagtggcggcagctcttcacagaagcatcacaatgatgcagatcagcagcagacatatcaagatgaggcagaaattgataaataggttctggagattctgacgtgcttgctgaggcatttcaatagtggaggctctcctgatagccgagcgagtgaggtattgcactttttccattatgccaggaaggcaaaagtagggagacaagtttttctaagtggtcaagagaaagataaaaagttgacaacaggcagccaaatgtgagctgtcttcttttaggagacctgttacgcaggaaagctcactgggatgaagcccctttaagactgcagaattgtaagctggcaagttcctttggtcccagctttgttgtgcagactgaagcgtcagagtctcttcacctgcttctgtcttggcttcggtgatcgtcacagtgcagagcatgaagctgtatgaagtcttatgggagcttagctgggcagttttctgttcccaggtttatgggagcagctgcagtaggt

SEQ ID NO: 353 - DNA, 2254 bp, Rattus norvegicus
  source 1..2254: mol_type = genomic DNA
aaagctgcgcagctgagctcccagacttcacacaactaaacagtctgcattgtgacgatcacagaagccaaggcctcctaaaaggagacagctcgcgtttggctgcctgctgtcaactttttatctttctcttgactacttaaaaaagacttgtcttcctacttttgtcttcctggcatcatggaaaaagtccaataccttactcgctcggctatcaggagagcctcgactattgaaatgccccagcaagcgcgtcagaacctccagaacctctttatcaatttctgtctcatcttgatatgtctgctgctgatctgcatcattgtgatgcttctgtgacaagctgtcgccaccgcagacctgcaccatgccaacgcagcttacaacctggccctccaccacgagggaggcagtgccgccgccttcctgctggacatcgtcgtgaaggtcacgattaagagtgagactgatggcagccagtgtgatcatcggctggatcttgtaaactttaccacgactaagtgtgcacaatgtagctgcccgtttcctcagtgtggctcataaatgtctttcctaaatacttctgacattgtagtatgagttttaattttgaaacagcactacaaaaaaagttcactttctatatccagcactagaaagttcaacttatagcttcagtttggggaataaatgaaatttaaactgcgttgccaccactttttttttataggaactaaatattcttcaggtctgcacaaagtagaaaataataatttaaatgaagtgttcttattcaaaatagctcactgggtcctcatatagacgacgatgacgatgaccatgacgatgacaatgattcagaagtcatggtcattactgtcagaacacataccttgaaaaaaggttgtgccctttttctaaacactaattatttttaagcttatgagagtcaaatagggaaatgtaaaagcatattctcatataaaaatcttcactaatttttccactaattgtggaattcaagcacatttacattaaccacaaatgtgctctctctagggtttgaccagcaagcaagaacatcttactgtgtggttgcgataatcactaaaacatcagaacctcacccgaaggttggcttggcacagatctcctgggttgtgccgggcttctccagataataaatgataacaacaaaccagacagctgtgctggggtacagctctcttcctgcatcccccagagaggagaggcttgctctcctaacttaaaaactagagattctattttacaatccttactaatcacggtttcaatttccctttctaaattcctaatatctctcaataaatactaaaagattaggagctaaaaactgtattggaaaacattcaccaaaatttagttaacttaagttatccaatacaaaacagttcacacctctcctgtgcactcccacagttcacacctctcctgtgcactcccacagtgttaagtccagctcaaggcattctaccaacacagcagctattaggagagttataattagatatattttccataatgattactacgaagatacggcgcatcagtattcaccttggtccctaacagagcagctgaaggcatgctgattcgaactgtttgaatccctgatagaaaggaagatgtctggtttcagaaattatccaaagagtagcccacaaaggagtcccacgttaataggcgtctcttcagaaaaggctgggggtgagggtgcccatcacagaaactataaaacatggatgacataatctctaaatcaatgttccctttgtgatgctatgaccctttcatatagttcctcatgttgtggtgaaacccaacaataaaattatttttgttgctattccataactgtaattttgcctccactatgaattgcgaatatttgtgtagacaaaggtttgcgtgaggggttgcaacgcacaggttgagaagcactggtgaatggtctgcggaattatgtacaagtgcataagttcgtagttgccatgctgagaggaaaaggaaggtgaaaagcgcctggccctttacattctcactaccacaccaactgtcaactcataagttcttctcatcaaacatttaatgtttaatgccttttacatttcagtagttaaatgtttatctataaaatgcaataagaatggcctatattcagatgggattatgattttggtgcaattgctatacaattaaatgctattactat

SEQ ID NO: 354 - DNA, 2254 bp, Rattus norvegicus
  source 1..2254: mol_type = genomic DNA
atagtaatagcatttaattgtatagcaattgcaccaaaatcataatcccatctgaatataggccattcttattgcattttatagataaacatttaactactgaaatgtaaaaggcattaaacattaaatgtttgatgagaagaacttatgagttgacagttggtgtggtagtgagaatgtaaagggccaggcgcttttcaccttccttttcctctcagcatggcaactacgaacttatgcacttgtacataattccgcagaccattcaccagtgcttctcaacctgtgcgttgcaacccctcacgcaaacctttgtctacacaaatattcgcaattcatagtggaggcaaaattacagttatggaatagcaacaaaaataattttattgttgggtttcaccacaacatgaggaactatatgaaagggtcatagcatcacaaagggaacattgatttagagattatgtcatccatgttttatagtttctgtgatgggcaccctcacccccagccttttctgaagagacgcctattaacgtgggactcctttgtgggctactctttggataatttctgaaaccagacatcttcctttctatcagggattcaaacagttcgaatcagcatgccttcagctgctctgttagggaccaaggtgaatactgatgcgccgtatcttcgtagtaatcattatggaaaatatatctaattataactctcctaatagctgctgtgttggtagaatgccttgagctggacttaacactgtgggagtgcacaggagaggtgtgaactgtgggagtgcacaggagaggtgtgaactgttttgtattggataacttaagttaactaaattttggtgaatgttttccaatacagtttttagctcctaatcttttagtatttattgagagatattaggaatttagaaagggaaattgaaaccgtgattagtaaggattgtaaaatagaatctctagtttttaagttaggagagcaagcctctcctctctgggggatgcaggaagagagctgtaccccagcacagctgtctggtttgttgttatcatttattatctggagaagcccggcacaacccaggagatctgtgccaagccaaccttcgggtgaggttctgatgttttagtgattatcgcaaccacacagtaagatgttcttgcttgctggtcaaaccctagagagagcacatttgtggttaatgtaaatgtgcttgaattccacaattagtggaaaaattagtgaagatttttatatgagaatatgcttttacatttccctatttgactctcataagcttaaaaataattagtgtttagaaaaagggcacaaccttttttcaaggtatgtgttctgacagtaatgaccatgacttctgaatcattgtcatcgtcatggtcatcgtcatcgtcgtctatatgaggacccagtgagctattttgaataagaacacttcatttaaattattattttctactttgtgcagacctgaagaatatttagttcctataaaaaaaaagtggtggcaacgcagtttaaatttcatttattccccaaactgaagctataagttgaactttctagtgctggatatagaaagtgaactttttttgtagtgctgtttcaaaattaaaactcatactacaatgtcagaagtatttaggaaagacatttatgagccacactgaggaaacgggcagctacattgtgcacacttagtcgtggtaaagtttacaagatccagccgatgatcacactggctgccatcagtctcactcttaatcgtgaccttcacgacgatgtccagcaggaaggcggcggcactgcctccctcgtggtggagggccaggttgtaagctgcgttggcatggtgcaggtctgcggtggcgacagcttgtcacagaagcatcacaatgatgcagatcagcagcagacatatcaagatgagacagaaattgataaagaggttctggaggttctgacgcgcttgctggggcatttcaatagtcgaggctctcctgatagccgagcgagtaaggtattggactttttccatgatgccaggaagacaaaagtaggaagacaagtcttttttaagtagtcaagagaaagataaaaagttgacagcaggcagccaaacgcgagctgtctccttttaggaggccttggcttctgtgatcgtcacaatgcagactgtttagttgtgtgaagtctgggagctcagctgcgcagcttt

SEQ ID NO: 355 - DNA, 846 bp, Macaca mulatta
  source 1..846: mol_type = genomic DNA
cagttatctcatatttggctaccagctttttatctttctctcaatcacttaaaacttcagacttcctctcctgctggtatcatggagaaagtccaatacctcactcgctcagctataagaagagcctcaaccattgaaatgcctcaacaagcacgtcaaaatctacagaatctatttatcaatttctgtctcatcttaatatgtctcttgctgatctgtatcatcgtgatgcttctctgaagttctgctacaacctctagatctgcaacttgccacatcagcttaaaatctgtcatcccatgcagacgggaaaacaatactgtaaaacagaccacttcctgagtagaagagtttctttgtgaaaaggtcaagattaagactaaaacttattgttagcaaatgtattcatctgctggatcttgtaaacatgaaaagggctttattttcaaaaattaactttaaaataagtgtataaaatgtaactgttgatttcctcaacatggctcacaaatttgtatcccaaatcttttctgaagatgaaataagagtttagttttgaaactgcactgccaacaagttcacttcatatataaagcattatctttactcttttgaggtgaatataacttatattacactgtaaaagcttctttaatactatttttcaagtcttcaccaagtatcaaagtaataacacaaatgaagtgtcattattcagaacagtccactgactcctcacatctgttatcttattataaagaactctgtagtaactctttgtagtaacattctaaaacagaaattgcatttttgctatgccacattaacattttttaaagttgatga

SEQ ID NO: 356 - DNA, 846 bp, Macaca mulatta
  source 1..846: mol_type = genomic DNA
tcatcaactttaaaaaatgttaatgtggcatagcaaaaatgcaatttctgttttagaatgttactacaaagagttactacagagttctttataataagataacagatgtgaggagtcagtggactgttctgaataatgacacttcatttgtgttattactttgatacttggtgaagacttgaaaaatagtattaaagaagcttttacagtgtaatataagttatattcacctcaaaagagtaaagataatgctttatatatgaagtgaacttgttggcagtgcagtttcaaaactaaactcttatttcatcttcagaaaagatttgggatacaaatttgtgagccatgttgaggaaatcaacagttacattttatacacttattttaaagttaatttttgaaaataaagcccttttcatgtttacaagatccagcagatgaatacatttgctaacaataagttttagtcttaatcttgaccttttcacaaagaaactcttctactcaggaagtggtctgttttacagtattgttttcccgtctgcatgggatgacagattttaagctgatgtggcaagttgcagatctagaggttgtagcagaacttcagagaagcatcacgatgatacagatcagcaagagacatattaagatgagacagaaattgataaatagattctgtagattttgacgtgcttgttgaggcatttcaatggttgaggctcttcttatagctgagcgagtgaggtattggactttctccatgataccagcaggagaggaagtctgaagttttaagtgattgagagaaagataaaaagctggtagccaaatatgagataactg

SEQ ID NO: 357 - DNA, 5785 bp, Homo sapiens
  source 1..5785: mol_type = genomic DNA
ctttctctcgccgcgccgtcttgaagccgcgcgggctcgtgagcagcgcgaggccgccaaggtgcctcgcttcgccggagccgctgccgcccgccggagggaagccggcctcgggcgcgcacgctcgtcggagccccggcgcgccccgcgcctgagcctgctgacagcggccgctgggctcaggctgtccgctctgggctccgcggcctcggccccgctgcactccacctccgccccctcggactccctcccctctgcttctactcctcctgctccagtgcggatcgtttcgcaactgcttgccactcgtcccgtgcctggctgtttttccatttcccggccccctcttcttgagtactttaccccctgcatttggggacagggactggaaaaggggcgggtggagcgtccagtggagaagaaggaagcgaggcccgcaggaggaggaggatcggcggactgtggggaggagaccccacgccaccctttctggtcatctcccctcccgccccgcccctgcgcacactccctcgcgggcgagctactttcggaccaggaaagtaagagcggccctgggtgacagcgccgcggggccagtcccggggttagccgcgcgtctgctcgcttctggtccgtcgcgctcccagccagggcacagcccggaccgaggatggcttcgaccacaacctgcaccaggttcacggacgagtatcagcttttcgaggagcttggaaagggggcattctcagtggtgagaagatgtatgaaaattcctactggacaagaatatgctgccaaaattatcaacaccaaaaagctttctgctagggatcatcagaaactagaaagagaagctagaatctgccgtcttttgaagcaccctaatattgtgcgacttcatgatagcatatcagaagagggctttcactacttggtgtttgatttagttactggaggtgaactgtttgaagacatagtggcaagagaatactacagtgaagctgatgccagtcattgcattcagcagatcctggaggctgtgctacactgccatcagatgggcgtggtccatcgggacctgaagcctgagaatttgcttttagctagcaaatccaagggagcagctgtgaaattggcagactttggcttagccatagaagttcaaggggaccagcaggcgtggtttggttttgctggcacacctggatatctttctccagaagttttacgtaaagatccttatggaaagccagtggatatgtgggcatgtggtgtcattctctatattctacttgtggggtatccacccttctgggatgaagaccaacacagactctatcagcagatcaaggctggagcttatgattttccatcaccagaatgggacacggtgactcctgaagccaaagacctcatcaataaaatgcttactatcaaccctgccaaacgcatcacagcctcagaggcactgaagcacccatggatctgtcaacgttctactgttgcttccatgatgcacagacaggagactgtagactgcttgaagaaatttaatgctagaagaaaactaaagggtgccatcttgacaactatgctggctacaaggaatttctcagcagccaagagtttgttgaagaaaccagatggagtaaagataaacaacaaagccaacgtggtaaccagccccaaagaaaatattcctaccccagcgctggagccccaaactactgtaatccacaaccctgatggaaacaaggagtcaactgagagttcaaatacaacaattgaggatgaagatgtgaaagcacgaaagcaagagattatcaaagtcactgaacaactgatcgaagctatcaacaatggggactttgaagcctacacaaaaatctgtgacccaggccttactgcttttgaacctgaagctttgggtaatttagtggaagggatggattttcaccgattctactttgaaaatgctttgtccaaaagcaataaaccaatccacactattattctaaaccctcatgtacatctggtaggggatgatgccgcctgcatagcatatattaggctcacacagtacatggatggcagtggaatgccaaagacaatgcagtcagaagagactcgtgtgtggcaccgccgggatggaaagtggcagaatgttcattttcatcgctcggggtcaccaacagtacccatcaagccaccctgtattccaaatgggaaagaaaacttctcaggaggcacctctttgtggcaaaacatctaaggcctgaaaaccattcacatatgggtcttctaaatttcaacagtgccacttctgcattctctgttctcaaggcacctggatggtgaccctgggccgtcctctcctcctcttcatgcatgtttctgagtgcatgaagttgtgaaggtcctacatgtaatgcatatgtgatgcatcatcttatcatatattccttcctatacattgtttacacttcaactacggggatgttccacacaaacttaaattactgttggcaaaacaatagggggagattagacaaaaaaaaaaatccacaatattccaagtacaactcttcatcaagtttctctgttaatgccaagatttaacagacttaagaactattgttctctgaatgacagttgtaagagaaatgtaaattttttagaactctttgctgttaatctgttttggtttgtttggtttttttttttttttttaaggtaaaaaaaaaatacaccttcagtttcctggtgtgatcctggttaaaatggatgatttttcattgaaagttttgctgattaacaattaaagtgggatgatatgtgggcaaaatcacttatgaaagtagaagcaagaatcagttggtttgctaccacataaagccatgctgtttttggtcaaactgtgtaaactggaaaaattcacatcatttctgagtttaatcactttaggatatattcacattgttttggtgaatttgctgaattgaattgtttttctttctcaaatctgtgatctcttttctttatcctgtttctttgttcctttcgtttgctttcttatttttcttttgttccattcttttcttacttttttcccttttccttttttggggaggctggctagtagtgtgtgagaaaagaatagaagtgaaatttgcataatgaatgtaaaagggaaataaaagtcttttgaaggtagctatactagcacttttgatcatcttcagggcccacaaaaatgttgtcaagattttaaaggtttataattctgcttaagctctagtttggacttaggtatcctaactatgttggaggtatttgcattgtttaaagttaggataaaagcaagttcctcctgtgactgcaacgtcttactgattgggacagttgccaggaggataccaacttgatagcagagggggttttatgcaaacgcactcacctccgccttggggaatgaaagggtcacttctgcatcatcactagctagttttctagtgttagagaggcttacaaatgtttgccattctcataagtgttttgaacttgatctttgtgacttgtgcttttttagcttctctcttgaatcagagtatcattgtcttcctccaaggagttagaatttcccagtttaaaacaaaaagggaaatgtcctaggttttctttgtgcttctcatttttcctttgttgattcaattcctgtgatttttgttctcttccctgaagtgctttacagtgcatggaatctccatcattgttattttaacgatagtaattcacagtcctcagaagcctatttttaaagcagaagcaaaaaagaaaaacaaaataacaaaaacaacccttcctcttttctctcatctcacctctctgtgttgattactaatcatcttagatattattgctagtggatgtatggtagatgggttgaagcttttctgataattattacacaatttaaaacaacatatatatttaaaataaatatatacagtaaatatattgagccatgttaacctgccaatgagatctgtgaaaaaataatggcctcatttttctctttttaatttcttttacccttttgtgaagcagctatacgtggcatacatgtatttaaagaaaaaaaaatagatgtagagtgttttttttacacttttaacttagcatgtggtgttgaagtattactgtagatcaagtttgtcttccgcactaagatgtgaggaaattgtgatttgttctctccaccacaaatgaattacacatttattatcttctatcattttgaaacactgcagtttaccatgggacactgtatatatttcttgccataatggtaaaggactgattgatatatttaagagttaataaatttgtgatttctgctgacagtgcgtccatctttatttcttcagaagaggtactgtatgtatgcctgcatagtgctggccagtgtcaagggcagtgtgtcctactctggtctcatttagtacataacaatttgcacttggtgagaatggcaagttaattgttctctgtgagcaaaacaatggtctcttctgggaaaatgttgctgagaacaatatagttaacaactaagactcctaaaagcttctctaaactgtaccctccaatccagccttcacatggctgctttttttttttttttttaatacgaacctgtccttgtaacactttgatgttatcatttctgggatacaggcaagcaccccagctcctgctactccccagcttgaacttgagcatacatggatgctcagcttcttttgatttgctaaaaacatcacacttgctcacatgcctgtttatgctgttcatgttgtttatgtttcttacctagaataaatagtctcttcccctacttcttttcccgacttcttactttttcctaagattcagtgtacagcatcatgctccacagcaaaccttcctaggccctattctgggcttgccttccctctcaaaacctacataatagattgtatttacctctcctgtcaaccacattgttttgaaaatatatttctatttgtgtctcctctactgcagtataatgtctccatgggcaagaactgtgtattcatcattgcattcctaaacccaaaccaaggccaggaatggagatatcattgataaatagttgttgaattgaggccaagcccttttgataacagaagcctcaaggggtacccagatagtccttgttttaatgatgggttctctcaccactgtcttgatgctctgagcaagttacctcttccctctgaccctcagtttccatatttgtaaaatgagaataaacataccaacttaataaagatattgtgaggattaatgggtacagagtgactagaatgatatttgatagaaattaaatggtagcagtataactattctgatcactgacattaatattcctattgttattattctttgctcacgagggtatacaactcttgttttgctgttgggctgccctctttatgtaggtttactgttaatgctgaggatatactcggactcaaatgtctcagcagaaggctgagagacaccaaatgaagtggtcatctagctgaatgtaggaaaaatgaaatgtagtagcaaatcagtatattctaaggaaattttcaaggaatattaatcttcacccaaattttgaatttttatgtaaaaaattataatttaagggtaaacatagatgacacagctttcgagtgatttcattgaataaaattctactgacttctatgaa

SEQ ID NO: 358 - DNA, 5785 bp, Homo sapiens
  source 1..5785: mol_type = genomic DNA
ttcatagaagtcagtagaattttattcaatgaaatcactcgaaagctgtgtcatctatgtttacccttaaattataattttttacataaaaattcaaaatttgggtgaagattaatattccttgaaaatttccttagaatatactgatttgctactacatttcatttttcctacattcagctagatgaccacttcatttggtgtctctcagccttctgctgagacatttgagtccgagtatatcctcagcattaacagtaaacctacataaagagggcagcccaacagcaaaacaagagttgtataccctcgtgagcaaagaataataacaataggaatattaatgtcagtgatcagaatagttatactgctaccatttaatttctatcaaatatcattctagtcactctgtacccattaatcctcacaatatctttattaagttggtatgtttattctcattttacaaatatggaaactgagggtcagagggaagaggtaacttgctcagagcatcaagacagtggtgagagaacccatcattaaaacaaggactatctgggtaccccttgaggcttctgttatcaaaagggcttggcctcaattcaacaactatttatcaatgatatctccattcctggccttggtttgggtttaggaatgcaatgatgaatacacagttcttgcccatggagacattatactgcagtagaggagacacaaatagaaatatattttcaaaacaatgtggttgacaggagaggtaaatacaatctattatgtaggttttgagagggaaggcaagcccagaatagggcctaggaaggtttgctgtggagcatgatgctgtacactgaatcttaggaaaaagtaagaagtcgggaaaagaagtaggggaagagactatttattctaggtaagaaacataaacaacatgaacagcataaacaggcatgtgagcaagtgtgatgtttttagcaaatcaaaagaagctgagcatccatgtatgctcaagttcaagctggggagtagcaggagctggggtgcttgcctgtatcccagaaatgataacatcaaagtgttacaaggacaggttcgtattaaaaaaaaaaaaaaaaagcagccatgtgaaggctggattggagggtacagtttagagaagcttttaggagtcttagttgttaactatattgttctcagcaacattttcccagaagagaccattgttttgctcacagagaacaattaacttgccattctcaccaagtgcaaattgttatgtactaaatgagaccagagtaggacacactgcccttgacactggccagcactatgcaggcatacatacagtacctcttctgaagaaataaagatggacgcactgtcagcagaaatcacaaatttattaactcttaaatatatcaatcagtcctttaccattatggcaagaaatatatacagtgtcccatggtaaactgcagtgtttcaaaatgatagaagataataaatgtgtaattcatttgtggtggagagaacaaatcacaatttcctcacatcttagtgcggaagacaaacttgatctacagtaatacttcaacaccacatgctaagttaaaagtgtaaaaaaaacactctacatctatttttttttctttaaatacatgtatgccacgtatagctgcttcacaaaagggtaaaagaaattaaaaagagaaaaatgaggccattattttttcacagatctcattggcaggttaacatggctcaatatatttactgtatatatttattttaaatatatatgttgttttaaattgtgtaataattatcagaaaagcttcaacccatctaccatacatccactagcaataatatctaagatgattagtaatcaacacagagaggtgagatgagagaaaagaggaagggttgtttttgttattttgtttttcttttttgcttctgctttaaaaataggcttctgaggactgtgaattactatcgttaaaataacaatgatggagattccatgcactgtaaagcacttcagggaagagaacaaaaatcacaggaattgaatcaacaaaggaaaaatgagaagcacaaagaaaacctaggacatttccctttttgttttaaactgggaaattctaactccttggaggaagacaatgatactctgattcaagagagaagctaaaaaagcacaagtcacaaagatcaagttcaaaacacttatgagaatggcaaacatttgtaagcctctctaacactagaaaactagctagtgatgatgcagaagtgaccctttcattccccaaggcggaggtgagtgcgtttgcataaaaccccctctgctatcaagttggtatcctcctggcaactgtcccaatcagtaagacgttgcagtcacaggaggaacttgcttttatcctaactttaaacaatgcaaatacctccaacatagttaggatacctaagtccaaactagagcttaagcagaattataaacctttaaaatcttgacaacatttttgtgggccctgaagatgatcaaaagtgctagtatagctaccttcaaaagacttttatttcccttttacattcattatgcaaatttcacttctattcttttctcacacactactagccagcctccccaaaaaaggaaaagggaaaaaagtaagaaaagaatggaacaaaagaaaaataagaaagcaaacgaaaggaacaaagaaacaggataaagaaaagagatcacagatttgagaaagaaaaacaattcaattcagcaaattcaccaaaacaatgtgaatatatcctaaagtgattaaactcagaaatgatgtgaatttttccagtttacacagtttgaccaaaaacagcatggctttatgtggtagcaaaccaactgattcttgcttctactttcataagtgattttgcccacatatcatcccactttaattgttaatcagcaaaactttcaatgaaaaatcatccattttaaccaggatcacaccaggaaactgaaggtgtattttttttttaccttaaaaaaaaaaaaaaaaaccaaacaaaccaaaacagattaacagcaaagagttctaaaaaatttacatttctcttacaactgtcattcagagaacaatagttcttaagtctgttaaatcttggcattaacagagaaacttgatgaagagttgtacttggaatattgtggatttttttttttgtctaatctccccctattgttttgccaacagtaatttaagtttgtgtggaacatccccgtagttgaagtgtaaacaatgtataggaaggaatatatgataagatgatgcatcacatatgcattacatgtaggaccttcacaacttcatgcactcagaaacatgcatgaagaggaggagaggacggcccagggtcaccatccaggtgccttgagaacagagaatgcagaagtggcactgttgaaatttagaagacccatatgtgaatggttttcaggccttagatgttttgccacaaagaggtgcctcctgagaagttttctttcccatttggaatacagggtggcttgatgggtactgttggtgaccccgagcgatgaaaatgaacattctgccactttccatcccggcggtgccacacacgagtctcttctgactgcattgtctttggcattccactgccatccatgtactgtgtgagcctaatatatgctatgcaggcggcatcatcccctaccagatgtacatgagggtttagaataatagtgtggattggtttattgcttttggacaaagcattttcaaagtagaatcggtgaaaatccatcccttccactaaattacccaaagcttcaggttcaaaagcagtaaggcctgggtcacagatttttgtgtaggcttcaaagtccccattgttgatagcttcgatcagttgttcagtgactttgataatctcttgctttcgtgctttcacatcttcatcctcaattgttgtatttgaactctcagttgactccttgtttccatcagggttgtggattacagtagtttggggctccagcgctggggtaggaatattttctttggggctggttaccacgttggctttgttgtttatctttactccatctggtttcttcaacaaactcttggctgctgagaaattccttgtagccagcatagttgtcaagatggcaccctttagttttcttctagcattaaatttcttcaagcagtctacagtctcctgtctgtgcatcatggaagcaacagtagaacgttgacagatccatgggtgcttcagtgcctctgaggctgtgatgcgtttggcagggttgatagtaagcattttattgatgaggtctttggcttcaggagtcaccgtgtcccattctggtgatggaaaatcataagctccagccttgatctgctgatagagtctgtgttggtcttcatcccagaagggtggataccccacaagtagaatatagagaatgacaccacatgcccacatatccactggctttccataaggatctttacgtaaaacttctggagaaagatatccaggtgtgccagcaaaaccaaaccacgcctgctggtccccttgaacttctatggctaagccaaagtctgccaatttcacagctgctcccttggatttgctagctaaaagcaaattctcaggcttcaggtcccgatggaccacgcccatctgatggcagtgtagcacagcctccaggatctgctgaatgcaatgactggcatcagcttcactgtagtattctcttgccactatgtcttcaaacagttcacctccagtaactaaatcaaacaccaagtagtgaaagccctcttctgatatgctatcatgaagtcgcacaatattagggtgcttcaaaagacggcagattctagcttctctttctagtttctgatgatccctagcagaaagctttttggtgttgataattttggcagcatattcttgtccagtaggaattttcatacatcttctcaccactgagaatgccccctttccaagctcctcgaaaagctgatactcgtccgtgaacctggtgcaggttgtggtcgaagccatcctcggtccgggctgtgccctggctgggagcgcgacggaccagaagcgagcagacgcgcggctaaccccgggactggccccgcggcgctgtcacccagggccgctcttactttcctggtccgaaagtagctcgcccgcgagggagtgtgcgcaggggcggggcgggaggggagatgaccagaaagggtggcgtggggtctcctccccacagtccgccgatcctcctcctcctgcgggcctcgcttccttcttctccactggacgctccacccgccccttttccagtccctgtccccaaatgcagggggtaaagtactcaagaagagggggccgggaaatggaaaaacagccaggcacgggacgagtggcaagcagttgcgaaacgatccgcactggagcaggaggagtagaagcagaggggagggagtccgagggggcggaggtggagtgcagcggggccgaggccgcggagcccagagcggacagcctgagcccagcggccgctgtcagcaggctcaggcgcggggcgcgccggggctccgacgagcgtgcgcgcccgaggccggcttccctccggcgggcggcagcggctccggcgaagcgaggcaccttggcggcctcgcgctgctcacgagcccgcgcggcttcaagacggcgcggcgagagaaag

SEQ ID NO: 359 - DNA, 5615 bp, Mus musculus
  source 1..5615: mol_type = genomic DNA
ggaggcgccggggaggagccgcggctgccagcttcgcccgagccgagcgagcgcactctgtcgccccgcgggttcccagccttgcggccccgtggagaggagggagcgcgggccaccagcgcctcctctgcccgctggaacgaccggctgggtgttcactcggccgctgccgcccgccactccgggcgctgcgttgagctctccgtgcggcctcggtgaccgcggcaacccctcctgacacctctcccccgccccttcgggagccctcggcccggccaccgcggcgggaggaggagaggacaagggatcgcggagcgggctggtctggccacctcgccccgcgcgccccgcccctgcgcgcactccctcgccggcgagctactttcggacacggaaagtgagggcggccccgggtgacagcgcggcggcgccagtcccgggaagccaggtctgttcgcgtgtcgcccgtcgcactgtccagaccccgccatggcttcgaccaccacctgcacccggttcaccgacgagtatcagctctttgaggagctcggaaagggggcgttctcagtggtgagaagatgtatgaaaatccctactggacaagagtatgctgccaaaattatcaacaccaaaaagctttctgctagggaccatcagaaactggaaagggaagctagaatctgccgtctcttgaagcaccccaatattgtgagacttcacgacagtatatcggaggagggcttccattacttggtgtttgacttagtgactggtggcgaactgtttgaagacatagtggcaagagaatattacagtgaagctgatgccagtcattgcattcagcagatcctggaggctgtgctacactgccatcagatgggcgtagtccatcgggacctaaagcctgagaatttgcttttagctagcaagtccaaaggagcagctgtgaagctggcagacttcggcttagccatagaagttcaaggcgaccagcaggcatggtttggttttgctggcacacctgggtatctttctccagaagtcctgcgtaaagatccttatggaaaaccagtggatatgtgggcatgcggtgtcatcctctacatcttgctggtgggatacccacccttctgggatgaagatcagcatagactgtatcagcagatcaaggccggagcttacgattttccgtcaccagaatgggatacagtgacacctgaagccaaagacctcatcaacaaaatgctgaccatcaaccctgccaaacgtatcacagcctctgaggccctgaaacacccatggatctgtcaacgctctactgttgcctccatgatgcacaggcaggagactgtagactgcttgaagaaatttaatgctagacggaaactgaagggcgccatcttgacaactatgctggctacgagaaatttttcagcagccaagagtttattgaagaaaccagatggggtaaagataaacaacaaagccaacgtggtaaccagccccaaagaaaatattcctaccccggcgctggagccccaaactactgtaatccacaaccctgacggaaacaaggagtcaactgagagctcaaacaccaccattgaggatgaagacgtgaaagcacgaaaacaggagatcatcaaagtcactgagcaactgattgaagctatcaacaatggggactttgaggcttacacaaaaatctgtgatccaggcctcactgcctttgaacctgaagcattgggcaacttagtggaagggatggactttcacagattctactttgaaaatgctttgtccaaaagcaataaaccaatccacacgatcatcctcaacccacacgttcacctggtaggggatgacgcagcctgcatcgcatacattcggctcacacagtacatggacggaagcgggatgccaaagaccatgcagtcagaagagacgcgcgtgtggcaccgccgtgatgggaagtggcagaatgttcactttcaccgttcggggtcccccacagtacccatcaactaattgtcaacagtgccacttcttcattctgtcctcaaggcaccaggcgggtgatcctgggacgtcctctcctcttcatgcatgtttctgagtgcatgaagttgtgaaggttctacgtgtaatgcatatgtgacacgtcatcttatcatgtgacacgtcatcttatcatgtattccttcctgtacattgtttacactccagctaccggacgggatgttccatgcaaacttccgttactgttggcaaactctagagggagctcagacaagaaaattccacaataactccaagttcagctgatccgtcaggtttctctgtgtatgccaagatccaaaagacttaattaaaattactgttctctgaatgacagtgtgtaaggaaatctttcaagaatgctgtcattattctctttgagctttttgttgggatttggggttttgggtttttttaggtttttttttttcttcacttttaaggcaaatacatatatgtatatgccttcagttcctggtgtgctcctgatagaaatgaatggatggcttttctctgacagtgttggtgttagataaatggatggttatgtaagcaaactcctgtgtgatcgtaggagcaagaatcatttggtgattctaccatcaaagccatgttgatttgggtcaaactatgtatactggaaaaattcacatcgtttactagtttgattgctttcagacacacacagtcctggtgaatgcttggcactgatttgggtttttctttcttaagtctgtgttgtgttttcagtgtatactatttgctccatttctttgtatttgtttttatttttcttttctttatctttctctctccccctttctctctctctttcttttgtgtatttatctttctttcttcctatagctggtagtatgtaaaaagaaaaaaaagtaacatttgtatatgattaaaataaaagtcaaggtcttttagaggaagctaaaactaacacttccaggctcttcagggctgtggagttgttacatttaaataaatatttaaataaaagaagaataaaattcagcttaagctaccatttgtgcgtaggtatccttgctatgtggaaattgttggaattgttgagacttacgctaatagcagtaaaagcctactatactgacctggttcgtcccaactacagaaatggaagaccaaatggagtacaacctgtgtacaacctgggtcagaggacatttcctgcctcactttcactagctagccacgtgaggagtaatctccatcttcctagaggttgaacttgatctttgtgattcctgcagttctagcttctctcttgagtcacagtagtatccttctgccgggagttaaggcttgtctagcttaaaacaaagaggaaaaggaaatgccccagttttcttctcgtctctcgtttctcctttgtcgattcggtccctgggaggctgtttctctgcgctgaactgctttatggtgcatggaatatccatcagcgttacctccaccatagctgctcacactccttagaagccgatttttaaagcagaagcaaaaaaagcaaaaacttaaacacccccttctctttttcctcatttcaccttttggtgttgattgctaatcactttagatatattgttgctagtgaatgtatgatagatggttgaagcttttctgataattatcacatgatttaaaacaatatatatttaaaacgaatatatacagtaaatgtattgagccgtgtaacctgccaatgagatctgtgaaaaagtaatggcctcacttttcccttttggatttcttttacctttctgtgaagcagctctgcgtggcatacatgtatttaaaaacacaaatagtggtaggatggtttggtttttttgtttttttgtttttttttttttacacttttaacttagcatgtggtgttgaagaattaccatagatccagtttgtcttctgcactaagatgtgaggaaatcgtgatttgttctctccagcacagtgaaattacaccttcatcatcttctattgtttggaaaacactgcagtttaccatgggacactgtatatatttcttgccgtaatggtaaatgactgattgatatatttaagagttaataaatttgtgatttctgctgacaatgtgtccatttttatttcttaagaaatactctatgtgtggtgccggccactgccaaggacatgatgtcctgccctggtctccttcaataaacaacttgcagtctgtgatcatggcaagctgtttgttctcgctgcacgcagtggagctgtctgtcgttccacagaaaacttagctgaaaggaaaattagcggctgagtatcctaaaagcttgtagatgcacacgcttctgtccatctctttagcaggactgctaaaatgtccctctactaacacagagctgtcagtcatctccagtacatagcagtcaccctagatgctatgacctcacaattacagattgctaatgtgctattagttaaagcactacctgttctttatgtccactcatgtgactcactttcttacctagaacagtcttcctttgttggattatcccattctttaactcattcactgaaatccagagtagtgttgtgcctcctctagtgaatttccttggcagctcctaggcttgtttgctctgtcatgagttgcgtggtagtctgcattcactattcctgctgctatccacattattctgacagtatatatattttttgcattatctttactgtagtaggaaagtctgtagagatgagaactatgcattcacgactatacccctacaatgaaaccagagcgagaaaaggaggggctgtaaataaaccattgttgaactgagaccatactgtacaaagcaacctctaagtgagatcaggcagtcctgggttgaatgctgggctctttcatcattatcctgatgttctaaacaagctgcttcttaccttggaacttcagtttccttaaaatgagtgtaagtatataaattaaattataatatcttaaggattagaaataacaggcataaaatccctagaataccttttttgtatattaaatgagcgttattgggcatgctggtatatggctatgatctcagcaagctagtatgggctacatagaagaccccacctcaacaaaatgtataaatgaacccatgatactcacagaaccctcttgctatcattccctgtttcagatcaggagggtgtgcaacccttgctttaccatggggagctctcttaagttaagcttactgttattgcaaaggatgtacttgcattccagtgcctcagcaagaagatgagagccacaaagggaggtagccatggccctgaaaatacaaaaggagatggagttaactggtacattttggggaaaatttcaaaaatgtcaattttaagtagctaaaattttgaatttctatgtaaaagaattctatataatgtgaagataaatgtagaaaacaactttcattaaatatttgttttagtcatttcattaaataaaatcctactgactttgagactaaaaaaaaaaaaaaaaaaaaaaa

SEQ ID NO: 360 - DNA, 5615 bp, Mus musculus
  source 1..5615: mol_type = genomic DNA
tttttttttttttttttttttttagtctcaaagtcagtaggattttatttaatgaaatgactaaaacaaatatttaatgaaagttgttttctacatttatcttcacattatatagaattcttttacatagaaattcaaaattttagctacttaaaattgacatttttgaaattttccccaaaatgtaccagttaactccatctccttttgtattttcagggccatggctacctccctttgtggctctcatcttcttgctgaggcactggaatgcaagtacatcctttgcaataacagtaagcttaacttaagagagctccccatggtaaagcaagggttgcacaccctcctgatctgaaacagggaatgatagcaagagggttctgtgagtatcatgggttcatttatacattttgttgaggtggggtcttctatgtagcccatactagcttgctgagatcatagccatataccagcatgcccaataacgctcatttaatatacaaaaaaggtattctagggattttatgcctgttatttctaatccttaagatattataatttaatttatatacttacactcattttaaggaaactgaagttccaaggtaagaagcagcttgtttagaacatcaggataatgatgaaagagcccagcattcaacccaggactgcctgatctcacttagaggttgctttgtacagtatggtctcagttcaacaatggtttatttacagcccctccttttctcgctctggtttcattgtaggggtatagtcgtgaatgcatagttctcatctctacagactttcctactacagtaaagataatgcaaaaaatatatatactgtcagaataatgtggatagcagcaggaatagtgaatgcagactaccacgcaactcatgacagagcaaacaagcctaggagctgccaaggaaattcactagaggaggcacaacactactctggatttcagtgaatgagttaaagaatgggataatccaacaaaggaagactgttctaggtaagaaagtgagtcacatgagtggacataaagaacaggtagtgctttaactaatagcacattagcaatctgtaattgtgaggtcatagcatctagggtgactgctatgtactggagatgactgacagctctgtgttagtagagggacattttagcagtcctgctaaagagatggacagaagcgtgtgcatctacaagcttttaggatactcagccgctaattttcctttcagctaagttttctgtggaacgacagacagctccactgcgtgcagcgagaacaaacagcttgccatgatcacagactgcaagttgtttattgaaggagaccagggcaggacatcatgtccttggcagtggccggcaccacacatagagtatttcttaagaaataaaaatggacacattgtcagcagaaatcacaaatttattaactcttaaatatatcaatcagtcatttaccattacggcaagaaatatatacagtgtcccatggtaaactgcagtgttttccaaacaatagaagatgatgaaggtgtaatttcactgtgctggagagaacaaatcacgatttcctcacatcttagtgcagaagacaaactggatctatggtaattcttcaacaccacatgctaagttaaaagtgtaaaaaaaaaaaaacaaaaaaacaaaaaaaccaaaccatcctaccactatttgtgtttttaaatacatgtatgccacgcagagctgcttcacagaaaggtaaaagaaatccaaaagggaaaagtgaggccattactttttcacagatctcattggcaggttacacggctcaatacatttactgtatatattcgttttaaatatatattgttttaaatcatgtgataattatcagaaaagcttcaaccatctatcatacattcactagcaacaatatatctaaagtgattagcaatcaacaccaaaaggtgaaatgaggaaaaagagaagggggtgtttaagtttttgctttttttgcttctgctttaaaaatcggcttctaaggagtgtgagcagctatggtggaggtaacgctgatggatattccatgcaccataaagcagttcagcgcagagaaacagcctcccagggaccgaatcgacaaaggagaaacgagagacgagaagaaaactggggcatttccttttcctctttgttttaagctagacaagccttaactcccggcagaaggatactactgtgactcaagagagaagctagaactgcaggaatcacaaagatcaagttcaacctctaggaagatggagattactcctcacgtggctagctagtgaaagtgaggcaggaaatgtcctctgacccaggttgtacacaggttgtactccatttggtcttccatttctgtagttgggacgaaccaggtcagtatagtaggcttttactgctattagcgtaagtctcaacaattccaacaatttccacatagcaaggatacctacgcacaaatggtagcttaagctgaattttattcttcttttatttaaatatttatttaaatgtaacaactccacagccctgaagagcctggaagtgttagttttagcttcctctaaaagaccttgacttttattttaatcatatacaaatgttacttttttttctttttacatactaccagctataggaagaaagaaagataaatacacaaaagaaagagagagagaaagggggagagagaaagataaagaaaagaaaaataaaaacaaatacaaagaaatggagcaaatagtatacactgaaaacacaacacagacttaagaaagaaaaacccaaatcagtgccaagcattcaccaggactgtgtgtgtctgaaagcaatcaaactagtaaacgatgtgaatttttccagtatacatagtttgacccaaatcaacatggctttgatggtagaatcaccaaatgattcttgctcctacgatcacacaggagtttgcttacataaccatccatttatctaacaccaacactgtcagagaaaagccatccattcatttctatcaggagcacaccaggaactgaaggcatatacatatatgtatttgccttaaaagtgaagaaaaaaaaaaacctaaaaaaacccaaaaccccaaatcccaacaaaaagctcaaagagaataatgacagcattcttgaaagatttccttacacactgtcattcagagaacagtaattttaattaagtcttttggatcttggcatacacagagaaacctgacggatcagctgaacttggagttattgtggaattttcttgtctgagctccctctagagtttgccaacagtaacggaagtttgcatggaacatcccgtccggtagctggagtgtaaacaatgtacaggaaggaatacatgataagatgacgtgtcacatgataagatgacgtgtcacatatgcattacacgtagaaccttcacaacttcatgcactcagaaacatgcatgaagaggagaggacgtcccaggatcacccgcctggtgccttgaggacagaatgaagaagtggcactgttgacaattagttgatgggtactgtgggggaccccgaacggtgaaagtgaacattctgccacttcccatcacggcggtgccacacgcgcgtctcttctgactgcatggtctttggcatcccgcttccgtccatgtactgtgtgagccgaatgtatgcgatgcaggctgcgtcatcccctaccaggtgaacgtgtgggttgaggatgatcgtgtggattggtttattgcttttggacaaagcattttcaaagtagaatctgtgaaagtccatcccttccactaagttgcccaatgcttcaggttcaaaggcagtgaggcctggatcacagatttttgtgtaagcctcaaagtccccattgttgatagcttcaatcagttgctcagtgactttgatgatctcctgttttcgtgctttcacgtcttcatcctcaatggtggtgtttgagctctcagttgactccttgtttccgtcagggttgtggattacagtagtttggggctccagcgccggggtaggaatattttctttggggctggttaccacgttggctttgttgtttatctttaccccatctggtttcttcaataaactcttggctgctgaaaaatttctcgtagccagcatagttgtcaagatggcgcccttcagtttccgtctagcattaaatttcttcaagcagtctacagtctcctgcctgtgcatcatggaggcaacagtagagcgttgacagatccatgggtgtttcagggcctcagaggctgtgatacgtttggcagggttgatggtcagcattttgttgatgaggtctttggcttcaggtgtcactgtatcccattctggtgacggaaaatcgtaagctccggccttgatctgctgatacagtctatgctgatcttcatcccagaagggtgggtatcccaccagcaagatgtagaggatgacaccgcatgcccacatatccactggttttccataaggatctttacgcaggacttctggagaaagatacccaggtgtgccagcaaaaccaaaccatgcctgctggtcgccttgaacttctatggctaagccgaagtctgccagcttcacagctgctcctttggacttgctagctaaaagcaaattctcaggctttaggtcccgatggactacgcccatctgatggcagtgtagcacagcctccaggatctgctgaatgcaatgactggcatcagcttcactgtaatattctcttgccactatgtcttcaaacagttcgccaccagtcactaagtcaaacaccaagtaatggaagccctcctccgatatactgtcgtgaagtctcacaatattggggtgcttcaagagacggcagattctagcttccctttccagtttctgatggtccctagcagaaagctttttggtgttgataattttggcagcatactcttgtccagtagggattttcatacatcttctcaccactgagaacgccccctttccgagctcctcaaagagctgatactcgtcggtgaaccgggtgcaggtggtggtcgaagccatggcggggtctggacagtgcgacgggcgacacgcgaacagacctggcttcccgggactggcgccgccgcgctgtcacccggggccgccctcactttccgtgtccgaaagtagctcgccggcgagggagtgcgcgcaggggcggggcgcgcggggcgaggtggccagaccagcccgctccgcgatcccttgtcctctcctcctcccgccgcggtggccgggccgagggctcccgaaggggcgggggagaggtgtcaggaggggttgccgcggtcaccgaggccgcacggagagctcaacgcagcgcccggagtggcgggcggcagcggccgagtgaacacccagccggtcgttccagcgggcagaggaggcgctggtggcccgcgctccctcctctccacggggccgcaaggctgggaacccgcggggcgacagagtgcgctcgctcggctcgggcgaagctggcagccgcggctcctccccggcgcctcc

SEQ ID NO: 361 - DNA, 2301 bp, Rattus norvegicus
  source 1..2301: mol_type = genomic DNA
ttcgggagcgctcgcccggcgggaggaggaggaagaaggatcgcggctcgggctggtctggccacctcgccccgcgcgccccgcccctgcgcgcactccctcgccggcgagctactttcggacaaggaaagtgagggcggccccgggtgacagcgcggcggtgccagtcccgggaagccgcgtctgttcgcgtgtcgcccgtcgcactgtccagaccccgccatggcttcgaccaccacctgcacccggttcaccgacgagtatcagctcttcgaggagctcggaaagggggcattctcagtggtgagaagatgcatgaaaatccctactggacaagagtatgctgccaaaattatcaacaccaaaaagctttctgctagggatcatcagaaactggaaagggaagctagaatctgccgtctcttgaagcaccccaatattgtgagacttcatgacagcatatccgaagagggcttccattacttggtgtttgacttagttactggtggcgaactctttgaagacatagtggcaagagaatattacagtgaggctgatgccagtcattgtatacaacagattctagagagtgtaaatcattgtcacctaaatggcatagttcacagggacctgaagcctgagaatttgcttttagctagcaaatccaaaggagcagctgtgaaactggcagacttcggcttagccatagaagttcaaggcgaccagcaggcgtggtttggttttgctggcacacctgggtatctttctccagaagtcctacgtaaagatccttatggaaaaccagtggacatgtgggcatgtggcgtcatcctctacatcttgctggtgggatacccacccttctgggatgaagatcagcatagactgtatcagcagatcaaggctggagcgtacgattttccatcaccagaatgggacacagtgacacctgaagccaaagacctcatcaacaaaatgctgaccatcaaccctgccaaacgcatcacagcctctgaggccctgaaacacccatggatctgtcaacgttctactgttgcctccatgatgcacaggcaggagactgtagactgcttgaagaaatttaatgctcgacggaaattgaagggtgccatcttgacaactatgctggctacgagaaatttttcagcagccaagagtttgttgaagaaaccggatggggtaaagataaacaacaaagccaacgtggtaaccagccccaaagaaaatattcctaccccggcgctggagccccaaactactgtaatccacaaccctgatggaaacaaggagtcaactgagagctcaaataccaccattgaggatgaagacgtgaaagcacgaaagcaagagatcatcaaagtcactgagcagctgattgaagctatcaacaatggggacttcgaggcttacacgaaaatctgtgatccaggcctcactgcctttgaacccgaagcattgggcaacttagtggaagggatggactttcacagattctactttgaaaatgctttgcccaaaatcaataaaccaatccacactatcatcctgaaccctcacgtacacctggtaggggatgatgcagcctgcatagcatacattcggctcacacagtacatggatggaaatggaatgccaaagacaatgcagtcagaagagactcgagtgtggcaccgccgtgatgggaagtggcagaatattcactttcatcgttcggggtccccaacagtccccatcaagccaccctgtattccaaatgggaaagaaaacttctcaggaggcacctctttgtggcaaaacatctgaaaaccattcacatttgggtcttctaattgtcaacagtgccacgtcttcattctgtcctcaaggcacctggcggggtgatcctgggacatcctctcctcttcatgcatgtttctgagtgcatgaagttgtgaaggttctacgtgtaatgcatatgtgacacgtcatcttaccatgtgacacgccatcttaccatgtattccttcctgtacattgtttacactccagctactggacggatgttccatgcaaacgtcagttactgctggcaaactaaagagggagctccgacaagaaaactccgcaatactccaagttcagctgatccatcaggtttctctgtggatgccaagattcaaaagacttcataaaattactgttcaatgaatgacagtgtgtaagaggaaaggaaatctttcaagaatgctgccattaatctatttgggcttctcattgggattttggggttgattttttttt

SEQ ID NO: 362 - DNA, 2301 bp, Rattus norvegicus
  source 1..2301: mol_type = genomic DNA
aaaaaaaaatcaaccccaaaatcccaatgagaagcccaaatagattaatggcagcattcttgaaagatttcctttcctcttacacactgtcattcattgaacagtaattttatgaagtcttttgaatcttggcatccacagagaaacctgatggatcagctgaacttggagtattgcggagttttcttgtcggagctccctctttagtttgccagcagtaactgacgtttgcatggaacatccgtccagtagctggagtgtaaacaatgtacaggaaggaatacatggtaagatggcgtgtcacatggtaagatgacgtgtcacatatgcattacacgtagaaccttcacaacttcatgcactcagaaacatgcatgaagaggagaggatgtcccaggatcaccccgccaggtgccttgaggacagaatgaagacgtggcactgttgacaattagaagacccaaatgtgaatggttttcagatgttttgccacaaagaggtgcctcctgagaagttttctttcccatttggaatacagggtggcttgatggggactgttggggaccccgaacgatgaaagtgaatattctgccacttcccatcacggcggtgccacactcgagtctcttctgactgcattgtctttggcattccatttccatccatgtactgtgtgagccgaatgtatgctatgcaggctgcatcatcccctaccaggtgtacgtgagggttcaggatgatagtgtggattggtttattgattttgggcaaagcattttcaaagtagaatctgtgaaagtccatcccttccactaagttgcccaatgcttcgggttcaaaggcagtgaggcctggatcacagattttcgtgtaagcctcgaagtccccattgttgatagcttcaatcagctgctcagtgactttgatgatctcttgctttcgtgctttcacgtcttcatcctcaatggtggtatttgagctctcagttgactccttgtttccatcagggttgtggattacagtagtttggggctccagcgccggggtaggaatattttctttggggctggttaccacgttggctttgttgtttatctttaccccatccggtttcttcaacaaactcttggctgctgaaaaatttctcgtagccagcatagttgtcaagatggcacccttcaatttccgtcgagcattaaatttcttcaagcagtctacagtctcctgcctgtgcatcatggaggcaacagtagaacgttgacagatccatgggtgtttcagggcctcagaggctgtgatgcgtttggcagggttgatggtcagcattttgttgatgaggtctttggcttcaggtgtcactgtgtcccattctggtgatggaaaatcgtacgctccagccttgatctgctgatacagtctatgctgatcttcatcccagaagggtgggtatcccaccagcaagatgtagaggatgacgccacatgcccacatgtccactggttttccataaggatctttacgtaggacttctggagaaagatacccaggtgtgccagcaaaaccaaaccacgcctgctggtcgccttgaacttctatggctaagccgaagtctgccagtttcacagctgctcctttggatttgctagctaaaagcaaattctcaggcttcaggtccctgtgaactatgccatttaggtgacaatgatttacactctctagaatctgttgtatacaatgactggcatcagcctcactgtaatattctcttgccactatgtcttcaaagagttcgccaccagtaactaagtcaaacaccaagtaatggaagccctcttcggatatgctgtcatgaagtctcacaatattggggtgcttcaagagacggcagattctagcttccctttccagtttctgatgatccctagcagaaagctttttggtgttgataattttggcagcatactcttgtccagtagggattttcatgcatcttctcaccactgagaatgccccctttccgagctcctcgaagagctgatactcgtcggtgaaccgggtgcaggtggtggtcgaagccatggcggggtctggacagtgcgacgggcgacacgcgaacagacgcggcttcccgggactggcaccgccgcgctgtcacccggggccgccctcactttccttgtccgaaagtagctcgccggcgagggagtgcgcgcaggggcggggcgcgcggggcgaggtggccagaccagcccgagccgcgatccttcttcctcctcctcccgccgggcgagcgctcccgaa

SEQ ID NO: 363 - DNA, 4782 bp, Macaca mulatta
  source 1..4782: mol_type = genomic DNA
ccctgcatcttcccgctcagtcagccccagattgaggcaggcttctctgtgcgggtttaaatgggtaactgacgtctcgcctcattcacccaaacctccaggcttctcccccgcaaatcctcctccacccacctggtttctcctagacgggtgtgctcgtgtgtgcgaccgaaggagggatagcgagagatccacgaagggacacacttggagtcgctagagggaggtgtgggaccagcgaggagggggcttcgccagggagggggtgctggctggcggagggagcggcgggaggaggcgccaggggaggagacggaggcctggggacggcagacgaggcttcgtccgagccgagcgctctttctctcgctgcgccgtcttgaagccgcgcgggctcgtgagcagcgcgaggcagtcaaggtgcctcgcttcgccggatccgctgctgcccgctggagggaagccggtcccgggcgcgcacgctcgcccgagccccgggcgcgctccgcgcctgagcctgctgacagctgccgctgggctctggctgtccgctccgggctccgcggcctcggccccgctgcactccacctccgccccctcggactccctcccctctgcttctacccctcctgcctccagtgcggatcgtttcgcaactgcttgccactcgccccgtgcccggctgtttttccatttcccggccccctcttcttgaatactttaccccctgtatttggggacagggactggaaaaggggcaggtggagcgtccagtggagaagaaggaagcgaggcccgcaggaggaggaggatcggcggaccgtggggaggagaccccacgccaccgtttctggtcatctcccctcccgccccgcccctgcgcacactccctcgcgggcgagctactttcggaccaggaaagtaagggcggccctgggtgacagcgccgcggggccaatcccggggttagccgcgcgtctgctcgcttctcgtccgtcgcgctcccagccagggcacagcccggaccaaggatggcttcgaccacaacctgcaccaggttcacggacgagtatcagcttttcgaggagcttggaaagggggcattctcagtggtgagaagatgtatgaaaattcctactggacaagaatatgctgccaaaattatcaacaccaaaaagctttctgctagggatcatcagaaactagaaagagaagctagaatctgccgtcttttgaagcaccctaatattgtgcgacttcatgatagcatatcagaggagggctttcactacttggtgtttgatttagttaccggaggtgaactgtttgaagacatagtggcaagagaatactacagtgaagctgatgccagtcattgtatacagcagattctagaaagtgtaaatcattgtcacctaaatggcatagttcacagggacctgaagcctgagaatttgcttttagctagcaaatccaagggagcagctgtgaaattggcagactttggcttagccatagaagttcaaggggaccagcaggcgtggtttggttttgctggcacacctggatatctttctccagaagttttacgtaaagatccttatggaaagccagtggatatgtgggcatgtggtgtcattctctatattctacttgtggggtatccacccttctgggatgaagaccaacacagactctatcagcagatcaaggctggagcttatgattttccatcaccggaatgggacacggtaactcctgaagccaaagacctcatcaataaaatgcttactatcaaccctgccaaacgtatcacagcctcagaggcactgaagcacccatggatctgtcaacgttctactgttgcttccatgatgcacagacaggagactgtagactgcttgaagaaatttaatgctagaagaaaactaaagggtgccatcttgacaactatgctggctacaagaaatttctcagcagccaagagtttgttgaagaaaccagatggagtaaagataaacaacaaagccaacgtggtaaccagccccaaagaaaatattcctaccccggcgctggagccccaaactactgtaatccacaaccctgatggaaacaaggagtcaactgagagttcaaatacaacaattgaggatgaagatgtgaaagcacgaaagcaagagattatcaaagtcaccgaacaactgattgaagctatcaacaacggggactttgaagcctacacaaaaatctgtgacccaggccttactgcttttgaacctgaagctctgggtaatttagtggaagggatggattttcaccgattctacttcgaaaatgctttgtccaaaagcaataaaccaatccacactattattctaaaccctcatgtacatctggtaggggatgatgccgcctgcatagcgtatattaggctcacacagtacatggatggcagtggaatgccaaagacaatgcagtcagaagagactcgtgtgtggcaccgtcgagatggaaagtggcagaatgttcattttcatcgctcggggtcaccaacagtacccatcaagccaccctgtattccaaatgggaaagaaaacttctcaggaggcacctctttgtggcaaaacatctaaggcctgaaaatcattcacatatgggtcttctaaatatcaacagtgccacttctgcattctctgttctcaaggcacctggatggtgaccctgggccgtcctctcctcctcttcatgcatgtttctgagtgcatgaagttgtgaaggtcctacatgtaatgcatatgtgatgcatcatcttatcatatattccttcctatacattgtttacacttcaactacggggatgttccgtgcaaacttaaattactgttggcaaaacaatagggggagattagacaaaaagaaaaaatccacaatattccaagtacaactcttcatcaagtttctctgttaatgccaagatttaacagacttaagaactattgttctctgaatgacagtttgtaagagaaatgtaaattttttagaactctttgctgttaatctgttttggcttgtttggtttttttgggtttttttgtttttgtttttgttttttttaaggtaaaaaaatataccttcagtttcctggtgtgatcctggttaaaatggatgatttttcatgggaagttttgctgattagcaattaaagtgggttgatatgttggcaaaatcacttatgaaagtagaagcaagaatcagttggtttgctaccacataaagccatgctctttttggtcaaactgtgtaaactggaaaaattcacatcatttctgagtttaatcactttaggatatattcacattgttttggtgaatttgctgaattgaattgtttttctttctcgaatctgtgatctcttttctttatcctgtttctttgttcctttcgtttgcttccttttttatttttcttttgttccattcttttcttactttcttcccttttccttttttgaggaggccggctagtagtgtgtgagaaaagaaaaaaagtgaaatttgcataatgaaggtaaaaaggaaataaaagccttttgaaggtggcttaactagcacttttgatcatcttcagggcccacaaaaatgttgtcaagattttaaaggtttataattctgcttaagctctactttggacttaggtatcctaactatgttggaggtatttgaattgtttaaacttaggataaaagcaagttcctcctgtgactgcaacgtcttactgattgggacagttgccaggaggataccaagttgatagcagagggggtgttatgcaaacgcactcacctccgccttggggaatgaaagggtcacttctgcatcatcactagctagttttctagcgttagagaggcttacaaatgtttgccattctcatacgtgttttgaacttgatctttgtgacttgtgttttttagcttctctcttgaatcagagtatcgttatcttcctccaaggagttaggattttccagtttaaaacaaaaagggaaatgtcctaggttttctttgtgcttctcatttttcctttgttgattgaattcctgtgatttttttgttctcttctctgaaatgctttacagtgcatggaatctccatcattgttattttaacggtagtaattcacagtcctcagaagcctgtttttaaagcagaagcaaaaaaggaaaacaaagcagcaaaaacaacccttcgtcttttctctcatctcacctttctgtgttgattactaatcatcttagatattattgctagtggatgaatggtagatgggttgaagcttttctgataattattacacaatttaaaacaatatatatttaaaataaatatatacagtcaatatattgagccatgttaacctgccaatgagatctgtgaaaaaaataatggcctcatttttccctttttaatttcttttacccttttgtgaagcagctatacgtggcatacatgtatttaaagaaaaaaataggtgtagagtgtttttttttacacttttagcatgtggtgttgaagtattactgtagatcaagtttgtcttccgcactaagatgtgaggaaattgtgatttgttctctccaccacaaatgaactacacatttattatcttctatcattttgaaacactgcagtttaccatgcgacactgtatatatttcttgccataatggtaaatgactgattgatatatttaagagttaataaatttgtgatttctgctgaca

SEQ ID NO: 364 - DNA, 4782 bp, Macaca mulatta
  source 1..4782: mol_type = genomic DNA
tgtcagcagaaatcacaaatttattaactcttaaatatatcaatcagtcatttaccattatggcaagaaatatatacagtgtcgcatggtaaactgcagtgtttcaaaatgatagaagataataaatgtgtagttcatttgtggtggagagaacaaatcacaatttcctcacatcttagtgcggaagacaaacttgatctacagtaatacttcaacaccacatgctaaaagtgtaaaaaaaaacactctacacctatttttttctttaaatacatgtatgccacgtatagctgcttcacaaaagggtaaaagaaattaaaaagggaaaaatgaggccattatttttttcacagatctcattggcaggttaacatggctcaatatattgactgtatatatttattttaaatatatattgttttaaattgtgtaataattatcagaaaagcttcaacccatctaccattcatccactagcaataatatctaagatgattagtaatcaacacagaaaggtgagatgagagaaaagacgaagggttgtttttgctgctttgttttccttttttgcttctgctttaaaaacaggcttctgaggactgtgaattactaccgttaaaataacaatgatggagattccatgcactgtaaagcatttcagagaagagaacaaaaaaatcacaggaattcaatcaacaaaggaaaaatgagaagcacaaagaaaacctaggacatttccctttttgttttaaactggaaaatcctaactccttggaggaagataacgatactctgattcaagagagaagctaaaaaacacaagtcacaaagatcaagttcaaaacacgtatgagaatggcaaacatttgtaagcctctctaacgctagaaaactagctagtgatgatgcagaagtgaccctttcattccccaaggcggaggtgagtgcgtttgcataacaccccctctgctatcaacttggtatcctcctggcaactgtcccaatcagtaagacgttgcagtcacaggaggaacttgcttttatcctaagtttaaacaattcaaatacctccaacatagttaggatacctaagtccaaagtagagcttaagcagaattataaacctttaaaatcttgacaacatttttgtgggccctgaagatgatcaaaagtgctagttaagccaccttcaaaaggcttttatttcctttttaccttcattatgcaaatttcactttttttcttttctcacacactactagccggcctcctcaaaaaaggaaaagggaagaaagtaagaaaagaatggaacaaaagaaaaataaaaaaggaagcaaacgaaaggaacaaagaaacaggataaagaaaagagatcacagattcgagaaagaaaaacaattcaattcagcaaattcaccaaaacaatgtgaatatatcctaaagtgattaaactcagaaatgatgtgaatttttccagtttacacagtttgaccaaaaagagcatggctttatgtggtagcaaaccaactgattcttgcttctactttcataagtgattttgccaacatatcaacccactttaattgctaatcagcaaaacttcccatgaaaaatcatccattttaaccaggatcacaccaggaaactgaaggtatatttttttaccttaaaaaaaacaaaaacaaaaacaaaaaaacccaaaaaaaccaaacaagccaaaacagattaacagcaaagagttctaaaaaatttacatttctcttacaaactgtcattcagagaacaatagttcttaagtctgttaaatcttggcattaacagagaaacttgatgaagagttgtacttggaatattgtggattttttctttttgtctaatctccccctattgttttgccaacagtaatttaagtttgcacggaacatccccgtagttgaagtgtaaacaatgtataggaaggaatatatgataagatgatgcatcacatatgcattacatgtaggaccttcacaacttcatgcactcagaaacatgcatgaagaggaggagaggacggcccagggtcaccatccaggtgccttgagaacagagaatgcagaagtggcactgttgatatttagaagacccatatgtgaatgattttcaggccttagatgttttgccacaaagaggtgcctcctgagaagttttctttcccatttggaatacagggtggcttgatgggtactgttggtgaccccgagcgatgaaaatgaacattctgccactttccatctcgacggtgccacacacgagtctcttctgactgcattgtctttggcattccactgccatccatgtactgtgtgagcctaatatacgctatgcaggcggcatcatcccctaccagatgtacatgagggtttagaataatagtgtggattggtttattgcttttggacaaagcattttcgaagtagaatcggtgaaaatccatcccttccactaaattacccagagcttcaggttcaaaagcagtaaggcctgggtcacagatttttgtgtaggcttcaaagtccccgttgttgatagcttcaatcagttgttcggtgactttgataatctcttgctttcgtgctttcacatcttcatcctcaattgttgtatttgaactctcagttgactccttgtttccatcagggttgtggattacagtagtttggggctccagcgccggggtaggaatattttctttggggctggttaccacgttggctttgttgtttatctttactccatctggtttcttcaacaaactcttggctgctgagaaatttcttgtagccagcatagttgtcaagatggcaccctttagttttcttctagcattaaatttcttcaagcagtctacagtctcctgtctgtgcatcatggaagcaacagtagaacgttgacagatccatgggtgcttcagtgcctctgaggctgtgatacgtttggcagggttgatagtaagcattttattgatgaggtctttggcttcaggagttaccgtgtcccattccggtgatggaaaatcataagctccagccttgatctgctgatagagtctgtgttggtcttcatcccagaagggtggataccccacaagtagaatatagagaatgacaccacatgcccacatatccactggctttccataaggatctttacgtaaaacttctggagaaagatatccaggtgtgccagcaaaaccaaaccacgcctgctggtccccttgaacttctatggctaagccaaagtctgccaatttcacagctgctcccttggatttgctagctaaaagcaaattctcaggcttcaggtccctgtgaactatgccatttaggtgacaatgatttacactttctagaatctgctgtatacaatgactggcatcagcttcactgtagtattctcttgccactatgtcttcaaacagttcacctccggtaactaaatcaaacaccaagtagtgaaagccctcctctgatatgctatcatgaagtcgcacaatattagggtgcttcaaaagacggcagattctagcttctctttctagtttctgatgatccctagcagaaagctttttggtgttgataattttggcagcatattcttgtccagtaggaattttcatacatcttctcaccactgagaatgccccctttccaagctcctcgaaaagctgatactcgtccgtgaacctggtgcaggttgtggtcgaagccatccttggtccgggctgtgccctggctgggagcgcgacggacgagaagcgagcagacgcgcggctaaccccgggattggccccgcggcgctgtcacccagggccgcccttactttcctggtccgaaagtagctcgcccgcgagggagtgtgcgcaggggcggggcgggaggggagatgaccagaaacggtggcgtggggtctcctccccacggtccgccgatcctcctcctcctgcgggcctcgcttccttcttctccactggacgctccacctgccccttttccagtccctgtccccaaatacagggggtaaagtattcaagaagagggggccgggaaatggaaaaacagccgggcacggggcgagtggcaagcagttgcgaaacgatccgcactggaggcaggaggggtagaagcagaggggagggagtccgagggggcggaggtggagtgcagcggggccgaggccgcggagcccggagcggacagccagagcccagcggcagctgtcagcaggctcaggcgcggagcgcgcccggggctcgggcgagcgtgcgcgcccgggaccggcttccctccagcgggcagcagcggatccggcgaagcgaggcaccttgactgcctcgcgctgctcacgagcccgcgcggcttcaagacggcgcagcgagagaaagagcgctcggctcggacgaagcctcgtctgccgtccccaggcctccgtctcctcccctggcgcctcctcccgccgctccctccgccagccagcaccccctccctggcgaagccccctcctcgctggtcccacacctccctctagcgactccaagtgtgtcccttcgtggatctctcgctatccctccttcggtcgcacacacgagcacacccgtctaggagaaaccaggtgggtggaggaggatttgcgggggagaagcctggaggtttgggtgaatgaggcgagacgtcagttacccatttaaacccgcacagagaagcctgcctcaatctggggctgactgagcgggaagatgcaggg

SEQ ID NO: 365 - RNA, 21 nt, synthetic construct
  source 1..21: mol_type = other RNA
taaattctacttcctcttgta

SEQ ID NO: 366 - RNA, 21 nt, synthetic construct
  source 1..21: mol_type = other RNA
attcaaactctacttctgtta

SEQ ID NO: 367 - RNA, 21 nt, synthetic construct
  source 1..21: mol_type = other RNA
tcctttatcatggtactgtaa

SEQ ID NO: 368 - RNA, 21 nt, synthetic construct
  source 1..21: mol_type = other RNA
aagaaatgttaagctcttcta

SEQ ID NO: 369 - RNA, 21 nt, synthetic construct
  source 1..21: mol_type = other RNA
ctttttatactcctttatcaa

SEQ ID NO: 370 - RNA, 21 nt, synthetic construct
  source 1..21: mol_type = other RNA
attgggaaaatacctttttaa

SEQ ID NO: 371 - RNA, 21 nt, synthetic construct
  source 1..21: mol_type = other RNA
aagacatatttccttttgcta

SEQ ID NO: 372 - RNA, 21 nt, synthetic construct
  source 1..21: mol_type = other RNA
ctacttctgttgtctagtata

SEQ ID NO: 373 - RNA, 21 nt, synthetic construct
  source 1..21: mol_type = other RNA
agtgttaggaattacaaaata

SEQ ID NO: 374 - RNA, 21 nt, synthetic construct
  source 1..21: mol_type = other RNA
atcacgtttcaagaaatgtta

SEQ ID NO: 375 - RNA, 21 nt, synthetic construct
  source 1..21: mol_type = other RNA
gtggttcaaaatgccatttta

SEQ ID NO: 376 - RNA, 21 nt, synthetic construct
  source 1..21: mol_type = other RNA
cttgtttatattaaacagcta

SEQ ID NO: 377 - RNA, 21 nt, synthetic construct
  source 1..21: mol_type = other RNA
gtgtttacttaagaccgataa

SEQ ID NO: 378 - RNA, 21 nt, synthetic construct
  source 1..21: mol_type = other RNA
ttccagagaaatttcatttta

SEQ ID NO: 379 - RNA, 21 nt, synthetic construct
  source 1..21: mol_type = other RNA
tgtaactgtatccatattata

SEQ ID NO: 380 - RNA, 21 nt, synthetic construct
  source 1..21: mol_type = other RNA
tgctgttatgaaagcaaagaa

SEQ ID NO: 381 - RNA, 21 nt, synthetic construct
  source 1..21: mol_type = other RNA
tagtatgttattgagctaata

SEQ ID NO: 382 - RNA, 21 nt, synthetic construct
  source 1..21: mol_type = other RNA
tttaccaagtatttatactca

SEQ ID NO: 383 - RNA, 21 nt, synthetic construct
  source 1..21: mol_type = other RNA
cctcttcgtcttcttcaacta

SEQ ID NO: 384 - RNA, 21 nt, synthetic construct
  source 1..21: mol_type = other RNA
gtgcaataaataccaatgaaa

SEQ ID NO: 385 - RNA, 21 nt, synthetic construct
  source 1..21: mol_type = other RNA
cttgtgtgttttaccaagtaa

SEQ ID NO: 386 - RNA, 21 nt, synthetic construct
  source 1..21: mol_type = other RNA
caccaacctcttcatcatgta

SEQ ID NO: 387 - RNA, 21 nt, synthetic construct
  source 1..21: mol_type = other RNA
agtaatgatttctgctgttaa

SEQ ID NO: 388 - RNA, 21 nt, synthetic construct
  source 1..21: mol_type = other RNA
ggtggtttttgacactctcta

SEQ ID NO: 389 - RNA, 21 nt, synthetic construct
  source 1..21: mol_type = other RNA
tgtgacatgtgactctgtcaa

SEQ ID NO: 390 - RNA, 21 nt, synthetic construct
  source 1..21: mol_type = other RNA
tgccatttttgcacagtgtta

SEQ ID NO: 391 - RNA, 21 nt, synthetic construct
  source 1..21: mol_type = other RNA
taactactgtgtgaggaatta

SEQ ID NO: 392 - RNA, 21 nt, synthetic construct
  source 1..21: mol_type = other RNA
acttgtgtgtaaattctacta

SEQ ID NO: 393 - RNA, 21 nt, synthetic construct
  source 1..21: mol_type = other RNA
gatagaaagacttgtttataa

SEQ ID NO: 394 - RNA, 21 nt, synthetic construct
  source 1..21: mol_type = other RNA
aagctcttcttggaacaagca

SEQ ID NO: 395 - RNA, 21 nt, synthetic construct
  source 1..21: mol_type = other RNA
ccacagaagatgttacttgca

SEQ ID NO: 396 - RNA, 21 nt, synthetic construct
  source 1..21: mol_type = other RNA
tctgtcaattgaagacaggaa

SEQ ID NO: 397 - RNA, 21 nt, synthetic construct
  source 1..21: mol_type = other RNA
gaaacagttcagattactgca

SEQ ID NO: 398 - RNA, 21 nt, synthetic construct
  source 1..21: mol_type = other RNA
attgagctaatgattcattga

SEQ ID NO: 399 - RNA, 21 nt, synthetic construct
  source 1..21: mol_type = other RNA
ccttttgctttccagagaaaa

SEQ ID NO: 400 - RNA, 21 nt, synthetic construct
  source 1..21: mol_type = other RNA
gtgatgcatctttagatttta

SEQ ID NO: 401 - RNA, 21 nt, synthetic construct
  source 1..21: mol_type = other RNA
aatcctcgtctgaatcatcca

SEQ ID NO: 402 - RNA, 21 nt, synthetic construct
  source 1..21: mol_type = other RNA
aaagttagcacttgtgtgtaa

SEQ ID NO: 403 - RNA, 21 nt, synthetic construct
  source 1..21: mol_type = other RNA
aattacaaaatccacagaaga

SEQ ID NO: 404 - RNA, 21 nt, synthetic construct
  source 1..21: mol_type = other RNA
atgacagtttgtcaagacata

SEQ ID NO: 405 - RNA, 21 nt, synthetic construct
  source 1..21: mol_type = other RNA
gggcagatcttaaataaaata

SEQ ID NO: 406 - RNA, 21 nt, synthetic construct
  source 1..21: mol_type = other RNA
gattaaaatcgatcatcgtga

SEQ ID NO: 407 - RNA, 21 nt, synthetic construct
  source 1..21: mol_type = other RNA
ttgctgatgttccttgttgta

SEQ ID NO: 408 - RNA, 21 nt, synthetic construct
  source 1..21: mol_type = other RNA
ctacctcacactgtgcattta

SEQ ID NO: 409 - RNA, 21 nt, synthetic construct
  source 1..21: mol_type = other RNA
gtatcaatattagttggaaga

SEQ ID NO: 410 - RNA, 21 nt, synthetic construct
  source 1..21: mol_type = other RNA
agattactgcacatgtggata

SEQ ID NO: 411 - RNA, 21 nt, synthetic construct
  source 1..21: mol_type = other RNA
gagggatttctacctcacaca

SEQ ID NO: 412 - RNA, 21 nt, synthetic construct
  source 1..21: mol_type = other RNA
tgaagacaggacattaaaaga

SEQ ID NO: 413 - RNA, 21 nt, synthetic construct
  source 1..21: mol_type = other RNA
gaggagatctgtgtttactta

SEQ ID NO: 414 - RNA, 21 nt, synthetic construct
  source 1..21: mol_type = other RNA
actctggtgcaactaactaca

SEQ ID NO: 415 - RNA, 21 nt, synthetic construct
  source 1..21: mol_type = other RNA
caccttgctttccttgtgtaa

SEQ ID NO: 416 - RNA, 21 nt, synthetic construct
  source 1..21: mol_type = other RNA
tccgtagtctccttctacgta

SEQ ID NO: 417 - RNA, 21 nt, synthetic construct
  source 1..21: mol_type = other RNA
ttgctggtgaaagttagcaca

SEQ ID NO: 418 - RNA, 21 nt, synthetic construct
  source 1..21: mol_type = other RNA
ctccttcttctgcgagctgta

SEQ ID NO: 419 - RNA, 21 nt, synthetic construct
  source 1..21: mol_type = other RNA
ggaattggtccatgtgcaata

SEQ ID NO: 420 - RNA, 21 nt, synthetic construct
  source 1..21: mol_type = other RNA
tgaatcatccgaggcaaagaa

SEQ ID NO: 421 - RNA, 21 nt, synthetic construct
  source 1..21: mol_type = other RNA
aaagcaaagagaaaggatgga

SEQ ID NO: 422 - RNA, 21 nt, synthetic construct
  source 1..21: mol_type = other RNA
tcttttgtgtgtgcgtgtgaa

SEQ ID NO: 423 - RNA, 21 nt, synthetic construct
  source 1..21: mol_type = other RNA
gcatttgcacagcagatagaa

SEQ ID NO: 424 - RNA, 21 nt, synthetic construct
  source 1..21: mol_type = other RNA
aggaaagtttgggaagggata

SEQ ID NO: 425 - RNA, 21 nt, synthetic construct
  source 1..21: mol_type = other RNA
agcctctctctgtgacatgta

SEQ ID NO: 426 - RNA, 21 nt, synthetic construct
  source 1..21: mol_type = other RNA
gggcgtcttcacgctctgcta

SEQ ID NO: 427 - RNA, 21 nt, synthetic construct
  source 1..21: mol_type = other RNA
agaaaggatggaggcaaaata

SEQ ID NO: 428 - RNA, 21 nt, synthetic construct
  source 1..21: mol_type = other RNA
gacattaaaagagagcgagaa

SEQ ID NO: 429 - RNA, 21 nt, synthetic construct
  source 1..21: mol_type = other RNA
cgggaacaggaacacactaca

SEQ ID NO: 430 - RNA, 21 nt, synthetic construct
  source 1..21: mol_type = other RNA
agagaggagaatgacagttta

SEQ ID NO: 431 - RNA, 21 nt, synthetic construct
  source 1..21: mol_type = other RNA
ctgcgacttcgtcaccaacca

SEQ ID NO: 432 - RNA, 21 nt, synthetic construct
  source 1..21: mol_type = other RNA
gcccttcttcctggccaacga

SEQ ID NO: 433 - RNA, 21 nt, synthetic construct
  source 1..21: mol_type = other RNA
taagaccgatagcaggtgaaa

SEQ ID NO: 434 - RNA, 21 nt, synthetic construct
  source 1..21: mol_type = other RNA
ggtgaagaagatcgacagcta

SEQ ID NO: 435 - RNA, 21 nt, synthetic construct
  source 1..21: mol_type = other RNA
cacgtgaatttgctggtgaaa

SEQ ID NO: 436 - RNA, 21 nt, synthetic construct
  source 1..21: mol_type = other RNA
agcgagagagagaaacagtta

SEQ ID NO: 437 - RNA, 21 nt, synthetic construct
  source 1..21: mol_type = other RNA
gaggcaaagagaaaagccaca

SEQ ID NO: 438 - RNA, 21 nt, synthetic construct
  source 1..21: mol_type = other RNA
gcccatcctcatgcactggta

SEQ ID NO: 439 - RNA, 21 nt, synthetic construct
  source 1..21: mol_type = other RNA
accctgtgtgtcattgcccta

SEQ ID NO: 440 - RNA, 21 nt, synthetic construct
  source 1..21: mol_type = other RNA
tagcaggtgaactcgaagcca

SEQ ID NO: 441 - RNA, 21 nt, synthetic construct
  source 1..21: mol_type = other RNA
gcgctcatcgtgctgctcata

SEQ ID NO: 442 - RNA, 21 nt, synthetic construct
  source 1..21: mol_type = other RNA
ctgtgcatcatggccttcgta

SEQ ID NO: 443 - RNA, 21 nt, synthetic construct
  source 1..21: mol_type = other RNA
cccatccctttcccgggaaca

SEQ ID NO: 444 - RNA, 21 nt, synthetic construct
  source 1..21: mol_type = other RNA
cctcggaatccaaggtgtaga

SEQ ID NO: 445 - RNA, 21 nt, synthetic construct
  source 1..21: mol_type = other RNA
gaagcccacaatcctcgtcta

SEQ ID NO: 446 - RNA, 21 nt, synthetic construct
  source 1..21: mol_type = other RNA
atggccttcgtgtacctgcga

SEQ ID NO: 447 - RNA, 21 nt, synthetic construct
  source 1..21: mol_type = other RNA
ttatgtccaagtgcccacgta

SEQ ID NO: 448 - RNA, 21 nt, synthetic construct
  source 1..21: mol_type = other RNA
gacactctctgagaggaccga

SEQ ID NO: 449 - RNA, 21 nt, synthetic construct
  source 1..21: mol_type = other RNA
gacgacgacgatgtcgtcgga

SEQ ID NO: 450 - RNA, 21 nt, synthetic construct
  source 1..21: mol_type = other RNA
atcgtggctcccatcccttta

SEQ ID NO: 451 - RNA, 21 nt, synthetic construct
  source 1..21: mol_type = other RNA
ctggtgtccttcctgcccata

SEQ ID NO: 452 - RNA, 21 nt, synthetic construct
  source 1..21: mol_type = other RNA
aagggagaagcattaggagga

SEQ ID NO: 453 - RNA, 21 nt, synthetic construct
  source 1..21: mol_type = other RNA
cgctgtctcagcagtggacaa

SEQ ID NO: 454 - RNA, 21 nt, synthetic construct
  source 1..21: mol_type = other RNA
tacgccaactcggccttcaaa

SEQ ID NO: 455 - RNA, 21 nt, synthetic construct
  source 1..21: mol_type = other RNA
ctcgccatcacctcgccctta

SEQ ID NO: 456 - RNA, 21 nt, synthetic construct
  source 1..21: mol_type = other RNA
gtccggccttcttttgtgtga

SEQ ID NO: 457 - RNA, 21 nt, synthetic construct
  source 1..21: mol_type = other RNA
atcgcctcgtccgtagtctca

SEQ ID NO: 458 - RNA, 21 nt, synthetic construct
  source 1..21: mol_type = other RNA
cgggcaatgtgctggtgatca

SEQ ID NO: 459 - RNA, 21 nt, synthetic construct
  source 1..21: mol_type = other RNA
cttcttcaactggctgggcta

SEQ ID NO: 460 - RNA, 21 nt, synthetic construct
  source 1..21: mol_type = other RNA
cttgtgtagggcaaacccgca

SEQ ID NO: 461 - RNA, 21 nt, synthetic construct
  source 1..21: mol_type = other RNA
ggccaacgtggtgaaggccta

SEQ ID NO: 462 - RNA, 21 nt, synthetic construct
  source 1..21: mol_type = other RNA
ggagtacggctccttcttcta

SEQ ID NO: 463 - RNA, 21 nt, synthetic construct
  source 1..21: mol_type = other RNA
gcccagaagcaggtgaagaaa

SEQ ID NO: 464 - RNA, 21 nt, synthetic construct
  source 1..21: mol_type = other RNA
cagaaggcgctcaagacgcta

SEQ ID NO: 465 - RNA, 21 nt, synthetic construct
  source 1..21: mol_type = other RNA
ttccgctaccagagcctgcta

SEQ ID NO: 466 - RNA, 21 nt, synthetic construct
  source 1..21: mol_type = other RNA
cttccgcaaggccttccagga

SEQ ID NO: 467 - RNA, 21 nt, synthetic construct
  source 1..21: mol_type = other RNA
gagtggaagatgggtgggtta

SEQ ID NO: 468 - RNA, 21 nt, synthetic construct
  source 1..21: mol_type = other RNA
ggccagcatcgagaccctgta

SEQ ID NO: 469 - RNA, 21 nt, synthetic construct
  source 1..21: mol_type = other RNA
ctgctggctgcccttcttcca

SEQ ID NO: 470 - RNA, 21 nt, synthetic construct
  source 1..21: mol_type = other RNA
gaccgctacctcgccatcaca

SEQ ID NO: 471 - RNA, 21 nt, synthetic construct
  source 1..21: mol_type = other RNA
cgtggccatcgccaagacgca

SEQ ID NO: 472 - RNA, 21 nt, synthetic construct
  source 1..21: mol_type = other RNA
atgggtctgctgatggcgcta

SEQ ID NO: 473 - RNA, 21 nt, synthetic construct
  source 1..21: mol_type = other RNA
gggcatcatcatgggcgtcta

SEQ ID NO: 474 - RNA, 21 nt, synthetic construct
  source 1..21: mol_type = other RNA
gaacacactaccagccagaga

SEQ ID NO: 475 - RNA, 21 nt, synthetic construct
  source 1..21: mol_type = other RNA
attgccctggaccgctaccta

SEQ ID NO: 476 - RNA, 21 nt, synthetic construct
  source 1..21: mol_type = other RNA
atctcggccctggtgtcctta

SEQ ID NO: 477 - RNA, 21 nt, synthetic construct
  source 1..21: mol_type = other RNA
agctgcgagcgccgtttccta

SEQ ID NO: 478 - RNA, 21 nt, synthetic construct
  source 1..21: mol_type = other RNA
catcatctactgccgcagcca

SEQ ID NO: 479 - RNA, 21 nt, synthetic construct
  source 1..21: mol_type = other RNA
gcagacgctcaccaacctcta

SEQ ID NO: 480 - RNA, 21 nt, synthetic construct
  source 1..21: mol_type = other RNA
cttccagggactgctctgcta

SEQ ID NO: 481 - RNA, 21 nt, synthetic construct
  source 1..21: mol_type = other RNA
cttcatcatgtccctggccaa

SEQ ID NO: 482 - RNA, 21 nt, synthetic construct
  source 1..21: mol_type = other RNA
aaacatgctgaagtcccggca

SEQ ID NO: 483 - RNA, 21 nt, synthetic construct
  source 1..21: mol_type = other RNA
aaggccttccaccgcgagcta

SEQ ID NO: 484 - RNA, 21 nt, synthetic construct
  source 1..21: mol_type = other RNA
caggcgcagagcctctctcta

SEQ ID NO: 485 - RNA, 21 nt, synthetic construct
  source 1..21: mol_type = other RNA
cgagcccggtaacctgtcgta

SEQ ID NO: 486 - RNA, 21 nt, synthetic construct
  source 1..21: mol_type = other RNA
ctgtggacctcagtggacgta

SEQ ID NO: 487 - RNA, 21 nt, synthetic construct
  source 1..21: mol_type = other RNA
gccacggaccgttgcacaaaa

SEQ ID NO: 488 - RNA, 21 nt, synthetic construct
  source 1..21: mol_type = other RNA
acctcgcccttccgctaccaa

SEQ ID NO: 489 - RNA, 21 nt, synthetic construct
  source 1..21: mol_type = other RNA
tcaagacgctgggcatcatca

SEQ ID NO: 490 - RNA, 21 nt, synthetic construct
  source 1..21: mol_type = other RNA
ggagagtggcttgctgatgta

SEQ ID NO: 491 - RNA, 21 nt, synthetic construct
  source 1..21: mol_type = other RNA
ctgctcatcgtggcgggcaaa

SEQ ID NO: 492 - RNA, 21 nt, synthetic construct
  source 1..21: mol_type = other RNA
accagccagagagaggagaaa

SEQ ID NO: 493 - RNA, 21 nt, synthetic construct
  source 1..21: mol_type = other RNA
gctggtgatcgtggccatcga

SEQ ID NO: 494 - RNA, 21 nt, synthetic construct
  source 1..21: mol_type = other RNA
aagtcccggcggctcttccaa

SEQ ID NO: 495 - RNA, 21 nt, synthetic construct
  source 1..21: mol_type = other RNA
ggtcaggctgagggatttcta

SEQ ID NO: 496 - RNA, 21 nt, synthetic construct
  source 1..21: mol_type = other RNA
tcagtggacgtgctgtgcgta

SEQ ID NO: 497 - RNA, 21 nt, synthetic construct
  source 1..21: mol_type = other RNA
tacctgcgggtgttccgcgaa

SEQ ID NO: 498 - RNA, 21 nt, synthetic construct
  source 1..21: mol_type = other RNA
tttctgtttgtggtccggcca

SEQ ID NO: 499 - RNA, 21 nt, synthetic construct
  source 1..21: mol_type = other RNA
accaaccgggcctacgccata

SEQ ID NO: 500 - RNA, 23 nt, synthetic construct
  source 1..23: mol_type = other RNA
tacaagaggaagtagaatttaca

SEQ ID NO: 501 - RNA, 23 nt, synthetic construct
  source 1..23: mol_type = other RNA
taacagaagtagagtttgaattt

SEQ ID NO: 502 - RNA, 23 nt, synthetic construct
  source 1..23: mol_type = other RNA
ttacagtaccatgataaaggagt

SEQ ID NO: 503 - RNA, 23 nt, synthetic construct
  source 1..23: mol_type = other RNA
tagaagagcttaacatttcttga

SEQ ID NO: 504 - RNA, 23 nt, synthetic construct
  source 1..23: mol_type = other RNA
ttgataaaggagtataaaaaggt

SEQ ID NO: 505 - RNA, 23 nt, synthetic construct
  source 1..23: mol_type = other RNA
ttaaaaaggtattttcccaatga

SEQ ID NO: 506 - RNA, 23 nt, synthetic construct
  source 1..23: mol_type = other RNA
tagcaaaaggaaatatgtcttga

SEQ ID NO: 507 - RNA, 23 nt, synthetic construct
  source 1..23: mol_type = other RNA
tatactagacaacagaagtagag

SEQ ID NO: 508 - RNA, 23 nt, synthetic construct
  source 1..23: mol_type = other RNA
tattttgtaattcctaacactgt

SEQ ID NO: 509 - RNA, 23 nt, synthetic construct
  source 1..23: mol_type = other RNA
taacatttcttgaaacgtgattt

SEQ ID NO: 510 - RNA, 23 nt, synthetic construct
  source 1..23: mol_type = other RNA
taaaatggcattttgaaccactc

SEQ ID NO: 511 - RNA, 23 nt, synthetic construct
  source 1..23: mol_type = other RNA
tagctgtttaatataaacaagtc

SEQ ID NO: 512 - RNA, 23 nt, synthetic construct
  source 1..23: mol_type = other RNA
ttatcggtcttaagtaaacacag

SEQ ID NO: 513 - RNA, 23 nt, synthetic construct
  source 1..23: mol_type = other RNA
taaaatgaaatttctctggaaag

SEQ ID NO: 514 - RNA, 23 nt, synthetic construct
  source 1..23: mol_type = other RNA
tataatatggatacagttacagt

SEQ ID NO: 515 - RNA, 23 nt, synthetic construct
  source 1..23: mol_type = other RNA
ttctttgctttcataacagcaga

SEQ ID NO: 516 - RNA, 23 nt, synthetic construct
  source 1..23: mol_type = other RNA
tattagctcaataacatactaga

SEQ ID NO: 517 - RNA, 23 nt, synthetic construct
  source 1..23: mol_type = other RNA
tgagtataaatacttggtaaaac

SEQ ID NO: 518 - RNA, 23 nt, synthetic construct
  source 1..23: mol_type = other RNA
tagttgaagaagacgaagaggcg

SEQ ID NO: 519 - RNA, 23 nt, synthetic construct
  source 1..23: mol_type = other RNA
tttcattggtatttattgcacat

SEQ ID NO: 520 - RNA, 23 nt, synthetic construct
  source 1..23: mol_type = other RNA
ttacttggtaaaacacacaagag

SEQ ID NO: 521 - RNA, 23 nt, synthetic construct
  source 1..23: mol_type = other RNA
tacatgatgaagaggttggtgag

SEQ ID NO: 522 - RNA, 23 nt, synthetic construct
  source 1..23: mol_type = other RNA
ttaacagcagaaatcattactta

SEQ ID NO: 523 - RNA, 23 nt, synthetic construct
  source 1..23: mol_type = other RNA
tagagagtgtcaaaaaccacctg

SEQ ID NO: 524 - RNA, 23 nt, synthetic construct
  source 1..23: mol_type = other RNA
ttgacagagtcacatgtcacaga

SEQ ID NO: 525 - RNA, 23 nt, synthetic construct
  source 1..23: mol_type = other RNA
taacactgtgcaaaaatggcatt

SEQ ID NO: 526 - RNA, 23 nt, synthetic construct
  source 1..23: mol_type = other RNA
taattcctcacacagtagttagt

SEQ ID NO: 527 - RNA, 23 nt, synthetic construct
  source 1..23: mol_type = other RNA
tagtagaatttacacacaagtgc

SEQ ID NO: 528 - RNA, 23 nt, synthetic construct
  source 1..23: mol_type = other RNA
ttataaacaagtctttctatctg

SEQ ID NO: 529 - RNA, 23 nt, synthetic construct
  source 1..23: mol_type = other RNA
tgcttgttccaagaagagcttaa

SEQ ID NO: 530 - RNA, 23 nt, synthetic construct
  source 1..23: mol_type = other RNA
tgcaagtaacatcttctgtggat

SEQ ID NO: 531 - RNA, 23 nt, synthetic construct
  source 1..23: mol_type = other RNA
ttcctgtcttcaattgacagagt

SEQ ID NO: 532 - RNA, 23 nt, synthetic construct
  source 1..23: mol_type = other RNA
tgcagtaatctgaactgtttctc

SEQ ID NO: 533 - RNA, 23 nt, synthetic construct
  source 1..23: mol_type = other RNA
tcaatgaatcattagctcaataa

SEQ ID NO: 534 - RNA, 23 nt, synthetic construct
  source 1..23: mol_type = other RNA
ttttctctggaaagcaaaaggaa

SEQ ID NO: 535 - RNA, 23 nt, synthetic construct
  source 1..23: mol_type = other RNA
taaaatctaaagatgcatcacac

SEQ ID NO: 536 - RNA, 23 nt, synthetic construct
  source 1..23: mol_type = other RNA
tggatgattcagacgaggattgt

SEQ ID NO: 537 - RNA, 23 nt, synthetic construct
  source 1..23: mol_type = other RNA
ttacacacaagtgctaactttca

SEQ ID NO: 538 - RNA, 23 nt, synthetic construct
  source 1..23: mol_type = other RNA
tcttctgtggattttgtaattcc

SEQ ID NO: 539 - RNA, 23 nt, synthetic construct
  source 1..23: mol_type = other RNA
tatgtcttgacaaactgtcattc

SEQ ID NO: 540 - RNA, 23 nt, synthetic construct
  source 1..23: mol_type = other RNA
tattttatttaagatctgcccag

SEQ ID NO: 541 - RNA, 23 nt, synthetic construct
  source 1..23: mol_type = other RNA
tcacgatgatcgattttaatccc

SEQ ID NO: 542 - RNA, 23 nt, synthetic construct
  source 1..23: mol_type = other RNA
tacaacaaggaacatcagcaagc

SEQ ID NO: 543 - RNA, 23 nt, synthetic construct
  source 1..23: mol_type = other RNA
taaatgcacagtgtgaggtagaa

SEQ ID NO: 544 - RNA, 23 nt, synthetic construct
  source 1..23: mol_type = other RNA
tcttccaactaatattgatacat

SEQ ID NO: 545 - RNA, 23 nt, synthetic construct
  source 1..23: mol_type = other RNA
tatccacatgtgcagtaatctga

SEQ ID NO: 546 - RNA, 23 nt, synthetic construct
  source 1..23: mol_type = other RNA
tgtgtgaggtagaaatccctcag

SEQ ID NO: 547 - RNA, 23 nt, synthetic construct
  source 1..23: mol_type = other RNA
tcttttaatgtcctgtcttcaat

SEQ ID NO: 548 - RNA, 23 nt, synthetic construct
  source 1..23: mol_type = other RNA
taagtaaacacagatctcctcgt

SEQ ID NO: 549 - RNA, 23 nt, synthetic construct
  source 1..23: mol_type = other RNA
tgtagttagttgcaccagagtat

SEQ ID NO: 550 - RNA, 23 nt, synthetic construct
  source 1..23: mol_type = other RNA
ttacacaaggaaagcaaggtggg

SEQ ID NO: 551 - RNA, 23 nt, synthetic construct
  source 1..23: mol_type = other RNA
tacgtagaaggagactacggacg

SEQ ID NO: 552 - RNA, 23 nt, synthetic construct
  source 1..23: mol_type = other RNA
tgtgctaactttcaccagcaaat

SEQ ID NO: 553 - RNA, 23 nt, synthetic construct
  source 1..23: mol_type = other RNA
tacagctcgcagaagaaggagcc

SEQ ID NO: 554 - RNA, 23 nt, synthetic construct
  source 1..23: mol_type = other RNA
tattgcacatggaccaattcctc

SEQ ID NO: 555 - RNA, 23 nt, synthetic construct
  source 1..23: mol_type = other RNA
ttctttgcctcggatgattcaga

SEQ ID NO: 556 - RNA, 23 nt, synthetic construct
  source 1..23: mol_type = other RNA
tccatcctttctctttgctttca

SEQ ID NO: 557 - RNA, 23 nt, synthetic construct
  source 1..23: mol_type = other RNA
ttcacacgcacacacaaaagaag

SEQ ID NO: 558 - RNA, 23 nt, synthetic construct
  source 1..23: mol_type = other RNA
ttctatctgctgtgcaaatgcac

SEQ ID NO: 559 - RNA, 23 nt, synthetic construct
  source 1..23: mol_type = other RNA
tatcccttcccaaactttccttt

SEQ ID NO: 560 - RNA, 23 nt, synthetic construct
  source 1..23: mol_type = other RNA
tacatgtcacagagagaggctct

SEQ ID NO: 561 - RNA, 23 nt, synthetic construct
  source 1..23: mol_type = other RNA
tagcagagcgtgaagacgcccat

SEQ ID NO: 562 - RNA, 23 nt, synthetic construct
  source 1..23: mol_type = other RNA
tattttgcctccatcctttctct

SEQ ID NO: 563 - RNA, 23 nt, synthetic construct
  source 1..23: mol_type = other RNA
ttctcgctctcttttaatgtcct

SEQ ID NO: 564 - RNA, 23 nt, synthetic construct
  source 1..23: mol_type = other RNA
tgtagtgtgttcctgttcccggg

SEQ ID NO: 565 - RNA, 23 nt, synthetic construct
  source 1..23: mol_type = other RNA
taaactgtcattctcctctctct

SEQ ID NO: 566 - RNA, 23 nt, synthetic construct
  source 1..23: mol_type = other RNA
tggttggtgacgaagtcgcagca

SEQ ID NO: 567 - RNA, 23 nt, synthetic construct
  source 1..23: mol_type = other RNA
tcgttggccaggaagaagggcag

SEQ ID NO: 568 - RNA, 23 nt, synthetic construct
  source 1..23: mol_type = other RNA
tttcacctgctatcggtcttaag

SEQ ID NO: 569 - RNA, 23 nt, synthetic construct
  source 1..23: mol_type = other RNA
tagctgtcgatcttcttcacctg

SEQ ID NO: 570 - RNA, 23 nt, synthetic construct
  source 1..23: mol_type = other RNA
tttcaccagcaaattcacgtggg

SEQ ID NO: 571 - RNA, 23 nt, synthetic construct
  source 1..23: mol_type = other RNA
taactgtttctctctctcgctct

SEQ ID NO: 572 - RNA, 23 nt, synthetic construct
  source 1..23: mol_type = other RNA
tgtggcttttctctttgcctcgg

SEQ ID NO: 573 - RNA, 23 nt, synthetic construct
  source 1..23: mol_type = other RNA
taccagtgcatgaggatgggcag

SEQ ID NO: 574 - RNA, 23 nt, synthetic construct
  source 1..23: mol_type = other RNA
tagggcaatgacacacagggtct

SEQ ID NO: 575 - RNA, 23 nt, synthetic construct
  source 1..23: mol_type = other RNA
tggcttcgagttcacctgctatc

SEQ ID NO: 576 - RNA, 23 nt, synthetic construct
  source 1..23: mol_type = other RNA
tatgagcagcacgatgagcgcca

SEQ ID NO: 577 - RNA, 23 nt, synthetic construct
  source 1..23: mol_type = other RNA
tacgaaggccatgatgcacaggg

SEQ ID NO: 578 - RNA, 23 nt, synthetic construct
  source 1..23: mol_type = other RNA
tgttcccgggaaagggatgggag

SEQ ID NO: 579 - RNA, 23 nt, synthetic construct
  source 1..23: mol_type = other RNA
tctacaccttggattccgaggcg

SEQ ID NO: 580 - RNA, 23 nt, synthetic construct
  source 1..23: mol_type = other RNA
tagacgaggattgtgggcttcga

SEQ ID NO: 581 - RNA, 23 nt, synthetic construct
  source 1..23: mol_type = other RNA
tcgcaggtacacgaaggccatga

SEQ ID NO: 582 - RNA, 23 nt, synthetic construct
  source 1..23: mol_type = other RNA
tacgtgggcacttggacataaaa

SEQ ID NO: 583 - RNA, 23 nt, synthetic construct
  source 1..23: mol_type = other RNA
tcggtcctctcagagagtgtcaa

SEQ ID NO: 584 - RNA, 23 nt, synthetic construct
  source 1..23: mol_type = other RNA
tccgacgacatcgtcgtcgtcgt

SEQ ID NO: 585 - RNA, 23 nt, synthetic construct
  source 1..23: mol_type = other RNA
taaagggatgggagccacgatga

SEQ ID NO: 586 - RNA, 23 nt, synthetic construct
  source 1..23: mol_type = other RNA
tatgggcaggaaggacaccaggg

SEQ ID NO: 587 - RNA, 23 nt, synthetic construct
  source 1..23: mol_type = other RNA
tcctcctaatgcttctcccttcc

SEQ ID NO: 588 - RNA, 23 nt, synthetic construct
  source 1..23: mol_type = other RNA
ttgtccactgctgagacagcggc

SEQ ID NO: 589 - RNA, 23 nt, synthetic construct
  source 1..23: mol_type = other RNA
tttgaaggccgagttggcgtagc

SEQ ID NO: 590 - RNA, 23 nt, synthetic construct
  source 1..23: mol_type = other RNA
taagggcgaggtgatggcgaggt

SEQ ID NO: 591 - RNA, 23 nt, synthetic construct
  source 1..23: mol_type = other RNA
tcacacaaaagaaggccggacca

SEQ ID NO: 592 - RNA, 23 nt, synthetic construct
  source 1..23: mol_type = other RNA
tgagactacggacgaggcgatgg

SEQ ID NO: 593 - RNA, 23 nt, synthetic construct
  source 1..23: mol_type = other RNA
tgatcaccagcacattgcccgcc

SEQ ID NO: 594 - RNA, 23 nt, synthetic construct
  source 1..23: mol_type = other RNA
tagcccagccagttgaagaagac

SEQ ID NO: 595 - RNA, 23 nt, synthetic construct
  source 1..23: mol_type = other RNA
tgcgggtttgccctacacaagga

SEQ ID NO: 596 - RNA, 23 nt, synthetic construct
  source 1..23: mol_type = other RNA
taggccttcaccacgttggccag

SEQ ID NO: 597 - RNA, 23 nt, synthetic construct
  source 1..23: mol_type = other RNA
tagaagaaggagccgtactccca

SEQ ID NO: 598 - RNA, 23 nt, synthetic construct
  source 1..23: mol_type = other RNA
tttcttcacctgcttctgggcct

SEQ ID NO: 599 - RNA, 23 nt, synthetic construct
  source 1..23: mol_type = other RNA
tagcgtcttgagcgccttctgct

SEQ ID NO: 600 - RNA, 23 nt, synthetic construct
  source 1..23: mol_type = other RNA
tagcaggctctggtagcggaagg

SEQ ID NO: 601 - RNA, 23 nt, synthetic construct
  source 1..23: mol_type = other RNA
tcctggaaggccttgcggaagtc

SEQ ID NO: 602 - RNA, 23 nt, synthetic construct
  source 1..23: mol_type = other RNA
taacccacccatcttccactccg

SEQ ID NO: 603 - RNA, 23 nt, synthetic construct
  source 1..23: mol_type = other RNA
tacagggtctcgatgctggccgt

SEQ ID NO: 604 - RNA, 23 nt, synthetic construct
  source 1..23: mol_type = other RNA
tggaagaagggcagccagcagag

SEQ ID NO: 605 - RNA, 23 nt, synthetic construct
  source 1..23: mol_type = other RNA
tgtgatggcgaggtagcggtcca

SEQ ID NO: 606 - RNA, 23 nt, synthetic construct
  source 1..23: mol_type = other RNA
tgcgtcttggcgatggccacgat

SEQ ID NO: 607 - RNA, 23 nt, synthetic construct
  source 1..23: mol_type = other RNA
tagcgccatcagcagacccatgc

SEQ ID NO: 608 - RNA, 23 nt, synthetic construct
  source 1..23: mol_type = other RNA
tagacgcccatgatgatgcccag

SEQ ID NO: 609 - RNA, 23 nt, synthetic construct
  source 1..23: mol_type = other RNA
tctctggctggtagtgtgttcct

SEQ ID NO: 610 - RNA, 23 nt, synthetic construct
  source 1..23: mol_type = other RNA
taggtagcggtccagggcaatga

SEQ ID NO: 611 - RNA, 23 nt, synthetic construct
  source 1..23: mol_type = other RNA
taaggacaccagggccgagatgg

SEQ ID NO: 612 - RNA, 23 nt, synthetic construct
  source 1..23: mol_type = other RNA
taggaaacggcgctcgcagctgt

SEQ ID NO: 613 - RNA, 23 nt, synthetic construct
  source 1..23: mol_type = other RNA
tggctgcggcagtagatgatggg

SEQ ID NO: 614 - RNA, 23 nt, synthetic construct
  source 1..23: mol_type = other RNA
tagaggttggtgagcgtctgcag

SEQ ID NO: 615 - RNA, 23 nt, synthetic construct
  source 1..23: mol_type = other RNA
tagcagagcagtccctggaaggc

SEQ ID NO: 616 - RNA, 23 nt, synthetic construct
  source 1..23: mol_type = other RNA
ttggccagggacatgatgaagag

SEQ ID NO: 617 - RNA, 23 nt, synthetic construct
  source 1..23: mol_type = other RNA
tgccgggacttcagcatgtttct

SEQ ID NO: 618 - RNA, 23 nt, synthetic construct
  source 1..23: mol_type = other RNA
tagctcgcggtggaaggccttca

SEQ ID NO: 619 - RNA, 23 nt, synthetic construct
  source 1..23: mol_type = other RNA
tagagagaggctctgcgcctggt

SEQ ID NO: 620 - RNA, 23 nt, synthetic construct
  source 1..23: mol_type = other RNA
tacgacaggttaccgggctcgga

SEQ ID NO: 621 - RNA, 23 nt, synthetic construct
  source 1..23: mol_type = other RNA
tacgtccactgaggtccacagct

SEQ ID NO: 622 - RNA, 23 nt, synthetic construct
  source 1..23: mol_type = other RNA
ttttgtgcaacggtccgtggctt

SEQ ID NO: 623 - RNA, 23 nt, synthetic construct
  source 1..23: mol_type = other RNA
ttggtagcggaagggcgaggtga

SEQ ID NO: 624 - RNA, 23 nt, synthetic construct
  source 1..23: mol_type = other RNA
tgatgatgcccagcgtcttgagc

SEQ ID NO: 625 - RNA, 23 nt, synthetic construct
  source 1..23: mol_type = other RNA
tacatcagcaagccactctccca

SEQ ID NO: 626 - RNA, 23 nt, synthetic construct
  source 1..23: mol_type = other RNA
tttgcccgccacgatgagcagca

SEQ ID NO: 627 - RNA, 23 nt, synthetic construct
  source 1..23: mol_type = other RNA
tttctcctctctctggctggtag

SEQ ID NO: 628 - RNA, 23 nt, synthetic construct
  source 1..23: mol_type = other RNA
tcgatggccacgatcaccagcac

SEQ ID NO: 629 - RNA, 23 nt, synthetic construct
  source 1..23: mol_type = other RNA
ttggaagagccgccgggacttca

SEQ ID NO: 630 - RNA, 23 nt, synthetic construct
  source 1..23: mol_type = other RNA
tagaaatccctcagcctgaccac

SEQ ID NO: 631 - RNA, 23 nt, synthetic construct
  source 1..23: mol_type = other RNA
tacgcacagcacgtccactgagg

SEQ ID NO: 632 - RNA, 23 nt, synthetic construct
  source 1..23: mol_type = other RNA
ttcgcggaacacccgcaggtaca

SEQ ID NO: 633 - RNA, 23 nt, synthetic construct
  source 1..23: mol_type = other RNA
tggccggaccacaaacagaaaaa

SEQ ID NO: 634 - RNA, 23 nt, synthetic construct
  source 1..23: mol_type = other RNA
tatggcgtaggcccggttggtga

SEQ ID NO: 635 - RNA, 21 nt, synthetic construct
  source 1..21: mol_type = other RNA
  modified_base 1: mod_base = OTHER; note = 2'-O-methyluridine-3'-phosphorothioate
  modified_base 2: mod_base = OTHER; note = 2'-O-methyladenosine-3'-phosphorothioate
  modified_base 3: mod_base = OTHER; note = 2'-O-methyladenosine-3'-phosphate
  modified_base 4: mod_base = OTHER; note = 2'-O-methyladenosine-3'-phosphate
  modified_base 5: mod_base = OTHER; note = 2'-O-methyluridine-3'-phosphate
  modified_base 6: mod_base = OTHER; note = 2'-O-docosanyl-uridine-3'-phosphate
  modified_base 7: mod_base = OTHER; note = 2'-deoxy-2'-fluorocytidine-3'-phosphate
  modified_base 8: mod_base = OTHER; note = 2'-O-methyluridine-3'-phosphate
  modified_base 9: mod_base = OTHER; note = 2'-deoxy-2'-fluoroadenosine-3'-phosphate
  modified_base 10: mod_base = OTHER; note = 2'-deoxy-2'-fluorocytidine-3'-phosphate
  modified_base 11: mod_base = OTHER; note = 2'-deoxy-2'-fluorouridine-3'-phosphate
  modified_base 12: mod_base = OTHER; note = 2'-O-methyluridine-3'-phosphate
  modified_base 13: mod_base = OTHER; note = 2'-O-methylcytidine-3'-phosphate
  modified_base 14: mod_base = OTHER; note = 2'-O-methylcytidine-3'-phosphate
  modified_base 15: mod_base = OTHER; note = 2'-O-methyluridine-3'-phosphate
  modified_base 16: mod_base = OTHER; note = 2'-O-methylcytidine-3'-phosphate
  modified_base 17: mod_base = OTHER; note = 2'-O-methyluridine-3'-phosphate
  modified_base 18: mod_base = OTHER; note = 2'-O-methyluridine-3'-phosphate
  modified_base 19: mod_base = OTHER; note = 2'-O-methylguanosine-3'-phosphorothioate
  modified_base 20: mod_base = OTHER; note = 2'-O-methyluridine-3'-phosphorothioate
  modified_base 21: mod_base = OTHER; note = 2'-O-methyladenosine
taaattctacttcctcttgta

SEQ ID NO: 636 - RNA, 21 nt, synthetic construct
  source 1..21: mol_type = other RNA
  modified_base 1: mod_base = OTHER; note = 2'-O-methyladenosine-3'-phosphorothioate
  modified_base 2: mod_base = OTHER; note = 2'-O-methyluridine-3'-phosphorothioate
  modified_base 3: mod_base = OTHER; note = 2'-O-methyluridine-3'-phosphate
  modified_base 4: mod_base = OTHER; note = 2'-O-methylcytidine-3'-phosphate
  modified_base 5: mod_base = OTHER; note = 2'-O-methyladenosine-3'-phosphate
  modified_base 6: mod_base = OTHER; note = 2'-O-docosanyl-adenosine-3'-phosphate
  modified_base 7: mod_base = OTHER; note = 2'-deoxy-2'-fluoroadenosine-3'-phosphate
  modified_base 8: mod_base = OTHER; note = 2'-O-methylcytidine-3'-phosphate
  modified_base 9: mod_base = OTHER; note = 2'-deoxy-2'-fluorouridine-3'-phosphate
  modified_base 10: mod_base = OTHER; note = 2'-deoxy-2'-fluorocytidine-3'-phosphate
  modified_base 11: mod_base = OTHER; note = 2'-deoxy-2'-fluorouridine-3'-phosphate
  modified_base 12: mod_base = OTHER; note = 2'-O-methyladenosine-3'-phosphate
  modified_base 13: mod_base = OTHER; note = 2'-O-methylcytidine-3'-phosphate
  modified_base 14: mod_base = OTHER; note = 2'-O-methyluridine-3'-phosphate
  modified_base 15: mod_base = OTHER; note = 2'-O-methyluridine-3'-phosphate
  modified_base 16: mod_base = OTHER; note = 2'-O-methylcytidine-3'-phosphate
  modified_base 17: mod_base = OTHER; note = 2'-O-methyluridine-3'-phosphate
  modified_base 18: mod_base = OTHER; note = 2'-O-methylguanosine-3'-phosphate
  modified_base 19: mod_base = OTHER; note = 2'-O-methyluridine-3'-phosphorothioate
  modified_base 20: mod_base = OTHER; note = 2'-O-methyluridine-3'-phosphorothioate
  modified_base 21: mod_base = OTHER; note = 2'-O-methyladenosine
attcaaactctacttctgtta

SEQ ID NO: 637 - RNA, 21 nt, synthetic construct
  source 1..21: mol_type = other RNA
  modified_base 1: mod_base = OTHER; note = 2'-O-methyluridine-3'-phosphorothioate
  modified_base 2: mod_base = OTHER; note = 2'-O-methylcytidine-3'-phosphorothioate
  modified_base 3: mod_base = OTHER; note = 2'-O-methylcytidine-3'-phosphate
  modified_base 4: mod_base = OTHER; note = 2'-O-methyluridine-3'-phosphate
  modified_base 5: mod_base = OTHER; note = 2'-O-methyluridine-3'-phosphate
  modified_base 6: mod_base = OTHER; note = 2'-O-docosanyl-uridine-3'-phosphate
  modified_base 7: mod_base = OTHER; note = 2'-deoxy-2'-fluoroadenosine-3'-phosphate
  modified_base 8: mod_base = OTHER; note = 2'-O-methyluridine-3'-phosphate
  modified_base 9: mod_base = OTHER; note = 2'-deoxy-2'-fluorocytidine-3'-phosphate
  modified_base 10: mod_base = OTHER; note = 2'-deoxy-2'-fluoroadenosine-3'-phosphate
  modified_base 11: mod_base = OTHER; note = 2'-deoxy-2'-fluorouridine-3'-phosphate
  modified_base 12: mod_base = OTHER; note = 2'-O-methylguanosine-3'-phosphate
  modified_base 13: mod_base = OTHER; note = 2'-O-methylguanosine-3'-phosphate
  modified_base 14: mod_base = OTHER; note = 2'-O-methyluridine-3'-phosphate
  modified_base 15: mod_base = OTHER; note = 2'-O-methyladenosine-3'-phosphate
  modified_base 16: mod_base = OTHER; note = 2'-O-methylcytidine-3'-phosphate
  modified_base 17: mod_base = OTHER; note = 2'-O-methyluridine-3'-phosphate
  modified_base 18: mod_base = OTHER; note = 2'-O-methylguanosine-3'-phosphate
  modified_base 19: mod_base = OTHER; note = 2'-O-methyluridine-3'-phosphorothioate
  modified_base 20: mod_base = OTHER; note = 2'-O-methyladenosine-3'-phosphorothioate
  modified_base 21: mod_base = OTHER; note = 2'-O-methyladenosine
tcctttatcatggtactgtaa

SEQ ID NO: 638 - RNA, 21 nt, synthetic construct
  source 1..21: mol_type = other RNA
  modified_base 1: mod_base = OTHER; note = 2'-O-methyladenosine-3'-phosphorothioate
  modified_base 2: mod_base = OTHER; note = 2'-O-methyladenosine-3'-phosphorothioate
  modified_base 3: mod_base = OTHER; note = 2'-O-methylguanosine-3'-phosphate
  modified_base 4: mod_base = OTHER; note = 2'-O-methyladenosine-3'-phosphate
  modified_base 5: mod_base = OTHER; note = 2'-O-methyladenosine-3'-phosphate
  modified_base 6: mod_base = OTHER; note = 2'-O-docosanyl-adenosine-3'-phosphate
  modified_base 7: mod_base = OTHER; note = 2'-deoxy-2'-fluorouridine-3'-phosphate
  modified_base 8: mod_base = OTHER; note = 2'-O-methylguanosine-3'-phosphate
  modified_base 9: mod_base = OTHER; note = 2'-deoxy-2'-fluorouridine-3'-phosphate
  modified_base 10: mod_base = OTHER; note = 2'-deoxy-2'-fluorouridine-3'-phosphate
  modified_base 11: mod_base = OTHER; note = 2'-deoxy-2'-fluoroadenosine-3'-phosphate
  modified_base 12: mod_base = OTHER; note = 2'-O-methyladenosine-3'-phosphate
  modified_base 13: mod_base = OTHER; note = 2'-O-methylguanosine-3'-phosphate
  modified_base 14: mod_base = OTHER; note = 2'-O-methylcytidine-3'-phosphate
  modified_base 15: mod_base = OTHER; note = 2'-O-methyluridine-3'-phosphate
  modified_base 16: mod_base = OTHER; note = 2'-O-methylcytidine-3'-phosphate
  modified_base 17: mod_base = OTHER; note = 2'-O-methyluridine-3'-phosphate
  modified_base 18: mod_base = OTHER; note = 2'-O-methyluridine-3'-phosphate
  modified_base 19: mod_base = OTHER; note = 2'-O-methylcytidine-3'-phosphorothioate
  modified_base 20: mod_base = OTHER; note = 2'-O-methyluridine-3'-phosphorothioate
  modified_base 21: mod_base = OTHER; note = 2'-O-methyladenosine
aagaaatgttaagctcttcta

SEQ ID NO: 639 - RNA, 21 nt, synthetic construct
  source 1..21: mol_type = other RNA
  modified_base 1: mod_base = OTHER; note = 2'-O-methylcytidine-3'-phosphorothioate
  modified_base 2: mod_base = OTHER; note = 2'-O-methyluridine-3'-phosphorothioate
  modified_base 3: mod_base = OTHER; note = 2'-O-methyluridine-3'-phosphate
  modified_base 4: mod_base = OTHER; note = 2'-O-methyluridine-3'-phosphate
  modified_base 5: mod_base = OTHER; note = 2'-O-methyluridine-3'-phosphate
  modified_base 6: mod_base = OTHER; note = 2'-O-docosanyl-uridine-3'-phosphate
  modified_base 7: mod_base = OTHER; note = 2'-deoxy-2'-fluoroadenosine-3'-phosphate
  modified_base 8: mod_base = OTHER; note = 2'-O-methyluridine-3'-phosphate
  modified_base 9: mod_base = OTHER; note = 2'-deoxy-2'-fluoroadenosine-3'-phosphate
  modified_base 10: mod_base = OTHER; note = 2'-deoxy-2'-fluorocytidine-3'-phosphate
  modified_base 11: mod_base = OTHER; note = 2'-deoxy-2'-fluorouridine-3'-phosphate
  modified_base 12: mod_base = OTHER; note = 2'-O-methylcytidine-3'-phosphate
  modified_base 13: mod_base = OTHER; note = 2'-O-methylcytidine-3'-phosphate
  modified_base 14: mod_base = OTHER; note = 2'-O-methyluridine-3'-phosphate
  modified_base 15: mod_base = OTHER; note = 2'-O-methyluridine-3'-phosphate
  modified_base 16: mod_base = OTHER; note = 2'-O-methyluridine-3'-phosphate
  modified_base 17: mod_base = OTHER; note = 2'-O-methyladenosine-3'-phosphate
  modified_base 18: mod_base = OTHER; note = 2'-O-methyluridine-3'-phosphate
  modified_base 19: mod_base = OTHER; note = 2'-O-methylcytidine-3'-phosphorothioate
  modified_base 20: mod_base = OTHER; note = 2'-O-methyladenosine-3'-phosphorothioate
  modified_base 21: mod_base = OTHER; note = 2'-O-methyladenosine
ctttttatactcctttatcaa

SEQ ID NO: 640 - RNA, 21 nt, synthetic construct
  source 1..21: mol_type = other RNA
  modified_base 1: mod_base = OTHER; note = 2'-O-methyladenosine-3'-phosphorothioate
  modified_base 2: mod_base = OTHER; note = 2'-O-methyluridine-3'-phosphorothioate
  modified_base 3: mod_base = OTHER; note = 2'-O-methyluridine-3'-phosphate
  modified_base 4: mod_base = OTHER; note = 2'-O-methylguanosine-3'-phosphate
  modified_base 5: mod_base = OTHER; note = 2'-O-methylguanosine-3'-phosphate
  modified_base 6: mod_base = OTHER; note = 2'-O-docosanyl-guanosine-3'-phosphate
  modified_base 7: mod_base = OTHER; note = 2'-deoxy-2'-fluoroadenosine-3'-phosphate
  modified_base 8: mod_base = OTHER; note = 2'-O-methyladenosine-3'-phosphate
  modified_base 9: mod_base = OTHER; note = 2'-deoxy-2'-fluoroadenosine-3'-phosphate
  modified_base 10: mod_base = OTHER; note = 2'-deoxy-2'-fluoroadenosine-3'-phosphate
  modified_base 11: mod_base = OTHER; note = 2'-deoxy-2'-fluorouridine-3'-phosphate
  modified_base 12: mod_base = OTHER; note = 2'-O-methyladenosine-3'-phosphate
  modified_base 13: mod_base = OTHER; note = 2'-O-methylcytidine-3'-phosphate
  modified_base 14: mod_base = OTHER; note = 2'-O-methylcytidine-3'-phosphate
  modified_base 15: mod_base = OTHER; note = 2'-O-methyluridine-3'-phosphate
  modified_base 16: mod_base = OTHER; note = 2'-O-methyluridine-3'-phosphate
  modified_base 17: mod_base = OTHER; note = 2'-O-methyluridine-3'-phosphate
  modified_base 18: mod_base = OTHER; note = 2'-O-methyluridine-3'-phosphate
  modified_base 19: mod_base = OTHER; note = 2'-O-methyluridine-3'-phosphorothioate
  modified_base 20: mod_base = OTHER; note = 2'-O-methyladenosine-3'-phosphorothioate
  modified_base 21: mod_base = OTHER; note = 2'-O-methyladenosine
attgggaaaatacctttttaa

SEQ ID NO: 641 - RNA, 21 nt, synthetic construct
  source 1..21: mol_type = other RNA
  modified_base 1: mod_base = OTHER; note = 2'-O-methyladenosine-3'-phosphorothioate
  modified_base 2: mod_base = OTHER; note = 2'-O-methyladenosine-3'-phosphorothioate
  modified_base 3: mod_base = OTHER; note = 2'-O-methylguanosine-3'-phosphate
  modified_base 4: mod_base = OTHER; note = 2'-O-methyladenosine-3'-phosphate
  modified_base 5: mod_base = OTHER; note = 2'-O-methylcytidine-3'-phosphate
  modified_base 6: mod_base = OTHER; note = 2'-O-docosanyl-adenosine-3'-phosphate
  modified_base 7: mod_base = OTHER; note = 2'-deoxy-2'-fluorouridine-3'-phosphate
  modified_base 8: mod_base = OTHER; note = 2'-O-methyladenosine-3'-phosphate
  modified_base 9: mod_base = OTHER; note = 2'-deoxy-2'-fluorouridine-3'-phosphate
  modified_base 10: mod_base = OTHER; note = 2'-deoxy-2'-fluorouridine-3'-phosphate
  modified_base 11: mod_base = OTHER; note = 2'-deoxy-2'-fluorouridine-3'-phosphate
  modified_base 12: mod_base = OTHER; note = 2'-O-methylcytidine-3'-phosphate
  modified_base 13: mod_base = OTHER; note = 2'-O-methylcytidine-3'-phosphate
  modified_base 14: mod_base = OTHER; note = 2'-O-methyluridine-3'-phosphate
  modified_base 15: mod_base = OTHER; note = 2'-O-methyluridine-3'-phosphate
  modified_base 16: mod_base = OTHER; note = 2'-O-methyluridine-3'-phosphate
  modified_base 17: mod_base = OTHER; note = 2'-O-methyluridine-3'-phosphate
  modified_base 18: mod_base = OTHER; note = 2'-O-methylguanosine-3'-phosphate
  modified_base 19: mod_base = OTHER; note = 2'-O-methylcytidine-3'-phosphorothioate
  modified_base 20: mod_base = OTHER; note = 2'-O-methyluridine-3'-phosphorothioate
  modified_base 21: mod_base = OTHER; note = 2'-O-methyladenosine
aagacatatttccttttgcta

SEQ ID NO: 642 - RNA, 21 nt, synthetic construct
  source 1..21: mol_type = other RNA
  modified_base 1: mod_base = OTHER; note = 2'-O-methylcytidine-3'-phosphorothioate
  modified_base 2: mod_base = OTHER; note = 2'-O-methyluridine-3'-phosphorothioate
  modified_base 3: mod_base = OTHER; note = 2'-O-methyladenosine-3'-phosphate
  modified_base 4: mod_base = OTHER; note = 2'-O-methylcytidine-3'-phosphate
  modified_base 5: mod_base = OTHER; note = 2'-O-methyluridine-3'-phosphate
  modified_base 6: mod_base = OTHER; note = 2'-O-docosanyl-uridine-3'-phosphate
  modified_base 7: mod_base = OTHER; note = 2'-deoxy-2'-fluorocytidine-3'-phosphate
  modified_base 8: mod_base = OTHER; note = 2'-O-methyluridine-3'-phosphate
  modified_base 9: mod_base = OTHER; note = 2'-deoxy-2'-fluoroguanosine-3'-phosphate
  modified_base 10: mod_base = OTHER; note = 2'-deoxy-2'-fluorouridine-3'-phosphate
  modified_base 11: mod_base = OTHER; note = 2'-deoxy-2'-fluorouridine-3'-phosphate
  modified_base 12: mod_base = OTHER; note = 2'-O-methylguanosine-3'-phosphate
  modified_base 13: mod_base = OTHER; note = 2'-O-methyluridine-3'-phosphate
  modified_base 14: mod_base = OTHER; note = 2'-O-methylcytidine-3'-phosphate
  modified_base 15: mod_base = OTHER; note = 2'-O-methyluridine-3'-phosphate
  modified_base 16: mod_base = OTHER; note = 2'-O-methyladenosine-3'-phosphate
  modified_base 17: mod_base = OTHER; note = 2'-O-methylguanosine-3'-phosphate
  modified_base 18: mod_base = OTHER; note = 2'-O-methyluridine-3'-phosphate
  modified_base 19: mod_base = OTHER; note = 2'-O-methyladenosine-3'-phosphorothioate
  modified_base 20: mod_base = OTHER; note = 2'-O-methyluridine-3'-phosphorothioate
  modified_base 21: mod_base = OTHER; note = 2'-O-methyladenosine
ctacttctgttgtctagtata

SEQ ID NO: 643 - RNA, 21 nt, synthetic construct
  source 1..21: mol_type = other RNA
  modified_base 1: mod_base = OTHER; note = 2'-O-methyladenosine-3'-phosphorothioate
  modified_base 2: mod_base = OTHER; note = 2'-O-methylguanosine-3'-phosphorothioate
  modified_base 3: mod_base = OTHER; note = 2'-O-methyluridine-3'-phosphate
  modified_base 4: mod_base = OTHER; note = 2'-O-methylguanosine-3'-phosphate
  modified_base 5: mod_base = OTHER; note = 2'-O-methyluridine-3'-phosphate
  modified_base 6: mod_base = OTHER; note = 2'-O-docosanyl-uridine-3'-phosphate
  modified_base 7: mod_base = OTHER; note = 2'-deoxy-2'-fluoroadenosine-3'-phosphate
  modified_base 8: mod_base = OTHER; note = 2'-O-methylguanosine-3'-phosphate
  modified_base 9: mod_base = OTHER; note = 2'-deoxy-2'-fluoroguanosine-3'-phosphate
  modified_base 10: mod_base = OTHER; note = 2'-deoxy-2'-fluoroadenosine-3'-phosphate
  modified_base 11: mod_base = OTHER; note = 2'-deoxy-2'-fluoroadenosine-3'-phosphate
  modified_base 12: mod_base = OTHER; note = 2'-O-methyluridine-3'-phosphate
  modified_base 13: mod_base = OTHER; note = 2'-O-methyluridine-3'-phosphate
  modified_base 14: mod_base = OTHER; note = 2'-O-methyladenosine-3'-phosphate
  modified_base 15: mod_base = OTHER; note = 2'-O-methylcytidine-3'-phosphate
  modified_base 16: mod_base = OTHER; note = 2'-O-methyladenosine-3'-phosphate
  modified_base 17: mod_base = OTHER; note = 2'-O-methyladenosine-3'-phosphate
  modified_base 18: mod_base = OTHER; note = 2'-O-methyladenosine-3'-phosphate
  modified_base 19: mod_base = OTHER; note = 2'-O-methyladenosine-3'-phosphorothioate
  modified_base 20: mod_base = OTHER; note = 2'-O-methyluridine-3'-phosphorothioate
  modified_base 21: mod_base = OTHER; note = 2'-O-methyladenosine
agtgttaggaattacaaaata

SEQ ID NO: 644 - RNA, 21 nt, synthetic construct
  source 1..21: mol_type = other RNA
  modified_base 1: mod_base = OTHER; note = 2'-O-methyladenosine-3'-phosphorothioate
  modified_base 2: mod_base = OTHER; note = 2'-O-methyluridine-3'-phosphorothioate
  modified_base 3: mod_base = OTHER; note = 2'-O-methylcytidine-3'-phosphate
  modified_base 4: mod_base = OTHER; note = 2'-O-methyladenosine-3'-phosphate
  modified_base 5: mod_base = OTHER; note = 2'-O-methylcytidine-3'-phosphate
  modified_base 6: mod_base = OTHER; note = 2'-O-docosanyl-guanosine-3'-phosphate
  modified_base 7: mod_base = OTHER; note = 2'-deoxy-2'-fluorouridine-3'-phosphate
  modified_base 8: mod_base = OTHER; note = 2'-O-methyluridine-3'-phosphate
  modified_base 9: mod_base = OTHER; note = 2'-deoxy-2'-fluorouridine-3'-phosphate
  modified_base 10: mod_base = OTHER; note = 2'-deoxy-2'-fluorocytidine-3'-phosphate
  modified_base 11: mod_base = OTHER; note = 2'-deoxy-2'-fluoroadenosine-3'-phosphate
  modified_base 12: mod_base = OTHER; note = 2'-O-methyladenosine-3'-phosphate
  modified_base 13: mod_base = OTHER; note = 2'-O-methylguanosine-3'-phosphate
  modified_base 14: mod_base = OTHER; note = 2'-O-methyladenosine-3'-phosphate
  modified_base 15: mod_base = OTHER; note = 2'-O-methyladenosine-3'-phosphate
  modified_base 16: mod_base = OTHER; note = 2'-O-methyladenosine-3'-phosphate
  modified_base 17: mod_base = OTHER; note = 2'-O-methyluridine-3'-phosphate
  modified_base 18: mod_base = OTHER; note = 2'-O-methylguanosine-3'-phosphate
  modified_base 19: mod_base = OTHER; note = 2'-O-methyluridine-3'-phosphorothioate
  modified_base 20: mod_base = OTHER; note = 2'-O-methyluridine-3'-phosphorothioate
  modified_base 21: mod_base = OTHER; note = 2'-O-methyladenosine
atcacgtttcaagaaatgtta

SEQ ID NO: 645 - RNA, 21 nt, synthetic construct
  source 1..21: mol_type = other RNA
  modified_base 1: mod_base = OTHER; note = 2'-O-methylguanosine-3'-phosphorothioate
  modified_base 2: mod_base = OTHER; note = 2'-O-methyluridine-3'-phosphorothioate
  modified_base 3: mod_base = OTHER; note = 2'-O-methylguanosine-3'-phosphate
  modified_base 4: mod_base = OTHER; note = 2'-O-methylguanosine-3'-phosphate
  modified_base 5: mod_base = OTHER; note = 2'-O-methyluridine-3'-phosphate
  modified_base 6: mod_base = OTHER; note = 2'-O-docosanyl-uridine-3'-phosphate
  modified_base 7: mod_base = OTHER; note = 2'-deoxy-2'-fluorocytidine-3'-phosphate
  modified_base 8: mod_base = OTHER; note = 2'-O-methyladenosine-3'-phosphate
  modified_base 9: mod_base = OTHER; note = 2'-deoxy-2'-fluoroadenosine-3'-phosphate
  modified_base 10: mod_base = OTHER; note = 2'-deoxy-2'-fluoroadenosine-3'-phosphate
  modified_base 11: mod_base = OTHER; note = 2'-deoxy-2'-fluoroadenosine-3'-phosphate
  modified_base 12: mod_base = OTHER; note = 2'-O-methyluridine-3'-phosphate
  modified_base 13: mod_base = OTHER; note = 2'-O-methylguanosine-3'-phosphate
  modified_base 14: mod_base = OTHER; note = 2'-O-methylcytidine-3'-phosphate
  modified_base 15: mod_base = OTHER; note = 2'-O-methylcytidine-3'-phosphate
  modified_base 16: mod_base = OTHER; note = 2'-O-methyladenosine-3'-phosphate
  modified_base 17: mod_base = OTHER; note = 2'-O-methyluridine-3'-phosphate
  modified_base 18: mod_base = OTHER; note = 2'-O-methyluridine-3'-phosphate
  modified_base 19: mod_base = OTHER; note = 2'-O-methyluridine-3'-phosphorothioate
  modified_base 20: mod_base = OTHER; note = 2'-O-methyluridine-3'-phosphorothioate
  modified_base 21: mod_base = OTHER; note = 2'-O-methyladenosine
gtggttcaaaatgccatttta

SEQ ID NO: 646 - RNA, 21 nt, synthetic construct
  source 1..21: mol_type = other RNA
  modified_base 1: mod_base = OTHER; note = 2'-O-methylcytidine-3'-phosphorothioate
  modified_base 2: mod_base = OTHER; note = 2'-O-methyluridine-3'-phosphorothioate
  modified_base 3: mod_base = OTHER; note = 2'-O-methyluridine-3'-phosphate
  modified_base 4: mod_base = OTHER; note = 2'-O-methylguanosine-3'-phosphate
  modified_base 5: mod_base = OTHER; note = 2'-O-methyluridine-3'-phosphate
  modified_base 6: mod_base = OTHER; note = 2'-O-docosanyl-uridine-3'-phosphate
  modified_base 7: mod_base = OTHER; note = 2'-deoxy-2'-fluorouridine-3'-phosphate
  modified_base 8: mod_base = OTHER; note = 2'-O-methyladenosine-3'-phosphate
  modified_base 9: mod_base = OTHER; note = 2'-deoxy-2'-fluorouridine-3'-phosphate
  modified_base 10: mod_base = OTHER; note = 2'-deoxy-2'-fluoroadenosine-3'-phosphate
  modified_base 11: mod_base = OTHER; note = 2'-deoxy-2'-fluorouridine-3'-phosphate
  modified_base 12: mod_base = OTHER; note = 2'-O-methyluridine-3'-phosphate
  modified_base 13: mod_base = OTHER; note = 2'-O-methyladenosine-3'-phosphate
  modified_base 14: mod_base = OTHER; note = 2'-O-methyladenosine-3'-phosphate
  modified_base 15: mod_base = OTHER; note = 2'-O-methyladenosine-3'-phosphate
  modified_base 16: mod_base = OTHER; note = 2'-O-methylcytidine-3'-phosphate
  modified_base 17: mod_base = OTHER; note = 2'-O-methyladenosine-3'-phosphate
  modified_base 18: mod_base = OTHER; note = 2'-O-methylguanosine-3'-phosphate
  modified_base 19: mod_base = OTHER; note = 2'-O-methylcytidine-3'-phosphorothioate
  modified_base 20: mod_base = OTHER; note = 2'-O-methyluridine-3'-phosphorothioate
  modified_base 21: mod_base = OTHER; note = 2'-O-methyladenosine
cttgtttatattaaacagcta

SEQ ID NO: 647 - RNA, 21 nt, synthetic construct
  source 1..21: mol_type = other RNA
  modified_base 1: mod_base = OTHER; note = 2'-O-methylguanosine-3'-phosphorothioate
  modified_base 2: mod_base = OTHER; note = 2'-O-methyluridine-3'-phosphorothioate
  modified_base 3: mod_base = OTHER; note = 2'-O-methylguanosine-3'-phosphate
  modified_base 4: mod_base = OTHER; note = 2'-O-methyluridine-3'-phosphate
  modified_base 5: mod_base = OTHER; note = 2'-O-methyluridine-3'-phosphate
  modified_base 6: mod_base = OTHER; note = 2'-O-docosanyl-uridine-3'-phosphate
  modified_base 7: mod_base = OTHER; note = 2'-deoxy-2'-fluoroadenosine-3'-phosphate
  modified_base 8: mod_base = OTHER; note = 2'-O-methylcytidine-3'-phosphate
  modified_base 9: mod_base = OTHER; note = 2'-deoxy-2'-fluorouridine-3'-phosphate
  modified_base 10: mod_base = OTHER; note = 2'-deoxy-2'-fluorouridine-3'-phosphate
  modified_base 11: mod_base = OTHER; note = 2'-deoxy-2'-fluoroadenosine-3'-phosphate
  modified_base 12: mod_base = OTHER; note = 2'-O-methyladenosine-3'-phosphate
  modified_base 13: mod_base = OTHER; note = 2'-O-methylguanosine-3'-phosphate
  modified_base 14: mod_base = OTHER; note = 2'-O-methyladenosine-3'-phosphate
  modified_base 15: mod_base = OTHER; note = 2'-O-methylcytidine-3'-phosphate
  modified_base 16: mod_base = OTHER; note = 2'-O-methylcytidine-3'-phosphate
  modified_base 17: mod_base = OTHER; note = 2'-O-methylguanosine-3'-phosphate
  modified_base 18: mod_base = OTHER; note = 2'-O-methyladenosine-3'-phosphate
  modified_base 19: mod_base = OTHER; note = 2'-O-methyluridine-3'-phosphorothioate
  modified_base 20: mod_base = OTHER; note = 2'-O-methyladenosine-3'-phosphorothioate
  modified_base 21: mod_base = OTHER; note = 2'-O-methyladenosine
gtgtttacttaagaccgataa

SEQ ID NO: 648 - RNA, 21 nt, synthetic construct
  source 1..21: mol_type = other RNA
  modified_base 1: mod_base = OTHER; note = 2'-O-methyluridine-3'-phosphorothioate
  modified_base 2: mod_base = OTHER; note = 2'-O-methyluridine-3'-phosphorothioate
  modified_base 3: mod_base = OTHER; note = 2'-O-methylcytidine-3'-phosphate
  modified_base 4: mod_base = OTHER; note = 2'-O-methylcytidine-3'-phosphate
  modified_base 5: mod_base = OTHER; note = 2'-O-methyladenosine-3'-phosphate
  modified_base 6: mod_base = OTHER; note = 2'-O-docosanyl-guanosine-3'-phosphate
  modified_base 7: mod_base = OTHER; note = 2'-deoxy-2'-fluoroadenosine-3'-phosphate
  modified_base 8: mod_base = OTHER; note = 2'-O-methylguanosine-3'-phosphate
  modified_base 9: mod_base = OTHER; note = 2'-deoxy-2'-fluoroadenosine-3'-phosphate
  modified_base 10: mod_base = OTHER; note = 2'-deoxy-2'-fluoroadenosine-3'-phosphate
  modified_base 11: mod_base = OTHER; note = 2'-deoxy-2'-fluoroadenosine-3'-phosphate
  modified_base 12: mod_base = OTHER; note = 2'-O-methyluridine-3'-phosphate
  modified_base 13: mod_base = OTHER; note = 2'-O-methyluridine-3'-phosphate
  modified_base 14: mod_base = OTHER; note = 2'-O-methyluridine-3'-phosphate
  modified_base 15: mod_base = OTHER; note = 2'-O-methylcytidine-3'-phosphate
  modified_base 16: mod_base = OTHER; note = 2'-O-methyladenosine-3'-phosphate
  modified_base 17: mod_base = OTHER; note = 2'-O-methyluridine-3'-phosphate
  modified_base 18: mod_base = OTHER; note = 2'-O-methyluridine-3'-phosphate
  modified_base 19: mod_base = OTHER; note = 2'-O-methyluridine-3'-phosphorothioate
  modified_base 20: mod_base = OTHER; note = 2'-O-methyluridine-3'-phosphorothioate
  modified_base 21: mod_base = OTHER; note = 2'-O-methyladenosine
ttccagagaaatttcatttta

SEQ ID NO: 649 - RNA, 21 nt, synthetic construct
  source 1..21: mol_type = other RNA
  modified_base 1: mod_base = OTHER; note = 2'-O-methyluridine-3'-phosphorothioate
  modified_base 2: mod_base = OTHER; note = 2'-O-methylguanosine-3'-phosphorothioate
  modified_base 3: mod_base = OTHER; note = 2'-O-methyluridine-3'-phosphate
  modified_base 4: mod_base = OTHER; note = 2'-O-methyladenosine-3'-phosphate
  modified_base 5: mod_base = OTHER; note = 2'-O-methyladenosine-3'-phosphate
  modified_base 6: mod_base = OTHER; note = 2'-O-docosanyl-cytidine-3'-phosphate
  modified_base 7: mod_base = OTHER; note = 2'-deoxy-2'-fluorouridine-3'-phosphate
  modified_base 8: mod_base = OTHER; note = 2'-O-methylguanosine-3'-phosphate
  modified_base 9: mod_base = OTHER; note = 2'-deoxy-2'-fluorouridine-3'-phosphate
  modified_base 10: mod_base = OTHER; note = 2'-deoxy-2'-fluoroadenosine-3'-phosphate
  modified_base 11: mod_base = OTHER; note = 2'-deoxy-2'-fluorouridine-3'-phosphate
  modified_base 12: mod_base = OTHER; note = 2'-O-methylcytidine-3'-phosphate
  modified_base 13: mod_base = OTHER; note = 2'-O-methylcytidine-3'-phosphate
  modified_base 14: mod_base = OTHER; note = 2'-O-methyladenosine-3'-phosphate
  modified_base 15: mod_base = OTHER; note = 2'-O-methyluridine-3'-phosphate
  modified_base 16: mod_base = OTHER; note = 2'-O-methyladenosine-3'-phosphate
  modified_base 17: mod_base = OTHER; note = 2'-O-methyluridine-3'-phosphate
  modified_base 18: mod_base = OTHER; note = 2'-O-methyluridine-3'-phosphate
  modified_base 19: mod_base = OTHER; note = 2'-O-methyladenosine-3'-phosphorothioate
  modified_base 20: mod_base = OTHER; note = 2'-O-methyluridine-3'-phosphorothioate
  modified_base 21: mod_base = OTHER; note = 2'-O-methyladenosine
tgtaactgtatccatattata

SEQ ID NO: 650 - RNA, 21 nt, synthetic construct
  source 1..21: mol_type = other RNA
  modified_base 1: mod_base = OTHER; note = 2'-O-methyluridine-3'-phosphorothioate
  modified_base 2: mod_base = OTHER; note = 2'-O-methylguanosine-3'-phosphorothioate
  modified_base 3: mod_base = OTHER; note = 2'-O-methylcytidine-3'-phosphate
  modified_base 4: mod_base = OTHER; note = 2'-O-methyluridine-3'-phosphate
  modified_base 5: mod_base = OTHER; note = 2'-O-methylguanosine-3'-phosphate
  modified_base 6: mod_base = OTHER; note = 2'-O-docosanyl-uridine-3'-phosphate
  modified_base 7: mod_base = OTHER; note = 2'-deoxy-2'-fluorouridine-3'-phosphate
  modified_base 8: mod_base = OTHER; note = 2'-O-methyladenosine-3'-phosphate
  modified_base 9: mod_base = OTHER; note = 2'-deoxy-2'-fluorouridine-3'-phosphate
  modified_base 10: mod_base = OTHER; note = 2'-deoxy-2'-fluoroguanosine-3'-phosphate
  modified_base 11: mod_base = OTHER; note = 2'-deoxy-2'-fluoroadenosine-3'-phosphate
  modified_base 12: mod_base = OTHER; note = 2'-O-methyladenosine-3'-phosphate
  modified_base 13: mod_base = OTHER; note = 2'-O-methyladenosine-3'-phosphate
  modified_base 14: mod_base = OTHER; note = 2'-O-methylguanosine-3'-phosphate
  modified_base 15: mod_base = OTHER; note = 2'-O-methylcytidine-3'-phosphate
  modified_base 16: mod_base = OTHER; note = 2'-O-methyladenosine-3'-phosphate
  modified_base 17: mod_base = OTHER; note = 2'-O-methyladenosine-3'-phosphate
  modified_base 18: mod_base = OTHER; note = 2'-O-methyladenosine-3'-phosphate
  modified_base 19: mod_base = OTHER; note = 2'-O-methylguanosine-3'-phosphorothioate
  modified_base 20: mod_base = OTHER; note = 2'-O-methyladenosine-3'-phosphorothioate
  modified_base 21: mod_base = OTHER; note = 2'-O-methyladenosine
tgctgttatgaaagcaaagaa

SEQ ID NO: 651 - RNA, 21 nt, synthetic construct
  source 1..21: mol_type = other RNA
  modified_base 1: mod_base = OTHER; note = 2'-O-methyluridine-3'-phosphorothioate
  modified_base 2: mod_base = OTHER; note = 2'-O-methyladenosine-3'-phosphorothioate
  modified_base 3: mod_base = OTHER; note = 2'-O-methylguanosine-3'-phosphate
  modified_base 4: mod_base = OTHER; note = 2'-O-methyluridine-3'-phosphate
  modified_base 5: mod_base = OTHER; note = 2'-O-methyladenosine-3'-phosphate
  modified_base 6: mod_base = OTHER; note = 2'-O-docosanyl-uridine-3'-phosphate
  modified_base 7: mod_base = OTHER; note = 2'-deoxy-2'-fluoroguanosine-3'-phosphate
  modified_base 8: mod_base = OTHER; note = 2'-O-methyluridine-3'-phosphate
  modified_base 9: mod_base = OTHER; note = 2'-deoxy-2'-fluorouridine-3'-phosphate
  modified_base 10: mod_base = OTHER; note = 2'-deoxy-2'-fluoroadenosine-3'-phosphate
  modified_base 11: mod_base = OTHER; note = 2'-deoxy-2'-fluorouridine-3'-phosphate
  modified_base 12: mod_base = OTHER; note = 2'-O-methyluridine-3'-phosphate
  modified_base 13: mod_base = OTHER; note = 2'-O-methylguanosine-3'-phosphate
  modified_base 14: mod_base = OTHER; note = 2'-O-methyladenosine-3'-phosphate
  modified_base 15: mod_base = OTHER; note = 2'-O-methylguanosine-3'-phosphate
  modified_base 16: mod_base = OTHER; note = 2'-O-methylcytidine-3'-phosphate
  modified_base 17: mod_base = OTHER; note = 2'-O-methyluridine-3'-phosphate
  modified_base 18: mod_base = OTHER; note = 2'-O-methyladenosine-3'-phosphate
  modified_base 19: mod_base = OTHER; note = 2'-O-methyladenosine-3'-phosphorothioate
  modified_base 20: mod_base = OTHER; note = 2'-O-methyluridine-3'-phosphorothioate
  modified_base 21: mod_base = OTHER; note = 2'-O-methyladenosine
tagtatgttattgagctaata

SEQ ID NO: 652 - RNA, 21 nt, synthetic construct
  source 1..21: mol_type = other RNA
  modified_base 1: mod_base = OTHER; note = 2'-O-methyluridine-3'-phosphorothioate
  modified_base 2: mod_base = OTHER; note = 2'-O-methyluridine-3'-phosphorothioate
  modified_base 3: mod_base = OTHER; note = 2'-O-methyluridine-3'-phosphate
  modified_base 4: mod_base = OTHER; note = 2'-O-methyladenosine-3'-phosphate
  modified_base 5: mod_base = OTHER; note = 2'-O-methylcytidine-3'-phosphate
  modified_base 6: mod_base = OTHER; note = 2'-O-docosanyl-cytidine-3'-phosphate
  modified_base 7: mod_base = OTHER; note = 2'-deoxy-2'-fluoroadenosine-3'-phosphate
  modified_base 8: mod_base = OTHER; note = 2'-O-methyladenosine-3'-phosphate
  modified_base 9: mod_base = OTHER; note = 2'-deoxy-2'-fluoroguanosine-3'-phosphate
  modified_base 10: mod_base = OTHER; note = 2'-deoxy-2'-fluorouridine-3'-phosphate
  modified_base 11: mod_base = OTHER; note = 2'-deoxy-2'-fluoroadenosine-3'-phosphate
  modified_base 12: mod_base = OTHER; note = 2'-O-methyluridine-3'-phosphate
  modified_base 13: mod_base = OTHER; note = 2'-O-methyluridine-3'-phosphate
  modified_base 14: mod_base = OTHER; note = 2'-O-methyluridine-3'-phosphate
  modified_base 15: mod_base = OTHER; note = 2'-O-methyladenosine-3'-phosphate
  modified_base 16: mod_base = OTHER; note = 2'-O-methyluridine-3'-phosphate
  modified_base 17: mod_base = OTHER; note = 2'-O-methyladenosine-3'-phosphate
  modified_base 18: mod_base = OTHER; note = 2'-O-methylcytidine-3'-phosphate
  modified_base 19: mod_base = OTHER; note = 2'-O-methyluridine-3'-phosphorothioate
  modified_base 20: mod_base = OTHER; note = 2'-O-methylcytidine-3'-phosphorothioate
  modified_base 21: mod_base = OTHER; note = 2'-O-methyladenosine
tttaccaagtatttatactca

SEQ ID NO: 653 - RNA, 21 nt, synthetic construct
  source 1..21: mol_type = other RNA
  modified_base 1: mod_base = OTHER; note = 2'-O-methylcytidine-3'-phosphorothioate
  modified_base 2: mod_base = OTHER; note = 2'-O-methylcytidine-3'-phosphorothioate
  modified_base 3: mod_base = OTHER; note = 2'-O-methyluridine-3'-phosphate
  modified_base 4: mod_base = OTHER; note = 2'-O-methylcytidine-3'-phosphate
  modified_base 5: mod_base = OTHER; note = 2'-O-methyluridine-3'-phosphate
  modified_base 6: mod_base = OTHER; note = 2'-O-docosanyl-uridine-3'-phosphate
  modified_base 7: mod_base = OTHER; note = 2'-deoxy-2'-fluorocytidine-3'-phosphate
  modified_base 8: mod_base = OTHER; note = 2'-O-methylguanosine-3'-phosphate
  modified_base 9: mod_base = OTHER; note = 2'-deoxy-2'-fluorouridine-3'-phosphate
  modified_base 10: mod_base = OTHER; note = 2'-deoxy-2'-fluorocytidine-3'-phosphate
  modified_base 11: mod_base = OTHER; note = 2'-deoxy-2'-fluorouridine-3'-phosphate
  modified_base 12: mod_base = OTHER; note = 2'-O-methyluridine-3'-phosphate
  modified_base 13: mod_base = OTHER; note = 2'-O-methylcytidine-3'-phosphate
  modified_base 14: mod_base = OTHER; note = 2'-O-methyluridine-3'-phosphate
  modified_base 15: mod_base = OTHER; note = 2'-O-methyluridine-3'-phosphate
  modified_base 16: mod_base = OTHER; note = 2'-O-methylcytidine-3'-phosphate
  modified_base 17: mod_base = OTHER; note = 2'-O-methyladenosine-3'-phosphate
  modified_base 18: mod_base = OTHER; note = 2'-O-methyladenosine-3'-phosphate
  modified_base 19: mod_base = OTHER; note = 2'-O-methylcytidine-3'-phosphorothioate
  modified_base 20: mod_base = OTHER; note = 2'-O-methyluridine-3'-phosphorothioate
  modified_base 21: mod_base = OTHER; note = 2'-O-methyladenosine
cctcttcgtcttcttcaacta

SEQ ID NO: 654 - RNA, 21 nt, synthetic construct
  source 1..21: mol_type = other RNA
  modified_base 1: mod_base = OTHER; note = 2'-O-methylguanosine-3'-phosphorothioate
  modified_base 2: mod_base = OTHER; note = 2'-O-methyluridine-3'-phosphorothioate
  modified_base 3: mod_base = OTHER; note = 2'-O-methylguanosine-3'-phosphate
  modified_base 4: mod_base = OTHER; note = 2'-O-methylcytidine-3'-phosphate
  modified_base 5: mod_base = OTHER; note = 2'-O-methyladenosine-3'-phosphate
  modified_base 6: mod_base = OTHER; note = 2'-O-docosanyl-adenosine-3'-phosphate
  modified_base 7: mod_base = OTHER; note = 2'-deoxy-2'-fluorouridine-3'-phosphate
  modified_base 8: mod_base = OTHER; note = 2'-O-methyladenosine-3'-phosphate
  modified_base 9: mod_base = OTHER; note = 2'-deoxy-2'-fluoroadenosine-3'-phosphate
  modified_base 10: mod_base = OTHER; note = 2'-deoxy-2'-fluoroadenosine-3'-phosphate
  modified_base 11: mod_base = OTHER; note = 2'-deoxy-2'-fluorouridine-3'-phosphate
  modified_base 12: mod_base = OTHER; note = 2'-O-methyladenosine-3'-phosphate
  modified_base 13: mod_base = OTHER; note = 2'-O-methylcytidine-3'-phosphate
  modified_base 14: mod_base = OTHER; note = 2'-O-methylcytidine-3'-phosphate
  modified_base 15: mod_base = OTHER; note = 2'-O-methyladenosine-3'-phosphate
  modified_base 16: mod_base = OTHER; note = 2'-O-methyladenosine-3'-phosphate
  modified_base 17: mod_base = OTHER; note = 2'-O-methyluridine-3'-phosphate
  modified_base 18: mod_base = OTHER; note = 2'-O-methylguanosine-3'-phosphate
  modified_base 19: mod_base = OTHER; note = 2'-O-methyladenosine-3'-phosphorothioate
  modified_base 20: mod_base = OTHER; note = 2'-O-methyladenosine-3'-phosphorothioate
  modified_base 21: mod_base = OTHER; note = 2'-O-methyladenosine
gtgcaataaataccaatgaaa

SEQ ID NO: 655 - RNA, 21 nt, synthetic construct
  source 1..21: mol_type = other RNA
  modified_base 1: mod_base = OTHER; note = 2'-O-methylcytidine-3'-phosphorothioate
  modified_base 2: mod_base = OTHER; note = 2'-O-methyluridine-3'-phosphorothioate
  modified_base 3: mod_base = OTHER; note = 2'-O-methyluridine-3'-phosphate
  modified_base 4: mod_base = OTHER; note = 2'-O-methylguanosine-3'-phosphate
  modified_base 5: mod_base = OTHER; note = 2'-O-methyluridine-3'-phosphate
  modified_base 6: mod_base = OTHER; note = 2'-O-docosanyl-guanosine-3'-phosphate
  modified_base 7: mod_base = OTHER; note = 2'-deoxy-2'-fluorouridine-3'-phosphate
  modified_base 8: mod_base = OTHER; note = 2'-O-methylguanosine-3'-phosphate
  modified_base 9: mod_base = OTHER; note = 2'-deoxy-2'-fluorouridine-3'-phosphate
  modified_base 10: mod_base = OTHER; note = 2'-deoxy-2'-fluorouridine-3'-phosphate
  modified_base 11: mod_base = OTHER; note = 2'-deoxy-2'-fluorouridine-3'-phosphate
  modified_base 12: mod_base = OTHER; note = 2'-O-methyluridine-3'-phosphate
  modified_base 13: mod_base = OTHER; note = 2'-O-methyladenosine-3'-phosphate
  modified_base 14: mod_base = OTHER; note = 2'-O-methylcytidine-3'-phosphate
  modified_base 15: mod_base = OTHER; note = 2'-O-methylcytidine-3'-phosphate
  modified_base 16: mod_base = OTHER; note = 2'-O-methyladenosine-3'-phosphate
  modified_base 17: mod_base = OTHER; note = 2'-O-methyladenosine-3'-phosphate
  modified_base 18: mod_base = OTHER; note = 2'-O-methylguanosine-3'-phosphate
  modified_base 19: mod_base = OTHER; note = 2'-O-methyluridine-3'-phosphorothioate
  modified_base 20: mod_base = OTHER; note = 2'-O-methyladenosine-3'-phosphorothioate
  modified_base 21: mod_base = OTHER; note = 2'-O-methyladenosine
cttgtgtgttttaccaagtaa

SEQ ID NO: 656 - RNA, 21 nt, synthetic construct
  source 1..21: mol_type = other RNA
  modified_base 1: mod_base = OTHER; note = 2'-O-methylcytidine-3'-phosphorothioate
  modified_base 2: mod_base = OTHER; note = 2'-O-methyladenosine-3'-phosphorothioate
  modified_base 3: mod_base = OTHER; note = 2'-O-methylcytidine-3'-phosphate
  modified_base 4: mod_base = OTHER; note = 2'-O-methylcytidine-3'-phosphate
  modified_base 5: mod_base = OTHER; note = 2'-O-methyladenosine-3'-phosphate
  modified_base 6: mod_base = OTHER; note = 2'-O-docosanyl-adenosine-3'-phosphate
  modified_base 7: mod_base = OTHER; note = 2'-deoxy-2'-fluorocytidine-3'-phosphate
  modified_base 8: mod_base = OTHER; note = 2'-O-methylcytidine-3'-phosphate
  modified_base 9: mod_base = OTHER; note = 2'-deoxy-2'-fluorouridine-3'-phosphate
  modified_base 10: mod_base = OTHER; note = 2'-deoxy-2'-fluorocytidine-3'-phosphate
  modified_base 11: mod_base = OTHER; note = 2'-deoxy-2'-fluorouridine-3'-phosphate
  modified_base 12: mod_base = OTHER; note = 2'-O-methyluridine-3'-phosphate
  modified_base 13: mod_base = OTHER; note = 2'-O-methylcytidine-3'-phosphate
  modified_base 14: mod_base = OTHER; note = 2'-O-methyladenosine-3'-phosphate
  modified_base 15: mod_base = OTHER; note = 2'-O-methyluridine-3'-phosphate
  modified_base 16: mod_base = OTHER; note = 2'-O-methylcytidine-3'-phosphate
  modified_base 17: mod_base = OTHER; note = 2'-O-methyladenosine-3'-phosphate
  modified_base 18: mod_base = OTHER; note = 2'-O-methyluridine-3'-phosphate
  modified_base 19: mod_base = OTHER; note = 2'-O-methylguanosine-3'-phosphorothioate
  modified_base 20: mod_base = OTHER; note = 2'-O-methyluridine-3'-phosphorothioate
  modified_base 21: mod_base = OTHER; note = 2'-O-methyladenosine
caccaacctcttcatcatgta

SEQ ID NO: 657 - RNA, 21 nt, synthetic construct
  source 1..21: mol_type = other RNA
  modified_base 1: mod_base = OTHER; note = 2'-O-methyladenosine-3'-phosphorothioate
  modified_base 2: mod_base = OTHER; note = 2'-O-methylguanosine-3'-phosphorothioate
  modified_base 3: mod_base = OTHER; note = 2'-O-methyluridine-3'-phosphate
  modified_base 4: mod_base = OTHER; note = 2'-O-methyladenosine-3'-phosphate
  modified_base 5: mod_base = OTHER; note = 2'-O-methyladenosine-3'-phosphate
  modified_base 6: mod_base = OTHER; note = 2'-O-docosanyl-uridine-3'-phosphate
  modified_base 7: mod_base = OTHER; note = 2'-deoxy-2'-fluoroguanosine-3'-phosphate
  modified_base 8: mod_base = OTHER; note = 2'-O-methyladenosine-3'-phosphate
  modified_base 9: mod_base = OTHER; note = 2'-deoxy-2'-fluorouridine-3'-phosphate
  modified_base 10: mod_base = OTHER; note = 2'-deoxy-2'-fluorouridine-3'-phosphate
  modified_base 11: mod_base = OTHER; note = 2'-deoxy-2'-fluorouridine-3'-phosphate
  modified_base 12: mod_base = OTHER; note = 2'-O-methylcytidine-3'-phosphate
  modified_base 13: mod_base = OTHER; note = 2'-O-methyluridine-3'-phosphate
  modified_base 14: mod_base = OTHER; note = 2'-O-methylguanosine-3'-phosphate
  modified_base 15: mod_base = OTHER; note = 2'-O-methylcytidine-3'-phosphate
  modified_base 16: mod_base = OTHER; note = 2'-O-methyluridine-3'-phosphate
  modified_base 17: mod_base = OTHER; note = 2'-O-methylguanosine-3'-phosphate
  modified_base 18: mod_base = OTHER; note = 2'-O-methyluridine-3'-phosphate
  modified_base 19: mod_base = OTHER; note = 2'-O-methyluridine-3'-phosphorothioate
  modified_base 20: mod_base = OTHER; note = 2'-O-methyladenosine-3'-phosphorothioate
  modified_base 21: mod_base = OTHER; note = 2'-O-methyladenosine
agtaatgatttctgctgttaa

SEQ ID NO: 658 - RNA, 21 nt, synthetic construct
  source 1..21: mol_type = other RNA
  modified_base 1: mod_base = OTHER; note = 2'-O-methylguanosine-3'-phosphorothioate
  modified_base 2: mod_base = OTHER; note = 2'-O-methylguanosine-3'-phosphorothioate
  modified_base 3: mod_base = OTHER; note = 2'-O-methyluridine-3'-phosphate
  modified_base 4: mod_base = OTHER; note = 2'-O-methylguanosine-3'-phosphate
  modified_base 5: mod_base = OTHER; note = 2'-O-methylguanosine-3'-phosphate
  modified_base 6: mod_base = OTHER; note = 2'-O-docosanyl-uridine-3'-phosphate
  modified_base 7: mod_base = OTHER; note = 2'-deoxy-2'-fluorouridine-3'-phosphate
  modified_base 8: mod_base = OTHER; note = 2'-O-methyluridine-3'-phosphate
  modified_base 9: mod_base = OTHER; note = 2'-deoxy-2'-fluorouridine-3'-phosphate
  modified_base 10: mod_base = OTHER; note = 2'-deoxy-2'-fluorouridine-3'-phosphate
  modified_base 11: mod_base = OTHER; note = 2'-deoxy-2'-fluoroguanosine-3'-phosphate
  modified_base 12: mod_base = OTHER; note = 2'-O-methyladenosine-3'-phosphate
  modified_base 13: mod_base = OTHER; note = 2'-O-methylcytidine-3'-phosphate
  modified_base 14: mod_base = OTHER; note = 2'-O-methyladenosine-3'-phosphate
  modified_base 15: mod_base = OTHER; note = 2'-O-methylcytidine-3'-phosphate
  modified_base 16: mod_base = OTHER; note = 2'-O-methyluridine-3'-phosphate
  modified_base 17: mod_base = OTHER; note = 2'-O-methylcytidine-3'-phosphate
  modified_base 18: mod_base = OTHER; note = 2'-O-methyluridine-3'-phosphate
  modified_base 19: mod_base = OTHER; note = 2'-O-methylcytidine-3'-phosphorothioate
  modified_base 20: mod_base = OTHER; note = 2'-O-methyluridine-3'-phosphorothioate
  modified_base 21: mod_base = OTHER; note = 2'-O-methyladenosine
ggtggtttttgacactctcta

SEQ ID NO: 659 - RNA, 21 nt, synthetic construct
  source 1..21: mol_type = other RNA
  modified_base 1: mod_base = OTHER; note = 2'-O-methyluridine-3'-phosphorothioate
  modified_base 2: mod_base = OTHER; note = 2'-O-methylguanosine-3'-phosphorothioate
  modified_base 3: mod_base = OTHER; note = 2'-O-methyluridine-3'-phosphate
  modified_base 4: mod_base = OTHER; note = 2'-O-methylguanosine-3'-phosphate
  modified_base 5: mod_base = OTHER; note = 2'-O-methyladenosine-3'-phosphate
  modified_base 6: mod_base = OTHER; note = 2'-O-docosanyl-cytidine-3'-phosphate
  modified_base 7: mod_base = OTHER; note = 2'-deoxy-2'-fluoroadenosine-3'-phosphate
  modified_base 8: mod_base = OTHER; note = 2'-O-methyluridine-3'-phosphate
  modified_base 9: mod_base = OTHER; note = 2'-deoxy-2'-fluoroguanosine-3'-phosphate
  modified_base 10: mod_base = OTHER; note = 2'-deoxy-2'-fluorouridine-3'-phosphate
  modified_base 11: mod_base = OTHER; note = 2'-deoxy-2'-fluoroguanosine-3'-phosphate
  modified_base 12: mod_base = OTHER; note = 2'-O-methyladenosine-3'-phosphate
  modified_base 13: mod_base = OTHER; note = 2'-O-methylcytidine-3'-phosphate
  modified_base 14: mod_base = OTHER; note = 2'-O-methyluridine-3'-phosphate
  modified_base 15: mod_base = OTHER; note = 2'-O-methylcytidine-3'-phosphate
  modified_base 16: mod_base = OTHER; note = 2'-O-methyluridine-3'-phosphate
  modified_base 17: mod_base = OTHER; note = 2'-O-methylguanosine-3'-phosphate
  modified_base 18: mod_base = OTHER; note = 2'-O-methyluridine-3'-phosphate
  modified_base 19: mod_base = OTHER; note = 2'-O-methylcytidine-3'-phosphorothioate
  modified_base 20: mod_base = OTHER; note = 2'-O-methyladenosine-3'-phosphorothioate
  modified_base 21: mod_base = OTHER; note = 2'-O-methyladenosine
tgtgacatgtgactctgtcaa

SEQ ID NO: 660 - RNA, 21 nt, synthetic construct
  source 1..21: mol_type = other RNA
  modified_base 1: mod_base = OTHER; note = 2'-O-methyluridine-3'-phosphorothioate
  modified_base 2: mod_base = OTHER; note = 2'-O-methylguanosine-3'-phosphorothioate
  modified_base 3: mod_base = OTHER; note = 2'-O-methylcytidine-3'-phosphate
  modified_base 4: mod_base = OTHER; note = 2'-O-methylcytidine-3'-phosphate
  modified_base 5: mod_base = OTHER; note = 2'-O-methyladenosine-3'-phosphate
  modified_base 6: mod_base = OTHER; note = 2'-O-docosanyl-uridine-3'-phosphate
  modified_base 7: mod_base = OTHER; note = 2'-deoxy-2'-fluorouridine-3'-phosphate
  modified_base 8: mod_base = OTHER; note = 2'-O-methyluridine-3'-phosphate
  modified_base 9: mod_base = OTHER; note = 2'-deoxy-2'-fluorouridine-3'-phosphate
  modified_base 10: mod_base = OTHER; note = 2'-deoxy-2'-fluorouridine-3'-phosphate
  modified_base 11: mod_base = OTHER; note = 2'-deoxy-2'-fluoroguanosine-3'-phosphate
  modified_base 12: mod_base = OTHER; note = 2'-O-methylcytidine-3'-phosphate
  modified_base 13: mod_base = OTHER; note = 2'-O-methyladenosine-3'-phosphate
  modified_base 14: mod_base = OTHER; note = 2'-O-methylcytidine-3'-phosphate
  modified_base 15: mod_base = OTHER; note = 2'-O-methyladenosine-3'-phosphate
  modified_base 16: mod_base = OTHER; note = 2'-O-methylguanosine-3'-phosphate
  modified_base 17: mod_base = OTHER; note = 2'-O-methyluridine-3'-phosphate
  modified_base 18: mod_base = OTHER; note = 2'-O-methylguanosine-3'-phosphate
  modified_base 19: mod_base = OTHER; note = 2'-O-methyluridine-3'-phosphorothioate
  modified_base 20: mod_base = OTHER; note = 2'-O-methyluridine-3'-phosphorothioate
  modified_base 21: mod_base = OTHER; note = 2'-O-methyladenosine
tgccatttttgcacagtgtta

SEQ ID NO: 661 - RNA, 21 nt, synthetic construct
  source 1..21: mol_type = other RNA
  modified_base 1: mod_base = OTHER; note = 2'-O-methyluridine-3'-phosphorothioate
  modified_base 2: mod_base = OTHER; note = 2'-O-methyladenosine-3'-phosphorothioate
  modified_base 3: mod_base = OTHER; note = 2'-O-methyladenosine-3'-phosphate
  modified_base 4: mod_base = OTHER; note = 2'-O-methylcytidine-3'-phosphate
  modified_base 5: mod_base = OTHER; note = 2'-O-methyluridine-3'-phosphate
  modified_base 6: mod_base = OTHER; note = 2'-O-docosanyl-adenosine-3'-phosphate
  modified_base 7: mod_base = OTHER; note = 2'-deoxy-2'-fluorocytidine-3'-phosphate
  modified_base 8: mod_base = OTHER; note = 2'-O-methyluridine-3'-phosphate
  modified_base 9: mod_base = OTHER; note = 2'-deoxy-2'-fluoroguanosine-3'-phosphate
  modified_base 10: mod_base = OTHER; note = 2'-deoxy-2'-fluorouridine-3'-phosphate
  modified_base 11: mod_base = OTHER; note = 2'-deoxy-2'-fluoroguanosine-3'-phosphate
  modified_base 12: mod_base = OTHER; note = 2'-O-methyluridine-3'-phosphate
  modified_base 13: mod_base = OTHER; note = 2'-O-methylguanosine-3'-phosphate
  modified_base 14: mod_base = OTHER; note = 2'-O-methyladenosine-3'-phosphate
  modified_base 15: mod_base = OTHER; note = 2'-O-methylguanosine-3'-phosphate
  modified_base 16: mod_base = OTHER; note = 2'-O-methylguanosine-3'-phosphate
  modified_base 17: mod_base = OTHER; note = 2'-O-methyladenosine-3'-phosphate
  modified_base 18: mod_base = OTHER; note = 2'-O-methyladenosine-3'-phosphate
  modified_base 19: mod_base = OTHER; note = 2'-O-methyluridine-3'-phosphorothioate
  modified_base 20: mod_base = OTHER; note = 2'-O-methyluridine-3'-phosphorothioate
  modified_base 21: mod_base = OTHER; note = 2'-O-methyladenosine
taactactgtgtgaggaatta

SEQ ID NO: 662 - RNA, 21 nt, synthetic construct
  source 1..21: mol_type = other RNA
  modified_base 1: mod_base = OTHER; note = 2'-O-methyladenosine-3'-phosphorothioate
  modified_base 2: mod_base = OTHER; note = 2'-O-methylcytidine-3'-phosphorothioate
  modified_base 3: mod_base = OTHER; note = 2'-O-methyluridine-3'-phosphate
  modified_base 4: mod_base = OTHER; note = 2'-O-methyluridine-3'-phosphate
  modified_base 5: mod_base = OTHER; note = 2'-O-methylguanosine-3'-phosphate
  modified_base 6: mod_base = OTHER; note = 2'-O-docosanyl-uridine-3'-phosphate
  modified_base 7: mod_base = OTHER; note = 2'-deoxy-2'-fluoroguanosine-3'-phosphate
  modified_base 8: mod_base = OTHER; note = 2'-O-methyluridine-3'-phosphate
  modified_base 9: mod_base = OTHER; note = 2'-deoxy-2'-fluoroguanosine-3'-phosphate
  modified_base 10: mod_base = OTHER; note = 2'-deoxy-2'-fluorouridine-3'-phosphate
  modified_base 11: mod_base = OTHER; note = 2'-deoxy-2'-fluoroadenosine-3'-phosphate
  modified_base 12: mod_base = OTHER; note = 2'-O-methyladenosine-3'-phosphate
  modified_base 13: mod_base = OTHER; note = 2'-O-methyladenosine-3'-phosphate
  modified_base 14: mod_base = OTHER; note = 2'-O-methyluridine-3'-phosphate
  modified_base 15: mod_base = OTHER; note = 2'-O-methyluridine-3'-phosphate
  modified_base 16: mod_base = OTHER; note = 2'-O-methylcytidine-3'-phosphate
  modified_base 17: mod_base = OTHER; note = 2'-O-methyluridine-3'-phosphate
  modified_base 18: mod_base = OTHER; note = 2'-O-methyladenosine-3'-phosphate
  modified_base 19: mod_base = OTHER; note = 2'-O-methylcytidine-3'-phosphorothioate
  modified_base 20: mod_base = OTHER; note = 2'-O-methyluridine-3'-phosphorothioate
  modified_base 21: mod_base = OTHER; note = 2'-O-methyladenosine
acttgtgtgtaaattctacta

SEQ ID NO: 663 - RNA, 21 nt, synthetic construct
  source 1..21: mol_type = other RNA
  modified_base 1: mod_base = OTHER; note = 2'-O-methylguanosine-3'-phosphorothioate
  modified_base 2: mod_base = OTHER; note = 2'-O-methyladenosine-3'-phosphorothioate
  modified_base 3: mod_base = OTHER; note = 2'-O-methyluridine-3'-phosphate
  modified_base 4: mod_base = OTHER; note = 2'-O-methyladenosine-3'-phosphate
  modified_base 5: mod_base = OTHER; note = 2'-O-methylguanosine-3'-phosphate
  modified_base 6: mod_base = OTHER; note = 2'-O-docosanyl-adenosine-3'-phosphate
  modified_base 7: mod_base = OTHER; note = 2'-deoxy-2'-fluoroadenosine-3'-phosphate
  modified_base 8: mod_base = OTHER; note = 2'-O-methyladenosine-3'-phosphate
  modified_base 9: mod_base = OTHER; note = 2'-deoxy-2'-fluoroguanosine-3'-phosphate
  modified_base 10: mod_base = OTHER; note = 2'-deoxy-2'-fluoroadenosine-3'-phosphate
  modified_base 11: mod_base = OTHER; note = 2'-deoxy-2'-fluorocytidine-3'-phosphate
  modified_base 12: mod_base = OTHER; note = 2'-O-methyluridine-3'-phosphate
  modified_base 13: mod_base = OTHER; note = 2'-O-methyluridine-3'-phosphate
  modified_base 14: mod_base = OTHER; note = 2'-O-methylguanosine-3'-phosphate
  modified_base 15: mod_base = OTHER; note = 2'-O-methyluridine-3'-phosphate
  modified_base 16: mod_base = OTHER; note = 2'-O-methyluridine-3'-phosphate
  modified_base 17: mod_base = OTHER; note = 2'-O-methyluridine-3'-phosphate
  modified_base 18: mod_base = OTHER; note = 2'-O-methyladenosine-3'-phosphate
  modified_base 19: mod_base = OTHER; note = 2'-O-methyluridine-3'-phosphorothioate
  modified_base 20: mod_base = OTHER; note = 2'-O-methyladenosine-3'-phosphorothioate
  modified_base 21: mod_base = OTHER; note = 2'-O-methyladenosine
gatagaaagacttgtttataa

SEQ ID NO: 664 - RNA, 21 nt, synthetic construct
  source 1..21: mol_type = other RNA
  modified_base 1: mod_base = OTHER; note = 2'-O-methyladenosine-3'-phosphorothioate
  modified_base 2: mod_base = OTHER; note = 2'-O-methyladenosine-3'-phosphorothioate
  modified_base 3: mod_base = OTHER; note = 2'-O-methylguanosine-3'-phosphate
  modified_base 4: mod_base = OTHER; note = 2'-O-methylcytidine-3'-phosphate
  modified_base 5: mod_base = OTHER; note = 2'-O-methyluridine-3'-phosphate
  modified_base 6: mod_base = OTHER; note = 2'-O-docosanyl-cytidine-3'-phosphate
  modified_base 7: mod_base = OTHER; note = 2'-deoxy-2'-fluorouridine-3'-phosphate
  modified_base 8: mod_base = OTHER; note = 2'-O-methyluridine-3'-phosphate
  modified_base 9: mod_base = OTHER; note = 2'-deoxy-2'-fluorocytidine-3'-phosphate
  modified_base 10: mod_base = OTHER; note = 2'-deoxy-2'-fluorouridine-3'-phosphate
  modified_base 11: mod_base = OTHER; note = 2'-deoxy-2'-fluorouridine-3'-phosphate
  modified_base 12: mod_base = OTHER; note = 2'-O-methylguanosine-3'-phosphate
  modified_base 13: mod_base = OTHER; note = 2'-O-methylguanosine-3'-phosphate
  modified_base 14: mod_base = OTHER; note = 2'-O-methyladenosine-3'-phosphate
  modified_base 15: mod_base = OTHER; note = 2'-O-methyladenosine-3'-phosphate
  modified_base 16: mod_base = OTHER; note = 2'-O-methylcytidine-3'-phosphate
  modified_base 17: mod_base = OTHER; note = 2'-O-methyladenosine-3'-phosphate
  modified_base 18: mod_base = OTHER; note = 2'-O-methyladenosine-3'-phosphate
  modified_base 19: mod_base = OTHER; note = 2'-O-methylguanosine-3'-phosphorothioate
  modified_base 20: mod_base = OTHER; note = 2'-O-methylcytidine-3'-phosphorothioate
  modified_base 21: mod_base = OTHER; note = 2'-O-methyladenosine
aagctcttcttggaacaagca

SEQ ID NO: 665 - RNA, 21 nt, synthetic construct
  source 1..21: mol_type = other RNA
  modified_base 1: mod_base = OTHER; note = 2'-O-methylcytidine-3'-phosphorothioate
  modified_base 2: mod_base = OTHER; note = 2'-O-methylcytidine-3'-phosphorothioate
  modified_base 3: mod_base = OTHER; note = 2'-O-methyladenosine-3'-phosphate
  modified_base 4: mod_base = OTHER; note = 2'-O-methylcytidine-3'-phosphate
  modified_base 5: mod_base = OTHER; note = 2'-O-methyladenosine-3'-phosphate
  modified_base 6: mod_base = OTHER; note = 2'-O-docosanyl-guanosine-3'-phosphate
  modified_base 7: mod_base = OTHER; note = 2'-deoxy-2'-fluoroadenosine-3'-phosphate
  modified_base 8: mod_base = OTHER; note = 2'-O-methyladenosine-3'-phosphate
  modified_base 9: mod_base = OTHER; note = 2'-deoxy-2'-fluoroguanosine-3'-phosphate
  modified_base 10: mod_base = OTHER; note = 2'-deoxy-2'-fluoroadenosine-3'-phosphate
  modified_base 11: mod_base = OTHER; note = 2'-deoxy-2'-fluorouridine-3'-phosphate
  modified_base 12: mod_base = OTHER; note = 2'-O-methylguanosine-3'-phosphate
  modified_base 13: mod_base = OTHER; note = 2'-O-methyluridine-3'-phosphate
  modified_base 14: mod_base = OTHER; note = 2'-O-methyluridine-3'-phosphate
  modified_base 15: mod_base = OTHER; note = 2'-O-methyladenosine-3'-phosphate
  modified_base 16: mod_base = OTHER; note = 2'-O-methylcytidine-3'-phosphate
  modified_base 17: mod_base = OTHER; note = 2'-O-methyluridine-3'-phosphate
  modified_base 18: mod_base = OTHER; note = 2'-O-methyluridine-3'-phosphate
  modified_base 19: mod_base = OTHER; note = 2'-O-methylguanosine-3'-phosphorothioate
  modified_base 20: mod_base = OTHER; note = 2'-O-methylcytidine-3'-phosphorothioate
  modified_base 21: mod_base = OTHER; note = 2'-O-methyladenosine
ccacagaagatgttacttgca

SEQ ID NO: 666 - RNA, 21 nt, synthetic construct
  source 1..21: mol_type = other RNA
  modified_base 1: mod_base = OTHER; note = 2'-O-methyluridine-3'-phosphorothioate
  modified_base 2: mod_base = OTHER; note = 2'-O-methylcytidine-3'-phosphorothioate
  modified_base 3: mod_base = OTHER; note = 2'-O-methyluridine-3'-phosphate
  modified_base 4: mod_base = OTHER; note = 2'-O-methylguanosine-3'-phosphate
  modified_base 5: mod_base = OTHER; note = 2'-O-methyluridine-3'-phosphate
  modified_base 6: mod_base = OTHER; note = 2'-O-docosanyl-cytidine-3'-phosphate
  modified_base 7: mod_base = OTHER; note = 2'-deoxy-2'-fluoroadenosine-3'-phosphate
  modified_base 8: mod_base = OTHER; note = 2'-O-methyladenosine-3'-phosphate
  modified_base 9: mod_base = OTHER; note = 2'-deoxy-2'-fluorouridine-3'-phosphate
  modified_base 10: mod_base = OTHER; note = 2'-deoxy-2'-fluorouridine-3'-phosphate
  modified_base 11: mod_base = OTHER; note = 2'-deoxy-2'-fluoroguanosine-3'-phosphate
  modified_base 12: mod_base = OTHER; note = 2'-O-methyladenosine-3'-phosphate
  modified_base 13: mod_base = OTHER; note = 2'-O-methyladenosine-3'-phosphate
  modified_base 14: mod_base = OTHER; note = 2'-O-methylguanosine-3'-phosphate
  modified_base 15: mod_base = OTHER; note = 2'-O-methyladenosine-3'-phosphate
  modified_base 16: mod_base = OTHER; note = 2'-O-methylcytidine-3'-phosphate
  modified_base 17: mod_base = OTHER; note = 2'-O-methyladenosine-3'-phosphate
  modified_base 18: mod_base = OTHER; note = 2'-O-methylguanosine-3'-phosphate
  modified_base 19: mod_base = OTHER; note = 2'-O-methylguanosine-3'-phosphorothioate
  modified_base 20: mod_base = OTHER; note = 2'-O-methyladenosine-3'-phosphorothioate
  modified_base 21: mod_base = OTHER; note = 2'-O-methyladenosine
tctgtcaattgaagacaggaa

SEQ ID NO: 667 - RNA, 21 nt, synthetic construct
  source 1..21: mol_type = other RNA
  modified_base 1: mod_base = OTHER; note = 2'-O-methylguanosine-3'-phosphorothioate
  modified_base 2: mod_base = OTHER; note = 2'-O-methyladenosine-3'-phosphorothioate
  modified_base 3: mod_base = OTHER; note = 2'-O-methyladenosine-3'-phosphate
  modified_base 4: mod_base = OTHER; note = 2'-O-methyladenosine-3'-phosphate
  modified_base 5: mod_base = OTHER; note = 2'-O-methylcytidine-3'-phosphate
  modified_base 6: mod_base = OTHER; note = 2'-O-docosanyl-adenosine-3'-phosphate
  modified_base 7: mod_base = OTHER; note = 2'-deoxy-2'-fluoroguanosine-3'-phosphate
  modified_base 8: mod_base = OTHER; note = 2'-O-methyluridine-3'-phosphate
  modified_base 9: mod_base = OTHER; note = 2'-deoxy-2'-fluorouridine-3'-phosphate
  modified_base 10: mod_base = OTHER; note = 2'-deoxy-2'-fluorocytidine-3'-phosphate
  modified_base 11: mod_base = OTHER; note = 2'-deoxy-2'-fluoroadenosine-3'-phosphate
  modified_base 12: mod_base = OTHER; note = 2'-O-methylguanosine-3'-phosphate
  modified_base 13: mod_base = OTHER; note = 2'-O-methyladenosine-3'-phosphate
  modified_base 14: mod_base = OTHER; note = 2'-O-methyluridine-3'-phosphate
  modified_base 15: mod_base = OTHER; note = 2'-O-methyluridine-3'-phosphate
  modified_base 16: mod_base = OTHER; note = 2'-O-methyladenosine-3'-phosphate
  modified_base 17: mod_base = OTHER; note = 2'-O-methylcytidine-3'-phosphate
  modified_base 18: mod_base = OTHER; note = 2'-O-methyluridine-3'-phosphate
  modified_base 19: mod_base = OTHER; note = 2'-O-methylguanosine-3'-phosphorothioate
  modified_base 20: mod_base = OTHER; note = 2'-O-methylcytidine-3'-phosphorothioate
  modified_base 21: mod_base = OTHER; note = 2'-O-methyladenosine
gaaacagttcagattactgca

SEQ ID NO: 668 - RNA, 21 nt, synthetic construct
  source 1..21: mol_type = other RNA
  modified_base 1: mod_base = OTHER; note = 2'-O-methyladenosine-3'-phosphorothioate
  modified_base 2: mod_base = OTHER; note = 2'-O-methyluridine-3'-phosphorothioate
  modified_base 3: mod_base = OTHER; note = 2'-O-methyluridine-3'-phosphate
  modified_base 4: mod_base = OTHER; note = 2'-O-methylguanosine-3'-phosphate
  modified_base 5: mod_base = OTHER; note = 2'-O-methyladenosine-3'-phosphate
  modified_base 6: mod_base = OTHER; note = 2'-O-docosanyl-guanosine-3'-phosphate
  modified_base 7: mod_base = OTHER; note = 2'-deoxy-2'-fluorocytidine-3'-phosphate
  modified_base 8: mod_base = OTHER; note = 2'-O-methyluridine-3'-phosphate
  modified_base 9: mod_base = OTHER; note = 2'-deoxy-2'-fluoroadenosine-3'-phosphate
  modified_base 10: mod_base = OTHER; note = 2'-deoxy-2'-fluoroadenosine-3'-phosphate
  modified_base 11: mod_base = OTHER; note = 2'-deoxy-2'-fluorouridine-3'-phosphate
  modified_base 12: mod_base = OTHER; note = 2'-O-methylguanosine-3'-phosphate
  modified_base 13: mod_base = OTHER; note = 2'-O-methyladenosine-3'-phosphate
  modified_base 14: mod_base = OTHER; note = 2'-O-methyluridine-3'-phosphate
  modified_base 15: mod_base = OTHER; note = 2'-O-methyluridine-3'-phosphate
  modified_base 16: mod_base = OTHER; note = 2'-O-methylcytidine-3'-phosphate
  modified_base 17: mod_base = OTHER; note = 2'-O-methyladenosine-3'-phosphate
  modified_base 18: mod_base = OTHER; note = 2'-O-methyluridine-3'-phosphate
  modified_base 19: mod_base = OTHER; note = 2'-O-methyluridine-3'-phosphorothioate
  modified_base 20: mod_base = OTHER; note = 2'-O-methylguanosine-3'-phosphorothioate
  modified_base 21: mod_base = OTHER; note = 2'-O-methyladenosine
attgagctaatgattcattga

SEQ ID NO: 669 - RNA, 21 nt, synthetic construct
  source 1..21: mol_type = other RNA
  modified_base 1: mod_base = OTHER; note = 2'-O-methylcytidine-3'-phosphorothioate
  modified_base 2: mod_base = OTHER; note = 2'-O-methylcytidine-3'-phosphorothioate
  modified_base 3: mod_base = OTHER; note = 2'-O-methyluridine-3'-phosphate
  modified_base 4: mod_base = OTHER; note = 2'-O-methyluridine-3'-phosphate
  modified_base 5: mod_base = OTHER; note = 2'-O-methyluridine-3'-phosphate
  modified_base 6: mod_base = OTHER; note = 2'-O-docosanyl-uridine-3'-phosphate
  modified_base 7: mod_base = OTHER; note = 2'-deoxy-2'-fluoroguanosine-3'-phosphate
  modified_base 8: mod_base = OTHER; note = 2'-O-methylcytidine-3'-phosphate
  modified_base 9: mod_base = OTHER; note = 2'-deoxy-2'-fluorouridine-3'-phosphate
  modified_base 10: mod_base = OTHER; note = 2'-deoxy-2'-fluorouridine-3'-phosphate
  modified_base 11: mod_base = OTHER; note = 2'-deoxy-2'-fluorouridine-3'-phosphate
  modified_base 12: mod_base = OTHER; note = 2'-O-methylcytidine-3'-phosphate
  modified_base 13: mod_base = OTHER; note = 2'-O-methylcytidine-3'-phosphate
  modified_base 14: mod_base = OTHER; note = 2'-O-methyladenosine-3'-phosphate
  modified_base 15: mod_base = OTHER; note = 2'-O-methylguanosine-3'-phosphate
  modified_base 16: mod_base = OTHER; note = 2'-O-methyladenosine-3'-phosphate
  modified_base 17: mod_base = OTHER; note = 2'-O-methylguanosine-3'-phosphate
  modified_base 18: mod_base = OTHER; note = 2'-O-methyladenosine-3'-phosphate
  modified_base 19: mod_base = OTHER; note = 2'-O-methyladenosine-3'-phosphorothioate
  modified_base 20: mod_base = OTHER; note = 2'-O-methyladenosine-3'-phosphorothioate
  modified_base 21: mod_base = OTHER; note = 2'-O-methyladenosine
ccttttgctttccagagaaaa

SEQ ID NO: 670 - RNA, 21 nt, synthetic construct
  source 1..21: mol_type = other RNA
  modified_base 1: mod_base = OTHER; note = 2'-O-methylguanosine-3'-phosphorothioate
  modified_base 2: mod_base = OTHER; note = 2'-O-methyluridine-3'-phosphorothioate
  modified_base 3: mod_base = OTHER; note = 2'-O-methylguanosine-3'-phosphate
  modified_base 4: mod_base = OTHER; note = 2'-O-methyladenosine-3'-phosphate
  modified_base 5: mod_base = OTHER; note = 2'-O-methyluridine-3'-phosphate
  modified_base 6: mod_base = OTHER; note = 2'-O-docosanyl-guanosine-3'-phosphate
  modified_base 7: mod_base = OTHER; note = 2'-deoxy-2'-fluorocytidine-3'-phosphate
  modified_base 8: mod_base = OTHER; note = 2'-O-methyladenosine-3'-phosphate
  modified_base 9: mod_base = OTHER; note = 2'-deoxy-2'-fluorouridine-3'-phosphate
  modified_base 10: mod_base = OTHER; note = 2'-deoxy-2'-fluorocytidine-3'-phosphate
  modified_base 11: mod_base = OTHER; note = 2'-deoxy-2'-fluorouridine-3'-phosphate
  modified_base 12: mod_base = OTHER; note = 2'-O-methyluridine-3'-phosphate
  modified_base 13: mod_base = OTHER; note = 2'-O-methyluridine-3'-phosphate
  modified_base 14: mod_base = OTHER; note = 2'-O-methyladenosine-3'-phosphate
  modified_base 15: mod_base = OTHER; note = 2'-O-methylguanosine-3'-phosphate
  modified_base 16: mod_base = OTHER; note = 2'-O-methyladenosine-3'-phosphate
  modified_base 17: mod_base = OTHER; note = 2'-O-methyluridine-3'-phosphate
  modified_base 18: mod_base = OTHER; note = 2'-O-methyluridine-3'-phosphate
  modified_base 19: mod_base = OTHER; note = 2'-O-methyluridine-3'-phosphorothioate
  modified_base 20: mod_base = OTHER; note = 2'-O-methyluridine-3'-phosphorothioate
  modified_base 21: mod_base = OTHER; note = 2'-O-methyladenosine
gtgatgcatctttagatttta

SEQ ID NO: 671 - RNA, 21 nt, synthetic construct
  source 1..21: mol_type = other RNA
  modified_base 1: mod_base = OTHER; note = 2'-O-methyladenosine-3'-phosphorothioate
  modified_base 2: mod_base = OTHER; note = 2'-O-methyladenosine-3'-phosphorothioate
  modified_base 3: mod_base = OTHER; note = 2'-O-methyluridine-3'-phosphate
  modified_base 4: mod_base = OTHER; note = 2'-O-methylcytidine-3'-phosphate
  modified_base 5: mod_base = OTHER; note = 2'-O-methylcytidine-3'-phosphate
  modified_base 6: mod_base = OTHER; note = 2'-O-docosanyl-uridine-3'-phosphate
  modified_base 7: mod_base = OTHER; note = 2'-deoxy-2'-fluorocytidine-3'-phosphate
  modified_base 8: mod_base = OTHER; note = 2'-O-methylguanosine-3'-phosphate
  modified_base 9: mod_base = OTHER; note = 2'-deoxy-2'-fluorouridine-3'-phosphate
  modified_base 10: mod_base = OTHER; note = 2'-deoxy-2'-fluorocytidine-3'-phosphate
  modified_base 11: mod_base = OTHER; note = 2'-deoxy-2'-fluorouridine-3'-phosphate
  modified_base 12: mod_base = OTHER; note = 2'-O-methylguanosine-3'-phosphate
  modified_base 13: mod_base = OTHER; note = 2'-O-methyladenosine-3'-phosphate
  modified_base 14: mod_base = OTHER; note = 2'-O-methyladenosine-3'-phosphate
  modified_base 15: mod_base = OTHER; note = 2'-O-methyluridine-3'-phosphate
  modified_base 16: mod_base = OTHER; note = 2'-O-methylcytidine-3'-phosphate
  modified_base 17: mod_base = OTHER; note = 2'-O-methyladenosine-3'-phosphate
  modified_base 18: mod_base = OTHER; note = 2'-O-methyluridine-3'-phosphate
  modified_base 19: mod_base = OTHER; note = 2'-O-methylcytidine-3'-phosphorothioate
  modified_base 20: mod_base = OTHER; note = 2'-O-methylcytidine-3'-phosphorothioate
  modified_base 21: mod_base = OTHER; note = 2'-O-methyladenosine
aatcctcgtctgaatcatcca

SEQ ID NO: 672 - RNA, 21 nt, synthetic construct
  source 1..21: mol_type = other RNA
  modified_base 1: mod_base = OTHER; note = 2'-O-methyladenosine-3'-phosphorothioate
  modified_base 2: mod_base = OTHER; note = 2'-O-methyladenosine-3'-phosphorothioate
  modified_base 3: mod_base = OTHER; note = 2'-O-methyladenosine-3'-phosphate
  modified_base 4: mod_base = OTHER; note = 2'-O-methylguanosine-3'-phosphate
  modified_base 5: mod_base = OTHER; note = 2'-O-methyluridine-3'-phosphate
  modified_base 6: mod_base = OTHER; note = 2'-O-docosanyl-uridine-3'-phosphate
  modified_base 7: mod_base = OTHER; note = 2'-deoxy-2'-fluoroadenosine-3'-phosphate
  modified_base 8: mod_base = OTHER; note = 2'-O-methylguanosine-3'-phosphate
  modified_base 9: mod_base = OTHER; note = 2'-deoxy-2'-fluorocytidine-3'-phosphate
  modified_base 10: mod_base = OTHER; note = 2'-deoxy-2'-fluoroadenosine-3'-phosphate
  modified_base 11: mod_base = OTHER; note = 2'-deoxy-2'-fluorocytidine-3'-phosphate
  modified_base 12: mod_base = OTHER; note = 2'-O-methyluridine-3'-phosphate
  modified_base 13: mod_base = OTHER; note = 2'-O-methyluridine-3'-phosphate
  modified_base 14: mod_base = OTHER; note = 2'-O-methylguanosine-3'-phosphate
  modified_base 15: mod_base = OTHER; note = 2'-O-methyluridine-3'-phosphate
  modified_base 16: mod_base = OTHER; note = 2'-O-methylguanosine-3'-phosphate
  modified_base 17: mod_base = OTHER; note = 2'-O-methyluridine-3'-phosphate
  modified_base 18: mod_base = OTHER; note = 2'-O-methylguanosine-3'-phosphate
  modified_base 19: mod_base = OTHER; note = 2'-O-methyluridine-3'-phosphorothioate
  modified_base 20: mod_base = OTHER; note = 2'-O-methyladenosine-3'-phosphorothioate
  modified_base 21: mod_base = OTHER; note = 2'-O-methyladenosine
aaagttagcacttgtgtgtaa

SEQ ID NO: 673 - RNA, 21 nt, synthetic construct
  source 1..21: mol_type = other RNA
  modified_base 1: mod_base = OTHER; note = 2'-O-methyladenosine-3'-phosphorothioate
  modified_base 2: mod_base = OTHER; note = 2'-O-methyladenosine-3'-phosphorothioate
  modified_base 3: mod_base = OTHER; note = 2'-O-methyluridine-3'-phosphate
  modified_base 4: mod_base = OTHER; note = 2'-O-methyluridine-3'-phosphate
  modified_base 5: mod_base = OTHER; note = 2'-O-methyladenosine-3'-phosphate
  modified_base 6: mod_base = OTHER; note = 2'-O-docosanyl-cytidine-3'-phosphate
  modified_base 7: mod_base = OTHER; note = 2'-deoxy-2'-fluoroadenosine-3'-phosphate
  modified_base 8: mod_base = OTHER; note = 2'-O-methyladenosine-3'-phosphate
  modified_base 9: mod_base = OTHER; note = 2'-deoxy-2'-fluoroadenosine-3'-phosphate
  modified_base 10: mod_base = OTHER; note = 2'-deoxy-2'-fluoroadenosine-3'-phosphate
  modified_base 11: mod_base = OTHER; note = 2'-deoxy-2'-fluorouridine-3'-phosphate
  modified_base 12: mod_base = OTHER; note = 2'-O-methylcytidine-3'-phosphate
  modified_base 13: mod_base = OTHER; note = 2'-O-methylcytidine-3'-phosphate
  modified_base 14: mod_base = OTHER; note = 2'-O-methyladenosine-3'-phosphate
  modified_base 15: mod_base = OTHER; note = 2'-O-methylcytidine-3'-phosphate
  modified_base 16: mod_base = OTHER; note = 2'-O-methyladenosine-3'-phosphate
  modified_base 17: mod_base = OTHER; note = 2'-O-methylguanosine-3'-phosphate
  modified_base 18: mod_base = OTHER; note = 2'-O-methyladenosine-3'-phosphate
  modified_base 19: mod_base = OTHER; note = 2'-O-methyladenosine-3'-phosphorothioate
  modified_base 20: mod_base = OTHER; note = 2'-O-methylguanosine-3'-phosphorothioate
  modified_base 21: mod_base = OTHER; note = 2'-O-methyladenosine
aattacaaaatccacagaaga

SEQ ID NO: 674 - RNA, 21 nt, synthetic construct
  source 1..21: mol_type = other RNA
  modified_base 1: mod_base = OTHER; note = 2'-O-methyladenosine-3'-phosphorothioate
  modified_base 2: mod_base = OTHER; note = 2'-O-methyluridine-3'-phosphorothioate
  modified_base 3: mod_base = OTHER; note = 2'-O-methylguanosine-3'-phosphate
  modified_base 4: mod_base = OTHER; note = 2'-O-methyladenosine-3'-phosphate
  modified_base 5: mod_base = OTHER; note = 2'-O-methylcytidine-3'-phosphate
  modified_base 6: mod_base = OTHER; note = 2'-O-docosanyl-adenosine-3'-phosphate
  modified_base 7: mod_base = OTHER; note = 2'-deoxy-2'-fluoroguanosine-3'-phosphate
  modified_base 8: mod_base = OTHER; note = 2'-O-methyluridine-3'-phosphate
  modified_base 9: mod_base = OTHER; note = 2'-deoxy-2'-fluorouridine-3'-phosphate
  modified_base 10: mod_base = OTHER; note = 2'-deoxy-2'-fluorouridine-3'-phosphate
  modified_base 11: mod_base = OTHER; note = 2'-deoxy-2'-fluoroguanosine-3'-phosphate
  modified_base 12: mod_base = OTHER; note = 2'-O-methyluridine-3'-phosphate
  modified_base 13: mod_base = OTHER; note = 2'-O-methylcytidine-3'-phosphate
  modified_base 14: mod_base = OTHER; note = 2'-O-methyladenosine-3'-phosphate
  modified_base 15: mod_base = OTHER; note = 2'-O-methyladenosine-3'-phosphate
  modified_base 16: mod_base = OTHER; note = 2'-O-methylguanosine-3'-phosphate
  modified_base 17: mod_base = OTHER; note = 2'-O-methyladenosine-3'-phosphate
  modified_base 18: mod_base = OTHER; note = 2'-O-methylcytidine-3'-phosphate
  modified_base 19: mod_base = OTHER; note = 2'-O-methyladenosine-3'-phosphorothioate
  modified_base 20: mod_base = OTHER; note = 2'-O-methyluridine-3'-phosphorothioate
  modified_base 21: mod_base = OTHER; note = 2'-O-methyladenosine
atgacagtttgtcaagacata

SEQ ID NO: 675 - RNA, 21 nt, synthetic construct
  source 1..21: mol_type = other RNA
  modified_base 1: mod_base = OTHER; note = 2'-O-methylguanosine-3'-phosphorothioate
  modified_base 2: mod_base = OTHER; note = 2'-O-methylguanosine-3'-phosphorothioate
  modified_base 3: mod_base = OTHER; note = 2'-O-methylguanosine-3'-phosphate
  modified_base 4: mod_base = OTHER; note = 2'-O-methylcytidine-3'-phosphate
  modified_base 5: mod_base = OTHER; note = 2'-O-methyladenosine-3'-phosphate
  modified_base 6: mod_base = OTHER; note = 2'-O-docosanyl-guanosine-3'-phosphate
  modified_base 7: mod_base = OTHER; note = 2'-deoxy-2'-fluoroadenosine-3'-phosphate
  modified_base 8: mod_base = OTHER; note = 2'-O-methyluridine-3'-phosphate
  modified_base 9: mod_base = OTHER; note = 2'-deoxy-2'-fluorocytidine-3'-phosphate
  modified_base 10: mod_base = OTHER; note = 2'-deoxy-2'-fluorouridine-3'-phosphate
  modified_base 11: mod_base = OTHER; note = 2'-deoxy-2'-fluorouridine-3'-phosphate
  modified_base 12: mod_base = OTHER; note = 2'-O-methyladenosine-3'-phosphate
  modified_base 13: mod_base = OTHER; note = 2'-O-methyladenosine-3'-phosphate
  modified_base 14: mod_base = OTHER; note = 2'-O-methyladenosine-3'-phosphate
  modified_base 15: mod_base = OTHER; note = 2'-O-methyluridine-3'-phosphate
  modified_base 16: mod_base = OTHER; note = 2'-O-methyladenosine-3'-phosphate
  modified_base 17: mod_base = OTHER; note = 2'-O-methyladenosine-3'-phosphate
  modified_base 18: mod_base = OTHER; note = 2'-O-methyladenosine-3'-phosphate
  modified_base 19: mod_base = OTHER; note = 2'-O-methyladenosine-3'-phosphorothioate
  modified_base 20: mod_base = OTHER; note = 2'-O-methyluridine-3'-phosphorothioate
  modified_base 21: mod_base = OTHER; note = 2'-O-methyladenosine
gggcagatcttaaataaaata

SEQ ID NO: 676 - RNA, 21 nt, synthetic construct
  source 1..21: mol_type = other RNA
  modified_base 1: mod_base = OTHER; note = 2'-O-methylguanosine-3'-phosphorothioate
  modified_base 2: mod_base = OTHER; note = 2'-O-methyladenosine-3'-phosphorothioate
  modified_base 3: mod_base = OTHER; note = 2'-O-methyluridine-3'-phosphate
  modified_base 4: mod_base = OTHER; note = 2'-O-methyluridine-3'-phosphate
  modified_base 5: mod_base = OTHER; note = 2'-O-methyladenosine-3'-phosphate
  modified_base 6: mod_base = OTHER; note = 2'-O-docosanyl-adenosine-3'-phosphate
  modified_base 7: mod_base = OTHER; note = 2'-deoxy-2'-fluoroadenosine-3'-phosphate
  modified_base 8: mod_base = OTHER; note = 2'-O-methyladenosine-3'-phosphate
  modified_base 9: mod_base = OTHER; note = 2'-deoxy-2'-fluorouridine-3'-phosphate
  modified_base 10: mod_base = OTHER; note = 2'-deoxy-2'-fluorocytidine-3'-phosphate
  modified_base 11: mod_base = OTHER; note = 2'-deoxy-2'-fluoroguanosine-3'-phosphate
  modified_base 12: mod_base = OTHER; note = 2'-O-methyladenosine-3'-phosphate
  modified_base 13: mod_base = OTHER; note = 2'-O-methyluridine-3'-phosphate
  modified_base 14: mod_base = OTHER; note = 2'-O-methylcytidine-3'-phosphate
  modified_base 15: mod_base = OTHER; note = 2'-O-methyladenosine-3'-phosphate
  modified_base 16: mod_base = OTHER; note = 2'-O-methyluridine-3'-phosphate
  modified_base 17: mod_base = OTHER; note = 2'-O-methylcytidine-3'-phosphate
  modified_base 18: mod_base = OTHER; note = 2'-O-methylguanosine-3'-phosphate
  modified_base 19: mod_base = OTHER; note = 2'-O-methyluridine-3'-phosphorothioate
  modified_base 20: mod_base = OTHER; note = 2'-O-methylguanosine-3'-phosphorothioate
  modified_base 21: mod_base = OTHER; note = 2'-O-methyladenosine
gattaaaatcgatcatcgtga

SEQ ID NO: 677 - RNA, 21 nt, synthetic construct
  source 1..21: mol_type = other RNA
  modified_base 1: mod_base = OTHER; note = 2'-O-methyluridine-3'-phosphorothioate
  modified_base 2: mod_base = OTHER; note = 2'-O-methyluridine-3'-phosphorothioate
  modified_base 3: mod_base = OTHER; note = 2'-O-methylguanosine-3'-phosphate
  modified_base 4: mod_base = OTHER; note = 2'-O-methylcytidine-3'-phosphate
  modified_base 5: mod_base = OTHER; note = 2'-O-methyluridine-3'-phosphate
  modified_base 6: mod_base = OTHER; note = 2'-O-docosanyl-guanosine-3'-phosphate
  modified_base 7: mod_base = OTHER; note = 2'-deoxy-2'-fluoroadenosine-3'-phosphate
  modified_base 8: mod_base = OTHER; note = 2'-O-methyluridine-3'-phosphate
  modified_base 9: mod_base = OTHER; note = 2'-deoxy-2'-fluoroguanosine-3'-phosphate
  modified_base 10: mod_base = OTHER; note = 2'-deoxy-2'-fluorouridine-3'-phosphate
  modified_base 11: mod_base = OTHER; note = 2'-deoxy-2'-fluorouridine-3'-phosphate
  modified_base 12: mod_base = OTHER; note = 2'-O-methylcytidine-3'-phosphate
  modified_base 13: mod_base = OTHER; note = 2'-O-methylcytidine-3'-phosphate
  modified_base 14: mod_base = OTHER; note = 2'-O-methyluridine-3'-phosphate
  modified_base 15: mod_base = OTHER; note = 2'-O-methyluridine-3'-phosphate
  modified_base 16: mod_base = OTHER; note = 2'-O-methylguanosine-3'-phosphate
  modified_base 17: mod_base = OTHER; note = 2'-O-methyluridine-3'-phosphate
  modified_base 18: mod_base = OTHER; note = 2'-O-methyluridine-3'-phosphate
  modified_base 19: mod_base = OTHER; note = 2'-O-methylguanosine-3'-phosphorothioate
  modified_base 20: mod_base = OTHER; note = 2'-O-methyluridine-3'-phosphorothioate
  modified_base 21: mod_base = OTHER; note = 2'-O-methyladenosine
ttgctgatgttccttgttgta

SEQ ID NO: 678 - RNA, 21 nt, synthetic construct
  source 1..21: mol_type = other RNA
  modified_base 1: mod_base = OTHER; note = 2'-O-methylcytidine-3'-phosphorothioate
  modified_base 2: mod_base = OTHER; note = 2'-O-methyluridine-3'-phosphorothioate
  modified_base 3: mod_base = OTHER; note = 2'-O-methyladenosine-3'-phosphate
  modified_base 4: mod_base = OTHER; note = 2'-O-methylcytidine-3'-phosphate
  modified_base 5: mod_base = OTHER; note = 2'-O-methylcytidine-3'-phosphate
  modified_base 6: mod_base = OTHER; note = 2'-O-docosanyl-uridine-3'-phosphate
  modified_base 7: mod_base = OTHER; note = 2'-deoxy-2'-fluorocytidine-3'-phosphate
  modified_base 8: mod_base = OTHER; note = 2'-O-methyladenosine-3'-phosphate
  modified_base 9: mod_base = OTHER; note = 2'-deoxy-2'-fluorocytidine-3'-phosphate
  modified_base 10: mod_base = OTHER; note = 2'-deoxy-2'-fluoroadenosine-3'-phosphate
  modified_base 11: mod_base = OTHER; note = 2'-deoxy-2'-fluorocytidine-3'-phosphate
  modified_base 12: mod_base = OTHER; note = 2'-O-methyluridine-3'-phosphate
  modified_base 13: mod_base = OTHER; note = 2'-O-methylguanosine-3'-phosphate
  modified_base 14: mod_base = OTHER; note = 2'-O-methyluridine-3'-phosphate
  modified_base 15: mod_base = OTHER; note = 2'-O-methylguanosine-3'-phosphate
  modified_base 16: mod_base = OTHER; note = 2'-O-methylcytidine-3'-phosphate
  modified_base 17: mod_base = OTHER; note = 2'-O-methyladenosine-3'-phosphate
  modified_base 18: mod_base = OTHER; note = 2'-O-methyluridine-3'-phosphate
  modified_base 19: mod_base = OTHER; note = 2'-O-methyluridine-3'-phosphorothioate
  modified_base 20: mod_base = OTHER; note = 2'-O-methyluridine-3'-phosphorothioate
  modified_base 21: mod_base = OTHER; note = 2'-O-methyladenosine
ctacctcacactgtgcattta

SEQ ID NO: 679 - RNA, 21 nt, synthetic construct
  source 1..21: mol_type = other RNA
  modified_base 1: mod_base = OTHER; note = 2'-O-methylguanosine-3'-phosphorothioate
  modified_base 2: mod_base = OTHER; note = 2'-O-methyluridine-3'-phosphorothioate
  modified_base 3: mod_base = OTHER; note = 2'-O-methyladenosine-3'-phosphate
  modified_base 4: mod_base = OTHER; note = 2'-O-methyluridine-3'-phosphate
  modified_base 5: mod_base = OTHER; note = 2'-O-methylcytidine-3'-phosphate
  modified_base 6: mod_base = OTHER; note = 2'-O-docosanyl-adenosine-3'-phosphate
  modified_base 7: mod_base = OTHER; note = 2'-deoxy-2'-fluoroadenosine-3'-phosphate
  modified_base 8: mod_base = OTHER; note = 2'-O-methyluridine-3'-phosphate
  modified_base 9: mod_base = OTHER; note = 2'-deoxy-2'-fluoroadenosine-3'-phosphate
  modified_base 10: mod_base = OTHER; note = 2'-deoxy-2'-fluorouridine-3'-phosphate
  modified_base 11: mod_base = OTHER; note = 2'-deoxy-2'-fluorouridine-3'-phosphate
  modified_base 12: mod_base = OTHER; note = 2'-O-methyladenosine-3'-phosphate
  modified_base 13: mod_base = OTHER; note = 2'-O-methylguanosine-3'-phosphate
  modified_base 14: mod_base = OTHER; note = 2'-O-methyluridine-3'-phosphate
  modified_base 15: mod_base = OTHER; note = 2'-O-methyluridine-3'-phosphate
  modified_base 16: mod_base = OTHER; note = 2'-O-methylguanosine-3'-phosphate
  modified_base 17: mod_base = OTHER; note = 2'-O-methylguanosine-3'-phosphate
  modified_base 18: mod_base = OTHER; note = 2'-O-methyladenosine-3'-phosphate
  modified_base 19: mod_base = OTHER; note = 2'-O-methyladenosine-3'-phosphorothioate
  modified_base 20: mod_base = OTHER; note = 2'-O-methylguanosine-3'-phosphorothioate
  modified_base 21: mod_base = OTHER; note = 2'-O-methyladenosine
gtatcaatattagttggaaga

SEQ ID NO: 680 - RNA, 21 nt, synthetic construct
  source 1..21: mol_type = other RNA
  modified_base 1: mod_base = OTHER; note = 2'-O-methyladenosine-3'-phosphorothioate
  modified_base 2: mod_base = OTHER; note = 2'-O-methylguanosine-3'-phosphorothioate
  modified_base 3: mod_base = OTHER; note = 2'-O-methyladenosine-3'-phosphate
  modified_base 4: mod_base = OTHER; note = 2'-O-methyluridine-3'-phosphate
  modified_base 5: mod_base = OTHER; note = 2'-O-methyluridine-3'-phosphate
  modified_base 6: mod_base = OTHER; note = 2'-O-docosanyl-adenosine-3'-phosphate
  modified_base 7: mod_base = OTHER; note = 2'-deoxy-2'-fluorocytidine-3'-phosphate
  modified_base 8: mod_base = OTHER; note = 2'-O-methyluridine-3'-phosphate
  modified_base 9: mod_base = OTHER; note = 2'-deoxy-2'-fluoroguanosine-3'-phosphate
  modified_base 10: mod_base = OTHER; note = 2'-deoxy-2'-fluorocytidine-3'-phosphate
  modified_base 11: mod_base = OTHER; note = 2'-deoxy-2'-fluoroadenosine-3'-phosphate
  modified_base 12: mod_base = OTHER; note = 2'-O-methylcytidine-3'-phosphate
  modified_base 13: mod_base = OTHER; note = 2'-O-methyladenosine-3'-phosphate
  modified_base 14: mod_base = OTHER; note = 2'-O-methyluridine-3'-phosphate
  modified_base 15: mod_base = OTHER; note = 2'-O-methylguanosine-3'-phosphate
  modified_base 16: mod_base = OTHER; note = 2'-O-methyluridine-3'-phosphate
  modified_base 17: mod_base = OTHER; note = 2'-O-methylguanosine-3'-phosphate
  modified_base 18: mod_base = OTHER; note = 2'-O-methylguanosine-3'-phosphate
  modified_base 19: mod_base = OTHER; note = 2'-O-methyladenosine-3'-phosphorothioate
  modified_base 20: mod_base = OTHER; note = 2'-O-methyluridine-3'-phosphorothioate
  modified_base 21: mod_base = OTHER; note = 2'-O-methyladenosine
agattactgcacatgtggata

SEQ ID NO: 681 - RNA, 21 nt, synthetic construct
  source 1..21: mol_type = other RNA
  modified_base 1: mod_base = OTHER; note = 2'-O-methylguanosine-3'-phosphorothioate
  modified_base 2: mod_base = OTHER; note = 2'-O-methyladenosine-3'-phosphorothioate
  modified_base 3: mod_base = OTHER; note = 2'-O-methylguanosine-3'-phosphate
  modified_base 4: mod_base = OTHER; note = 2'-O-methylguanosine-3'-phosphate
  modified_base 5: mod_base = OTHER; note = 2'-O-methylguanosine-3'-phosphate
  modified_base 6: mod_base = OTHER; note = 2'-O-docosanyl-adenosine-3'-phosphate
  modified_base 7: mod_base = OTHER; note = 2'-deoxy-2'-fluorouridine-3'-phosphate
  modified_base 8: mod_base = OTHER; note = 2'-O-methyluridine-3'-phosphate
  modified_base 9: mod_base = OTHER; note = 2'-deoxy-2'-fluorouridine-3'-phosphate
  modified_base 10: mod_base = OTHER; note = 2'-deoxy-2'-fluorocytidine-3'-phosphate
  modified_base 11: mod_base = OTHER; note = 2'-deoxy-2'-fluorouridine-3'-phosphate
  modified_base 12: mod_base = OTHER; note = 2'-O-methyladenosine-3'-phosphate
  modified_base 13: mod_base = OTHER; note = 2'-O-methylcytidine-3'-phosphate
  modified_base 14: mod_base = OTHER; note = 2'-O-methylcytidine-3'-phosphate
  modified_base 15: mod_base = OTHER; note = 2'-O-methyluridine-3'-phosphate
  modified_base 16: mod_base = OTHER; note = 2'-O-methylcytidine-3'-phosphate
  modified_base 17: mod_base = OTHER; note = 2'-O-methyladenosine-3'-phosphate
  modified_base 18: mod_base = OTHER; note = 2'-O-methylcytidine-3'-phosphate
  modified_base 19: mod_base = OTHER; note = 2'-O-methyladenosine-3'-phosphorothioate
  modified_base 20: mod_base = OTHER; note = 2'-O-methylcytidine-3'-phosphorothioate
  modified_base 21: mod_base = OTHER; note = 2'-O-methyladenosine
gagggatttctacctcacaca

SEQ ID NO: 682 - RNA, 21 nt, synthetic construct
  source 1..21: mol_type = other RNA
  modified_base 1: mod_base = OTHER; note = 2'-O-methyluridine-3'-phosphorothioate
  modified_base 2: mod_base = OTHER; note = 2'-O-methylguanosine-3'-phosphorothioate
  modified_base 3: mod_base = OTHER; note = 2'-O-methyladenosine-3'-phosphate
  modified_base 4: mod_base = OTHER; note = 2'-O-methyladenosine-3'-phosphate
  modified_base 5: mod_base = OTHER; note = 2'-O-methylguanosine-3'-phosphate
  modified_base 6: mod_base = OTHER; note = 2'-O-docosanyl-adenosine-3'-phosphate
  modified_base 7: mod_base = OTHER; note = 2'-deoxy-2'-fluorocytidine-3'-phosphate
  modified_base 8: mod_base = OTHER; note = 2'-O-methyladenosine-3'-phosphate
  modified_base 9: mod_base = OTHER; note = 2'-deoxy-2'-fluoroguanosine-3'-phosphate
  modified_base 10: mod_base = OTHER; note = 2'-deoxy-2'-fluoroguanosine-3'-phosphate
  modified_base 11: mod_base = OTHER; note = 2'-deoxy-2'-fluoroadenosine-3'-phosphate
  modified_base 12: mod_base = OTHER; note = 2'-O-methylcytidine-3'-phosphate
  modified_base 13: mod_base = OTHER; note = 2'-O-methyladenosine-3'-phosphate
  modified_base 14: mod_base = OTHER; note = 2'-O-methyluridine-3'-phosphate
  modified_base 15: mod_base = OTHER; note = 2'-O-methyluridine-3'-phosphate
  modified_base 16: mod_base = OTHER; note = 2'-O-methyladenosine-3'-phosphate
  modified_base 17: mod_base = OTHER; note = 2'-O-methyladenosine-3'-phosphate
  modified_base 18: mod_base = OTHER; note = 2'-O-methyladenosine-3'-phosphate
  modified_base 19: mod_base = OTHER; note = 2'-O-methyladenosine-3'-phosphorothioate
  modified_base 20: mod_base = OTHER; note = 2'-O-methylguanosine-3'-phosphorothioate
  modified_base 21: mod_base = OTHER; note = 2'-O-methyladenosine
tgaagacaggacattaaaaga

SEQ ID NO: 683 - RNA, 21 nt, synthetic construct
  source 1..21: mol_type = other RNA
  modified_base 1: mod_base = OTHER; note = 2'-O-methylguanosine-3'-phosphorothioate
  modified_base 2: mod_base = OTHER; note = 2'-O-methyladenosine-3'-phosphorothioate
  modified_base 3: mod_base = OTHER; note = 2'-O-methylguanosine-3'-phosphate
  modified_base 4: mod_base = OTHER; note = 2'-O-methylguanosine-3'-phosphate
  modified_base 5: mod_base = OTHER; note = 2'-O-methyladenosine-3'-phosphate
  modified_base 6: mod_base = OTHER; note = 2'-O-docosanyl-guanosine-3'-phosphate
  modified_base 7: mod_base = OTHER; note = 2'-deoxy-2'-fluoroadenosine-3'-phosphate
  modified_base 8: mod_base = OTHER; note = 2'-O-methyluridine-3'-phosphate
  modified_base 9: mod_base = OTHER; note = 2'-deoxy-2'-fluorocytidine-3'-phosphate
  modified_base 10: mod_base = OTHER; note = 2'-deoxy-2'-fluorouridine-3'-phosphate
  modified_base 11: mod_base = OTHER; note = 2'-deoxy-2'-fluoroguanosine-3'-phosphate
  modified_base 12: mod_base = OTHER; note = 2'-O-methyluridine-3'-phosphate
  modified_base 13: mod_base = OTHER; note = 2'-O-methylguanosine-3'-phosphate
  modified_base 14: mod_base = OTHER; note = 2'-O-methyluridine-3'-phosphate
  modified_base 15: mod_base = OTHER; note = 2'-O-methyluridine-3'-phosphate
  modified_base 16: mod_base = OTHER; note = 2'-O-methyluridine-3'-phosphate
  modified_base 17: mod_base = OTHER; note = 2'-O-methyladenosine-3'-phosphate
  modified_base 18: mod_base = OTHER; note = 2'-O-methylcytidine-3'-phosphate
  modified_base 19: mod_base = OTHER; note = 2'-O-methyluridine-3'-phosphorothioate
  modified_base 20: mod_base = OTHER; note = 2'-O-methyluridine-3'-phosphorothioate
  modified_base 21: mod_base = OTHER; note = 2'-O-methyladenosine
gaggagatctgtgtttactta

SEQ ID NO: 684 - RNA, 21 nt, synthetic construct
  source 1..21: mol_type = other RNA
  modified_base 1: mod_base = OTHER; note = 2'-O-methyladenosine-3'-phosphorothioate
  modified_base 2: mod_base = OTHER; note = 2'-O-methylcytidine-3'-phosphorothioate
  modified_base 3: mod_base = OTHER; note = 2'-O-methyluridine-3'-phosphate
  modified_base 4: mod_base = OTHER; note = 2'-O-methylcytidine-3'-phosphate
  modified_base 5: mod_base = OTHER; note = 2'-O-methyluridine-3'-phosphate
  modified_base 6: mod_base = OTHER; note = 2'-O-docosanyl-guanosine-3'-phosphate
  modified_base 7: mod_base = OTHER; note = 2'-deoxy-2'-fluoroguanosine-3'-phosphate
  modified_base 8: mod_base = OTHER; note = 2'-O-methyluridine-3'-phosphate
  modified_base 9: mod_base = OTHER; note = 2'-deoxy-2'-fluoroguanosine-3'-phosphate
  modified_base 10: mod_base = OTHER; note = 2'-deoxy-2'-fluorocytidine-3'-phosphate
  modified_base 11: mod_base = OTHER; note = 2'-deoxy-2'-fluoroadenosine-3'-phosphate
  modified_base 12: mod_base = OTHER; note = 2'-O-methyladenosine-3'-phosphate
  modified_base 13: mod_base = OTHER; note = 2'-O-methylcytidine-3'-phosphate
  modified_base 14: mod_base = OTHER; note = 2'-O-methyluridine-3'-phosphate
  modified_base 15: mod_base = OTHER; note = 2'-O-methyladenosine-3'-phosphate
  modified_base 16: mod_base = OTHER; note = 2'-O-methyladenosine-3'-phosphate
  modified_base 17: mod_base = OTHER; note = 2'-O-methylcytidine-3'-phosphate
  modified_base 18: mod_base = OTHER; note = 2'-O-methyluridine-3'-phosphate
  modified_base 19: mod_base = OTHER; note = 2'-O-methyladenosine-3'-phosphorothioate
  modified_base 20: mod_base = OTHER; note = 2'-O-methylcytidine-3'-phosphorothioate
  modified_base 21: mod_base = OTHER; note = 2'-O-methyladenosine
actctggtgcaactaactaca

SEQ ID NO: 685 - RNA, 21 nt, synthetic construct
  source 1..21: mol_type = other RNA
  modified_base 1: mod_base = OTHER; note = 2'-O-methylcytidine-3'-phosphorothioate
  modified_base 2: mod_base = OTHER; note = 2'-O-methyladenosine-3'-phosphorothioate
  modified_base 3: mod_base = OTHER; note = 2'-O-methylcytidine-3'-phosphate
  modified_base 4: mod_base = OTHER; note = 2'-O-methylcytidine-3'-phosphate
  modified_base 5: mod_base = OTHER; note = 2'-O-methyluridine-3'-phosphate
  modified_base 6: mod_base = OTHER; note = 2'-O-docosanyl-uridine-3'-phosphate
  modified_base 7: mod_base = OTHER; note = 2'-deoxy-2'-fluoroguanosine-3'-phosphate
  modified_base 8: mod_base = OTHER; note = 2'-O-methylcytidine-3'-phosphate
  modified_base 9: mod_base = OTHER; note = 2'-deoxy-2'-fluorouridine-3'-phosphate
  modified_base 10: mod_base = OTHER; note = 2'-deoxy-2'-fluorouridine-3'-phosphate
  modified_base 11: mod_base = OTHER; note = 2'-deoxy-2'-fluorouridine-3'-phosphate
  modified_base 12: mod_base = OTHER; note = 2'-O-methylcytidine-3'-phosphate
  modified_base 13: mod_base = OTHER; note = 2'-O-methylcytidine-3'-phosphate
  modified_base 14: mod_base = OTHER; note = 2'-O-methyluridine-3'-phosphate
  modified_base 15: mod_base = OTHER; note = 2'-O-methyluridine-3'-phosphate
  modified_base 16: mod_base = OTHER; note = 2'-O-methylguanosine-3'-phosphate
  modified_base 17: mod_base = OTHER; note = 2'-O-methyluridine-3'-phosphate
  modified_base 18: mod_base = OTHER; note = 2'-O-methylguanosine-3'-phosphate
  modified_base 19: mod_base = OTHER; note = 2'-O-methyluridine-3'-phosphorothioate
  modified_base 20: mod_base = OTHER; note = 2'-O-methyladenosine-3'-phosphorothioate
  modified_base 21: mod_base = OTHER; note = 2'-O-methyladenosine
caccttgctttccttgtgtaa

SEQ ID NO: 686 - RNA, 21 nt, synthetic construct
  source 1..21: mol_type = other RNA
  modified_base 1: mod_base = OTHER; note = 2'-O-methyluridine-3'-phosphorothioate
  modified_base 2: mod_base = OTHER; note = 2'-O-methylcytidine-3'-phosphorothioate
  modified_base 3: mod_base = OTHER; note = 2'-O-methylcytidine-3'-phosphate
  modified_base 4: mod_base = OTHER; note = 2'-O-methylguanosine-3'-phosphate
  modified_base 5: mod_base = OTHER; note = 2'-O-methyluridine-3'-phosphate
  modified_base 6: mod_base = OTHER; note = 2'-O-docosanyl-adenosine-3'-phosphate
  modified_base 7: mod_base = OTHER; note = 2'-deoxy-2'-fluoroguanosine-3'-phosphate
  modified_base 8: mod_base = OTHER; note = 2'-O-methyluridine-3'-phosphate
  modified_base 9: mod_base = OTHER; note = 2'-deoxy-2'-fluorocytidine-3'-phosphate
  modified_base 10: mod_base = OTHER; note = 2'-deoxy-2'-fluorouridine-3'-phosphate
  modified_base 11: mod_base = OTHER; note = 2'-deoxy-2'-fluorocytidine-3'-phosphate
  modified_base 12: mod_base = OTHER; note = 2'-O-methylcytidine-3'-phosphate
  modified_base 13: mod_base = OTHER; note = 2'-O-methyluridine-3'-phosphate
  modified_base 14: mod_base = OTHER; note = 2'-O-methyluridine-3'-phosphate
  modified_base 15: mod_base = OTHER; note = 2'-O-methylcytidine-3'-phosphate
  modified_base 16: mod_base = OTHER; note = 2'-O-methyluridine-3'-phosphate
  modified_base 17: mod_base = OTHER; note = 2'-O-methyladenosine-3'-phosphate
  modified_base 18: mod_base = OTHER; note = 2'-O-methylcytidine-3'-phosphate
  modified_base 19: mod_base = OTHER; note = 2'-O-methylguanosine-3'-phosphorothioate
  modified_base 20: mod_base = OTHER; note = 2'-O-methyluridine-3'-phosphorothioate
  modified_base 21: mod_base = OTHER; note = 2'-O-methyladenosine
tccgtagtctccttctacgta

SEQ ID NO: 687 - RNA, 21 nt, synthetic construct
  source 1..21: mol_type = other RNA
  modified_base 1: mod_base = OTHER; note = 2'-O-methyluridine-3'-phosphorothioate
  modified_base 2: mod_base = OTHER; note = 2'-O-methyluridine-3'-phosphorothioate
  modified_base 3: mod_base = OTHER; note = 2'-O-methylguanosine-3'-phosphate
  modified_base 4: mod_base = OTHER; note = 2'-O-methylcytidine-3'-phosphate
  modified_base 5: mod_base = OTHER; note = 2'-O-methyluridine-3'-phosphate
  modified_base 6: mod_base = OTHER; note = 2'-O-docosanyl-guanosine-3'-phosphate
  modified_base 7: mod_base = OTHER; note = 2'-deoxy-2'-fluoroguanosine-3'-phosphate
  modified_base 8: mod_base = OTHER; note = 2'-O-methyluridine-3'-phosphate
  modified_base 9: mod_base = OTHER; note = 2'-deoxy-2'-fluoroguanosine-3'-phosphate
  modified_base 10: mod_base = OTHER; note = 2'-deoxy-2'-fluoroadenosine-3'-phosphate
  modified_base 11: mod_base = OTHER; note = 2'-deoxy-2'-fluoroadenosine-3'-phosphate
  modified_base 12: mod_base = OTHER; note = 2'-O-methyladenosine-3'-phosphate
  modified_base 13: mod_base = OTHER; note = 2'-O-methylguanosine-3'-phosphate
  modified_base 14: mod_base = OTHER; note = 2'-O-methyluridine-3'-phosphate
  modified_base 15: mod_base = OTHER; note = 2'-O-methyluridine-3'-phosphate
  modified_base 16: mod_base = OTHER; note = 2'-O-methyladenosine-3'-phosphate
  modified_base 17: mod_base = OTHER; note = 2'-O-methylguanosine-3'-phosphate
  modified_base 18: mod_base = OTHER; note = 2'-O-methylcytidine-3'-phosphate
  modified_base 19: mod_base = OTHER; note = 2'-O-methyladenosine-3'-phosphorothioate
  modified_base 20: mod_base = OTHER; note = 2'-O-methylcytidine-3'-phosphorothioate
  modified_base 21: mod_base = OTHER; note = 2'-O-methyladenosine
ttgctggtgaaagttagcaca

SEQ ID NO: 688 - RNA, 21 nt, synthetic construct
  source 1..21: mol_type = other RNA
  modified_base 1: mod_base = OTHER; note = 2'-O-methylcytidine-3'-phosphorothioate
  modified_base 2: mod_base = OTHER; note = 2'-O-methyluridine-3'-phosphorothioate
  modified_base 3: mod_base = OTHER; note = 2'-O-methylcytidine-3'-phosphate
  modified_base 4: mod_base = OTHER; note = 2'-O-methylcytidine-3'-phosphate
  modified_base 5: mod_base = OTHER; note = 2'-O-methyluridine-3'-phosphate
  modified_base 6: mod_base = OTHER; note = 2'-O-docosanyl-uridine-3'-phosphate
  modified_base 7: mod_base = OTHER; note = 2'-deoxy-2'-fluorocytidine-3'-phosphate
  modified_base 8: mod_base = OTHER; note = 2'-O-methyluridine-3'-phosphate
  modified_base 9: mod_base = OTHER; note = 2'-deoxy-2'-fluorouridine-3'-phosphate
  modified_base 10: mod_base = OTHER; note = 2'-deoxy-2'-fluorocytidine-3'-phosphate
  modified_base 11: mod_base = OTHER; note = 2'-deoxy-2'-fluorouridine-3'-phosphate
  modified_base 12: mod_base = OTHER; note = 2'-O-methylguanosine-3'-phosphate
  modified_base 13: mod_base = OTHER; note = 2'-O-methylcytidine-3'-phosphate
  modified_base 14: mod_base = OTHER; note = 2'-O-methylguanosine-3'-phosphate
  modified_base 15: mod_base = OTHER; note = 2'-O-methyladenosine-3'-phosphate
  modified_base 16: mod_base = OTHER; note = 2'-O-methylguanosine-3'-phosphate
  modified_base 17: mod_base = OTHER; note = 2'-O-methylcytidine-3'-phosphate
  modified_base 18: mod_base = OTHER; note = 2'-O-methyluridine-3'-phosphate
  modified_base 19: mod_base = OTHER; note = 2'-O-methylguanosine-3'-phosphorothioate
  modified_base 20: mod_base = OTHER; note = 2'-O-methyluridine-3'-phosphorothioate
  modified_base 21: mod_base = OTHER; note = 2'-O-methyladenosine
ctccttcttctgcgagctgta

SEQ ID NO: 689 - RNA, 21 nt, synthetic construct
  source 1..21: mol_type = other RNA
  modified_base 1: mod_base = OTHER; note = 2'-O-methylguanosine-3'-phosphorothioate
  modified_base 2: mod_base = OTHER; note = 2'-O-methylguanosine-3'-phosphorothioate
  modified_base 3: mod_base = OTHER; note = 2'-O-methyladenosine-3'-phosphate
  modified_base 4: mod_base = OTHER; note = 2'-O-methyladenosine-3'-phosphate
  modified_base 5: mod_base = OTHER; note = 2'-O-methyluridine-3'-phosphate
  modified_base 6: mod_base = OTHER; note = 2'-O-docosanyl-uridine-3'-phosphate
  modified_base 7: mod_base = OTHER; note = 2'-deoxy-2'-fluoroguanosine-3'-phosphate
  modified_base 8: mod_base = OTHER; note = 2'-O-methylguanosine-3'-phosphate
  modified_base 9: mod_base = OTHER; note = 2'-deoxy-2'-fluorouridine-3'-phosphate
  modified_base 10: mod_base = OTHER; note = 2'-deoxy-2'-fluorocytidine-3'-phosphate
  modified_base 11: mod_base = OTHER; note = 2'-deoxy-2'-fluorocytidine-3'-phosphate
  modified_base 12: mod_base = OTHER; note = 2'-O-methyladenosine-3'-phosphate
  modified_base 13: mod_base = OTHER; note = 2'-O-methyluridine-3'-phosphate
  modified_base 14: mod_base = OTHER; note = 2'-O-methylguanosine-3'-phosphate
  modified_base 15: mod_base = OTHER; note = 2'-O-methyluridine-3'-phosphate
  modified_base 16: mod_base = OTHER; note = 2'-O-methylguanosine-3'-phosphate
  modified_base 17: mod_base = OTHER; note = 2'-O-methylcytidine-3'-phosphate
  modified_base 18: mod_base = OTHER; note = 2'-O-methyladenosine-3'-phosphate
  modified_base 19: mod_base = OTHER; note = 2'-O-methyladenosine-3'-phosphorothioate
  modified_base 20: mod_base = OTHER; note = 2'-O-methyluridine-3'-phosphorothioate
  modified_base 21: mod_base = OTHER; note = 2'-O-methyladenosine
ggaattggtccatgtgcaata

SEQ ID NO: 690 - RNA, 21 nt, synthetic construct
  source 1..21: mol_type = other RNA
  modified_base 1: mod_base = OTHER; note = 2'-O-methyluridine-3'-phosphorothioate
  modified_base 2: mod_base = OTHER; note = 2'-O-methylguanosine-3'-phosphorothioate
  modified_base 3: mod_base = OTHER; note = 2'-O-methyladenosine-3'-phosphate
  modified_base 4: mod_base = OTHER; note = 2'-O-methyladenosine-3'-phosphate
  modified_base 5: mod_base = OTHER; note = 2'-O-methyluridine-3'-phosphate
  modified_base 6: mod_base = OTHER; note = 2'-O-docosanyl-cytidine-3'-phosphate
  modified_base 7: mod_base = OTHER; note = 2'-deoxy-2'-fluoroadenosine-3'-phosphate
  modified_base 8: mod_base = OTHER; note = 2'-O-methyluridine-3'-phosphate
  modified_base 9: mod_base = OTHER; note = 2'-deoxy-2'-fluorocytidine-3'-phosphate
  modified_base 10: mod_base = OTHER; note = 2'-deoxy-2'-fluorocytidine-3'-phosphate
  modified_base 11: mod_base = OTHER; note = 2'-deoxy-2'-fluoroguanosine-3'-phosphate
  modified_base 12: mod_base = OTHER; note = 2'-O-methyladenosine-3'-phosphate
  modified_base 13: mod_base = OTHER; note = 2'-O-methylguanosine-3'-phosphate
  modified_base 14: mod_base = OTHER; note = 2'-O-methylguanosine-3'-phosphate
  modified_base 15: mod_base = OTHER; note = 2'-O-methylcytidine-3'-phosphate
  modified_base 16: mod_base = OTHER; note = 2'-O-methyladenosine-3'-phosphate
  modified_base 17: mod_base = OTHER; note = 2'-O-methyladenosine-3'-phosphate
  modified_base 18: mod_base = OTHER; note = 2'-O-methyladenosine-3'-phosphate
  modified_base 19: mod_base = OTHER; note = 2'-O-methylguanosine-3'-phosphorothioate
  modified_base 20: mod_base = OTHER; note = 2'-O-methyladenosine-3'-phosphorothioate
  modified_base 21: mod_base = OTHER; note = 2'-O-methyladenosine
tgaatcatccgaggcaaagaa

SEQ ID NO: 691 - RNA, 21 nt, synthetic construct
  source 1..21: mol_type = other RNA
  modified_base 1: mod_base = OTHER; note = 2'-O-methyladenosine-3'-phosphorothioate
  modified_base 2: mod_base = OTHER; note = 2'-O-methyladenosine-3'-phosphorothioate
  modified_base 3: mod_base = OTHER; note = 2'-O-methyladenosine-3'-phosphate
  modified_base 4: mod_base = OTHER; note = 2'-O-methylguanosine-3'-phosphate
  modified_base 5: mod_base = OTHER; note = 2'-O-methylcytidine-3'-phosphate
  modified_base 6: mod_base = OTHER; note = 2'-O-docosanyl-adenosine-3'-phosphate
  modified_base 7: mod_base = OTHER; note = 2'-deoxy-2'-fluoroadenosine-3'-phosphate
  modified_base 8: mod_base = OTHER; note = 2'-O-methyladenosine-3'-phosphate
  modified_base 9: mod_base = OTHER; note = 2'-deoxy-2'-fluoroguanosine-3'-phosphate
  modified_base 10: mod_base = OTHER; note = 2'-deoxy-2'-fluoroadenosine-3'-phosphate
  modified_base 11: mod_base = OTHER; note = 2'-deoxy-2'-fluoroguanosine-3'-phosphate
  modified_base 12: mod_base = OTHER; note = 2'-O-methyladenosine-3'-phosphate
  modified_base 13: mod_base = OTHER; note = 2'-O-methyladenosine-3'-phosphate
  modified_base 14: mod_base = OTHER; note = 2'-O-methyladenosine-3'-phosphate
  modified_base 15: mod_base = OTHER; note = 2'-O-methylguanosine-3'-phosphate
  modified_base 16: mod_base = OTHER; note = 2'-O-methylguanosine-3'-phosphate
  modified_base 17: mod_base = OTHER; note = 2'-O-methyladenosine-3'-phosphate
  modified_base 18: mod_base = OTHER; note = 2'-O-methyluridine-3'-phosphate
  modified_base 19: mod_base = OTHER; note = 2'-O-methylguanosine-3'-phosphorothioate
  modified_base 20: mod_base = OTHER; note = 2'-O-methylguanosine-3'-phosphorothioate
  modified_base 21: mod_base = OTHER; note = 2'-O-methyladenosine
aaagcaaagagaaaggatgga

SEQ ID NO: 692 - RNA, 21 nt, synthetic construct
  source 1..21: mol_type = other RNA
  modified_base 1: mod_base = OTHER; note = 2'-O-methyluridine-3'-phosphorothioate
  modified_base 2: mod_base = OTHER; note = 2'-O-methylcytidine-3'-phosphorothioate
  modified_base 3: mod_base = OTHER; note = 2'-O-methyluridine-3'-phosphate
  modified_base 4: mod_base = OTHER; note = 2'-O-methyluridine-3'-phosphate
  modified_base 5: mod_base = OTHER; note = 2'-O-methyluridine-3'-phosphate
  modified_base 6: mod_base = OTHER; note = 2'-O-docosanyl-uridine-3'-phosphate
  modified_base 7: mod_base = OTHER; note = 2'-deoxy-2'-fluoroguanosine-3'-phosphate
  modified_base 8: mod_base = OTHER; note = 2'-O-methyluridine-3'-phosphate
  modified_base 9: mod_base = OTHER; note = 2'-deoxy-2'-fluoroguanosine-3'-phosphate
  modified_base 10: mod_base = OTHER; note = 2'-deoxy-2'-fluorouridine-3'-phosphate
  modified_base 11: mod_base = OTHER; note = 2'-deoxy-2'-fluoroguanosine-3'-phosphate
  modified_base 12: mod_base = OTHER; note = 2'-O-methyluridine-3'-phosphate
  modified_base 13: mod_base = OTHER; note = 2'-O-methylguanosine-3'-phosphate
  modified_base 14: mod_base = OTHER; note = 2'-O-methylcytidine-3'-phosphate
  modified_base 15: mod_base = OTHER; note = 2'-O-methylguanosine-3'-phosphate
  modified_base 16: mod_base = OTHER; note = 2'-O-methyluridine-3'-phosphate
  modified_base 17: mod_base = OTHER; note = 2'-O-methylguanosine-3'-phosphate
  modified_base 18: mod_base = OTHER; note = 2'-O-methyluridine-3'-phosphate
  modified_base 19: mod_base = OTHER; note = 2'-O-methylguanosine-3'-phosphorothioate
  modified_base 20: mod_base = OTHER; note = 2'-O-methyladenosine-3'-phosphorothioate
  modified_base 21: mod_base = OTHER; note = 2'-O-methyladenosine
tcttttgtgtgtgcgtgtgaa

SEQ ID NO: 693 - RNA, 21 nt, synthetic construct
  source 1..21: mol_type = other RNA
  modified_base 1: mod_base = OTHER; note = 2'-O-methylguanosine-3'-phosphorothioate
  modified_base 2: mod_base = OTHER; note = 2'-O-methylcytidine-3'-phosphorothioate
  modified_base 3: mod_base = OTHER; note = 2'-O-methyladenosine-3'-phosphate
  modified_base 4: mod_base = OTHER; note = 2'-O-methyluridine-3'-phosphate
  modified_base 5: mod_base = OTHER; note = 2'-O-methyluridine-3'-phosphate
  modified_base 6: mod_base = OTHER; note = 2'-O-docosanyl-uridine-3'-phosphate
  modified_base 7: mod_base = OTHER; note = 2'-deoxy-2'-fluoroguanosine-3'-phosphate
  modified_base 8: mod_base = OTHER; note = 2'-O-methylcytidine-3'-phosphate
  modified_base 9: mod_base = OTHER; note = 2'-deoxy-2'-fluoroadenosine-3'-phosphate
  modified_base 10: mod_base = OTHER; note = 2'-deoxy-2'-fluorocytidine-3'-phosphate
  modified_base 11: mod_base = OTHER; note = 2'-deoxy-2'-fluoroadenosine-3'-phosphate
  modified_base 12: mod_base = OTHER; note = 2'-O-methylguanosine-3'-phosphate
  modified_base 13: mod_base = OTHER; note = 2'-O-methylcytidine-3'-phosphate
  modified_base 14: mod_base = OTHER; note = 2'-O-methyladenosine-3'-phosphate
  modified_base 15: mod_base = OTHER; note = 2'-O-methylguanosine-3'-phosphate
  modified_base 16: mod_base = OTHER; note = 2'-O-methyladenosine-3'-phosphate
  modified_base 17: mod_base = OTHER; note = 2'-O-methyluridine-3'-phosphate
  modified_base 18: mod_base = OTHER; note = 2'-O-methyladenosine-3'-phosphate
  modified_base 19: mod_base = OTHER; note = 2'-O-methylguanosine-3'-phosphorothioate
  modified_base 20: mod_base = OTHER; note = 2'-O-methyladenosine-3'-phosphorothioate
  modified_base 21: mod_base = OTHER; note = 2'-O-methyladenosine
gcatttgcacagcagatagaa

SEQ ID NO: 694 - RNA, 21 nt, synthetic construct
  source 1..21: mol_type = other RNA
  modified_base 1: mod_base = OTHER; note = 2'-O-methyladenosine-3'-phosphorothioate
  modified_base 2: mod_base = OTHER; note = 2'-O-methylguanosine-3'-phosphorothioate
  modified_base 3: mod_base = OTHER; note = 2'-O-methylguanosine-3'-phosphate
  modified_base 4: mod_base = OTHER; note = 2'-O-methyladenosine-3'-phosphate
  modified_base 5: mod_base = OTHER; note = 2'-O-methyladenosine-3'-phosphate
  modified_base 6: mod_base = OTHER; note = 2'-O-docosanyl-adenosine-3'-phosphate
  modified_base 7: mod_base = OTHER; note = 2'-deoxy-2'-fluoroguanosine-3'-phosphate
  modified_base 8: mod_base = OTHER; note = 2'-O-methyluridine-3'-phosphate
  modified_base 9: mod_base = OTHER; note = 2'-deoxy-2'-fluorouridine-3'-phosphate
  modified_base 10: mod_base = OTHER; note = 2'-deoxy-2'-fluorouridine-3'-phosphate
  modified_base 11: mod_base = OTHER; note = 2'-deoxy-2'-fluoroguanosine-3'-phosphate
  modified_base 12: mod_base = OTHER; note = 2'-O-methylguanosine-3'-phosphate
  modified_base 13: mod_base = OTHER; note = 2'-O-methylguanosine-3'-phosphate
  modified_base 14: mod_base = OTHER; note = 2'-O-methyladenosine-3'-phosphate
  modified_base 15: mod_base = OTHER; note = 2'-O-methyladenosine-3'-phosphate
  modified_base 16: mod_base = OTHER; note = 2'-O-methylguanosine-3'-phosphate
  modified_base 17: mod_base = OTHER; note = 2'-O-methylguanosine-3'-phosphate
  modified_base 18: mod_base = OTHER; note = 2'-O-methylguanosine-3'-phosphate
  modified_base 19: mod_base = OTHER; note = 2'-O-methyladenosine-3'-phosphorothioate
  modified_base 20: mod_base = OTHER; note = 2'-O-methyluridine-3'-phosphorothioate
  modified_base 21: mod_base = OTHER; note = 2'-O-methyladenosine
aggaaagtttgggaagggata

SEQ ID NO: 695 - RNA, 21 nt, synthetic construct
  source 1..21: mol_type = other RNA
  modified_base 1: mod_base = OTHER; note = 2'-O-methyladenosine-3'-phosphorothioate
  modified_base 2: mod_base = OTHER; note = 2'-O-methylguanosine-3'-phosphorothioate
  modified_base 3: mod_base = OTHER; note = 2'-O-methylcytidine-3'-phosphate
  modified_base 4: mod_base = OTHER; note = 2'-O-methylcytidine-3'-phosphate
  modified_base 5: mod_base = OTHER; note = 2'-O-methyluridine-3'-phosphate
  modified_base 6: mod_base = OTHER; note = 2'-O-docosanyl-cytidine-3'-phosphate
  modified_base 7: mod_base = OTHER; note = 2'-deoxy-2'-fluorouridine-3'-phosphate
  modified_base 8: mod_base = OTHER; note = 2'-O-methylcytidine-3'-phosphate
  modified_base 9: mod_base = OTHER; note = 2'-deoxy-2'-fluorouridine-3'-phosphate
  modified_base 10: mod_base = OTHER; note = 2'-deoxy-2'-fluorocytidine-3'-phosphate
  modified_base 11: mod_base = OTHER; note = 2'-deoxy-2'-fluorouridine-3'-phosphate
  modified_base 12: mod_base = OTHER; note = 2'-O-methylguanosine-3'-phosphate
  modified_base 13: mod_base = OTHER; note = 2'-O-methyluridine-3'-phosphate
  modified_base 14: mod_base = OTHER; note = 2'-O-methylguanosine-3'-phosphate
  modified_base 15: mod_base = OTHER; note = 2'-O-methyladenosine-3'-phosphate
  modified_base 16: mod_base = OTHER; note = 2'-O-methylcytidine-3'-phosphate
  modified_base 17: mod_base = OTHER; note = 2'-O-methyladenosine-3'-phosphate
  modified_base 18: mod_base = OTHER; note = 2'-O-methyluridine-3'-phosphate
  modified_base 19: mod_base = OTHER; note = 2'-O-methylguanosine-3'-phosphorothioate
  modified_base 20: mod_base = OTHER; note = 2'-O-methyluridine-3'-phosphorothioate
  modified_base 21: mod_base = OTHER; note = 2'-O-methyladenosine
agcctctctctgtgacatgta

SEQ ID NO: 696 - RNA, 21 nt, synthetic construct
  source 1..21: mol_type = other RNA
  modified_base 1: mod_base = OTHER; note = 2'-O-methylguanosine-3'-phosphorothioate
  modified_base 2: mod_base = OTHER; note = 2'-O-methylguanosine-3'-phosphorothioate
  modified_base 3: mod_base = OTHER; note = 2'-O-methylguanosine-3'-phosphate
  modified_base 4: mod_base = OTHER; note = 2'-O-methylcytidine-3'-phosphate
  modified_base 5: mod_base = OTHER; note = 2'-O-methylguanosine-3'-phosphate
  modified_base 6: mod_base = OTHER; note = 2'-O-docosanyl-uridine-3'-phosphate
  modified_base 7: mod_base = OTHER; note = 2'-deoxy-2'-fluorocytidine-3'-phosphate
  modified_base 8: mod_base = OTHER; note = 2'-O-methyluridine-3'-phosphate
  modified_base 9: mod_base = OTHER; note = 2'-deoxy-2'-fluorouridine-3'-phosphate
  modified_base 10: mod_base = OTHER; note = 2'-deoxy-2'-fluorocytidine-3'-phosphate
  modified_base 11: mod_base = OTHER; note = 2'-deoxy-2'-fluoroadenosine-3'-phosphate
  modified_base 12: mod_base = OTHER; note = 2'-O-methylcytidine-3'-phosphate
  modified_base 13: mod_base = OTHER; note = 2'-O-methylguanosine-3'-phosphate
  modified_base 14: mod_base = OTHER; note = 2'-O-methylcytidine-3'-phosphate
  modified_base 15: mod_base = OTHER; note = 2'-O-methyluridine-3'-phosphate
  modified_base 16: mod_base = OTHER; note = 2'-O-methylcytidine-3'-phosphate
  modified_base 17: mod_base = OTHER; note = 2'-O-methyluridine-3'-phosphate
  modified_base 18: mod_base = OTHER; note = 2'-O-methylguanosine-3'-phosphate
  modified_base 19: mod_base = OTHER; note = 2'-O-methylcytidine-3'-phosphorothioate
  modified_base 20: mod_base = OTHER; note = 2'-O-methyluridine-3'-phosphorothioate
  modified_base 21: mod_base = OTHER; note = 2'-O-methyladenosine
gggcgtcttcacgctctgcta

SEQ ID NO: 697 - RNA, 21 nt, synthetic construct
  source 1..21: mol_type = other RNA
  modified_base 1: mod_base = OTHER; note = 2'-O-methyladenosine-3'-phosphorothioate
  modified_base 2: mod_base = OTHER; note = 2'-O-methylguanosine-3'-phosphorothioate
  modified_base 3: mod_base = OTHER; note = 2'-O-methyladenosine-3'-phosphate
  modified_base 4: mod_base = OTHER; note = 2'-O-methyladenosine-3'-phosphate
  modified_base 5: mod_base = OTHER; note = 2'-O-methyladenosine-3'-phosphate
  modified_base 6: mod_base = OTHER; note = 2'-O-docosanyl-guanosine-3'-phosphate
  modified_base 7: mod_base = OTHER; note = 2'-deoxy-2'-fluoroguanosine-3'-phosphate
  modified_base 8: mod_base = OTHER; note = 2'-O-methyladenosine-3'-phosphate
  modified_base 9: mod_base = OTHER; note = 2'-deoxy-2'-fluorouridine-3'-phosphate
  modified_base 10: mod_base = OTHER; note = 2'-deoxy-2'-fluoroguanosine-3'-phosphate
  modified_base 11: mod_base = OTHER; note = 2'-deoxy-2'-fluoroguanosine-3'-phosphate
  modified_base 12: mod_base = OTHER; note = 2'-O-methyladenosine-3'-phosphate
  modified_base 13: mod_base = OTHER; note = 2'-O-methylguanosine-3'-phosphate
  modified_base 14: mod_base = OTHER; note = 2'-O-methylguanosine-3'-phosphate
  modified_base 15: mod_base = OTHER; note = 2'-O-methylcytidine-3'-phosphate
  modified_base 16: mod_base = OTHER; note = 2'-O-methyladenosine-3'-phosphate
  modified_base 17: mod_base = OTHER; note = 2'-O-methyladenosine-3'-phosphate
  modified_base 18: mod_base = OTHER; note = 2'-O-methyladenosine-3'-phosphate
  modified_base 19: mod_base = OTHER; note = 2'-O-methyladenosine-3'-phosphorothioate
  modified_base 20: mod_base = OTHER; note = 2'-O-methyluridine-3'-phosphorothioate
  modified_base 21: mod_base = OTHER; note = 2'-O-methyladenosine
agaaaggatggaggcaaaata

SEQ ID NO: 698 - RNA, 21 nt, synthetic construct
  source 1..21: mol_type = other RNA
  modified_base 1: mod_base = OTHER; note = 2'-O-methylguanosine-3'-phosphorothioate
  modified_base 2: mod_base = OTHER; note = 2'-O-methyladenosine-3'-phosphorothioate
  modified_base 3: mod_base = OTHER; note = 2'-O-methylcytidine-3'-phosphate
  modified_base 4: mod_base = OTHER; note = 2'-O-methyladenosine-3'-phosphate
  modified_base 5: mod_base = OTHER; note = 2'-O-methyluridine-3'-phosphate
  modified_base 6: mod_base = OTHER; note = 2'-O-docosanyl-uridine-3'-phosphate
  modified_base 7: mod_base = OTHER; note = 2'-deoxy-2'-fluoroadenosine-3'-phosphate
  modified_base 8: mod_base = OTHER; note = 2'-O-methyladenosine-3'-phosphate
  modified_base 9: mod_base = OTHER; note = 2'-deoxy-2'-fluoroadenosine-3'-phosphate
  modified_base 10: mod_base = OTHER; note = 2'-deoxy-2'-fluoroadenosine-3'-phosphate
  modified_base 11: mod_base = OTHER; note = 2'-deoxy-2'-fluoroguanosine-3'-phosphate
  modified_base 12: mod_base = OTHER; note = 2'-O-methyladenosine-3'-phosphate
  modified_base 13: mod_base = OTHER; note = 2'-O-methylguanosine-3'-phosphate
  modified_base 14: mod_base = OTHER; note = 2'-O-methyladenosine-3'-phosphate
  modified_base 15: mod_base = OTHER; note = 2'-O-methylguanosine-3'-phosphate
  modified_base 16: mod_base = OTHER; note = 2'-O-methylcytidine-3'-phosphate
  modified_base 17: mod_base = OTHER; note = 2'-O-methylguanosine-3'-phosphate
  modified_base 18: mod_base = OTHER; note = 2'-O-methyladenosine-3'-phosphate
  modified_base 19: mod_base = OTHER; note = 2'-O-methylguanosine-3'-phosphorothioate
  modified_base 20: mod_base = OTHER; note = 2'-O-methyladenosine-3'-phosphorothioate
  modified_base 21: mod_base = OTHER; note = 2'-O-methyladenosine
gacattaaaagagagcgagaa

SEQ ID NO: 699 - RNA, 21 nt, synthetic construct
  source 1..21: mol_type = other RNA
  modified_base 1: mod_base = OTHER; note = 2'-O-methylcytidine-3'-phosphorothioate
  modified_base 2: mod_base = OTHER; note = 2'-O-methylguanosine-3'-phosphorothioate
  modified_base 3: mod_base = OTHER; note = 2'-O-methylguanosine-3'-phosphate
  modified_base 4: mod_base = OTHER; note = 2'-O-methylguanosine-3'-phosphate
  modified_base 5: mod_base = OTHER; note = 2'-O-methyladenosine-3'-phosphate
  modified_base 6: mod_base = OTHER; note = 2'-O-docosanyl-adenosine-3'-phosphate
  modified_base 7: mod_base = OTHER; note = 2'-deoxy-2'-fluorocytidine-3'-phosphate
  modified_base 8: mod_base = OTHER; note = 2'-O-methyladenosine-3'-phosphate
  modified_base 9: mod_base = OTHER; note = 2'-deoxy-2'-fluoroguanosine-3'-phosphate
  modified_base 10: mod_base = OTHER; note = 2'-deoxy-2'-fluoroguanosine-3'-phosphate
  modified_base 11: mod_base = OTHER; note = 2'-deoxy-2'-fluoroadenosine-3'-phosphate
  modified_base 12: mod_base = OTHER; note = 2'-O-methyladenosine-3'-phosphate
  modified_base 13: mod_base = OTHER; note = 2'-O-methylcytidine-3'-phosphate
  modified_base 14: mod_base = OTHER; note = 2'-O-methyladenosine-3'-phosphate
  modified_base 15: mod_base = OTHER; note = 2'-O-methylcytidine-3'-phosphate
  modified_base 16: mod_base = OTHER; note = 2'-O-methyladenosine-3'-phosphate
  modified_base 17: mod_base = OTHER; note = 2'-O-methylcytidine-3'-phosphate
  modified_base 18: mod_base = OTHER; note = 2'-O-methyluridine-3'-phosphate
  modified_base 19: mod_base = OTHER; note = 2'-O-methyladenosine-3'-phosphorothioate
  modified_base 20: mod_base = OTHER; note = 2'-O-methylcytidine-3'-phosphorothioate
  modified_base 21: mod_base = OTHER; note = 2'-O-methyladenosine
cgggaacaggaacacactaca

SEQ ID NO: 700 - RNA, 21 nt, synthetic construct
  source 1..21: mol_type = other RNA
  modified_base 1: mod_base = OTHER; note = 2'-O-methyladenosine-3'-phosphorothioate
  modified_base 2: mod_base = OTHER; note = 2'-O-methylguanosine-3'-phosphorothioate
  modified_base 3: mod_base = OTHER; note = 2'-O-methyladenosine-3'-phosphate
  modified_base 4: mod_base = OTHER; note = 2'-O-methylguanosine-3'-phosphate
  modified_base 5: mod_base = OTHER; note = 2'-O-methyladenosine-3'-phosphate
  modified_base 6: mod_base = OTHER; note = 2'-O-docosanyl-guanosine-3'-phosphate
  modified_base 7: mod_base = OTHER; note = 2'-deoxy-2'-fluoroguanosine-3'-phosphate
  modified_base 8: mod_base = OTHER; note = 2'-O-methyladenosine-3'-phosphate
  modified_base 9: mod_base = OTHER; note = 2'-deoxy-2'-fluoroguanosine-3'-phosphate
  modified_base 10: mod_base = OTHER; note = 2'-deoxy-2'-fluoroadenosine-3'-phosphate
  modified_base 11: mod_base = OTHER; note = 2'-deoxy-2'-fluoroadenosine-3'-phosphate
  modified_base 12: mod_base = OTHER; note = 2'-O-methyluridine-3'-phosphate
  modified_base 13: mod_base = OTHER; note = 2'-O-methylguanosine-3'-phosphate
  modified_base 14: mod_base = OTHER; note = 2'-O-methyladenosine-3'-phosphate
  modified_base 15: mod_base = OTHER; note = 2'-O-methylcytidine-3'-phosphate
  modified_base 16: mod_base = OTHER; note = 2'-O-methyladenosine-3'-phosphate
  modified_base 17: mod_base = OTHER; note = 2'-O-methylguanosine-3'-phosphate
  modified_base 18: mod_base = OTHER; note = 2'-O-methyluridine-3'-phosphate
  modified_base 19: mod_base = OTHER; note = 2'-O-methyluridine-3'-phosphorothioate
  modified_base 20: mod_base = OTHER; note = 2'-O-methyluridine-3'-phosphorothioate
  modified_base 21: mod_base = OTHER; note = 2'-O-methyladenosine
agagaggagaatgacagttta

SEQ ID NO: 701 - RNA, 21 nt, synthetic construct
  source 1..21: mol_type = other RNA
  modified_base 1: mod_base = OTHER; note = 2'-O-methylcytidine-3'-phosphorothioate
  modified_base 2: mod_base = OTHER; note = 2'-O-methyluridine-3'-phosphorothioate
  modified_base 3: mod_base = OTHER; note = 2'-O-methylguanosine-3'-phosphate
  modified_base 4: mod_base = OTHER; note = 2'-O-methylcytidine-3'-phosphate
  modified_base 5: mod_base = OTHER; note = 2'-O-methylguanosine-3'-phosphate
  modified_base 6: mod_base = OTHER; note = 2'-O-docosanyl-adenosine-3'-phosphate
  modified_base 7: mod_base = OTHER; note = 2'-deoxy-2'-fluorocytidine-3'-phosphate
  modified_base 8: mod_base = OTHER; note = 2'-O-methyluridine-3'-phosphate
  modified_base 9: mod_base = OTHER; note = 2'-deoxy-2'-fluorouridine-3'-phosphate
  modified_base 10: mod_base = OTHER; note = 2'-deoxy-2'-fluorocytidine-3'-phosphate
  modified_base 11: mod_base = OTHER; note = 2'-deoxy-2'-fluoroguanosine-3'-phosphate
  modified_base 12: mod_base = OTHER; note = 2'-O-methyluridine-3'-phosphate
  modified_base 13: mod_base = OTHER; note = 2'-O-methylcytidine-3'-phosphate
  modified_base 14: mod_base = OTHER; note = 2'-O-methyladenosine-3'-phosphate
  modified_base 15: mod_base = OTHER; note = 2'-O-methylcytidine-3'-phosphate
  modified_base 16: mod_base = OTHER; note = 2'-O-methylcytidine-3'-phosphate
  modified_base 17: mod_base = OTHER; note = 2'-O-methyladenosine-3'-phosphate
  modified_base 18: mod_base = OTHER; note = 2'-O-methyladenosine-3'-phosphate
  modified_base 19: mod_base = OTHER; note = 2'-O-methylcytidine-3'-phosphorothioate
  modified_base 20: mod_base = OTHER; note = 2'-O-methylcytidine-3'-phosphorothioate
  modified_base 21: mod_base = OTHER; note = 2'-O-methyladenosine
ctgcgacttcgtcaccaacca

SEQ ID NO: 702 - RNA, 21 nt, synthetic construct
  source 1..21: mol_type = other RNA
  modified_base 1: mod_base = OTHER; note = 2'-O-methylguanosine-3'-phosphorothioate
  modified_base 2: mod_base = OTHER; note = 2'-O-methylcytidine-3'-phosphorothioate
  modified_base 3: mod_base = OTHER; note = 2'-O-methylcytidine-3'-phosphate
  modified_base 4: mod_base = OTHER; note = 2'-O-methylcytidine-3'-phosphate
  modified_base 5: mod_base = OTHER; note = 2'-O-methyluridine-3'-phosphate
  modified_base 6: mod_base = OTHER; note = 2'-O-docosanyl-uridine-3'-phosphate
  modified_base 7: mod_base = OTHER; note = 2'-deoxy-2'-fluorocytidine-3'-phosphate
  modified_base 8: mod_base = OTHER; note = 2'-O-methyluridine-3'-phosphate
  modified_base 9: mod_base = OTHER; note = 2'-deoxy-2'-fluorouridine-3'-phosphate
  modified_base 10: mod_base = OTHER; note = 2'-deoxy-2'-fluorocytidine-3'-phosphate
  modified_base 11: mod_base = OTHER; note = 2'-deoxy-2'-fluorocytidine-3'-phosphate
  modified_base 12: mod_base = OTHER; note = 2'-O-methyluridine-3'-phosphate
  modified_base 13: mod_base = OTHER; note = 2'-O-methylguanosine-3'-phosphate
  modified_base 14: mod_base = OTHER; note = 2'-O-methylguanosine-3'-phosphate
  modified_base 15: mod_base = OTHER; note = 2'-O-methylcytidine-3'-phosphate
  modified_base 16: mod_base = OTHER; note = 2'-O-methylcytidine-3'-phosphate
  modified_base 17: mod_base = OTHER; note = 2'-O-methyladenosine-3'-phosphate
  modified_base 18: mod_base = OTHER; note = 2'-O-methyladenosine-3'-phosphate
  modified_base 19: mod_base = OTHER; note = 2'-O-methylcytidine-3'-phosphorothioate
  modified_base 20: mod_base = OTHER; note = 2'-O-methylguanosine-3'-phosphorothioate
  modified_base 21: mod_base = OTHER; note = 2'-O-methyladenosine
gcccttcttcctggccaacga

SEQ ID NO: 703 - RNA, 21 nt, synthetic construct
  source 1..21: mol_type = other RNA
  modified_base 1: mod_base = OTHER; note = 2'-O-methyluridine-3'-phosphorothioate
  modified_base 2: mod_base = OTHER; note = 2'-O-methyladenosine-3'-phosphorothioate
  modified_base 3: mod_base = OTHER; note = 2'-O-methyladenosine-3'-phosphate
  modified_base 4: mod_base = OTHER; note = 2'-O-methylguanosine-3'-phosphate
  modified_base 5: mod_base = OTHER; note = 2'-O-methyladenosine-3'-phosphate
  modified_base 6: mod_base = OTHER; note = 2'-O-docosanyl-cytidine-3'-phosphate
  modified_base 7: mod_base = OTHER; note = 2'-deoxy-2'-fluorocytidine-3'-phosphate
  modified_base 8: mod_base = OTHER; note = 2'-O-methylguanosine-3'-phosphate
  modified_base 9: mod_base = OTHER; note = 2'-deoxy-2'-fluoroadenosine-3'-phosphate
  modified_base 10: mod_base = OTHER; note = 2'-deoxy-2'-fluorouridine-3'-phosphate
  modified_base 11: mod_base = OTHER; note = 2'-deoxy-2'-fluoroadenosine-3'-phosphate
  modified_base 12: mod_base = OTHER; note = 2'-O-methylguanosine-3'-phosphate
  modified_base 13: mod_base = OTHER; note = 2'-O-methylcytidine-3'-phosphate
  modified_base 14: mod_base = OTHER; note = 2'-O-methyladenosine-3'-phosphate
  modified_base 15: mod_base = OTHER; note = 2'-O-methylguanosine-3'-phosphate
  modified_base 16: mod_base = OTHER; note = 2'-O-methylguanosine-3'-phosphate
  modified_base 17: mod_base = OTHER; note = 2'-O-methyluridine-3'-phosphate
  modified_base 18: mod_base = OTHER; note = 2'-O-methylguanosine-3'-phosphate
  modified_base 19: mod_base = OTHER; note = 2'-O-methyladenosine-3'-phosphorothioate
  modified_base 20: mod_base = OTHER; note = 2'-O-methyladenosine-3'-phosphorothioate
  modified_base 21: mod_base = OTHER; note = 2'-O-methyladenosine
taagaccgatagcaggtgaaa

SEQ ID NO: 704 - RNA, 21 nt, synthetic construct
  source 1..21: mol_type = other RNA
  modified_base 1: mod_base = OTHER; note = 2'-O-methylguanosine-3'-phosphorothioate
  modified_base 2: mod_base = OTHER; note = 2'-O-methylguanosine-3'-phosphorothioate
  modified_base 3: mod_base = OTHER; note = 2'-O-methyluridine-3'-phosphate
  modified_base 4: mod_base = OTHER; note = 2'-O-methylguanosine-3'-phosphate
  modified_base 5: mod_base = OTHER; note = 2'-O-methyladenosine-3'-phosphate
  modified_base 6: mod_base = OTHER; note = 2'-O-docosanyl-adenosine-3'-phosphate
  modified_base 7: mod_base = OTHER; note = 2'-deoxy-2'-fluoroguanosine-3'-phosphate
  modified_base 8: mod_base = OTHER; note = 2'-O-methyladenosine-3'-phosphate
  modified_base 9: mod_base = OTHER; note = 2'-deoxy-2'-fluoroadenosine-3'-phosphate
  modified_base 10: mod_base = OTHER; note = 2'-deoxy-2'-fluoroguanosine-3'-phosphate
  modified_base 11: mod_base = OTHER; note = 2'-deoxy-2'-fluoroadenosine-3'-phosphate
  modified_base 12: mod_base = OTHER; note = 2'-O-methyluridine-3'-phosphate
  modified_base 13: mod_base = OTHER; note = 2'-O-methylcytidine-3'-phosphate
  modified_base 14: mod_base = OTHER; note = 2'-O-methylguanosine-3'-phosphate
  modified_base 15: mod_base = OTHER; note = 2'-O-methyladenosine-3'-phosphate
  modified_base 16: mod_base = OTHER; note = 2'-O-methylcytidine-3'-phosphate
  modified_base 17: mod_base = OTHER; note = 2'-O-methyladenosine-3'-phosphate
  modified_base 18: mod_base = OTHER; note = 2'-O-methylguanosine-3'-phosphate
  modified_base 19: mod_base = OTHER; note = 2'-O-methylcytidine-3'-phosphorothioate
  modified_base 20: mod_base = OTHER; note = 2'-O-methyluridine-3'-phosphorothioate
  modified_base 21: mod_base = OTHER; note = 2'-O-methyladenosine
ggtgaagaagatcgacagcta

SEQ ID NO: 705 - RNA, 21 nt, synthetic construct
  source 1..21: mol_type = other RNA
  modified_base 1: mod_base = OTHER; note = 2'-O-methylcytidine-3'-phosphorothioate
  modified_base 2: mod_base = OTHER; note = 2'-O-methyladenosine-3'-phosphorothioate
  modified_base 3: mod_base = OTHER; note = 2'-O-methylcytidine-3'-phosphate
  modified_base 4: mod_base = OTHER; note = 2'-O-methylguanosine-3'-phosphate
  modified_base 5: mod_base = OTHER; note = 2'-O-methyluridine-3'-phosphate
  modified_base 6: mod_base = OTHER; note = 2'-O-docosanyl-guanosine-3'-phosphate
  modified_base 7: mod_base = OTHER; note = 2'-deoxy-2'-fluoroadenosine-3'-phosphate
  modified_base 8: mod_base = OTHER; note = 2'-O-methyladenosine-3'-phosphate
  modified_base 9: mod_base = OTHER; note = 2'-deoxy-2'-fluorouridine-3'-phosphate
  modified_base 10: mod_base = OTHER; note = 2'-deoxy-2'-fluorouridine-3'-phosphate
  modified_base 11: mod_base = OTHER; note = 2'-deoxy-2'-fluorouridine-3'-phosphate
  modified_base 12: mod_base = OTHER; note = 2'-O-methylguanosine-3'-phosphate
  modified_base 13: mod_base = OTHER; note = 2'-O-methylcytidine-3'-phosphate
  modified_base 14: mod_base = OTHER; note = 2'-O-methyluridine-3'-phosphate
  modified_base 15: mod_base = OTHER; note = 2'-O-methylguanosine-3'-phosphate
  modified_base 16: mod_base = OTHER; note = 2'-O-methylguanosine-3'-phosphate
  modified_base 17: mod_base = OTHER; note = 2'-O-methyluridine-3'-phosphate
  modified_base 18: mod_base = OTHER; note = 2'-O-methylguanosine-3'-phosphate
  modified_base 19: mod_base = OTHER; note = 2'-O-methyladenosine-3'-phosphorothioate
  modified_base 20: mod_base = OTHER; note = 2'-O-methyladenosine-3'-phosphorothioate
  modified_base 21: mod_base = OTHER; note = 2'-O-methyladenosine
cacgtgaatttgctggtgaaa

SEQ ID NO: 706 - RNA, 21 nt, synthetic construct
  source 1..21: mol_type = other RNA
  modified_base 1: mod_base = OTHER; note = 2'-O-methyladenosine-3'-phosphorothioate
  modified_base 2: mod_base = OTHER; note = 2'-O-methylguanosine-3'-phosphorothioate
  modified_base 3: mod_base = OTHER; note = 2'-O-methylcytidine-3'-phosphate
  modified_base 4: mod_base = OTHER; note = 2'-O-methylguanosine-3'-phosphate
  modified_base 5: mod_base = OTHER; note = 2'-O-methyladenosine-3'-phosphate
  modified_base 6: mod_base = OTHER; note = 2'-O-docosanyl-guanosine-3'-phosphate
  modified_base 7: mod_base = OTHER; note = 2'-deoxy-2'-fluoroadenosine-3'-phosphate
  modified_base 8: mod_base = OTHER; note = 2'-O-methylguanosine-3'-phosphate
  modified_base 9: mod_base = OTHER; note = 2'-deoxy-2'-fluoroadenosine-3'-phosphate
  modified_base 10: mod_base = OTHER; note = 2'-deoxy-2'-fluoroguanosine-3'-phosphate
  modified_base 11: mod_base = OTHER; note = 2'-deoxy-2'-fluoroadenosine-3'-phosphate
  modified_base 12: mod_base = OTHER; note = 2'-O-methylguanosine-3'-phosphate
  modified_base 13: mod_base = OTHER; note = 2'-O-methyladenosine-3'-phosphate
  modified_base 14: mod_base = OTHER; note = 2'-O-methyladenosine-3'-phosphate
  modified_base 15: mod_base = OTHER; note = 2'-O-methyladenosine-3'-phosphate
  modified_base 16: mod_base = OTHER; note = 2'-O-methylcytidine-3'-phosphate
  modified_base 17: mod_base = OTHER; note = 2'-O-methyladenosine-3'-phosphate
  modified_base 18: mod_base = OTHER; note = 2'-O-methylguanosine-3'-phosphate
  modified_base 19: mod_base = OTHER; note = 2'-O-methyluridine-3'-phosphorothioate
  modified_base 20: mod_base = OTHER; note = 2'-O-methyluridine-3'-phosphorothioate
  modified_base 21: mod_base = OTHER; note = 2'-O-methyladenosine
agcgagagagagaaacagtta

SEQ ID NO: 707 - RNA, 21 nt, synthetic construct
  source 1..21: mol_type = other RNA
  modified_base 1: mod_base = OTHER; note = 2'-O-methylguanosine-3'-phosphorothioate
  modified_base 2: mod_base = OTHER; note = 2'-O-methyladenosine-3'-phosphorothioate
  modified_base 3: mod_base = OTHER; note = 2'-O-methylguanosine-3'-phosphate
  modified_base 4: mod_base = OTHER; note = 2'-O-methylguanosine-3'-phosphate
  modified_base 5: mod_base = OTHER; note = 2'-O-methylcytidine-3'-phosphate
  modified_base 6: mod_base = OTHER; note = 2'-O-docosanyl-adenosine-3'-phosphate
  modified_base 7: mod_base = OTHER; note = 2'-deoxy-2'-fluoroadenosine-3'-phosphate
  modified_base 8: mod_base = OTHER; note = 2'-O-methyladenosine-3'-phosphate
  modified_base 9: mod_base = OTHER; note = 2'-deoxy-2'-fluoroguanosine-3'-phosphate
  modified_base 10: mod_base = OTHER; note = 2'-deoxy-2'-fluoroadenosine-3'-phosphate
  modified_base 11: mod_base = OTHER; note = 2'-deoxy-2'-fluoroguanosine-3'-phosphate
  modified_base 12: mod_base = OTHER; note = 2'-O-methyladenosine-3'-phosphate
  modified_base 13: mod_base = OTHER; note = 2'-O-methyladenosine-3'-phosphate
  modified_base 14: mod_base = OTHER; note = 2'-O-methyladenosine-3'-phosphate
  modified_base 15: mod_base = OTHER; note = 2'-O-methyladenosine-3'-phosphate
  modified_base 16: mod_base = OTHER; note = 2'-O-methylguanosine-3'-phosphate
  modified_base 17: mod_base = OTHER; note = 2'-O-methylcytidine-3'-phosphate
  modified_base 18: mod_base = OTHER; note = 2'-O-methylcytidine-3'-phosphate
  modified_base 19: mod_base = OTHER; note = 2'-O-methyladenosine-3'-phosphorothioate
  modified_base 20: mod_base = OTHER; note = 2'-O-methylcytidine-3'-phosphorothioate
  modified_base 21: mod_base = OTHER; note = 2'-O-methyladenosine
gaggcaaagagaaaagccaca

SEQ ID NO: 708 - RNA, 21 nt, synthetic construct
  source 1..21: mol_type = other RNA
  modified_base 1: mod_base = OTHER; note = 2'-O-methylguanosine-3'-phosphorothioate
  modified_base 2: mod_base = OTHER; note = 2'-O-methylcytidine-3'-phosphorothioate
  modified_base 3: mod_base = OTHER; note = 2'-O-methylcytidine-3'-phosphate
  modified_base 4: mod_base = OTHER; note = 2'-O-methylcytidine-3'-phosphate
  modified_base 5: mod_base = OTHER; note = 2'-O-methyladenosine-3'-phosphate
  modified_base 6: mod_base = OTHER; note = 2'-O-docosanyl-uridine-3'-phosphate
  modified_base 7: mod_base = OTHER; note = 2'-deoxy-2'-fluorocytidine-3'-phosphate
  modified_base 8: mod_base = OTHER; note = 2'-O-methylcytidine-3'-phosphate
  modified_base 9: mod_base = OTHER; note = 2'-deoxy-2'-fluorouridine-3'-phosphate
  modified_base 10: mod_base = OTHER; note = 2'-deoxy-2'-fluorocytidine-3'-phosphate
  modified_base 11: mod_base = OTHER; note = 2'-deoxy-2'-fluoroadenosine-3'-phosphate
  modified_base 12: mod_base = OTHER; note = 2'-O-methyluridine-3'-phosphate
  modified_base 13: mod_base = OTHER; note = 2'-O-methylguanosine-3'-phosphate
  modified_base 14: mod_base = OTHER; note = 2'-O-methylcytidine-3'-phosphate
  modified_base 15: mod_base = OTHER; note = 2'-O-methyladenosine-3'-phosphate
  modified_base 16: mod_base = OTHER; note = 2'-O-methylcytidine-3'-phosphate
  modified_base 17: mod_base = OTHER; note = 2'-O-methyluridine-3'-phosphate
  modified_base 18: mod_base = OTHER; note = 2'-O-methylguanosine-3'-phosphate
  modified_base 19: mod_base = OTHER; note = 2'-O-methylguanosine-3'-phosphorothioate
  modified_base 20: mod_base = OTHER; note = 2'-O-methyluridine-3'-phosphorothioate
  modified_base 21: mod_base = OTHER; note = 2'-O-methyladenosine
gcccatcctcatgcactggta

SEQ ID NO: 709 - RNA, 21 nt, synthetic construct
  source 1..21: mol_type = other RNA
  modified_base 1: mod_base = OTHER; note = 2'-O-methyladenosine-3'-phosphorothioate
  modified_base 2: mod_base = OTHER; note = 2'-O-methylcytidine-3'-phosphorothioate
  modified_base 3: mod_base = OTHER; note = 2'-O-methylcytidine-3'-phosphate
  modified_base 4: mod_base = OTHER; note = 2'-O-methylcytidine-3'-phosphate
  modified_base 5: mod_base = OTHER; note = 2'-O-methyluridine-3'-phosphate
  modified_base 6: mod_base = OTHER; note = 2'-O-docosanyl-guanosine-3'-phosphate
  modified_base 7: mod_base = OTHER; note = 2'-deoxy-2'-fluorouridine-3'-phosphate
  modified_base 8: mod_base = OTHER; note = 2'-O-methylguanosine-3'-phosphate
  modified_base 9: mod_base = OTHER; note = 2'-deoxy-2'-fluorouridine-3'-phosphate
  modified_base 10: mod_base = OTHER; note = 2'-deoxy-2'-fluoroguanosine-3'-phosphate
  modified_base 11: mod_base = OTHER; note = 2'-deoxy-2'-fluorouridine-3'-phosphate
  modified_base 12: mod_base = OTHER; note = 2'-O-methylcytidine-3'-phosphate
  modified_base 13: mod_base = OTHER; note = 2'-O-methyladenosine-3'-phosphate
  modified_base 14: mod_base = OTHER; note = 2'-O-methyluridine-3'-phosphate
  modified_base 15: mod_base = OTHER; note = 2'-O-methyluridine-3'-phosphate
  modified_base 16: mod_base = OTHER; note = 2'-O-methylguanosine-3'-phosphate
  modified_base 17: mod_base = OTHER; note = 2'-O-methylcytidine-3'-phosphate
  modified_base 18: mod_base = OTHER; note = 2'-O-methylcytidine-3'-phosphate
  modified_base 19: mod_base = OTHER; note = 2'-O-methylcytidine-3'-phosphorothioate
  modified_base 20: mod_base = OTHER; note = 2'-O-methyluridine-3'-phosphorothioate
  modified_base 21: mod_base = OTHER; note = 2'-O-methyladenosine
accctgtgtgtcattgcccta

SEQ ID NO: 710 - RNA, 21 nt, synthetic construct
  source 1..21: mol_type = other RNA
  modified_base 1: mod_base = OTHER; note = 2'-O-methyluridine-3'-phosphorothioate
  modified_base 2: mod_base = OTHER; note = 2'-O-methyladenosine-3'-phosphorothioate
  modified_base 3: mod_base = OTHER; note = 2'-O-methylguanosine-3'-phosphate
  modified_base 4: mod_base = OTHER; note = 2'-O-methylcytidine-3'-phosphate
  modified_base 5: mod_base = OTHER; note = 2'-O-methyladenosine-3'-phosphate
  modified_base 6: mod_base = OTHER; note = 2'-O-docosanyl-guanosine-3'-phosphate
  modified_base 7: mod_base = OTHER; note = 2'-deoxy-2'-fluoroguanosine-3'-phosphate
  modified_base 8: mod_base = OTHER; note = 2'-O-methyluridine-3'-phosphate
  modified_base 9: mod_base = OTHER; note = 2'-deoxy-2'-fluoroguanosine-3'-phosphate
  modified_base 10: mod_base = OTHER; note = 2'-deoxy-2'-fluoroadenosine-3'-phosphate
  modified_base 11: mod_base = OTHER; note = 2'-deoxy-2'-fluoroadenosine-3'-phosphate
  modified_base 12: mod_base = OTHER; note = 2'-O-methylcytidine-3'-phosphate
  modified_base 13: mod_base = OTHER; note = 2'-O-methyluridine-3'-phosphate
  modified_base 14: mod_base = OTHER; note = 2'-O-methylcytidine-3'-phosphate
  modified_base 15: mod_base = OTHER; note = 2'-O-methylguanosine-3'-phosphate
  modified_base 16: mod_base = OTHER; note = 2'-O-methyladenosine-3'-phosphate
  modified_base 17: mod_base = OTHER; note = 2'-O-methyladenosine-3'-phosphate
  modified_base 18: mod_base = OTHER; note = 2'-O-methylguanosine-3'-phosphate
  modified_base 19: mod_base = OTHER; note = 2'-O-methylcytidine-3'-phosphorothioate
  modified_base 20: mod_base = OTHER; note = 2'-O-methylcytidine-3'-phosphorothioate
  modified_base 21: mod_base = OTHER; note = 2'-O-methyladenosine
tagcaggtgaactcgaagcca

SEQ ID NO: 711 - RNA, 21 nt, synthetic construct
  source 1..21: mol_type = other RNA
  modified_base 1: mod_base = OTHER; note = 2'-O-methylguanosine-3'-phosphorothioate
  modified_base 2: mod_base = OTHER; note = 2'-O-methylcytidine-3'-phosphorothioate
  modified_base 3: mod_base = OTHER; note = 2'-O-methylguanosine-3'-phosphate
  modified_base 4: mod_base = OTHER; note = 2'-O-methylcytidine-3'-phosphate
  modified_base 5: mod_base = OTHER; note = 2'-O-methyluridine-3'-phosphate
  modified_base 6: mod_base = OTHER; note = 2'-O-docosanyl-cytidine-3'-phosphate
  modified_base 7: mod_base = OTHER; note = 2'-deoxy-2'-fluoroadenosine-3'-phosphate
  modified_base 8: mod_base = OTHER; note = 2'-O-methyluridine-3'-phosphate
  modified_base 9: mod_base = OTHER; note = 2'-deoxy-2'-fluorocytidine-3'-phosphate
  modified_base 10: mod_base = OTHER; note = 2'-deoxy-2'-fluoroguanosine-3'-phosphate
  modified_base 11: mod_base = OTHER; note = 2'-deoxy-2'-fluorouridine-3'-phosphate
  modified_base 12: mod_base = OTHER; note = 2'-O-methylguanosine-3'-phosphate
  modified_base 13: mod_base = OTHER; note = 2'-O-methylcytidine-3'-phosphate
  modified_base 14: mod_base = OTHER; note = 2'-O-methyluridine-3'-phosphate
  modified_base 15: mod_base = OTHER; note = 2'-O-methylguanosine-3'-phosphate
  modified_base 16: mod_base = OTHER; note = 2'-O-methylcytidine-3'-phosphate
  modified_base 17: mod_base = OTHER; note = 2'-O-methyluridine-3'-phosphate
  modified_base 18: mod_base = OTHER; note = 2'-O-methylcytidine-3'-phosphate
  modified_base 19: mod_base = OTHER; note = 2'-O-methyladenosine-3'-phosphorothioate
  modified_base 20: mod_base = OTHER; note = 2'-O-methyluridine-3'-phosphorothioate
  modified_base 21: mod_base = OTHER; note = 2'-O-methyladenosine
gcgctcatcgtgctgctcata

SEQ ID NO: 712 - RNA, 21 nt, synthetic construct
  source 1..21: mol_type = other RNA
  modified_base 1: mod_base = OTHER; note = 2'-O-methylcytidine-3'-phosphorothioate
  modified_base 2: mod_base = OTHER; note = 2'-O-methyluridine-3'-phosphorothioate
  modified_base 3: mod_base = OTHER; note = 2'-O-methylguanosine-3'-phosphate
  modified_base 4: mod_base = OTHER; note = 2'-O-methyluridine-3'-phosphate
  modified_base 5: mod_base = OTHER; note = 2'-O-methylguanosine-3'-phosphate
  modified_base 6: mod_base = OTHER; note = 2'-O-docosanyl-cytidine-3'-phosphate
  modified_base 7: mod_base = OTHER; note = 2'-deoxy-2'-fluoroadenosine-3'-phosphate
  modified_base 8: mod_base = OTHER; note = 2'-O-methyluridine-3'-phosphate
  modified_base 9: mod_base = OTHER; note = 2'-deoxy-2'-fluorocytidine-3'-phosphate
  modified_base 10: mod_base = OTHER; note = 2'-deoxy-2'-fluoroadenosine-3'-phosphate
  modified_base 11: mod_base = OTHER; note = 2'-deoxy-2'-fluorouridine-3'-phosphate
  modified_base 12: mod_base = OTHER; note = 2'-O-methylguanosine-3'-phosphate
  modified_base 13: mod_base = OTHER; note = 2'-O-methylguanosine-3'-phosphate
  modified_base 14: mod_base = OTHER; note = 2'-O-methylcytidine-3'-phosphate
  modified_base 15: mod_base = OTHER; note = 2'-O-methylcytidine-3'-phosphate
  modified_base 16: mod_base = OTHER; note = 2'-O-methyluridine-3'-phosphate
  modified_base 17: mod_base = OTHER; note = 2'-O-methyluridine-3'-phosphate
  modified_base 18: mod_base = OTHER; note = 2'-O-methylcytidine-3'-phosphate
  modified_base 19: mod_base = OTHER; note = 2'-O-methylguanosine-3'-phosphorothioate
  modified_base 20: mod_base = OTHER; note = 2'-O-methyluridine-3'-phosphorothioate
  modified_base 21: mod_base = OTHER; note = 2'-O-methyladenosine
ctgtgcatcatggccttcgta

SEQ ID NO: 713 - RNA, 21 nt, synthetic construct
  source 1..21: mol_type = other RNA
  modified_base 1: mod_base = OTHER; note = 2'-O-methylcytidine-3'-phosphorothioate
  modified_base 2: mod_base = OTHER; note = 2'-O-methylcytidine-3'-phosphorothioate
  modified_base 3: mod_base = OTHER; note = 2'-O-methylcytidine-3'-phosphate
  modified_base 4: mod_base = OTHER; note = 2'-O-methyladenosine-3'-phosphate
  modified_base 5: mod_base = OTHER; note = 2'-O-methyluridine-3'-phosphate
  modified_base 6: mod_base = OTHER; note = 2'-O-docosanyl-cytidine-3'-phosphate
  modified_base 7: mod_base = OTHER; note = 2'-deoxy-2'-fluorocytidine-3'-phosphate
  modified_base 8: mod_base = OTHER; note = 2'-O-methylcytidine-3'-phosphate
  modified_base 9: mod_base = OTHER; note = 2'-deoxy-2'-fluorouridine-3'-phosphate
  modified_base 10: mod_base = OTHER; note = 2'-deoxy-2'-fluorouridine-3'-phosphate
  modified_base 11: mod_base = OTHER; note = 2'-deoxy-2'-fluorouridine-3'-phosphate
  modified_base 12: mod_base = OTHER; note = 2'-O-methylcytidine-3'-phosphate
  modified_base 13: mod_base = OTHER; note = 2'-O-methylcytidine-3'-phosphate
  modified_base 14: mod_base = OTHER; note = 2'-O-methylcytidine-3'-phosphate
  modified_base 15: mod_base = OTHER; note = 2'-O-methylguanosine-3'-phosphate
  modified_base 16: mod_base = OTHER; note = 2'-O-methylguanosine-3'-phosphate
  modified_base 17: mod_base = OTHER; note = 2'-O-methylguanosine-3'-phosphate
  modified_base 18: mod_base = OTHER; note = 2'-O-methyladenosine-3'-phosphate
  modified_base 19: mod_base = OTHER; note = 2'-O-methyladenosine-3'-phosphorothioate
  modified_base 20: mod_base = OTHER; note = 2'-O-methylcytidine-3'-phosphorothioate
  modified_base 21: mod_base = OTHER; note = 2'-O-methyladenosine
cccatccctttcccgggaaca

SEQ ID NO: 714 - RNA, 21 nt, synthetic construct
  source 1..21: mol_type = other RNA
  modified_base 1: mod_base = OTHER; note = 2'-O-methylcytidine-3'-phosphorothioate
  modified_base 2: mod_base = OTHER; note = 2'-O-methylcytidine-3'-phosphorothioate
  modified_base 3: mod_base = OTHER; note = 2'-O-methyluridine-3'-phosphate
  modified_base 4: mod_base = OTHER; note = 2'-O-methylcytidine-3'-phosphate
  modified_base 5: mod_base = OTHER; note = 2'-O-methylguanosine-3'-phosphate
  modified_base 6: mod_base = OTHER; note = 2'-O-docosanyl-guanosine-3'-phosphate
  modified_base 7: mod_base = OTHER; note = 2'-deoxy-2'-fluoroadenosine-3'-phosphate
  modified_base 8: mod_base = OTHER; note = 2'-O-methyladenosine-3'-phosphate
  modified_base 9: mod_base = OTHER; note = 2'-deoxy-2'-fluorouridine-3'-phosphate
  modified_base 10: mod_base = OTHER; note = 2'-deoxy-2'-fluorocytidine-3'-phosphate
  modified_base 11: mod_base = OTHER; note = 2'-deoxy-2'-fluorocytidine-3'-phosphate
  modified_base 12: mod_base = OTHER; note = 2'-O-methyladenosine-3'-phosphate
  modified_base 13: mod_base = OTHER; note = 2'-O-methyladenosine-3'-phosphate
  modified_base 14: mod_base = OTHER; note = 2'-O-methylguanosine-3'-phosphate
  modified_base 15: mod_base = OTHER; note = 2'-O-methylguanosine-3'-phosphate
  modified_base 16: mod_base = OTHER; note = 2'-O-methyluridine-3'-phosphate
  modified_base 17: mod_base = OTHER; note = 2'-O-methylguanosine-3'-phosphate
  modified_base 18: mod_base = OTHER; note = 2'-O-methyluridine-3'-phosphate
  modified_base 19: mod_base = OTHER; note = 2'-O-methyladenosine-3'-phosphorothioate
  modified_base 20: mod_base = OTHER; note = 2'-O-methylguanosine-3'-phosphorothioate
  modified_base 21: mod_base = OTHER; note = 2'-O-methyladenosine
cctcggaatccaaggtgtaga

SEQ ID NO: 715 - RNA, 21 nt, synthetic construct
  source 1..21: mol_type = other RNA
  modified_base 1: mod_base = OTHER; note = 2'-O-methylguanosine-3'-phosphorothioate
  modified_base 2: mod_base = OTHER; note = 2'-O-methyladenosine-3'-phosphorothioate
  modified_base 3: mod_base = OTHER; note = 2'-O-methyladenosine-3'-phosphate
  modified_base 4: mod_base = OTHER; note = 2'-O-methylguanosine-3'-phosphate
  modified_base 5: mod_base = OTHER; note = 2'-O-methylcytidine-3'-phosphate
  modified_base 6: mod_base = OTHER; note = 2'-O-docosanyl-cytidine-3'-phosphate
  modified_base 7: mod_base = OTHER; note = 2'-deoxy-2'-fluorocytidine-3'-phosphate
  modified_base 8: mod_base = OTHER; note = 2'-O-methyladenosine-3'-phosphate
  modified_base 9: mod_base = OTHER; note = 2'-deoxy-2'-fluorocytidine-3'-phosphate
  modified_base 10: mod_base = OTHER; note = 2'-deoxy-2'-fluoroadenosine-3'-phosphate
  modified_base 11: mod_base = OTHER; note = 2'-deoxy-2'-fluoroadenosine-3'-phosphate
  modified_base 12: mod_base = OTHER; note = 2'-O-methyluridine-3'-phosphate
  modified_base 13: mod_base = OTHER; note = 2'-O-methylcytidine-3'-phosphate
  modified_base 14: mod_base = OTHER; note = 2'-O-methylcytidine-3'-phosphate
  modified_base 15: mod_base = OTHER; note = 2'-O-methyluridine-3'-phosphate
  modified_base 16: mod_base = OTHER; note = 2'-O-methylcytidine-3'-phosphate
  modified_base 17: mod_base = OTHER; note = 2'-O-methylguanosine-3'-phosphate
  modified_base 18: mod_base = OTHER; note = 2'-O-methyluridine-3'-phosphate
  modified_base 19: mod_base = OTHER; note = 2'-O-methylcytidine-3'-phosphorothioate
  modified_base 20: mod_base = OTHER; note = 2'-O-methyluridine-3'-phosphorothioate
  modified_base 21: mod_base = OTHER; note = 2'-O-methyladenosine
gaagcccacaatcctcgtcta

SEQ ID NO: 716 - RNA, 21 nt, synthetic construct
  source 1..21: mol_type = other RNA
  modified_base 1: mod_base = OTHER; note = 2'-O-methyladenosine-3'-phosphorothioate
  modified_base 2: mod_base = OTHER; note = 2'-O-methyluridine-3'-phosphorothioate
  modified_base 3: mod_base = OTHER; note = 2'-O-methylguanosine-3'-phosphate
  modified_base 4: mod_base = OTHER; note = 2'-O-methylguanosine-3'-phosphate
  modified_base 5: mod_base = OTHER; note = 2'-O-methylcytidine-3'-phosphate
  modified_base 6: mod_base = OTHER; note = 2'-O-docosanyl-cytidine-3'-phosphate
  modified_base 7: mod_base = OTHER; note = 2'-deoxy-2'-fluorouridine-3'-phosphate
  modified_base 8: mod_base = OTHER; note = 2'-O-methyluridine-3'-phosphate
  modified_base 9: mod_base = OTHER; note = 2'-deoxy-2'-fluorocytidine-3'-phosphate
  modified_base 10: mod_base = OTHER; note = 2'-deoxy-2'-fluoroguanosine-3'-phosphate
  modified_base 11: mod_base = OTHER; note = 2'-deoxy-2'-fluorouridine-3'-phosphate
  modified_base 12: mod_base = OTHER; note = 2'-O-methylguanosine-3'-phosphate
  modified_base 13: mod_base = OTHER; note = 2'-O-methyluridine-3'-phosphate
  modified_base 14: mod_base = OTHER; note = 2'-O-methyladenosine-3'-phosphate
  modified_base 15: mod_base = OTHER; note = 2'-O-methylcytidine-3'-phosphate
  modified_base 16: mod_base = OTHER; note = 2'-O-methylcytidine-3'-phosphate
  modified_base 17: mod_base = OTHER; note = 2'-O-methyluridine-3'-phosphate
  modified_base 18: mod_base = OTHER; note = 2'-O-methylguanosine-3'-phosphate
  modified_base 19: mod_base = OTHER; note = 2'-O-methylcytidine-3'-phosphorothioate
  modified_base 20: mod_base = OTHER; note = 2'-O-methylguanosine-3'-phosphorothioate
  modified_base 21: mod_base = OTHER; note = 2'-O-methyladenosine
atggccttcgtgtacctgcga

SEQ ID NO: 717 - RNA, 21 nt, synthetic construct
  source 1..21: mol_type = other RNA
  modified_base 1: mod_base = OTHER; note = 2'-O-methyluridine-3'-phosphorothioate
  modified_base 2: mod_base = OTHER; note = 2'-O-methyluridine-3'-phosphorothioate
  modified_base 3: mod_base = OTHER; note = 2'-O-methyladenosine-3'-phosphate
  modified_base 4: mod_base = OTHER; note = 2'-O-methyluridine-3'-phosphate
  modified_base 5: mod_base = OTHER; note = 2'-O-methylguanosine-3'-phosphate
  modified_base 6: mod_base = OTHER; note = 2'-O-docosanyl-uridine-3'-phosphate
  modified_base 7: mod_base = OTHER; note = 2'-deoxy-2'-fluorocytidine-3'-phosphate
  modified_base 8: mod_base = OTHER; note = 2'-O-methylcytidine-3'-phosphate
  modified_base 9: mod_base = OTHER; note = 2'-deoxy-2'-fluoroadenosine-3'-phosphate
  modified_base 10: mod_base = OTHER; note = 2'-deoxy-2'-fluoroadenosine-3'-phosphate
  modified_base 11: mod_base = OTHER; note = 2'-deoxy-2'-fluoroguanosine-3'-phosphate
  modified_base 12: mod_base = OTHER; note = 2'-O-methyluridine-3'-phosphate
  modified_base 13: mod_base = OTHER; note = 2'-O-methylguanosine-3'-phosphate
  modified_base 14: mod_base = OTHER; note = 2'-O-methylcytidine-3'-phosphate
  modified_base 15: mod_base = OTHER; note = 2'-O-methylcytidine-3'-phosphate
  modified_base 16: mod_base = OTHER; note = 2'-O-methylcytidine-3'-phosphate
  modified_base 17: mod_base = OTHER; note = 2'-O-methyladenosine-3'-phosphate
  modified_base 18: mod_base = OTHER; note = 2'-O-methylcytidine-3'-phosphate
  modified_base 19: mod_base = OTHER; note = 2'-O-methylguanosine-3'-phosphorothioate
  modified_base 20: mod_base = OTHER; note = 2'-O-methyluridine-3'-phosphorothioate
  modified_base 21: mod_base = OTHER; note = 2'-O-methyladenosine
ttatgtccaagtgcccacgta

SEQ ID NO: 718 - RNA, 21 nt, synthetic construct
  source 1..21: mol_type = other RNA
  modified_base 1: mod_base = OTHER; note = 2'-O-methylguanosine-3'-phosphorothioate
  modified_base 2: mod_base = OTHER; note = 2'-O-methyladenosine-3'-phosphorothioate
  modified_base 3: mod_base = OTHER; note = 2'-O-methylcytidine-3'-phosphate
  modified_base 4: mod_base = OTHER; note = 2'-O-methyladenosine-3'-phosphate
  modified_base 5: mod_base = OTHER; note = 2'-O-methylcytidine-3'-phosphate
  modified_base 6: mod_base = OTHER; note = 2'-O-docosanyl-uridine-3'-phosphate
  modified_base 7: mod_base = OTHER; note = 2'-deoxy-2'-fluorocytidine-3'-phosphate
  modified_base 8: mod_base = OTHER; note = 2'-O-methyluridine-3'-phosphate
  modified_base 9: mod_base = OTHER; note = 2'-deoxy-2'-fluorocytidine-3'-phosphate
  modified_base 10: mod_base = OTHER; note = 2'-deoxy-2'-fluorouridine-3'-phosphate
  modified_base 11: mod_base = OTHER; note = 2'-deoxy-2'-fluoroguanosine-3'-phosphate
  modified_base 12: mod_base = OTHER; note = 2'-O-methyladenosine-3'-phosphate
  modified_base 13: mod_base = OTHER; note = 2'-O-methylguanosine-3'-phosphate
  modified_base 14: mod_base = OTHER; note = 2'-O-methyladenosine-3'-phosphate
  modified_base 15: mod_base = OTHER; note = 2'-O-methylguanosine-3'-phosphate
  modified_base 16: mod_base = OTHER; note = 2'-O-methylguanosine-3'-phosphate
  modified_base 17: mod_base = OTHER; note = 2'-O-methyladenosine-3'-phosphate
  modified_base 18: mod_base = OTHER; note = 2'-O-methylcytidine-3'-phosphate
  modified_base 19: mod_base = OTHER; note = 2'-O-methylcytidine-3'-phosphorothioate
  modified_base 20: mod_base = OTHER; note = 2'-O-methylguanosine-3'-phosphorothioate
  modified_base 21: mod_base = OTHER; note = 2'-O-methyladenosine
gacactctctgagaggaccga

SEQ ID NO: 719 - RNA, 21 nt, synthetic construct
  source 1..21: mol_type = other RNA
  modified_base 1: mod_base = OTHER; note = 2'-O-methylguanosine-3'-phosphorothioate
  modified_base 2: mod_base = OTHER; note = 2'-O-methyladenosine-3'-phosphorothioate
  modified_base 3: mod_base = OTHER; note = 2'-O-methylcytidine-3'-phosphate
  modified_base 4: mod_base = OTHER; note = 2'-O-methylguanosine-3'-phosphate
  modified_base 5: mod_base = OTHER; note = 2'-O-methyladenosine-3'-phosphate
  modified_base 6: mod_base = OTHER; note = 2'-O-docosanyl-cytidine-3'-phosphate
  modified_base 7: mod_base = OTHER; note = 2'-deoxy-2'-fluoroguanosine-3'-phosphate
  modified_base 8: mod_base = OTHER; note = 2'-O-methyladenosine-3'-phosphate
  modified_base 9: mod_base = OTHER; note = 2'-deoxy-2'-fluorocytidine-3'-phosphate
  modified_base 10: mod_base = OTHER; note = 2'-deoxy-2'-fluoroguanosine-3'-phosphate
  modified_base 11: mod_base = OTHER; note = 2'-deoxy-2'-fluoroadenosine-3'-phosphate
  modified_base 12: mod_base = OTHER; note = 2'-O-methyluridine-3'-phosphate
  modified_base 13: mod_base = OTHER; note = 2'-O-methylguanosine-3'-phosphate
  modified_base 14: mod_base = OTHER; note = 2'-O-methyluridine-3'-phosphate
  modified_base 15: mod_base = OTHER; note = 2'-O-methylcytidine-3'-phosphate
  modified_base 16: mod_base = OTHER; note = 2'-O-methylguanosine-3'-phosphate
  modified_base 17: mod_base = OTHER; note = 2'-O-methyluridine-3'-phosphate
  modified_base 18: mod_base = OTHER; note = 2'-O-methylcytidine-3'-phosphate
  modified_base 19: mod_base = OTHER; note = 2'-O-methylguanosine-3'-phosphorothioate
  modified_base 20: mod_base = OTHER; note = 2'-O-methylguanosine-3'-phosphorothioate
  modified_base 21: mod_base = OTHER; note = 2'-O-methyladenosine
gacgacgacgatgtcgtcgga

SEQ ID NO: 720 - RNA, 21 nt, synthetic construct
  source 1..21: mol_type = other RNA
  modified_base 1: mod_base = OTHER; note = 2'-O-methyladenosine-3'-phosphorothioate
  modified_base 2: mod_base = OTHER; note = 2'-O-methyluridine-3'-phosphorothioate
  modified_base 3: mod_base = OTHER; note = 2'-O-methylcytidine-3'-phosphate
  modified_base 4: mod_base = OTHER; note = 2'-O-methylguanosine-3'-phosphate
  modified_base 5: mod_base = OTHER; note = 2'-O-methyluridine-3'-phosphate
  modified_base 6: mod_base = OTHER; note = 2'-O-docosanyl-guanosine-3'-phosphate
  modified_base 7: mod_base = OTHER; note = 2'-deoxy-2'-fluoroguanosine-3'-phosphate
  modified_base 8: mod_base = OTHER; note = 2'-O-methylcytidine-3'-phosphate
  modified_base 9: mod_base = OTHER; note = 2'-deoxy-2'-fluorouridine-3'-phosphate
  modified_base 10: mod_base = OTHER; note = 2'-deoxy-2'-fluorocytidine-3'-phosphate
  modified_base 11: mod_base = OTHER; note = 2'-deoxy-2'-fluorocytidine-3'-phosphate
  modified_base 12: mod_base = OTHER; note = 2'-O-methylcytidine-3'-phosphate
  modified_base 13: mod_base = OTHER; note = 2'-O-methyladenosine-3'-phosphate
  modified_base 14: mod_base = OTHER; note = 2'-O-methyluridine-3'-phosphate
  modified_base 15: mod_base = OTHER; note = 2'-O-methylcytidine-3'-phosphate
  modified_base 16: mod_base = OTHER; note = 2'-O-methylcytidine-3'-phosphate
  modified_base 17: mod_base = OTHER; note = 2'-O-methylcytidine-3'-phosphate
  modified_base 18: mod_base = OTHER; note = 2'-O-methyluridine-3'-phosphate
  modified_base 19: mod_base = OTHER; note = 2'-O-methyluridine-3'-phosphorothioate
  modified_base 20: mod_base = OTHER; note = 2'-O-methyluridine-3'-phosphorothioate
  modified_base 21: mod_base = OTHER; note = 2'-O-methyladenosine
atcgtggctcccatcccttta

SEQ ID NO: 721 - RNA, 21 nt, synthetic construct
  source 1..21: mol_type = other RNA
  modified_base 1: mod_base = OTHER; note = 2'-O-methylcytidine-3'-phosphorothioate
  modified_base 2: mod_base = OTHER; note = 2'-O-methyluridine-3'-phosphorothioate
  modified_base 3: mod_base = OTHER; note = 2'-O-methylguanosine-3'-phosphate
  modified_base 4: mod_base = OTHER; note = 2'-O-methylguanosine-3'-phosphate
  modified_base 5: mod_base = OTHER; note = 2'-O-methyluridine-3'-phosphate
  modified_base 6: mod_base = OTHER; note = 2'-O-docosanyl-guanosine-3'-phosphate
  modified_base 7: mod_base = OTHER; note = 2'-deoxy-2'-fluorouridine-3'-phosphate
  modified_base 8: mod_base = OTHER; note = 2'-O-methylcytidine-3'-phosphate
  modified_base 9: mod_base = OTHER; note = 2'-deoxy-2'-fluorocytidine-3'-phosphate
  modified_base 10: mod_base = OTHER; note = 2'-deoxy-2'-fluorouridine-3'-phosphate
  modified_base 11: mod_base = OTHER; note = 2'-deoxy-2'-fluorouridine-3'-phosphate
  modified_base 12: mod_base = OTHER; note = 2'-O-methylcytidine-3'-phosphate
  modified_base 13: mod_base = OTHER; note = 2'-O-methylcytidine-3'-phosphate
  modified_base 14: mod_base = OTHER; note = 2'-O-methyluridine-3'-phosphate
  modified_base 15: mod_base = OTHER; note = 2'-O-methylguanosine-3'-phosphate
  modified_base 16: mod_base = OTHER; note = 2'-O-methylcytidine-3'-phosphate
  modified_base 17: mod_base = OTHER; note = 2'-O-methylcytidine-3'-phosphate
  modified_base 18: mod_base = OTHER; note = 2'-O-methylcytidine-3'-phosphate
  modified_base 19: mod_base = OTHER; note = 2'-O-methyladenosine-3'-phosphorothioate
  modified_base 20: mod_base = OTHER; note = 2'-O-methyluridine-3'-phosphorothioate
  modified_base 21: mod_base = OTHER; note = 2'-O-methyladenosine
ctggtgtccttcctgcccata

SEQ ID NO: 722 - RNA, 21 nt, synthetic construct
  source 1..21: mol_type = other RNA
  modified_base 1: mod_base = OTHER; note = 2'-O-methyladenosine-3'-phosphorothioate
  modified_base 2: mod_base = OTHER; note = 2'-O-methyladenosine-3'-phosphorothioate
  modified_base 3: mod_base = OTHER; note = 2'-O-methylguanosine-3'-phosphate
  modified_base 4: mod_base = OTHER; note = 2'-O-methylguanosine-3'-phosphate
  modified_base 5: mod_base = OTHER; note = 2'-O-methylguanosine-3'-phosphate
  modified_base 6: mod_base = OTHER; note = 2'-O-docosanyl-adenosine-3'-phosphate
  modified_base 7: mod_base = OTHER; note = 2'-deoxy-2'-fluoroguanosine-3'-phosphate
  modified_base 8: mod_base = OTHER; note = 2'-O-methyladenosine-3'-phosphate
  modified_base 9: mod_base = OTHER; note = 2'-deoxy-2'-fluoroadenosine-3'-phosphate
  modified_base 10: mod_base = OTHER; note = 2'-deoxy-2'-fluoroguanosine-3'-phosphate
  modified_base 11: mod_base = OTHER; note = 2'-deoxy-2'-fluorocytidine-3'-phosphate
  modified_base 12: mod_base = OTHER; note = 2'-O-methyladenosine-3'-phosphate
  modified_base 13: mod_base = OTHER; note = 2'-O-methyluridine-3'-phosphate
  modified_base 14: mod_base = OTHER; note = 2'-O-methyluridine-3'-phosphate
  modified_base 15: mod_base = OTHER; note = 2'-O-methyladenosine-3'-phosphate
  modified_base 16: mod_base = OTHER; note = 2'-O-methylguanosine-3'-phosphate
  modified_base 17: mod_base = OTHER; note = 2'-O-methylguanosine-3'-phosphate
  modified_base 18: mod_base = OTHER; note = 2'-O-methyladenosine-3'-phosphate
  modified_base 19: mod_base = OTHER; note = 2'-O-methylguanosine-3'-phosphorothioate
  modified_base 20: mod_base = OTHER; note = 2'-O-methylguanosine-3'-phosphorothioate
  modified_base 21: mod_base = OTHER; note = 2'-O-methyladenosine
aagggagaagcattaggagga

SEQ ID NO: 723 - RNA, 21 nt, synthetic construct
  source 1..21: mol_type = other RNA
  modified_base 1: mod_base = OTHER; note = 2'-O-methylcytidine-3'-phosphorothioate
  modified_base 2: mod_base = OTHER; note = 2'-O-methylguanosine-3'-phosphorothioate
  modified_base 3: mod_base = OTHER; note = 2'-O-methylcytidine-3'-phosphate
  modified_base 4: mod_base = OTHER; note = 2'-O-methyluridine-3'-phosphate
  modified_base 5: mod_base = OTHER; note = 2'-O-methylguanosine-3'-phosphate
  modified_base 6: mod_base = OTHER; note = 2'-O-docosanyl-uridine-3'-phosphate
  modified_base 7: mod_base = OTHER; note = 2'-deoxy-2'-fluorocytidine-3'-phosphate
  modified_base 8: mod_base = OTHER; note = 2'-O-methyluridine-3'-phosphate
  modified_base 9: mod_base = OTHER; note = 2'-deoxy-2'-fluorocytidine-3'-phosphate
  modified_base 10: mod_base = OTHER; note = 2'-deoxy-2'-fluoroadenosine-3'-phosphate
  modified_base 11: mod_base = OTHER; note = 2'-deoxy-2'-fluoroguanosine-3'-phosphate
  modified_base 12: mod_base = OTHER; note = 2'-O-methylcytidine-3'-phosphate
  modified_base 13: mod_base = OTHER; note = 2'-O-methyladenosine-3'-phosphate
  modified_base 14: mod_base = OTHER; note = 2'-O-methylguanosine-3'-phosphate
  modified_base 15: mod_base = OTHER; note = 2'-O-methyluridine-3'-phosphate
  modified_base 16: mod_base = OTHER; note = 2'-O-methylguanosine-3'-phosphate
  modified_base 17: mod_base = OTHER; note = 2'-O-methylguanosine-3'-phosphate
  modified_base 18: mod_base = OTHER; note = 2'-O-methyladenosine-3'-phosphate
  modified_base 19: mod_base = OTHER; note = 2'-O-methylcytidine-3'-phosphorothioate
  modified_base 20: mod_base = OTHER; note = 2'-O-methyladenosine-3'-phosphorothioate
  modified_base 21: mod_base = OTHER; note = 2'-O-methyladenosine
cgctgtctcagcagtggacaa

SEQ ID NO: 724 - RNA, 21 nt, synthetic construct
  source 1..21: mol_type = other RNA
  modified_base 1: mod_base = OTHER; note = 2'-O-methyluridine-3'-phosphorothioate
  modified_base 2: mod_base = OTHER; note = 2'-O-methyladenosine-3'-phosphorothioate
  modified_base 3: mod_base = OTHER; note = 2'-O-methylcytidine-3'-phosphate
  modified_base 4: mod_base = OTHER; note = 2'-O-methylguanosine-3'-phosphate
  modified_base 5: mod_base = OTHER; note = 2'-O-methylcytidine-3'-phosphate
  modified_base 6: mod_base = OTHER; note = 2'-O-docosanyl-cytidine-3'-phosphate
  modified_base 7: mod_base = OTHER; note = 2'-deoxy-2'-fluoroadenosine-3'-phosphate
  modified_base 8: mod_base = OTHER; note = 2'-O-methyladenosine-3'-phosphate
  modified_base 9: mod_base = OTHER; note = 2'-deoxy-2'-fluorocytidine-3'-phosphate
  modified_base 10: mod_base = OTHER; note = 2'-deoxy-2'-fluorouridine-3'-phosphate
  modified_base 11: mod_base = OTHER; note = 2'-deoxy-2'-fluorocytidine-3'-phosphate
  modified_base 12: mod_base = OTHER; note = 2'-O-methylguanosine-3'-phosphate
  modified_base 13: mod_base = OTHER; note = 2'-O-methylguanosine-3'-phosphate
  modified_base 14: mod_base = OTHER; note = 2'-O-methylcytidine-3'-phosphate
  modified_base 15: mod_base = OTHER; note = 2'-O-methylcytidine-3'-phosphate
  modified_base 16: mod_base = OTHER; note = 2'-O-methyluridine-3'-phosphate
  modified_base 17: mod_base = OTHER; note = 2'-O-methyluridine-3'-phosphate
  modified_base 18: mod_base = OTHER; note = 2'-O-methylcytidine-3'-phosphate
  modified_base 19: mod_base = OTHER; note = 2'-O-methyladenosine-3'-phosphorothioate
  modified_base 20: mod_base = OTHER; note = 2'-O-methyladenosine-3'-phosphorothioate
  modified_base 21: mod_base = OTHER; note = 2'-O-methyladenosine
tacgccaactcggccttcaaa

SEQ ID NO: 725 - RNA, 21 nt, synthetic construct
  source 1..21: mol_type = other RNA
  modified_base 1: mod_base = OTHER; note = 2'-O-methylcytidine-3'-phosphorothioate
  modified_base 2: mod_base = OTHER; note = 2'-O-methyluridine-3'-phosphorothioate
  modified_base 3: mod_base = OTHER; note = 2'-O-methylcytidine-3'-phosphate
  modified_base 4: mod_base = OTHER; note = 2'-O-methylguanosine-3'-phosphate
  modified_base 5: mod_base = OTHER; note = 2'-O-methylcytidine-3'-phosphate
  modified_base 6: mod_base = OTHER; note = 2'-O-docosanyl-cytidine-3'-phosphate
  modified_base 7: mod_base = OTHER; note = 2'-deoxy-2'-fluoroadenosine-3'-phosphate
  modified_base 8: mod_base = OTHER; note = 2'-O-methyluridine-3'-phosphate
  modified_base 9: mod_base = OTHER; note = 2'-deoxy-2'-fluorocytidine-3'-phosphate
  modified_base 10: mod_base = OTHER; note = 2'-deoxy-2'-fluoroadenosine-3'-phosphate
  modified_base 11: mod_base = OTHER; note = 2'-deoxy-2'-fluorocytidine-3'-phosphate
  modified_base 12: mod_base = OTHER; note = 2'-O-methylcytidine-3'-phosphate
  modified_base 13: mod_base = OTHER; note = 2'-O-methyluridine-3'-phosphate
  modified_base 14: mod_base = OTHER; note = 2'-O-methylcytidine-3'-phosphate
  modified_base 15: mod_base = OTHER; note = 2'-O-methylguanosine-3'-phosphate
  modified_base 16: mod_base = OTHER; note = 2'-O-methylcytidine-3'-phosphate
  modified_base 17: mod_base = OTHER; note = 2'-O-methylcytidine-3'-phosphate
  modified_base 18: mod_base = OTHER; note = 2'-O-methylcytidine-3'-phosphate
  modified_base 19: mod_base = OTHER; note = 2'-O-methyluridine-3'-phosphorothioate
  modified_base 20: mod_base = OTHER; note = 2'-O-methyluridine-3'-phosphorothioate
  modified_base 21: mod_base = OTHER; note = 2'-O-methyladenosine
ctcgccatcacctcgccctta

SEQ ID NO: 726 - RNA, 21 nt, synthetic construct
  source 1..21: mol_type = other RNA
  modified_base 1: mod_base = OTHER; note = 2'-O-methylguanosine-3'-phosphorothioate
  modified_base 2: mod_base = OTHER; note = 2'-O-methyluridine-3'-phosphorothioate
  modified_base 3: mod_base = OTHER; note = 2'-O-methylcytidine-3'-phosphate
  modified_base 4: mod_base = OTHER; note = 2'-O-methylcytidine-3'-phosphate
  modified_base 5: mod_base = OTHER; note = 2'-O-methylguanosine-3'-phosphate
  modified_base 6: mod_base = OTHER; note = 2'-O-docosanyl-guanosine-3'-phosphate
  modified_base 7: mod_base = OTHER; note = 2'-deoxy-2'-fluorocytidine-3'-phosphate
  modified_base 8: mod_base = OTHER; note = 2'-O-methylcytidine-3'-phosphate
  modified_base 9: mod_base = OTHER; note = 2'-deoxy-2'-fluorouridine-3'-phosphate
  modified_base 10: mod_base = OTHER; note = 2'-deoxy-2'-fluorouridine-3'-phosphate
  modified_base 11: mod_base = OTHER; note = 2'-deoxy-2'-fluorocytidine-3'-phosphate
  modified_base 12: mod_base = OTHER; note = 2'-O-methyluridine-3'-phosphate
  modified_base 13: mod_base = OTHER; note = 2'-O-methyluridine-3'-phosphate
  modified_base 14: mod_base = OTHER; note = 2'-O-methyluridine-3'-phosphate
  modified_base 15: mod_base = OTHER; note = 2'-O-methyluridine-3'-phosphate
  modified_base 16: mod_base = OTHER; note = 2'-O-methylguanosine-3'-phosphate
  modified_base 17: mod_base = OTHER; note = 2'-O-methyluridine-3'-phosphate
  modified_base 18: mod_base = OTHER; note = 2'-O-methylguanosine-3'-phosphate
  modified_base 19: mod_base = OTHER; note = 2'-O-methyluridine-3'-phosphorothioate
  modified_base 20: mod_base = OTHER; note = 2'-O-methylguanosine-3'-phosphorothioate
  modified_base 21: mod_base = OTHER; note = 2'-O-methyladenosine
gtccggccttcttttgtgtga

SEQ ID NO: 727 - RNA, 21 nt, synthetic construct
  source 1..21: mol_type = other RNA
  modified_base 1: mod_base = OTHER; note = 2'-O-methyladenosine-3'-phosphorothioate
  modified_base 2: mod_base = OTHER; note = 2'-O-methyluridine-3'-phosphorothioate
  modified_base 3: mod_base = OTHER; note = 2'-O-methylcytidine-3'-phosphate
  modified_base 4: mod_base = OTHER; note = 2'-O-methylguanosine-3'-phosphate
  modified_base 5: mod_base = OTHER; note = 2'-O-methylcytidine-3'-phosphate
  modified_base 6: mod_base = OTHER; note = 2'-O-docosanyl-cytidine-3'-phosphate
  modified_base 7: mod_base = OTHER; note = 2'-deoxy-2'-fluorouridine-3'-phosphate
  modified_base 8: mod_base = OTHER; note = 2'-O-methylcytidine-3'-phosphate
  modified_base 9: mod_base = OTHER; note = 2'-deoxy-2'-fluoroguanosine-3'-phosphate
  modified_base 10: mod_base = OTHER; note = 2'-deoxy-2'-fluorouridine-3'-phosphate
  modified_base 11: mod_base = OTHER; note = 2'-deoxy-2'-fluorocytidine-3'-phosphate
  modified_base 12: mod_base = OTHER; note = 2'-O-methylcytidine-3'-phosphate
  modified_base 13: mod_base = OTHER; note = 2'-O-methylguanosine-3'-phosphate
  modified_base 14: mod_base = OTHER; note = 2'-O-methyluridine-3'-phosphate
  modified_base 15: mod_base = OTHER; note = 2'-O-methyladenosine-3'-phosphate
  modified_base 16: mod_base = OTHER; note = 2'-O-methylguanosine-3'-phosphate
  modified_base 17: mod_base = OTHER; note = 2'-O-methyluridine-3'-phosphate
  modified_base 18: mod_base = OTHER; note = 2'-O-methylcytidine-3'-phosphate
  modified_base 19: mod_base = OTHER; note = 2'-O-methyluridine-3'-phosphorothioate
  modified_base 20: mod_base = OTHER; note = 2'-O-methylcytidine-3'-phosphorothioate
  modified_base 21: mod_base = OTHER; note = 2'-O-methyladenosine
atcgcctcgtccgtagtctca

SEQ ID NO: 728 - RNA, 21 nt, synthetic construct
  source 1..21: mol_type = other RNA
  modified_base 1: mod_base = OTHER; note = 2'-O-methylcytidine-3'-phosphorothioate
  modified_base 2: mod_base = OTHER; note = 2'-O-methylguanosine-3'-phosphorothioate
  modified_base 3: mod_base = OTHER; note = 2'-O-methylguanosine-3'-phosphate
  modified_base 4: mod_base = OTHER; note = 2'-O-methylguanosine-3'-phosphate
  modified_base 5: mod_base = OTHER; note = 2'-O-methylcytidine-3'-phosphate
  modified_base 6: mod_base = OTHER; note = 2'-O-docosanyl-adenosine-3'-phosphate
  modified_base 7: mod_base = OTHER; note = 2'-deoxy-2'-fluoroadenosine-3'-phosphate
  modified_base 8: mod_base = OTHER; note = 2'-O-methyluridine-3'-phosphate
  modified_base 9: mod_base = OTHER; note = 2'-deoxy-2'-fluoroguanosine-3'-phosphate
  modified_base 10: mod_base = OTHER; note = 2'-deoxy-2'-fluorouridine-3'-phosphate
  modified_base 11: mod_base = OTHER; note = 2'-deoxy-2'-fluoroguanosine-3'-phosphate
  modified_base 12: mod_base = OTHER; note = 2'-O-methylcytidine-3'-phosphate
  modified_base 13: mod_base = OTHER; note = 2'-O-methyluridine-3'-phosphate
  modified_base 14: mod_base = OTHER; note = 2'-O-methylguanosine-3'-phosphate
  modified_base 15: mod_base = OTHER; note = 2'-O-methylguanosine-3'-phosphate
  modified_base 16: mod_base = OTHER; note = 2'-O-methyluridine-3'-phosphate
  modified_base 17: mod_base = OTHER; note = 2'-O-methylguanosine-3'-phosphate
  modified_base 18: mod_base = OTHER; note = 2'-O-methyladenosine-3'-phosphate
  modified_base 19: mod_base = OTHER; note = 2'-O-methyluridine-3'-phosphorothioate
  modified_base 20: mod_base = OTHER; note = 2'-O-methylcytidine-3'-phosphorothioate
  modified_base 21: mod_base = OTHER; note = 2'-O-methyladenosine
cgggcaatgtgctggtgatca

SEQ ID NO: 729 - RNA, 21 nt, synthetic construct
  source 1..21: mol_type = other RNA
  modified_base 1: mod_base = OTHER; note = 2'-O-methylcytidine-3'-phosphorothioate
  modified_base 2: mod_base = OTHER; note = 2'-O-methyluridine-3'-phosphorothioate
  modified_base 3: mod_base = OTHER; note = 2'-O-methyluridine-3'-phosphate
  modified_base 4: mod_base = OTHER; note = 2'-O-methylcytidine-3'-phosphate
  modified_base 5: mod_base = OTHER; note = 2'-O-methyluridine-3'-phosphate
  modified_base 6: mod_base = OTHER; note = 2'-O-docosanyl-uridine-3'-phosphate
  modified_base 7: mod_base = OTHER; note = 2'-deoxy-2'-fluorocytidine-3'-phosphate
  modified_base 8: mod_base = OTHER; note = 2'-O-methyladenosine-3'-phosphate
  modified_base 9: mod_base = OTHER; note = 2'-deoxy-2'-fluoroadenosine-3'-phosphate
  modified_base 10: mod_base = OTHER; note = 2'-deoxy-2'-fluorocytidine-3'-phosphate
  modified_base 11: mod_base = OTHER; note = 2'-deoxy-2'-fluorouridine-3'-phosphate
  modified_base 12: mod_base = OTHER; note = 2'-O-methylguanosine-3'-phosphate
  modified_base 13: mod_base = OTHER; note = 2'-O-methylguanosine-3'-phosphate
  modified_base 14: mod_base = OTHER; note = 2'-O-methylcytidine-3'-phosphate
  modified_base 15: mod_base = OTHER; note = 2'-O-methyluridine-3'-phosphate
  modified_base 16: mod_base = OTHER; note = 2'-O-methylguanosine-3'-phosphate
  modified_base 17: mod_base = OTHER; note = 2'-O-methylguanosine-3'-phosphate
  modified_base 18: mod_base = OTHER; note = 2'-O-methylguanosine-3'-phosphate
  modified_base 19: mod_base = OTHER; note = 2'-O-methylcytidine-3'-phosphorothioate
  modified_base 20: mod_base = OTHER; note = 2'-O-methyluridine-3'-phosphorothioate
  modified_base 21: mod_base = OTHER; note = 2'-O-methyladenosine
cttcttcaactggctgggcta

SEQ ID NO: 730 - RNA, 21 nt, synthetic construct
  source 1..21: mol_type = other RNA
  modified_base 1: mod_base = OTHER; note = 2'-O-methylcytidine-3'-phosphorothioate
  modified_base 2: mod_base = OTHER; note = 2'-O-methyluridine-3'-phosphorothioate
  modified_base 3: mod_base = OTHER; note = 2'-O-methyluridine-3'-phosphate
  modified_base 4: mod_base = OTHER; note = 2'-O-methylguanosine-3'-phosphate
  modified_base 5: mod_base = OTHER; note = 2'-O-methyluridine-3'-phosphate
  modified_base 6: mod_base = OTHER; note = 2'-O-docosanyl-guanosine-3'-phosphate
  modified_base 7: mod_base = OTHER; note = 2'-deoxy-2'-fluorouridine-3'-phosphate
  modified_base 8: mod_base = OTHER; note = 2'-O-methyladenosine-3'-phosphate
  modified_base 9: mod_base = OTHER; note = 2'-deoxy-2'-fluoroguanosine-3'-phosphate
  modified_base 10: mod_base = OTHER; note = 2'-deoxy-2'-fluoroguanosine-3'-phosphate
  modified_base 11: mod_base = OTHER; note = 2'-deoxy-2'-fluoroguanosine-3'-phosphate
  modified_base 12: mod_base = OTHER; note = 2'-O-methylcytidine-3'-phosphate
  modified_base 13: mod_base = OTHER; note = 2'-O-methyladenosine-3'-phosphate
  modified_base 14: mod_base = OTHER; note = 2'-O-methyladenosine-3'-phosphate
  modified_base 15: mod_base = OTHER; note = 2'-O-methyladenosine-3'-phosphate
  modified_base 16: mod_base = OTHER; note = 2'-O-methylcytidine-3'-phosphate
  modified_base 17: mod_base = OTHER; note = 2'-O-methylcytidine-3'-phosphate
  modified_base 18: mod_base = OTHER; note = 2'-O-methylcytidine-3'-phosphate
  modified_base 19: mod_base = OTHER; note = 2'-O-methylguanosine-3'-phosphorothioate
  modified_base 20: mod_base = OTHER; note = 2'-O-methylcytidine-3'-phosphorothioate
  modified_base 21: mod_base = OTHER; note = 2'-O-methyladenosine
cttgtgtagggcaaacccgca

SEQ ID NO: 731 - RNA, 21 nt, synthetic construct
  source 1..21: mol_type = other RNA
  modified_base 1: mod_base = OTHER; note = 2'-O-methylguanosine-3'-phosphorothioate
  modified_base 2: mod_base = OTHER; note = 2'-O-methylguanosine-3'-phosphorothioate
  modified_base 3: mod_base = OTHER; note = 2'-O-methylcytidine-3'-phosphate
  modified_base 4: mod_base = OTHER; note = 2'-O-methylcytidine-3'-phosphate
  modified_base 5: mod_base = OTHER; note = 2'-O-methyladenosine-3'-phosphate
  modified_base 6: mod_base = OTHER; note = 2'-O-docosanyl-adenosine-3'-phosphate
  modified_base 7: mod_base = OTHER; note = 2'-deoxy-2'-fluorocytidine-3'-phosphate
  modified_base 8: mod_base = OTHER; note = 2'-O-methylguanosine-3'-phosphate
  modified_base 9: mod_base = OTHER; note = 2'-deoxy-2'-fluorouridine-3'-phosphate
  modified_base 10: mod_base = OTHER; note = 2'-deoxy-2'-fluoroguanosine-3'-phosphate
  modified_base 11: mod_base = OTHER; note = 2'-deoxy-2'-fluoroguanosine-3'-phosphate
  modified_base 12: mod_base = OTHER; note = 2'-O-methyluridine-3'-phosphate
  modified_base 13: mod_base = OTHER; note = 2'-O-methylguanosine-3'-phosphate
  modified_base 14: mod_base = OTHER; note = 2'-O-methyladenosine-3'-phosphate
  modified_base 15: mod_base = OTHER; note = 2'-O-methyladenosine-3'-phosphate
  modified_base 16: mod_base = OTHER; note = 2'-O-methylguanosine-3'-phosphate
  modified_base 17: mod_base = OTHER; note = 2'-O-methylguanosine-3'-phosphate
  modified_base 18: mod_base = OTHER; note = 2'-O-methylcytidine-3'-phosphate
  modified_base 19: mod_base = OTHER; note = 2'-O-methylcytidine-3'-phosphorothioate
  modified_base 20: mod_base = OTHER; note = 2'-O-methyluridine-3'-phosphorothioate
  modified_base 21: mod_base = OTHER; note = 2'-O-methyladenosine
ggccaacgtggtgaaggccta

SEQ ID NO: 732 - RNA, 21 nt, synthetic construct
  source 1..21: mol_type = other RNA
  modified_base 1: mod_base = OTHER; note = 2'-O-methylguanosine-3'-phosphorothioate
  modified_base 2: mod_base = OTHER; note = 2'-O-methylguanosine-3'-phosphorothioate
  modified_base 3: mod_base = OTHER; note = 2'-O-methyladenosine-3'-phosphate
  modified_base 4: mod_base = OTHER; note = 2'-O-methylguanosine-3'-phosphate
  modified_base 5: mod_base = OTHER; note = 2'-O-methyluridine-3'-phosphate
  modified_base 6: mod_base = OTHER; note = 2'-O-docosanyl-adenosine-3'-phosphate
  modified_base 7: mod_base = OTHER; note = 2'-deoxy-2'-fluorocytidine-3'-phosphate
  modified_base 8: mod_base = OTHER; note = 2'-O-methylguanosine-3'-phosphate
  modified_base 9: mod_base = OTHER; note = 2'-deoxy-2'-fluoroguanosine-3'-phosphate
  modified_base 10: mod_base = OTHER; note = 2'-deoxy-2'-fluorocytidine-3'-phosphate
  modified_base 11: mod_base = OTHER; note = 2'-deoxy-2'-fluorouridine-3'-phosphate
  modified_base 12: mod_base = OTHER; note = 2'-O-methylcytidine-3'-phosphate
  modified_base 13: mod_base = OTHER; note = 2'-O-methylcytidine-3'-phosphate
  modified_base 14: mod_base = OTHER; note = 2'-O-methyluridine-3'-phosphate
  modified_base 15: mod_base = OTHER; note = 2'-O-methyluridine-3'-phosphate
  modified_base 16: mod_base = OTHER; note = 2'-O-methylcytidine-3'-phosphate
  modified_base 17: mod_base = OTHER; note = 2'-O-methyluridine-3'-phosphate
  modified_base 18: mod_base = OTHER; note = 2'-O-methyluridine-3'-phosphate
  modified_base 19: mod_base = OTHER; note = 2'-O-methylcytidine-3'-phosphorothioate
  modified_base 20: mod_base = OTHER; note = 2'-O-methyluridine-3'-phosphorothioate
  modified_base 21: mod_base = OTHER; note = 2'-O-methyladenosine
ggagtacggctccttcttcta

SEQ ID NO: 733 - RNA, 21 nt, synthetic construct
  source 1..21: mol_type = other RNA
  modified_base 1: mod_base = OTHER; note = 2'-O-methylguanosine-3'-phosphorothioate
  modified_base 2: mod_base = OTHER; note = 2'-O-methylcytidine-3'-phosphorothioate
  modified_base 3: mod_base = OTHER; note = 2'-O-methylcytidine-3'-phosphate
  modified_base 4: mod_base = OTHER; note = 2'-O-methylcytidine-3'-phosphate
  modified_base 5: mod_base = OTHER; note = 2'-O-methyladenosine-3'-phosphate
  modified_base 6: mod_base = OTHER; note = 2'-O-docosanyl-guanosine-3'-phosphate
  modified_base 7: mod_base = OTHER; note = 2'-deoxy-2'-fluoroadenosine-3'-phosphate
  modified_base 8: mod_base = OTHER; note = 2'-O-methyladenosine-3'-phosphate
  modified_base 9: mod_base = OTHER; note = 2'-deoxy-2'-fluoroguanosine-3'-phosphate
  modified_base 10: mod_base = OTHER; note = 2'-deoxy-2'-fluorocytidine-3'-phosphate
  modified_base 11: mod_base = OTHER; note = 2'-deoxy-2'-fluoroadenosine-3'-phosphate
  modified_base 12: mod_base = OTHER; note = 2'-O-methylguanosine-3'-phosphate
  modified_base 13: mod_base = OTHER; note = 2'-O-methylguanosine-3'-phosphate
  modified_base 14: mod_base = OTHER; note = 2'-O-methyluridine-3'-phosphate
  modified_base 15: mod_base = OTHER; note = 2'-O-methylguanosine-3'-phosphate
  modified_base 16: mod_base = OTHER; note = 2'-O-methyladenosine-3'-phosphate
  modified_base 17: mod_base = OTHER; note = 2'-O-methyladenosine-3'-phosphate
  modified_base 18: mod_base = OTHER; note = 2'-O-methylguanosine-3'-phosphate
  modified_base 19: mod_base = OTHER; note = 2'-O-methyladenosine-3'-phosphorothioate
  modified_base 20: mod_base = OTHER; note = 2'-O-methyladenosine-3'-phosphorothioate
  modified_base 21: mod_base = OTHER; note = 2'-O-methyladenosine
gcccagaagcaggtgaagaaa

SEQ ID NO: 734 - RNA, 21 nt, synthetic construct
  source 1..21: mol_type = other RNA
  modified_base 1: mod_base = OTHER; note = 2'-O-methylcytidine-3'-phosphorothioate
  modified_base 2: mod_base = OTHER; note = 2'-O-methyladenosine-3'-phosphorothioate
  modified_base 3: mod_base = OTHER; note = 2'-O-methylguanosine-3'-phosphate
  modified_base 4: mod_base = OTHER; note = 2'-O-methyladenosine-3'-phosphate
  modified_base 5: mod_base = OTHER; note = 2'-O-methyladenosine-3'-phosphate
  modified_base 6: mod_base = OTHER; note = 2'-O-docosanyl-guanosine-3'-phosphate
  modified_base 7: mod_base = OTHER; note = 2'-deoxy-2'-fluoroguanosine-3'-phosphate
  modified_base 8: mod_base = OTHER; note = 2'-O-methylcytidine-3'-phosphate
  modified_base 9: mod_base = OTHER; note = 2'-deoxy-2'-fluoroguanosine-3'-phosphate
  modified_base 10: mod_base = OTHER; note = 2'-deoxy-2'-fluorocytidine-3'-phosphate
  modified_base 11: mod_base = OTHER; note = 2'-deoxy-2'-fluorouridine-3'-phosphate
  modified_base 12: mod_base = OTHER; note = 2'-O-methylcytidine-3'-phosphate
  modified_base 13: mod_base = OTHER; note = 2'-O-methyladenosine-3'-phosphate
  modified_base 14: mod_base = OTHER; note = 2'-O-methyladenosine-3'-phosphate
  modified_base 15: mod_base = OTHER; note = 2'-O-methylguanosine-3'-phosphate
  modified_base 16: mod_base = OTHER; note = 2'-O-methyladenosine-3'-phosphate
  modified_base 17: mod_base = OTHER; note = 2'-O-methylcytidine-3'-phosphate
  modified_base 18: mod_base = OTHER; note = 2'-O-methylguanosine-3'-phosphate
  modified_base 19: mod_base = OTHER; note = 2'-O-methylcytidine-3'-phosphorothioate
  modified_base 20: mod_base = OTHER; note = 2'-O-methyluridine-3'-phosphorothioate
  modified_base 21: mod_base = OTHER; note = 2'-O-methyladenosine
cagaaggcgctcaagacgcta

SEQ ID NO: 735 - RNA, 21 nt, synthetic construct
  source 1..21: mol_type = other RNA
  modified_base 1: mod_base = OTHER; note = 2'-O-methyluridine-3'-phosphorothioate
  modified_base 2: mod_base = OTHER; note = 2'-O-methyluridine-3'-phosphorothioate
  modified_base 3: mod_base = OTHER; note = 2'-O-methylcytidine-3'-phosphate
  modified_base 4: mod_base = OTHER; note = 2'-O-methylcytidine-3'-phosphate
  modified_base 5: mod_base = OTHER; note = 2'-O-methylguanosine-3'-phosphate
  modified_base 6: mod_base = OTHER; note = 2'-O-docosanyl-cytidine-3'-phosphate
  modified_base 7: mod_base = OTHER; note = 2'-deoxy-2'-fluorouridine-3'-phosphate
  modified_base 8: mod_base = OTHER; note = 2'-O-methyladenosine-3'-phosphate
  modified_base 9: mod_base = OTHER; note = 2'-deoxy-2'-fluorocytidine-3'-phosphate
  modified_base 10: mod_base = OTHER; note = 2'-deoxy-2'-fluorocytidine-3'-phosphate
  modified_base 11: mod_base = OTHER; note = 2'-deoxy-2'-fluoroadenosine-3'-phosphate
  modified_base 12: mod_base = OTHER; note = 2'-O-methylguanosine-3'-phosphate
  modified_base 13: mod_base = OTHER; note = 2'-O-methyladenosine-3'-phosphate
  modified_base 14: mod_base = OTHER; note = 2'-O-methylguanosine-3'-phosphate
  modified_base 15: mod_base = OTHER; note = 2'-O-methylcytidine-3'-phosphate
  modified_base 16: mod_base = OTHER; note = 2'-O-methylcytidine-3'-phosphate
  modified_base 17: mod_base = OTHER; note = 2'-O-methyluridine-3'-phosphate
  modified_base 18: mod_base = OTHER; note = 2'-O-methylguanosine-3'-phosphate
  modified_base 19: mod_base = OTHER; note = 2'-O-methylcytidine-3'-phosphorothioate
  modified_base 20: mod_base = OTHER; note = 2'-O-methyluridine-3'-phosphorothioate
  modified_base 21: mod_base = OTHER; note = 2'-O-methyladenosine
ttccgctaccagagcctgcta

SEQ ID NO: 736 - RNA, 21 nt, synthetic construct
  source 1..21: mol_type = other RNA
  modified_base 1: mod_base = OTHER; note = 2'-O-methylcytidine-3'-phosphorothioate
  modified_base 2: mod_base = OTHER; note = 2'-O-methyluridine-3'-phosphorothioate
  modified_base 3: mod_base = OTHER; note = 2'-O-methyluridine-3'-phosphate
  modified_base 4: mod_base = OTHER; note = 2'-O-methylcytidine-3'-phosphate
  modified_base 5: mod_base = OTHER; note = 2'-O-methylcytidine-3'-phosphate
  modified_base 6: mod_base = OTHER; note = 2'-O-docosanyl-guanosine-3'-phosphate
  modified_base 7: mod_base = OTHER; note = 2'-deoxy-2'-fluorocytidine-3'-phosphate
  modified_base 8: mod_base = OTHER; note = 2'-O-methyladenosine-3'-phosphate
  modified_base 9: mod_base = OTHER; note = 2'-deoxy-2'-fluoroadenosine-3'-phosphate
  modified_base 10: mod_base = OTHER; note = 2'-deoxy-2'-fluoroguanosine-3'-phosphate
  modified_base 11: mod_base = OTHER; note = 2'-deoxy-2'-fluoroguanosine-3'-phosphate
  modified_base 12: mod_base = OTHER; note = 2'-O-methylcytidine-3'-phosphate
  modified_base 13: mod_base = OTHER; note = 2'-O-methylcytidine-3'-phosphate
  modified_base 14: mod_base = OTHER; note = 2'-O-methyluridine-3'-phosphate
  modified_base 15: mod_base = OTHER; note = 2'-O-methyluridine-3'-phosphate
  modified_base 16: mod_base = OTHER; note = 2'-O-methylcytidine-3'-phosphate
  modified_base 17: mod_base = OTHER; note = 2'-O-methylcytidine-3'-phosphate
  modified_base 18: mod_base = OTHER; note = 2'-O-methyladenosine-3'-phosphate
  modified_base 19: mod_base = OTHER; note = 2'-O-methylguanosine-3'-phosphorothioate
  modified_base 20: mod_base = OTHER; note = 2'-O-methylguanosine-3'-phosphorothioate
  modified_base 21: mod_base = OTHER; note = 2'-O-methyladenosine
cttccgcaaggccttccagga

SEQ ID NO: 737 - RNA, 21 nt, synthetic construct
  source 1..21: mol_type = other RNA
  modified_base 1: mod_base = OTHER; note = 2'-O-methylguanosine-3'-phosphorothioate
  modified_base 2: mod_base = OTHER; note = 2'-O-methyladenosine-3'-phosphorothioate
  modified_base 3: mod_base = OTHER; note = 2'-O-methylguanosine-3'-phosphate
  modified_base 4: mod_base = OTHER; note = 2'-O-methyluridine-3'-phosphate
  modified_base 5: mod_base = OTHER; note = 2'-O-methylguanosine-3'-phosphate
  modified_base 6: mod_base = OTHER; note = 2'-O-docosanyl-guanosine-3'-phosphate
  modified_base 7: mod_base = OTHER; note = 2'-deoxy-2'-fluoroadenosine-3'-phosphate
  modified_base 8: mod_base = OTHER; note = 2'-O-methyladenosine-3'-phosphate
  modified_base 9: mod_base = OTHER; note = 2'-deoxy-2'-fluoroguanosine-3'-phosphate
  modified_base 10: mod_base = OTHER; note = 2'-deoxy-2'-fluoroadenosine-3'-phosphate
  modified_base 11: mod_base = OTHER; note = 2'-deoxy-2'-fluorouridine-3'-phosphate
  modified_base 12: mod_base = OTHER; note = 2'-O-methylguanosine-3'-phosphate
  modified_base 13: mod_base = OTHER; note = 2'-O-methylguanosine-3'-phosphate
  modified_base 14: mod_base = OTHER; note = 2'-O-methylguanosine-3'-phosphate
  modified_base 15: mod_base = OTHER; note = 2'-O-methyluridine-3'-phosphate
  modified_base 16: mod_base = OTHER; note = 2'-O-methylguanosine-3'-phosphate
  modified_base 17: mod_base = OTHER; note = 2'-O-methylguanosine-3'-phosphate
  modified_base 18: mod_base = OTHER; note = 2'-O-methylguanosine-3'-phosphate
  modified_base 19: mod_base = OTHER; note = 2'-O-methyluridine-3'-phosphorothioate
  modified_base 20: mod_base = OTHER; note = 2'-O-methyluridine-3'-phosphorothioate
  modified_base 21: mod_base = OTHER; note = 2'-O-methyladenosine
gagtggaagatgggtgggtta

SEQ ID NO: 738 - RNA, 21 nt, synthetic construct
  source 1..21: mol_type = other RNA
  modified_base 1: mod_base = OTHER; note = 2'-O-methylguanosine-3'-phosphorothioate
  modified_base 2: mod_base = OTHER; note = 2'-O-methylguanosine-3'-phosphorothioate
  modified_base 3: mod_base = OTHER; note = 2'-O-methylcytidine-3'-phosphate
  modified_base 4: mod_base = OTHER; note = 2'-O-methylcytidine-3'-phosphate
  modified_base 5: mod_base = OTHER; note = 2'-O-methyladenosine-3'-phosphate
  modified_base 6: mod_base = OTHER; note = 2'-O-docosanyl-guanosine-3'-phosphate
  modified_base 7: mod_base = OTHER; note = 2'-deoxy-2'-fluorocytidine-3'-phosphate
  modified_base 8: mod_base = OTHER; note = 2'-O-methyladenosine-3'-phosphate
  modified_base 9: mod_base = OTHER; note = 2'-deoxy-2'-fluorouridine-3'-phosphate
  modified_base 10: mod_base = OTHER; note = 2'-deoxy-2'-fluorocytidine-3'-phosphate
  modified_base 11: mod_base = OTHER; note = 2'-deoxy-2'-fluoroguanosine-3'-phosphate
  modified_base 12: mod_base = OTHER; note = 2'-O-methyladenosine-3'-phosphate
  modified_base 13: mod_base = OTHER; note = 2'-O-methylguanosine-3'-phosphate
  modified_base 14: mod_base = OTHER; note = 2'-O-methyladenosine-3'-phosphate
  modified_base 15: mod_base = OTHER; note = 2'-O-methylcytidine-3'-phosphate
  modified_base 16: mod_base = OTHER; note = 2'-O-methylcytidine-3'-phosphate
  modified_base 17: mod_base = OTHER; note = 2'-O-methylcytidine-3'-phosphate
  modified_base 18: mod_base = OTHER; note = 2'-O-methyluridine-3'-phosphate
  modified_base 19: mod_base = OTHER; note = 2'-O-methylguanosine-3'-phosphorothioate
  modified_base 20: mod_base = OTHER; note = 2'-O-methyluridine-3'-phosphorothioate
  modified_base 21: mod_base = OTHER; note = 2'-O-methyladenosine
ggccagcatcgagaccctgta

SEQ ID NO: 739 - RNA, 21 nt, synthetic construct
  source 1..21: mol_type = other RNA
  modified_base 1: mod_base = OTHER; note = 2'-O-methylcytidine-3'-phosphorothioate
  modified_base 2: mod_base = OTHER; note = 2'-O-methyluridine-3'-phosphorothioate
  modified_base 3: mod_base = OTHER; note = 2'-O-methylguanosine-3'-phosphate
  modified_base 4: mod_base = OTHER; note = 2'-O-methylcytidine-3'-phosphate
  modified_base 5: mod_base = OTHER; note = 2'-O-methyluridine-3'-phosphate
  modified_base 6: mod_base = OTHER; note = 2'-O-docosanyl-guanosine-3'-phosphate
  modified_base 7: mod_base = OTHER; note = 2'-deoxy-2'-fluoroguanosine-3'-phosphate
  modified_base 8: mod_base = OTHER; note = 2'-O-methylcytidine-3'-phosphate
  modified_base 9: mod_base = OTHER; note = 2'-deoxy-2'-fluorouridine-3'-phosphate
  modified_base 10: mod_base = OTHER; note = 2'-deoxy-2'-fluoroguanosine-3'-phosphate
  modified_base 11: mod_base = OTHER; note = 2'-deoxy-2'-fluorocytidine-3'-phosphate
  modified_base 12: mod_base = OTHER; note = 2'-O-methylcytidine-3'-phosphate
  modified_base 13: mod_base = OTHER; note = 2'-O-methylcytidine-3'-phosphate
  modified_base 14: mod_base = OTHER; note = 2'-O-methyluridine-3'-phosphate
  modified_base 15: mod_base = OTHER; note = 2'-O-methyluridine-3'-phosphate
  modified_base 16: mod_base = OTHER; note = 2'-O-methylcytidine-3'-phosphate
  modified_base 17: mod_base = OTHER; note = 2'-O-methyluridine-3'-phosphate
  modified_base 18: mod_base = OTHER; note = 2'-O-methyluridine-3'-phosphate
  modified_base 19: mod_base = OTHER; note = 2'-O-methylcytidine-3'-phosphorothioate
  modified_base 20: mod_base = OTHER; note = 2'-O-methylcytidine-3'-phosphorothioate
  modified_base 21: mod_base = OTHER; note = 2'-O-methyladenosine
ctgctggctgcccttcttcca

SEQ ID NO: 740 - RNA, 21 nt, synthetic construct
  source 1..21: mol_type = other RNA
  modified_base 1: mod_base = OTHER; note = 2'-O-methylguanosine-3'-phosphorothioate
  modified_base 2: mod_base = OTHER; note = 2'-O-methyladenosine-3'-phosphorothioate
  modified_base 3: mod_base = OTHER; note = 2'-O-methylcytidine-3'-phosphate
  modified_base 4: mod_base = OTHER; note = 2'-O-methylcytidine-3'-phosphate
  modified_base 5: mod_base = OTHER; note = 2'-O-methylguanosine-3'-phosphate
  modified_base 6: mod_base = OTHER; note = 2'-O-docosanyl-cytidine-3'-phosphate
  modified_base 7: mod_base = OTHER; note = 2'-deoxy-2'-fluorouridine-3'-phosphate
  modified_base 8: mod_base = OTHER; note = 2'-O-methyladenosine-3'-phosphate
  modified_base 9: mod_base = OTHER; note = 2'-deoxy-2'-fluorocytidine-3'-phosphate
  modified_base 10: mod_base = OTHER; note = 2'-deoxy-2'-fluorocytidine-3'-phosphate
  modified_base 11: mod_base = OTHER; note = 2'-deoxy-2'-fluorouridine-3'-phosphate
  modified_base 12: mod_base = OTHER; note = 2'-O-methylcytidine-3'-phosphate
  modified_base 13: mod_base = OTHER; note = 2'-O-methylguanosine-3'-phosphate
  modified_base 14: mod_base = OTHER; note = 2'-O-methylcytidine-3'-phosphate
  modified_base 15: mod_base = OTHER; note = 2'-O-methylcytidine-3'-phosphate
  modified_base 16: mod_base = OTHER; note = 2'-O-methyladenosine-3'-phosphate
  modified_base 17: mod_base = OTHER; note = 2'-O-methyluridine-3'-phosphate
  modified_base 18: mod_base = OTHER; note = 2'-O-methylcytidine-3'-phosphate
  modified_base 19: mod_base = OTHER; note = 2'-O-methyladenosine-3'-phosphorothioate
  modified_base 20: mod_base = OTHER; note = 2'-O-methylcytidine-3'-phosphorothioate
  modified_base 21: mod_base = OTHER; note = 2'-O-methyladenosine
gaccgctacctcgccatcaca

SEQ ID NO: 741 - RNA, 21 nt, synthetic construct
  source 1..21: mol_type = other RNA
  modified_base 1: mod_base = OTHER; note = 2'-O-methylcytidine-3'-phosphorothioate
  modified_base 2: mod_base = OTHER; note = 2'-O-methylguanosine-3'-phosphorothioate
  modified_base 3: mod_base = OTHER; note = 2'-O-methyluridine-3'-phosphate
  modified_base 4: mod_base = OTHER; note = 2'-O-methylguanosine-3'-phosphate
  modified_base 5: mod_base = OTHER; note = 2'-O-methylguanosine-3'-phosphate
  modified_base 6: mod_base = OTHER; note = 2'-O-docosanyl-cytidine-3'-phosphate
  modified_base 7: mod_base = OTHER; note = 2'-deoxy-2'-fluorocytidine-3'-phosphate
  modified_base 8: mod_base = OTHER; note = 2'-O-methyladenosine-3'-phosphate
  modified_base 9: mod_base = OTHER; note = 2'-deoxy-2'-fluorouridine-3'-phosphate
  modified_base 10: mod_base = OTHER; note = 2'-deoxy-2'-fluorocytidine-3'-phosphate
  modified_base 11: mod_base = OTHER; note = 2'-deoxy-2'-fluoroguanosine-3'-phosphate
  modified_base 12: mod_base = OTHER; note = 2'-O-methylcytidine-3'-phosphate
  modified_base 13: mod_base = OTHER; note = 2'-O-methylcytidine-3'-phosphate
  modified_base 14: mod_base = OTHER; note = 2'-O-methyladenosine-3'-phosphate
  modified_base 15: mod_base = OTHER; note = 2'-O-methyladenosine-3'-phosphate
  modified_base 16: mod_base = OTHER; note = 2'-O-methylguanosine-3'-phosphate
  modified_base 17: mod_base = OTHER; note = 2'-O-methyladenosine-3'-phosphate
  modified_base 18: mod_base = OTHER; note = 2'-O-methylcytidine-3'-phosphate
  modified_base 19: mod_base = OTHER; note = 2'-O-methylguanosine-3'-phosphorothioate
  modified_base 20: mod_base = OTHER; note = 2'-O-methylcytidine-3'-phosphorothioate
  modified_base 21: mod_base = OTHER; note = 2'-O-methyladenosine
cgtggccatcgccaagacgca

SEQ ID NO: 742 - RNA, 21 nt, synthetic construct
  source 1..21: mol_type = other RNA
  modified_base 1: mod_base = OTHER; note = 2'-O-methyladenosine-3'-phosphorothioate
  modified_base 2: mod_base = OTHER; note = 2'-O-methyluridine-3'-phosphorothioate
  modified_base 3: mod_base = OTHER; note = 2'-O-methylguanosine-3'-phosphate
  modified_base 4: mod_base = OTHER; note = 2'-O-methylguanosine-3'-phosphate
  modified_base 5: mod_base = OTHER; note = 2'-O-methylguanosine-3'-phosphate
  modified_base 6: mod_base = OTHER; note = 2'-O-docosanyl-uridine-3'-phosphate
  modified_base 7: mod_base = OTHER; note = 2'-deoxy-2'-fluorocytidine-3'-phosphate
  modified_base 8: mod_base = OTHER; note = 2'-O-methyluridine-3'-phosphate
  modified_base 9: mod_base = OTHER; note = 2'-deoxy-2'-fluoroguanosine-3'-phosphate
  modified_base 10: mod_base = OTHER; note = 2'-deoxy-2'-fluorocytidine-3'-phosphate
  modified_base 11: mod_base = OTHER; note = 2'-deoxy-2'-fluorouridine-3'-phosphate
  modified_base 12: mod_base = OTHER; note = 2'-O-methylguanosine-3'-phosphate
  modified_base 13: mod_base = OTHER; note = 2'-O-methyladenosine-3'-phosphate
  modified_base 14: mod_base = OTHER; note = 2'-O-methyluridine-3'-phosphate
  modified_base 15: mod_base = OTHER; note = 2'-O-methylguanosine-3'-phosphate
  modified_base 16: mod_base = OTHER; note = 2'-O-methylguanosine-3'-phosphate
  modified_base 17: mod_base = OTHER; note = 2'-O-methylcytidine-3'-phosphate
  modified_base 18: mod_base = OTHER; note = 2'-O-methylguanosine-3'-phosphate
  modified_base 19: mod_base = OTHER; note = 2'-O-methylcytidine-3'-phosphorothioate
  modified_base 20: mod_base = OTHER; note = 2'-O-methyluridine-3'-phosphorothioate
  modified_base 21: mod_base = OTHER; note = 2'-O-methyladenosine
atgggtctgctgatggcgcta

SEQ ID NO: 743 - RNA, 21 nt, synthetic construct
  source 1..21: mol_type = other RNA
  modified_base 1: mod_base = OTHER; note = 2'-O-methylguanosine-3'-phosphorothioate
  modified_base 2: mod_base = OTHER; note = 2'-O-methylguanosine-3'-phosphorothioate
  modified_base 3: mod_base = OTHER; note = 2'-O-methylguanosine-3'-phosphate
  modified_base 4: mod_base = OTHER; note = 2'-O-methylcytidine-3'-phosphate
  modified_base 5: mod_base = OTHER; note = 2'-O-methyladenosine-3'-phosphate
  modified_base 6: mod_base = OTHER; note = 2'-O-docosanyl-uridine-3'-phosphate
  modified_base 7: mod_base = OTHER; note = 2'-deoxy-2'-fluorocytidine-3'-phosphate
  modified_base 8: mod_base = OTHER; note = 2'-O-methyladenosine-3'-phosphate
  modified_base 9: mod_base = OTHER; note = 2'-deoxy-2'-fluorouridine-3'-phosphate
  modified_base 10: mod_base = OTHER; note = 2'-deoxy-2'-fluorocytidine-3'-phosphate
  modified_base 11: mod_base = OTHER; note = 2'-deoxy-2'-fluoroadenosine-3'-phosphate
  modified_base 12: mod_base = OTHER; note = 2'-O-methyluridine-3'-phosphate
  modified_base 13: mod_base = OTHER; note = 2'-O-methylguanosine-3'-phosphate
  modified_base 14: mod_base = OTHER; note = 2'-O-methylguanosine-3'-phosphate
  modified_base 15: mod_base = OTHER; note = 2'-O-methylguanosine-3'-phosphate
  modified_base 16: mod_base = OTHER; note = 2'-O-methylcytidine-3'-phosphate
  modified_base 17: mod_base = OTHER; note = 2'-O-methylguanosine-3'-phosphate
  modified_base 18: mod_base = OTHER; note = 2'-O-methyluridine-3'-phosphate
  modified_base 19: mod_base = OTHER; note = 2'-O-methylcytidine-3'-phosphorothioate
  modified_base 20: mod_base = OTHER; note = 2'-O-methyluridine-3'-phosphorothioate
  modified_base 21: mod_base = OTHER; note = 2'-O-methyladenosine
gggcatcatcatgggcgtcta

SEQ ID NO: 744 - RNA, 21 nt, synthetic construct
  source 1..21: mol_type = other RNA
  modified_base 1: mod_base = OTHER; note = 2'-O-methylguanosine-3'-phosphorothioate
  modified_base 2: mod_base = OTHER; note = 2'-O-methyladenosine-3'-phosphorothioate
  modified_base 3: mod_base = OTHER; note = 2'-O-methyladenosine-3'-phosphate
  modified_base 4: mod_base = OTHER; note = 2'-O-methylcytidine-3'-phosphate
  modified_base 5: mod_base = OTHER; note = 2'-O-methyladenosine-3'-phosphate
  modified_base 6: mod_base = OTHER; note = 2'-O-docosanyl-cytidine-3'-phosphate
  modified_base 7: mod_base = OTHER; note = 2'-deoxy-2'-fluoroadenosine-3'-phosphate
  modified_base 8: mod_base = OTHER; note = 2'-O-methylcytidine-3'-phosphate
  modified_base 9: mod_base = OTHER; note = 2'-deoxy-2'-fluorouridine-3'-phosphate
  modified_base 10: mod_base = OTHER; note = 2'-deoxy-2'-fluoroadenosine-3'-phosphate
  modified_base 11: mod_base = OTHER; note = 2'-deoxy-2'-fluorocytidine-3'-phosphate
  modified_base 12: mod_base = OTHER; note = 2'-O-methylcytidine-3'-phosphate
  modified_base 13: mod_base = OTHER; note = 2'-O-methyladenosine-3'-phosphate
  modified_base 14: mod_base = OTHER; note = 2'-O-methylguanosine-3'-phosphate
  modified_base 15: mod_base = OTHER; note = 2'-O-methylcytidine-3'-phosphate
  modified_base 16: mod_base = OTHER; note = 2'-O-methylcytidine-3'-phosphate
  modified_base 17: mod_base = OTHER; note = 2'-O-methyladenosine-3'-phosphate
  modified_base 18: mod_base = OTHER; note = 2'-O-methylguanosine-3'-phosphate
  modified_base 19: mod_base = OTHER; note = 2'-O-methyladenosine-3'-phosphorothioate
  modified_base 20: mod_base = OTHER; note = 2'-O-methylguanosine-3'-phosphorothioate
  modified_base 21: mod_base = OTHER; note = 2'-O-methyladenosine
gaacacactaccagccagaga

SEQ ID NO: 745 - RNA, 21 nt, synthetic construct
  source 1..21: mol_type = other RNA
  modified_base 1: mod_base = OTHER; note = 2'-O-methyladenosine-3'-phosphorothioate
  modified_base 2: mod_base = OTHER; note = 2'-O-methyluridine-3'-phosphorothioate
  modified_base 3: mod_base = OTHER; note = 2'-O-methyluridine-3'-phosphate
  modified_base 4: mod_base = OTHER; note = 2'-O-methylguanosine-3'-phosphate
  modified_base 5: mod_base = OTHER; note = 2'-O-methylcytidine-3'-phosphate
  modified_base 6: mod_base = OTHER; note = 2'-O-docosanyl-cytidine-3'-phosphate
  modified_base 7: mod_base = OTHER; note = 2'-deoxy-2'-fluorocytidine-3'-phosphate
  modified_base 8: mod_base = OTHER; note = 2'-O-methyluridine-3'-phosphate
  modified_base 9: mod_base = OTHER; note = 2'-deoxy-2'-fluoroguanosine-3'-phosphate
  modified_base 10: mod_base = OTHER; note = 2'-deoxy-2'-fluoroguanosine-3'-phosphate
  modified_base 11: mod_base = OTHER; note = 2'-deoxy-2'-fluoroadenosine-3'-phosphate
  modified_base 12: mod_base = OTHER; note = 2'-O-methylcytidine-3'-phosphate
  modified_base 13: mod_base = OTHER; note = 2'-O-methylcytidine-3'-phosphate
  modified_base 14: mod_base = OTHER; note = 2'-O-methylguanosine-3'-phosphate
  modified_base 15: mod_base = OTHER; note = 2'-O-methylcytidine-3'-phosphate
  modified_base 16: mod_base = OTHER; note = 2'-O-methyluridine-3'-phosphate
  modified_base 17: mod_base = OTHER; note = 2'-O-methyladenosine-3'-phosphate
  modified_base 18: mod_base = OTHER; note = 2'-O-methylcytidine-3'-phosphate
  modified_base 19: mod_base = OTHER; note = 2'-O-methylcytidine-3'-phosphorothioate
  modified_base 20: mod_base = OTHER; note = 2'-O-methyluridine-3'-phosphorothioate
  modified_base 21: mod_base = OTHER; note = 2'-O-methyladenosine
attgccctggaccgctaccta

SEQ ID NO: 746 - RNA, 21 nt, synthetic construct
  source 1..21: mol_type = other RNA
  modified_base 1: mod_base = OTHER; note = 2'-O-methyladenosine-3'-phosphorothioate
  modified_base 2: mod_base = OTHER; note = 2'-O-methyluridine-3'-phosphorothioate
  modified_base 3: mod_base = OTHER; note = 2'-O-methylcytidine-3'-phosphate
  modified_base 4: mod_base = OTHER; note = 2'-O-methyluridine-3'-phosphate
  modified_base 5: mod_base = OTHER; note = 2'-O-methylcytidine-3'-phosphate
  modified_base 6: mod_base = OTHER; note = 2'-O-docosanyl-guanosine-3'-phosphate
  modified_base 7: mod_base = OTHER; note = 2'-deoxy-2'-fluoroguanosine-3'-phosphate
  modified_base 8: mod_base = OTHER; note = 2'-O-methylcytidine-3'-phosphate
  modified_base 9: mod_base = OTHER; note = 2'-deoxy-2'-fluorocytidine-3'-phosphate
  modified_base 10: mod_base = OTHER; note = 2'-deoxy-2'-fluorocytidine-3'-phosphate
  modified_base 11: mod_base = OTHER; note = 2'-deoxy-2'-fluorouridine-3'-phosphate
  modified_base 12: mod_base = OTHER; note = 2'-O-methylguanosine-3'-phosphate
  modified_base 13: mod_base = OTHER; note = 2'-O-methylguanosine-3'-phosphate
  modified_base 14: mod_base = OTHER; note = 2'-O-methyluridine-3'-phosphate
  modified_base 15: mod_base = OTHER; note = 2'-O-methylguanosine-3'-phosphate
  modified_base 16: mod_base = OTHER; note = 2'-O-methyluridine-3'-phosphate
  modified_base 17: mod_base = OTHER; note = 2'-O-methylcytidine-3'-phosphate
  modified_base 18: mod_base = OTHER; note = 2'-O-methylcytidine-3'-phosphate
  modified_base 19: mod_base = OTHER; note = 2'-O-methyluridine-3'-phosphorothioate
  modified_base 20: mod_base = OTHER; note = 2'-O-methyluridine-3'-phosphorothioate
  modified_base 21: mod_base = OTHER; note = 2'-O-methyladenosine
atctcggccctggtgtcctta

SEQ ID NO: 747 - RNA, 21 nt, synthetic construct
  source 1..21: mol_type = other RNA
  modified_base 1: mod_base = OTHER; note = 2'-O-methyladenosine-3'-phosphorothioate
  modified_base 2: mod_base = OTHER; note = 2'-O-methylguanosine-3'-phosphorothioate
  modified_base 3: mod_base = OTHER; note = 2'-O-methylcytidine-3'-phosphate
  modified_base 4: mod_base = OTHER; note = 2'-O-methyluridine-3'-phosphate
  modified_base 5: mod_base = OTHER; note = 2'-O-methylguanosine-3'-phosphate
  modified_base 6: mod_base = OTHER; note = 2'-O-docosanyl-cytidine-3'-phosphate
  modified_base 7: mod_base = OTHER; note = 2'-deoxy-2'-fluoroguanosine-3'-phosphate
  modified_base 8: mod_base = OTHER; note = 2'-O-methyladenosine-3'-phosphate
  modified_base 9: mod_base = OTHER; note = 2'-deoxy-2'-fluoroguanosine-3'-phosphate
  modified_base 10: mod_base = OTHER; note = 2'-deoxy-2'-fluorocytidine-3'-phosphate
  modified_base 11: mod_base = OTHER; note = 2'-deoxy-2'-fluoroguanosine-3'-phosphate
  modified_base 12: mod_base = OTHER; note = 2'-O-methylcytidine-3'-phosphate
  modified_base 13: mod_base = OTHER; note = 2'-O-methylcytidine-3'-phosphate
  modified_base 14: mod_base = OTHER; note = 2'-O-methylguanosine-3'-phosphate
  modified_base 15: mod_base = OTHER; note = 2'-O-methyluridine-3'-phosphate
  modified_base 16: mod_base = OTHER; note = 2'-O-methyluridine-3'-phosphate
  modified_base 17: mod_base = OTHER; note = 2'-O-methyluridine-3'-phosphate
  modified_base 18: mod_base = OTHER; note = 2'-O-methylcytidine-3'-phosphate
  modified_base 19: mod_base = OTHER; note = 2'-O-methylcytidine-3'-phosphorothioate
  modified_base 20: mod_base = OTHER; note = 2'-O-methyluridine-3'-phosphorothioate
  modified_base 21: mod_base = OTHER; note = 2'-O-methyladenosine
agctgcgagcgccgtttccta

SEQ ID NO: 748 - RNA, 21 nt, synthetic construct
  source 1..21: mol_type = other RNA
  modified_base 1: mod_base = OTHER; note = 2'-O-methylcytidine-3'-phosphorothioate
  modified_base 2: mod_base = OTHER; note = 2'-O-methyladenosine-3'-phosphorothioate
  modified_base 3: mod_base = OTHER; note = 2'-O-methyluridine-3'-phosphate
  modified_base 4: mod_base = OTHER; note = 2'-O-methylcytidine-3'-phosphate
  modified_base 5: mod_base = OTHER; note = 2'-O-methyladenosine-3'-phosphate
  modified_base 6: mod_base = OTHER; note = 2'-O-docosanyl-uridine-3'-phosphate
  modified_base 7: mod_base = OTHER; note = 2'-deoxy-2'-fluorocytidine-3'-phosphate
  modified_base 8: mod_base = OTHER; note = 2'-O-methyluridine-3'-phosphate
  modified_base 9: mod_base = OTHER; note = 2'-deoxy-2'-fluoroadenosine-3'-phosphate
  modified_base 10: mod_base = OTHER; note = 2'-deoxy-2'-fluorocytidine-3'-phosphate
  modified_base 11: mod_base = OTHER; note = 2'-deoxy-2'-fluorouridine-3'-phosphate
  modified_base 12: mod_base = OTHER; note = 2'-O-methylguanosine-3'-phosphate
  modified_base 13: mod_base = OTHER; note = 2'-O-methylcytidine-3'-phosphate
  modified_base 14: mod_base = OTHER; note = 2'-O-methylcytidine-3'-phosphate
  modified_base 15: mod_base = OTHER; note = 2'-O-methylguanosine-3'-phosphate
  modified_base 16: mod_base = OTHER; note = 2'-O-methylcytidine-3'-phosphate
  modified_base 17: mod_base = OTHER; note = 2'-O-methyladenosine-3'-phosphate
  modified_base 18: mod_base = OTHER; note = 2'-O-methylguanosine-3'-phosphate
  modified_base 19: mod_base = OTHER; note = 2'-O-methylcytidine-3'-phosphorothioate
  modified_base 20: mod_base = OTHER; note = 2'-O-methylcytidine-3'-phosphorothioate
  modified_base 21: mod_base = OTHER; note = 2'-O-methyladenosine
catcatctactgccgcagcca

SEQ ID NO: 749 - RNA, 21 nt, synthetic construct
  source 1..21: mol_type = other RNA
  modified_base 1: mod_base = OTHER; note = 2'-O-methylguanosine-3'-phosphorothioate
  modified_base 2: mod_base = OTHER; note = 2'-O-methylcytidine-3'-phosphorothioate
  modified_base 3: mod_base = OTHER; note = 2'-O-methyladenosine-3'-phosphate
  modified_base 4: mod_base = OTHER; note = 2'-O-methylguanosine-3'-phosphate
  modified_base 5: mod_base = OTHER; note = 2'-O-methyladenosine-3'-phosphate
  modified_base 6: mod_base = OTHER; note = 2'-O-docosanyl-cytidine-3'-phosphate
  modified_base 7: mod_base = OTHER; note = 2'-deoxy-2'-fluoroguanosine-3'-phosphate
  modified_base 8: mod_base = OTHER; note = 2'-O-methylcytidine-3'-phosphate
  modified_base 9: mod_base = OTHER; note = 2'-deoxy-2'-fluorouridine-3'-phosphate
  modified_base 10: mod_base = OTHER; note = 2'-deoxy-2'-fluorocytidine-3'-phosphate
  modified_base 11: mod_base = OTHER; note = 2'-deoxy-2'-fluoroadenosine-3'-phosphate
  modified_base 12: mod_base = OTHER; note = 2'-O-methylcytidine-3'-phosphate
  modified_base 13: mod_base = OTHER; note = 2'-O-methylcytidine-3'-phosphate
  modified_base 14: mod_base = OTHER; note = 2'-O-methyladenosine-3'-phosphate
  modified_base 15: mod_base = OTHER; note = 2'-O-methyladenosine-3'-phosphate
  modified_base 16: mod_base = OTHER; note = 2'-O-methylcytidine-3'-phosphate
  modified_base 17: mod_base = OTHER; note = 2'-O-methylcytidine-3'-phosphate
  modified_base 18: mod_base = OTHER; note = 2'-O-methyluridine-3'-phosphate
  modified_base 19: mod_base = OTHER; note = 2'-O-methylcytidine-3'-phosphorothioate
  modified_base 20: mod_base = OTHER; note = 2'-O-methyluridine-3'-phosphorothioate
  modified_base 21: mod_base = OTHER; note = 2'-O-methyladenosine
gcagacgctcaccaacctcta

SEQ ID NO: 750 - RNA, 21 nt, synthetic construct
  source 1..21: mol_type = other RNA
  modified_base 1: mod_base = OTHER; note = 2'-O-methylcytidine-3'-phosphorothioate
  modified_base 2: mod_base = OTHER; note = 2'-O-methyluridine-3'-phosphorothioate
  modified_base 3: mod_base = OTHER; note = 2'-O-methyluridine-3'-phosphate
  modified_base 4: mod_base = OTHER; note = 2'-O-methylcytidine-3'-phosphate
  modified_base 5: mod_base = OTHER; note = 2'-O-methylcytidine-3'-phosphate
  modified_base 6: mod_base = OTHER; note = 2'-O-docosanyl-adenosine-3'-phosphate
  modified_base 7: mod_base = OTHER; note = 2'-deoxy-2'-fluoroguanosine-3'-phosphate
  modified_base 8: mod_base = OTHER; note = 2'-O-methylguanosine-3'-phosphate
  modified_base 9: mod_base = OTHER; note = 2'-deoxy-2'-fluoroguanosine-3'-phosphate
  modified_base 10: mod_base = OTHER; note = 2'-deoxy-2'-fluoroadenosine-3'-phosphate
  modified_base 11: mod_base = OTHER; note = 2'-deoxy-2'-fluorocytidine-3'-phosphate
  modified_base 12: mod_base = OTHER; note = 2'-O-methyluridine-3'-phosphate
  modified_base 13: mod_base = OTHER; note = 2'-O-methylguanosine-3'-phosphate
  modified_base 14: mod_base = OTHER; note = 2'-O-methylcytidine-3'-phosphate
  modified_base 15: mod_base = OTHER; note = 2'-O-methyluridine-3'-phosphate
  modified_base 16: mod_base = OTHER; note = 2'-O-methylcytidine-3'-phosphate
  modified_base 17: mod_base = OTHER; note = 2'-O-methyluridine-3'-phosphate
  modified_base 18: mod_base = OTHER; note = 2'-O-methylguanosine-3'-phosphate
  modified_base 19: mod_base = OTHER; note = 2'-O-methylcytidine-3'-phosphorothioate
  modified_base 20: mod_base = OTHER; note = 2'-O-methyluridine-3'-phosphorothioate
  modified_base 21: mod_base = OTHER; note = 2'-O-methyladenosine
cttccagggactgctctgcta

SEQ ID NO: 751 - RNA, 21 nt, synthetic construct
  source 1..21: mol_type = other RNA
  modified_base 1: mod_base = OTHER; note = 2'-O-methylcytidine-3'-phosphorothioate
  modified_base 2: mod_base = OTHER; note = 2'-O-methyluridine-3'-phosphorothioate
  modified_base 3: mod_base = OTHER; note = 2'-O-methyluridine-3'-phosphate
  modified_base 4: mod_base = OTHER; note = 2'-O-methylcytidine-3'-phosphate
  modified_base 5: mod_base = OTHER; note = 2'-O-methyladenosine-3'-phosphate
  modified_base 6: mod_base = OTHER; note = 2'-O-docosanyl-uridine-3'-phosphate
  modified_base 7: mod_base = OTHER; note = 2'-deoxy-2'-fluorocytidine-3'-phosphate
  modified_base 8: mod_base = OTHER; note = 2'-O-methyladenosine-3'-phosphate
  modified_base 9: mod_base = OTHER; note = 2'-deoxy-2'-fluorouridine-3'-phosphate
  modified_base 10: mod_base = OTHER; note = 2'-deoxy-2'-fluoroguanosine-3'-phosphate
  modified_base 11: mod_base = OTHER; note = 2'-deoxy-2'-fluorouridine-3'-phosphate
  modified_base 12: mod_base = OTHER; note = 2'-O-methylcytidine-3'-phosphate
  modified_base 13: mod_base = OTHER; note = 2'-O-methylcytidine-3'-phosphate
  modified_base 14: mod_base = OTHER; note = 2'-O-methylcytidine-3'-phosphate
  modified_base 15: mod_base = OTHER; note = 2'-O-methyluridine-3'-phosphate
  modified_base 16: mod_base = OTHER; note = 2'-O-methylguanosine-3'-phosphate
  modified_base 17: mod_base = OTHER; note = 2'-O-methylguanosine-3'-phosphate
  modified_base 18: mod_base = OTHER; note = 2'-O-methylcytidine-3'-phosphate
  modified_base 19: mod_base = OTHER; note = 2'-O-methylcytidine-3'-phosphorothioate
  modified_base 20: mod_base = OTHER; note = 2'-O-methyladenosine-3'-phosphorothioate
  modified_base 21: mod_base = OTHER; note = 2'-O-methyladenosine
cttcatcatgtccctggccaa

SEQ ID NO: 752 - RNA, 21 nt, synthetic construct
  source 1..21: mol_type = other RNA
  modified_base 1: mod_base = OTHER; note = 2'-O-methyladenosine-3'-phosphorothioate
  modified_base 2: mod_base = OTHER; note = 2'-O-methyladenosine-3'-phosphorothioate
  modified_base 3: mod_base = OTHER; note = 2'-O-methyladenosine-3'-phosphate
  modified_base 4: mod_base = OTHER; note = 2'-O-methylcytidine-3'-phosphate
  modified_base 5: mod_base = OTHER; note = 2'-O-methyladenosine-3'-phosphate
  modified_base 6: mod_base = OTHER; note = 2'-O-docosanyl-uridine-3'-phosphate
  modified_base 7: mod_base = OTHER; note = 2'-deoxy-2'-fluoroguanosine-3'-phosphate
  modified_base 8: mod_base = OTHER; note = 2'-O-methylcytidine-3'-phosphate
  modified_base 9: mod_base = OTHER; note = 2'-deoxy-2'-fluorouridine-3'-phosphate
  modified_base 10: mod_base = OTHER; note = 2'-deoxy-2'-fluoroguanosine-3'-phosphate
  modified_base 11: mod_base = OTHER; note = 2'-deoxy-2'-fluoroadenosine-3'-phosphate
  modified_base 12: mod_base = OTHER; note = 2'-O-methyladenosine-3'-phosphate
  modified_base 13: mod_base = OTHER; note = 2'-O-methylguanosine-3'-phosphate
  modified_base 14: mod_base = OTHER; note = 2'-O-methyluridine-3'-phosphate
  modified_base 15: mod_base = OTHER; note = 2'-O-methylcytidine-3'-phosphate
  modified_base 16: mod_base = OTHER; note = 2'-O-methylcytidine-3'-phosphate
  modified_base 17: mod_base = OTHER; note = 2'-O-methylcytidine-3'-phosphate
  modified_base 18: mod_base = OTHER; note = 2'-O-methylguanosine-3'-phosphate
  modified_base 19: mod_base = OTHER; note = 2'-O-methylguanosine-3'-phosphorothioate
  modified_base 20: mod_base = OTHER; note = 2'-O-methylcytidine-3'-phosphorothioate
  modified_base 21: mod_base = OTHER; note = 2'-O-methyladenosine
aaacatgctgaagtcccggca

SEQ ID NO: 753 - RNA, 21 nt, synthetic construct
  source 1..21: mol_type = other RNA
  modified_base 1: mod_base = OTHER; note = 2'-O-methyladenosine-3'-phosphorothioate
  modified_base 2: mod_base = OTHER; note = 2'-O-methyladenosine-3'-phosphorothioate
  modified_base 3: mod_base = OTHER; note = 2'-O-methylguanosine-3'-phosphate
  modified_base 4: mod_base = OTHER; note = 2'-O-methylguanosine-3'-phosphate
  modified_base 5: mod_base = OTHER; note = 2'-O-methylcytidine-3'-phosphate
  modified_base 6: mod_base = OTHER; note = 2'-O-docosanyl-cytidine-3'-phosphate
  modified_base 7: mod_base = OTHER; note = 2'-deoxy-2'-fluorouridine-3'-phosphate
  modified_base 8: mod_base = OTHER; note = 2'-O-methyluridine-3'-phosphate
  modified_base 9: mod_base = OTHER; note = 2'-deoxy-2'-fluorocytidine-3'-phosphate
  modified_base 10: mod_base = OTHER; note = 2'-deoxy-2'-fluorocytidine-3'-phosphate
  modified_base 11: mod_base = OTHER; note = 2'-deoxy-2'-fluoroadenosine-3'-phosphate
  modified_base 12: mod_base = OTHER; note = 2'-O-methylcytidine-3'-phosphate
  modified_base 13: mod_base = OTHER; note = 2'-O-methylcytidine-3'-phosphate
  modified_base 14: mod_base = OTHER; note = 2'-O-methylguanosine-3'-phosphate
  modified_base 15: mod_base = OTHER; note = 2'-O-methylcytidine-3'-phosphate
  modified_base 16: mod_base = OTHER; note = 2'-O-methylguanosine-3'-phosphate
  modified_base 17: mod_base = OTHER; note = 2'-O-methyladenosine-3'-phosphate
  modified_base 18: mod_base = OTHER; note = 2'-O-methylguanosine-3'-phosphate
  modified_base 19: mod_base = OTHER; note = 2'-O-methylcytidine-3'-phosphorothioate
  modified_base 20: mod_base = OTHER; note = 2'-O-methyluridine-3'-phosphorothioate
  modified_base 21: mod_base = OTHER; note = 2'-O-methyladenosine
aaggccttccaccgcgagcta

SEQ ID NO: 754 - RNA, 21 nt, synthetic construct
  source 1..21: mol_type = other RNA
  modified_base 1: mod_base = OTHER; note = 2'-O-methylcytidine-3'-phosphorothioate
  modified_base 2: mod_base = OTHER; note = 2'-O-methyladenosine-3'-phosphorothioate
  modified_base 3: mod_base = OTHER; note = 2'-O-methylguanosine-3'-phosphate
  modified_base 4: mod_base = OTHER; note = 2'-O-methylguanosine-3'-phosphate
  modified_base 5: mod_base = OTHER; note = 2'-O-methylcytidine-3'-phosphate
  modified_base 6: mod_base = OTHER; note = 2'-O-docosanyl-guanosine-3'-phosphate
  modified_base 7: mod_base = OTHER; note = 2'-deoxy-2'-fluorocytidine-3'-phosphate
  modified_base 8: mod_base = OTHER; note = 2'-O-methyladenosine-3'-phosphate
  modified_base 9: mod_base = OTHER; note = 2'-deoxy-2'-fluoroguanosine-3'-phosphate
  modified_base 10: mod_base = OTHER; note = 2'-deoxy-2'-fluoroadenosine-3'-phosphate
  modified_base 11: mod_base = OTHER; note = 2'-deoxy-2'-fluoroguanosine-3'-phosphate
  modified_base 12: mod_base = OTHER; note = 2'-O-methylcytidine-3'-phosphate
  modified_base 13: mod_base = OTHER; note = 2'-O-methylcytidine-3'-phosphate
  modified_base 14: mod_base = OTHER; note = 2'-O-methyluridine-3'-phosphate
  modified_base 15: mod_base = OTHER; note = 2'-O-methylcytidine-3'-phosphate
  modified_base 16: mod_base = OTHER; note = 2'-O-methyluridine-3'-phosphate
  modified_base 17: mod_base = OTHER; note = 2'-O-methylcytidine-3'-phosphate
  modified_base 18: mod_base = OTHER; note = 2'-O-methyluridine-3'-phosphate
  modified_base 19: mod_base = OTHER; note = 2'-O-methylcytidine-3'-phosphorothioate
  modified_base 20: mod_base = OTHER; note = 2'-O-methyluridine-3'-phosphorothioate
  modified_base 21: mod_base = OTHER; note = 2'-O-methyladenosine
caggcgcagagcctctctcta

SEQ ID NO: 755 - RNA, 21 nt, synthetic construct
  source 1..21: mol_type = other RNA
  modified_base 1: mod_base = OTHER; note = 2'-O-methylcytidine-3'-phosphorothioate
  modified_base 2: mod_base = OTHER; note = 2'-O-methylguanosine-3'-phosphorothioate
  modified_base 3: mod_base = OTHER; note = 2'-O-methyladenosine-3'-phosphate
  modified_base 4: mod_base = OTHER; note = 2'-O-methylguanosine-3'-phosphate
  modified_base 5: mod_base = OTHER; note = 2'-O-methylcytidine-3'-phosphate
  modified_base 6: mod_base = OTHER; note = 2'-O-docosanyl-cytidine-3'-phosphate
  modified_base 7: mod_base = OTHER; note = 2'-deoxy-2'-fluorocytidine-3'-phosphate
  modified_base 8: mod_base = OTHER; note = 2'-O-methylguanosine-3'-phosphate
  modified_base 9: mod_base = OTHER; note = 2'-deoxy-2'-fluoroguanosine-3'-phosphate
  modified_base 10: mod_base = OTHER; note = 2'-deoxy-2'-fluorouridine-3'-phosphate
  modified_base 11: mod_base = OTHER; note = 2'-deoxy-2'-fluoroadenosine-3'-phosphate
  modified_base 12: mod_base = OTHER; note = 2'-O-methyladenosine-3'-phosphate
  modified_base 13: mod_base = OTHER; note = 2'-O-methylcytidine-3'-phosphate
  modified_base 14: mod_base = OTHER; note = 2'-O-methylcytidine-3'-phosphate
  modified_base 15: mod_base = OTHER; note = 2'-O-methyluridine-3'-phosphate
  modified_base 16: mod_base = OTHER; note = 2'-O-methylguanosine-3'-phosphate
  modified_base 17: mod_base = OTHER; note = 2'-O-methyluridine-3'-phosphate
  modified_base 18: mod_base = OTHER; note = 2'-O-methylcytidine-3'-phosphate
  modified_base 19: mod_base = OTHER; note = 2'-O-methylguanosine-3'-phosphorothioate
  modified_base 20: mod_base = OTHER; note = 2'-O-methyluridine-3'-phosphorothioate
  modified_base 21: mod_base = OTHER; note = 2'-O-methyladenosine
cgagcccggtaacctgtcgta

SEQ ID NO: 756 - RNA, 21 nt, synthetic construct
  source 1..21: mol_type = other RNA
  modified_base 1: mod_base = OTHER; note = 2'-O-methylcytidine-3'-phosphorothioate
  modified_base 2: mod_base = OTHER; note = 2'-O-methyluridine-3'-phosphorothioate
  modified_base 3: mod_base = OTHER; note = 2'-O-methylguanosine-3'-phosphate
  modified_base 4: mod_base = OTHER; note = 2'-O-methyluridine-3'-phosphate
  modified_base 5: mod_base = OTHER; note = 2'-O-methylguanosine-3'-phosphate
  modified_base 6: mod_base = OTHER; note = 2'-O-docosanyl-guanosine-3'-phosphate
  modified_base 7: mod_base = OTHER; note = 2'-deoxy-2'-fluoroadenosine-3'-phosphate
  modified_base 8: mod_base = OTHER; note = 2'-O-methylcytidine-3'-phosphate
  modified_base 9: mod_base = OTHER; note = 2'-deoxy-2'-fluorocytidine-3'-phosphate
  modified_base 10: mod_base = OTHER; note = 2'-deoxy-2'-fluorouridine-3'-phosphate
  modified_base 11: mod_base = OTHER; note = 2'-deoxy-2'-fluorocytidine-3'-phosphate
  modified_base 12: mod_base = OTHER; note = 2'-O-methyladenosine-3'-phosphate
  modified_base 13: mod_base = OTHER; note = 2'-O-methylguanosine-3'-phosphate
  modified_base 14: mod_base = OTHER; note = 2'-O-methyluridine-3'-phosphate
  modified_base 15: mod_base = OTHER; note = 2'-O-methylguanosine-3'-phosphate
  modified_base 16: mod_base = OTHER; note = 2'-O-methylguanosine-3'-phosphate
  modified_base 17: mod_base = OTHER; note = 2'-O-methyladenosine-3'-phosphate
  modified_base 18: mod_base = OTHER; note = 2'-O-methylcytidine-3'-phosphate
  modified_base 19: mod_base = OTHER; note = 2'-O-methylguanosine-3'-phosphorothioate
  modified_base 20: mod_base = OTHER; note = 2'-O-methyluridine-3'-phosphorothioate
  modified_base 21: mod_base = OTHER; note = 2'-O-methyladenosine
ctgtggacctcagtggacgta

SEQ ID NO: 757 - RNA, 21 nt, synthetic construct
  source 1..21: mol_type = other RNA
  modified_base 1: mod_base = OTHER; note = 2'-O-methylguanosine-3'-phosphorothioate
  modified_base 2: mod_base = OTHER; note = 2'-O-methylcytidine-3'-phosphorothioate
  modified_base 3: mod_base = OTHER; note = 2'-O-methylcytidine-3'-phosphate
  modified_base 4: mod_base = OTHER; note = 2'-O-methyladenosine-3'-phosphate
  modified_base 5: mod_base = OTHER; note = 2'-O-methylcytidine-3'-phosphate
  modified_base 6: mod_base = OTHER; note = 2'-O-docosanyl-guanosine-3'-phosphate
  modified_base 7: mod_base = OTHER; note = 2'-deoxy-2'-fluoroguanosine-3'-phosphate
  modified_base 8: mod_base = OTHER; note = 2'-O-methyladenosine-3'-phosphate
  modified_base 9: mod_base = OTHER; note = 2'-deoxy-2'-fluorocytidine-3'-phosphate
  modified_base 10: mod_base = OTHER; note = 2'-deoxy-2'-fluorocytidine-3'-phosphate
  modified_base 11: mod_base = OTHER; note = 2'-deoxy-2'-fluoroguanosine-3'-phosphate
  modified_base 12: mod_base = OTHER; note = 2'-O-methyluridine-3'-phosphate
  modified_base 13: mod_base = OTHER; note = 2'-O-methyluridine-3'-phosphate
  modified_base 14: mod_base = OTHER; note = 2'-O-methylguanosine-3'-phosphate
  modified_base 15: mod_base = OTHER; note = 2'-O-methylcytidine-3'-phosphate
  modified_base 16: mod_base = OTHER; note = 2'-O-methyladenosine-3'-phosphate
  modified_base 17: mod_base = OTHER; note = 2'-O-methylcytidine-3'-phosphate
  modified_base 18: mod_base = OTHER; note = 2'-O-methyladenosine-3'-phosphate
  modified_base 19: mod_base = OTHER; note = 2'-O-methyladenosine-3'-phosphorothioate
  modified_base 20: mod_base = OTHER; note = 2'-O-methyladenosine-3'-phosphorothioate
  modified_base 21: mod_base = OTHER; note = 2'-O-methyladenosine
gccacggaccgttgcacaaaa

SEQ ID NO: 758 - RNA, 21 nt, synthetic construct
  source 1..21: mol_type = other RNA
  modified_base 1: mod_base = OTHER; note = 2'-O-methyladenosine-3'-phosphorothioate
  modified_base 2: mod_base = OTHER; note = 2'-O-methylcytidine-3'-phosphorothioate
  modified_base 3: mod_base = OTHER; note = 2'-O-methylcytidine-3'-phosphate
  modified_base 4: mod_base = OTHER; note = 2'-O-methyluridine-3'-phosphate
  modified_base 5: mod_base = OTHER; note = 2'-O-methylcytidine-3'-phosphate
  modified_base 6: mod_base = OTHER; note = 2'-O-docosanyl-guanosine-3'-phosphate
  modified_base 7: mod_base = OTHER; note = 2'-deoxy-2'-fluorocytidine-3'-phosphate
  modified_base 8: mod_base = OTHER; note = 2'-O-methylcytidine-3'-phosphate
  modified_base 9: mod_base = OTHER; note = 2'-deoxy-2'-fluorocytidine-3'-phosphate
  modified_base 10: mod_base = OTHER; note = 2'-deoxy-2'-fluorouridine-3'-phosphate
  modified_base 11: mod_base = OTHER; note = 2'-deoxy-2'-fluorouridine-3'-phosphate
  modified_base 12: mod_base = OTHER; note = 2'-O-methylcytidine-3'-phosphate
  modified_base 13: mod_base = OTHER; note = 2'-O-methylcytidine-3'-phosphate
  modified_base 14: mod_base = OTHER; note = 2'-O-methylguanosine-3'-phosphate
  modified_base 15: mod_base = OTHER; note = 2'-O-methylcytidine-3'-phosphate
  modified_base 16: mod_base = OTHER; note = 2'-O-methyluridine-3'-phosphate
  modified_base 17: mod_base = OTHER; note = 2'-O-methyladenosine-3'-phosphate
  modified_base 18: mod_base = OTHER; note = 2'-O-methylcytidine-3'-phosphate
  modified_base 19: mod_base = OTHER; note = 2'-O-methylcytidine-3'-phosphorothioate
  modified_base 20: mod_base = OTHER; note = 2'-O-methyladenosine-3'-phosphorothioate
  modified_base 21: mod_base = OTHER; note = 2'-O-methyladenosine
acctcgcccttccgctaccaa

SEQ ID NO: 759 - RNA, 21 nt, synthetic construct
  source 1..21: mol_type = other RNA
  modified_base 1: mod_base = OTHER; note = 2'-O-methyluridine-3'-phosphorothioate
  modified_base 2: mod_base = OTHER; note = 2'-O-methylcytidine-3'-phosphorothioate
  modified_base 3: mod_base = OTHER; note = 2'-O-methyladenosine-3'-phosphate
  modified_base 4: mod_base = OTHER; note = 2'-O-methyladenosine-3'-phosphate
  modified_base 5: mod_base = OTHER; note = 2'-O-methylguanosine-3'-phosphate
  modified_base 6: mod_base = OTHER; note = 2'-O-docosanyl-adenosine-3'-phosphate
  modified_base 7: mod_base = OTHER; note = 2'-deoxy-2'-fluorocytidine-3'-phosphate
  modified_base 8: mod_base = OTHER; note = 2'-O-methylguanosine-3'-phosphate
  modified_base 9: mod_base = OTHER; note = 2'-deoxy-2'-fluorocytidine-3'-phosphate
  modified_base 10: mod_base = OTHER; note = 2'-deoxy-2'-fluorouridine-3'-phosphate
  modified_base 11: mod_base = OTHER; note = 2'-deoxy-2'-fluoroguanosine-3'-phosphate
  modified_base 12: mod_base = OTHER; note = 2'-O-methylguanosine-3'-phosphate
  modified_base 13: mod_base = OTHER; note = 2'-O-methylguanosine-3'-phosphate
  modified_base 14: mod_base = OTHER; note = 2'-O-methylcytidine-3'-phosphate
  modified_base 15: mod_base = OTHER; note = 2'-O-methyladenosine-3'-phosphate
  modified_base 16: mod_base = OTHER; note = 2'-O-methyluridine-3'-phosphate
  modified_base 17: mod_base = OTHER; note = 2'-O-methylcytidine-3'-phosphate
  modified_base 18: mod_base = OTHER; note = 2'-O-methyladenosine-3'-phosphate
  modified_base 19: mod_base = OTHER; note = 2'-O-methyluridine-3'-phosphorothioate
  modified_base 20: mod_base = OTHER; note = 2'-O-methylcytidine-3'-phosphorothioate
  modified_base 21: mod_base = OTHER; note = 2'-O-methyladenosine
tcaagacgctgggcatcatca

SEQ ID NO: 760 - RNA, 21 nt, synthetic construct
  source 1..21: mol_type = other RNA
  modified_base 1: mod_base = OTHER; note = 2'-O-methylguanosine-3'-phosphorothioate
  modified_base 2: mod_base = OTHER; note = 2'-O-methylguanosine-3'-phosphorothioate
  modified_base 3: mod_base = OTHER; note = 2'-O-methyladenosine-3'-phosphate
  modified_base 4: mod_base = OTHER; note = 2'-O-methylguanosine-3'-phosphate
  modified_base 5: mod_base = OTHER; note = 2'-O-methyladenosine-3'-phosphate
  modified_base 6: mod_base = OTHER; note = 2'-O-docosanyl-guanosine-3'-phosphate
  modified_base 7: mod_base = OTHER; note = 2'-deoxy-2'-fluorouridine-3'-phosphate
  modified_base 8: mod_base = OTHER; note = 2'-O-methylguanosine-3'-phosphate
  modified_base 9: mod_base = OTHER; note = 2'-deoxy-2'-fluoroguanosine-3'-phosphate
  modified_base 10: mod_base = OTHER; note = 2'-deoxy-2'-fluorocytidine-3'-phosphate
  modified_base 11: mod_base = OTHER; note = 2'-deoxy-2'-fluorouridine-3'-phosphate
  modified_base 12: mod_base = OTHER; note = 2'-O-methyluridine-3'-phosphate
  modified_base 13: mod_base = OTHER; note = 2'-O-methylguanosine-3'-phosphate
  modified_base 14: mod_base = OTHER; note = 2'-O-methylcytidine-3'-phosphate
  modified_base 15: mod_base = OTHER; note = 2'-O-methyluridine-3'-phosphate
  modified_base 16: mod_base = OTHER; note = 2'-O-methylguanosine-3'-phosphate
  modified_base 17: mod_base = OTHER; note = 2'-O-methyladenosine-3'-phosphate
  modified_base 18: mod_base = OTHER; note = 2'-O-methyluridine-3'-phosphate
  modified_base 19: mod_base = OTHER; note = 2'-O-methylguanosine-3'-phosphorothioate
  modified_base 20: mod_base = OTHER; note = 2'-O-methyluridine-3'-phosphorothioate
  modified_base 21: mod_base = OTHER; note = 2'-O-methyladenosine
ggagagtggcttgctgatgta

SEQ ID NO: 761 - RNA, 21 nt, synthetic construct
  source 1..21: mol_type = other RNA
  modified_base 1: mod_base = OTHER; note = 2'-O-methylcytidine-3'-phosphorothioate
  modified_base 2: mod_base = OTHER; note = 2'-O-methyluridine-3'-phosphorothioate
  modified_base 3: mod_base = OTHER; note = 2'-O-methylguanosine-3'-phosphate
  modified_base 4: mod_base = OTHER; note = 2'-O-methylcytidine-3'-phosphate
  modified_base 5: mod_base = OTHER; note = 2'-O-methyluridine-3'-phosphate
  modified_base 6: mod_base = OTHER; note = 2'-O-docosanyl-cytidine-3'-phosphate
  modified_base 7: mod_base = OTHER; note = 2'-deoxy-2'-fluoroadenosine-3'-phosphate
  modified_base 8: mod_base = OTHER; note = 2'-O-methyluridine-3'-phosphate
  modified_base 9: mod_base = OTHER; note = 2'-deoxy-2'-fluorocytidine-3'-phosphate
  modified_base 10: mod_base = OTHER; note = 2'-deoxy-2'-fluoroguanosine-3'-phosphate
  modified_base 11: mod_base = OTHER; note = 2'-deoxy-2'-fluorouridine-3'-phosphate
  modified_base 12: mod_base = OTHER; note = 2'-O-methylguanosine-3'-phosphate
  modified_base 13: mod_base = OTHER; note = 2'-O-methylguanosine-3'-phosphate
  modified_base 14: mod_base = OTHER; note = 2'-O-methylcytidine-3'-phosphate
  modified_base 15: mod_base = OTHER; note = 2'-O-methylguanosine-3'-phosphate
  modified_base 16: mod_base = OTHER; note = 2'-O-methylguanosine-3'-phosphate
  modified_base 17: mod_base = OTHER; note = 2'-O-methylguanosine-3'-phosphate
  modified_base 18: mod_base = OTHER; note = 2'-O-methylcytidine-3'-phosphate
  modified_base 19: mod_base = OTHER; note = 2'-O-methyladenosine-3'-phosphorothioate
  modified_base 20: mod_base = OTHER; note = 2'-O-methyladenosine-3'-phosphorothioate
  modified_base 21: mod_base = OTHER; note = 2'-O-methyladenosine
ctgctcatcgtggcgggcaaa

SEQ ID NO: 762 - RNA, 21 nt, synthetic construct
  source 1..21: mol_type = other RNA
  modified_base 1: mod_base = OTHER; note = 2'-O-methyladenosine-3'-phosphorothioate
  modified_base 2: mod_base = OTHER; note = 2'-O-methylcytidine-3'-phosphorothioate
  modified_base 3: mod_base = OTHER; note = 2'-O-methylcytidine-3'-phosphate
  modified_base 4: mod_base = OTHER; note = 2'-O-methyladenosine-3'-phosphate
  modified_base 5: mod_base = OTHER; note = 2'-O-methylguanosine-3'-phosphate
  modified_base 6: mod_base = OTHER; note = 2'-O-docosanyl-cytidine-3'-phosphate
  modified_base 7: mod_base = OTHER; note = 2'-deoxy-2'-fluorocytidine-3'-phosphate
  modified_base 8: mod_base = OTHER; note = 2'-O-methyladenosine-3'-phosphate
  modified_base 9: mod_base = OTHER; note = 2'-deoxy-2'-fluoroguanosine-3'-phosphate
  modified_base 10: mod_base = OTHER; note = 2'-deoxy-2'-fluoroadenosine-3'-phosphate
  modified_base 11: mod_base = OTHER; note = 2'-deoxy-2'-fluoroguanosine-3'-phosphate
  modified_base 12: mod_base = OTHER; note = 2'-O-methyladenosine-3'-phosphate
  modified_base 13: mod_base = OTHER; note = 2'-O-methylguanosine-3'-phosphate
  modified_base 14: mod_base = OTHER; note = 2'-O-methyladenosine-3'-phosphate
  modified_base 15: mod_base = OTHER; note = 2'-O-methylguanosine-3'-phosphate
  modified_base 16: mod_base = OTHER; note = 2'-O-methylguanosine-3'-phosphate
  modified_base 17: mod_base = OTHER; note = 2'-O-methyladenosine-3'-phosphate
  modified_base 18: mod_base = OTHER; note = 2'-O-methylguanosine-3'-phosphate
  modified_base 19: mod_base = OTHER; note = 2'-O-methyladenosine-3'-phosphorothioate
  modified_base 20: mod_base = OTHER; note = 2'-O-methyladenosine-3'-phosphorothioate
  modified_base 21: mod_base = OTHER; note = 2'-O-methyladenosine
accagccagagagaggagaaa

SEQ ID NO: 763 - RNA, 21 nt, synthetic construct
  source 1..21: mol_type = other RNA
  modified_base 1: mod_base = OTHER; note = 2'-O-methylguanosine-3'-phosphorothioate
  modified_base 2: mod_base = OTHER; note = 2'-O-methylcytidine-3'-phosphorothioate
  modified_base 3: mod_base = OTHER; note = 2'-O-methyluridine-3'-phosphate
  modified_base 4: mod_base = OTHER; note = 2'-O-methylguanosine-3'-phosphate
  modified_base 5: mod_base = OTHER; note = 2'-O-methylguanosine-3'-phosphate
  modified_base 6: mod_base = OTHER; note = 2'-O-docosanyl-uridine-3'-phosphate
  modified_base 7: mod_base = OTHER; note = 2'-deoxy-2'-fluoroguanosine-3'-phosphate
  modified_base 8: mod_base = OTHER; note = 2'-O-methyladenosine-3'-phosphate
  modified_base 9: mod_base = OTHER; note = 2'-deoxy-2'-fluorouridine-3'-phosphate
  modified_base 10: mod_base = OTHER; note = 2'-deoxy-2'-fluorocytidine-3'-phosphate
  modified_base 11: mod_base = OTHER; note = 2'-deoxy-2'-fluoroguanosine-3'-phosphate
  modified_base 12: mod_base = OTHER; note = 2'-O-methyluridine-3'-phosphate
  modified_base 13: mod_base = OTHER; note = 2'-O-methylguanosine-3'-phosphate
  modified_base 14: mod_base = OTHER; note = 2'-O-methylguanosine-3'-phosphate
  modified_base 15: mod_base = OTHER; note = 2'-O-methylcytidine-3'-phosphate
  modified_base 16: mod_base = OTHER; note = 2'-O-methylcytidine-3'-phosphate
  modified_base 17: mod_base = OTHER; note = 2'-O-methyladenosine-3'-phosphate
  modified_base 18: mod_base = OTHER; note = 2'-O-methyluridine-3'-phosphate
  modified_base 19: mod_base = OTHER; note = 2'-O-methylcytidine-3'-phosphorothioate
  modified_base 20: mod_base = OTHER; note = 2'-O-methylguanosine-3'-phosphorothioate
  modified_base 21: mod_base = OTHER; note = 2'-O-methyladenosine
gctggtgatcgtggccatcga

SEQ ID NO: 764 - RNA, 21 nt, synthetic construct
  source 1..21: mol_type = other RNA
  modified_base 1: mod_base = OTHER; note = 2'-O-methyladenosine-3'-phosphorothioate
  modified_base 2: mod_base = OTHER; note = 2'-O-methyladenosine-3'-phosphorothioate
  modified_base 3: mod_base = OTHER; note = 2'-O-methylguanosine-3'-phosphate
  modified_base 4: mod_base = OTHER; note = 2'-O-methyluridine-3'-phosphate
  modified_base 5: mod_base = OTHER; note = 2'-O-methylcytidine-3'-phosphate
  modified_base 6: mod_base = OTHER; note = 2'-O-docosanyl-cytidine-3'-phosphate
  modified_base 7: mod_base = OTHER; note = 2'-deoxy-2'-fluorocytidine-3'-phosphate
  modified_base 8: mod_base = OTHER; note = 2'-O-methylguanosine-3'-phosphate
  modified_base 9: mod_base = OTHER; note = 2'-deoxy-2'-fluoroguanosine-3'-phosphate
  modified_base 10: mod_base = OTHER; note = 2'-deoxy-2'-fluorocytidine-3'-phosphate
  modified_base 11: mod_base = OTHER; note = 2'-deoxy-2'-fluoroguanosine-3'-phosphate
  modified_base 12: mod_base = OTHER; note = 2'-O-methylguanosine-3'-phosphate
  modified_base 13: mod_base = OTHER; note = 2'-O-methylcytidine-3'-phosphate
  modified_base 14: mod_base = OTHER; note = 2'-O-methyluridine-3'-phosphate
  modified_base 15: mod_base = OTHER; note = 2'-O-methylcytidine-3'-phosphate
  modified_base 16: mod_base = OTHER; note = 2'-O-methyluridine-3'-phosphate
  modified_base 17: mod_base = OTHER; note = 2'-O-methyluridine-3'-phosphate
  modified_base 18: mod_base = OTHER; note = 2'-O-methylcytidine-3'-phosphate
  modified_base 19: mod_base = OTHER; note = 2'-O-methylcytidine-3'-phosphorothioate
  modified_base 20: mod_base = OTHER; note = 2'-O-methyladenosine-3'-phosphorothioate
  modified_base 21: mod_base = OTHER; note = 2'-O-methyladenosine
aagtcccggcggctcttccaa

SEQ ID NO: 765 - RNA, 21 nt, synthetic construct
  source 1..21: mol_type = other RNA
  modified_base 1: mod_base = OTHER; note = 2'-O-methylguanosine-3'-phosphorothioate
  modified_base 2: mod_base = OTHER; note = 2'-O-methylguanosine-3'-phosphorothioate
  modified_base 3: mod_base = OTHER; note = 2'-O-methyluridine-3'-phosphate
  modified_base 4: mod_base = OTHER; note = 2'-O-methylcytidine-3'-phosphate
  modified_base 5: mod_base = OTHER; note = 2'-O-methyladenosine-3'-phosphate
  modified_base 6: mod_base = OTHER; note = 2'-O-docosanyl-guanosine-3'-phosphate
  modified_base 7: mod_base = OTHER; note = 2'-deoxy-2'-fluoroguanosine-3'-phosphate
  modified_base 8: mod_base = OTHER; note = 2'-O-methylcytidine-3'-phosphate
  modified_base 9: mod_base = OTHER; note = 2'-deoxy-2'-fluorouridine-3'-phosphate
  modified_base 10: mod_base = OTHER; note = 2'-deoxy-2'-fluoroguanosine-3'-phosphate
  modified_base 11: mod_base = OTHER; note = 2'-deoxy-2'-fluoroadenosine-3'-phosphate
  modified_base 12: mod_base = OTHER; note = 2'-O-methylguanosine-3'-phosphate
  modified_base 13: mod_base = OTHER; note = 2'-O-methylguanosine-3'-phosphate
  modified_base 14: mod_base = OTHER; note = 2'-O-methylguanosine-3'-phosphate
  modified_base 15: mod_base = OTHER; note = 2'-O-methyladenosine-3'-phosphate
  modified_base 16: mod_base = OTHER; note = 2'-O-methyluridine-3'-phosphate
  modified_base 17: mod_base = OTHER; note = 2'-O-methyluridine-3'-phosphate
  modified_base 18: mod_base = OTHER; note = 2'-O-methyluridine-3'-phosphate
  modified_base 19: mod_base = OTHER; note = 2'-O-methylcytidine-3'-phosphorothioate
  modified_base 20: mod_base = OTHER; note = 2'-O-methyluridine-3'-phosphorothioate
  modified_base 21: mod_base = OTHER; note = 2'-O-methyladenosine
ggtcaggctgagggatttcta

SEQ ID NO: 766 - RNA, 21 nt, synthetic construct
  source 1..21: mol_type = other RNA
  modified_base 1: mod_base = OTHER; note = 2'-O-methyluridine-3'-phosphorothioate
  modified_base 2: mod_base = OTHER; note = 2'-O-methylcytidine-3'-phosphorothioate
  modified_base 3: mod_base = OTHER; note = 2'-O-methyladenosine-3'-phosphate
  modified_base 4: mod_base = OTHER; note = 2'-O-methylguanosine-3'-phosphate
  modified_base 5: mod_base = OTHER; note = 2'-O-methyluridine-3'-phosphate
  modified_base 6: mod_base = OTHER; note = 2'-O-docosanyl-guanosine-3'-phosphate
  modified_base 7: mod_base = OTHER; note = 2'-deoxy-2'-fluoroguanosine-3'-phosphate
  modified_base 8: mod_base = OTHER; note = 2'-O-methyladenosine-3'-phosphate
  modified_base 9: mod_base = OTHER; note = 2'-deoxy-2'-fluorocytidine-3'-phosphate
  modified_base 10: mod_base = OTHER; note = 2'-deoxy-2'-fluoroguanosine-3'-phosphate
  modified_base 11: mod_base = OTHER; note = 2'-deoxy-2'-fluorouridine-3'-phosphate
  modified_base 12: mod_base = OTHER; note = 2'-O-methylguanosine-3'-phosphate
  modified_base 13: mod_base = OTHER; note = 2'-O-methylcytidine-3'-phosphate
  modified_base 14: mod_base = OTHER; note = 2'-O-methyluridine-3'-phosphate
  modified_base 15: mod_base = OTHER; note = 2'-O-methylguanosine-3'-phosphate
  modified_base 16: mod_base = OTHER; note = 2'-O-methyluridine-3'-phosphate
  modified_base 17: mod_base = OTHER; note = 2'-O-methylguanosine-3'-phosphate
  modified_base 18: mod_base = OTHER; note = 2'-O-methylcytidine-3'-phosphate
  modified_base 19: mod_base = OTHER; note = 2'-O-methylguanosine-3'-phosphorothioate
  modified_base 20: mod_base = OTHER; note = 2'-O-methyluridine-3'-phosphorothioate
  modified_base 21: mod_base = OTHER; note = 2'-O-methyladenosine
tcagtggacgtgctgtgcgta

SEQ ID NO: 767 - RNA, 21 nt, synthetic construct
  source 1..21: mol_type = other RNA
  modified_base 1: mod_base = OTHER; note = 2'-O-methyluridine-3'-phosphorothioate
  modified_base 2: mod_base = OTHER; note = 2'-O-methyladenosine-3'-phosphorothioate
  modified_base 3: mod_base = OTHER; note = 2'-O-methylcytidine-3'-phosphate
  modified_base 4: mod_base = OTHER; note = 2'-O-methylcytidine-3'-phosphate
  modified_base 5: mod_base = OTHER; note = 2'-O-methyluridine-3'-phosphate
  modified_base 6: mod_base = OTHER; note = 2'-O-docosanyl-guanosine-3'-phosphate
  modified_base 7: mod_base = OTHER; note = 2'-deoxy-2'-fluorocytidine-3'-phosphate
  modified_base 8: mod_base = OTHER; note = 2'-O-methylguanosine-3'-phosphate
  modified_base 9: mod_base = OTHER; note = 2'-deoxy-2'-fluoroguanosine-3'-phosphate
  modified_base 10: mod_base = OTHER; note = 2'-deoxy-2'-fluoroguanosine-3'-phosphate
  modified_base 11: mod_base = OTHER; note = 2'-deoxy-2'-fluorouridine-3'-phosphate
  modified_base 12: mod_base = OTHER; note = 2'-O-methylguanosine-3'-phosphate
  modified_base 13: mod_base = OTHER; note = 2'-O-methyluridine-3'-phosphate
  modified_base 14: mod_base = OTHER; note = 2'-O-methyluridine-3'-phosphate
  modified_base 15: mod_base = OTHER; note = 2'-O-methylcytidine-3'-phosphate
  modified_base 16: mod_base = OTHER; note = 2'-O-methylcytidine-3'-phosphate
  modified_base 17: mod_base = OTHER; note = 2'-O-methylguanosine-3'-phosphate
  modified_base 18: mod_base = OTHER; note = 2'-O-methylcytidine-3'-phosphate
  modified_base 19: mod_base = OTHER; note = 2'-O-methylguanosine-3'-phosphorothioate
  modified_base 20: mod_base = OTHER; note = 2'-O-methyladenosine-3'-phosphorothioate
  modified_base 21: mod_base = OTHER; note = 2'-O-methyladenosine
tacctgcgggtgttccgcgaa

SEQ ID NO: 768 - RNA, 21 nt, synthetic construct
  source 1..21: mol_type = other RNA
  modified_base 1: mod_base = OTHER; note = 2'-O-methyluridine-3'-phosphorothioate
  modified_base 2: mod_base = OTHER; note = 2'-O-methyluridine-3'-phosphorothioate
  modified_base 3: mod_base = OTHER; note = 2'-O-methyluridine-3'-phosphate
  modified_base 4: mod_base = OTHER; note = 2'-O-methylcytidine-3'-phosphate
  modified_base 5: mod_base = OTHER; note = 2'-O-methyluridine-3'-phosphate
  modified_base 6: mod_base = OTHER; note = 2'-O-docosanyl-guanosine-3'-phosphate
  modified_base 7: mod_base = OTHER; note = 2'-deoxy-2'-fluorouridine-3'-phosphate
  modified_base 8: mod_base = OTHER; note = 2'-O-methyluridine-3'-phosphate
  modified_base 9: mod_base = OTHER; note = 2'-deoxy-2'-fluorouridine-3'-phosphate
  modified_base 10: mod_base = OTHER; note = 2'-deoxy-2'-fluoroguanosine-3'-phosphate
  modified_base 11: mod_base = OTHER; note = 2'-deoxy-2'-fluorouridine-3'-phosphate
  modified_base 12: mod_base = OTHER; note = 2'-O-methylguanosine-3'-phosphate
  modified_base 13: mod_base = OTHER; note = 2'-O-methylguanosine-3'-phosphate
  modified_base 14: mod_base = OTHER; note = 2'-O-methyluridine-3'-phosphate
  modified_base 15: mod_base = OTHER; note = 2'-O-methylcytidine-3'-phosphate
  modified_base 16: mod_base = OTHER; note = 2'-O-methylcytidine-3'-phosphate
  modified_base 17: mod_base = OTHER; note = 2'-O-methylguanosine-3'-phosphate
  modified_base 18: mod_base = OTHER; note = 2'-O-methylguanosine-3'-phosphate
  modified_base 19: mod_base = OTHER; note = 2'-O-methylcytidine-3'-phosphorothioate
  modified_base 20: mod_base = OTHER; note = 2'-O-methylcytidine-3'-phosphorothioate
  modified_base 21: mod_base = OTHER; note = 2'-O-methyladenosine
tttctgtttgtggtccggcca

SEQ ID NO: 769 - RNA, 21 nt, synthetic construct
  source 1..21: mol_type = other RNA
  modified_base 1: mod_base = OTHER; note = 2'-O-methyladenosine-3'-phosphorothioate
  modified_base 2: mod_base = OTHER; note = 2'-O-methylcytidine-3'-phosphorothioate
  modified_base 3: mod_base = OTHER; note = 2'-O-methylcytidine-3'-phosphate
  modified_base 4: mod_base = OTHER; note = 2'-O-methyladenosine-3'-phosphate
  modified_base 5: mod_base = OTHER; note = 2'-O-methyladenosine-3'-phosphate
  modified_base 6: mod_base = OTHER; note = 2'-O-docosanyl-cytidine-3'-phosphate
  modified_base 7: mod_base = OTHER; note = 2'-deoxy-2'-fluorocytidine-3'-phosphate
  modified_base 8: mod_base = OTHER; note = 2'-O-methylguanosine-3'-phosphate
  modified_base 9: mod_base = OTHER; note = 2'-deoxy-2'-fluoroguanosine-3'-phosphate
  modified_base 10: mod_base = OTHER; note = 2'-deoxy-2'-fluoroguanosine-3'-phosphate
  modified_base 11: mod_base = OTHER; note = 2'-deoxy-2'-fluorocytidine-3'-phosphate
  modified_base 12: mod_base = OTHER; note = 2'-O-methylcytidine-3'-phosphate
  modified_base 13: mod_base = OTHER; note = 2'-O-methyluridine-3'-phosphate
  modified_base 14: mod_base = OTHER; note = 2'-O-methyladenosine-3'-phosphate
  modified_base 15: mod_base = OTHER; note = 2'-O-methylcytidine-3'-phosphate
  modified_base 16: mod_base = OTHER; note = 2'-O-methylguanosine-3'-phosphate
  modified_base 17: mod_base = OTHER; note = 2'-O-methylcytidine-3'-phosphate
  modified_base 18: mod_base = OTHER; note = 2'-O-methylcytidine-3'-phosphate
  modified_base 19: mod_base = OTHER; note = 2'-O-methyladenosine-3'-phosphorothioate
  modified_base 20: mod_base = OTHER; note = 2'-O-methyluridine-3'-phosphorothioate
  modified_base 21: mod_base = OTHER; note = 2'-O-methyladenosine
accaaccgggcctacgccata

SEQ ID NO: 770 - RNA, 23 nt, synthetic construct
  source 1..23: mol_type = other RNA
  modified_base 1: mod_base = OTHER; note = 2'-O-methyluridine-3'-phosphorothioate 5'-(E)-Vinylphosphonate
  modified_base 2: mod_base = OTHER; note = 2'-deoxy-2'-fluoroadenosine-3'-phosphorothioate
  modified_base 3: mod_base = OTHER; note = 2'-O-methylcytidine-3'-phosphate
  modified_base 4: mod_base = OTHER; note = 2'-O-methyladenosine-3'-phosphate
  modified_base 5: mod_base = OTHER; note = 2'-O-methyladenosine-3'-phosphate
  modified_base 6: mod_base = OTHER; note = 2'-deoxy-2'-fluoroguanosine-3'-phosphate
  modified_base 7: mod_base = OTHER; note = 2'-O-methyladenosine-3'-phosphate
  modified_base 8: mod_base = OTHER; note = 2'-deoxy-2'-fluoroguanosine-3'-phosphate
  modified_base 9: mod_base = OTHER; note = 2'-deoxy-2'-fluoroguanosine-3'-phosphate
  modified_base 10: mod_base = OTHER; note = 2'-O-methyladenosine-3'-phosphate
  modified_base 11: mod_base = OTHER; note = 2'-O-methyladenosine-3'-phosphate
  modified_base 12: mod_base = OTHER; note = 2'-O-methylguanosine-3'-phosphate
  modified_base 13: mod_base = OTHER; note = 2'-O-methyluridine-3'-phosphate
  modified_base 14: mod_base = OTHER; note = 2'-deoxy-2'-fluoroadenosine-3'-phosphate
  modified_base 15: mod_base = OTHER; note = 2'-O-methylguanosine-3'-phosphate
  modified_base 16: mod_base = OTHER; note = 2'-deoxy-2'-fluoroadenosine-3'-phosphate
  modified_base 17: mod_base = OTHER; note = 2'-O-methyladenosine-3'-phosphate
  modified_base 18: mod_base = OTHER; note = 2'-O-methyluridine-3'-phosphate
  modified_base 19: mod_base = OTHER; note = 2'-O-methyluridine-3'-phosphate
  modified_base 20: mod_base = OTHER; note = 2'-O-methyluridine-3'-phosphate
  modified_base 21: mod_base = OTHER; note = 2'-O-methyladenosine-3'-phosphorothioate
  modified_base 22: mod_base = OTHER; note = 2'-O-methylcytidine-3'-phosphorothioate
  modified_base 23: mod_base = OTHER; note = 2'-O-methyladenosine
tacaagaggaagtagaatttaca

SEQ ID NO: 771 - RNA, 23 nt, synthetic construct
  source 1..23: mol_type = other RNA
  modified_base 1: mod_base = OTHER; note = 2'-O-methyluridine-3'-phosphorothioate 5'-(E)-Vinylphosphonate
  modified_base 2: mod_base = OTHER; note = 2'-deoxy-2'-fluoroadenosine-3'-phosphorothioate
  modified_base 3: mod_base = OTHER; note = 2'-O-methyladenosine-3'-phosphate
  modified_base 4: mod_base = OTHER; note = 2'-O-methylcytidine-3'-phosphate
  modified_base 5: mod_base = OTHER; note = 2'-O-methyladenosine-3'-phosphate
  modified_base 6: mod_base = OTHER; note = 2'-deoxy-2'-fluoroguanosine-3'-phosphate
  modified_base 7: mod_base = OTHER; note = 2'-O-methyladenosine-3'-phosphate
  modified_base 8: mod_base = OTHER; note = 2'-deoxy-2'-fluoroadenosine-3'-phosphate
  modified_base 9: mod_base = OTHER; note = 2'-deoxy-2'-fluoroguanosine-3'-phosphate
  modified_base 10: mod_base = OTHER; note = 2'-O-methyluridine-3'-phosphate
  modified_base 11: mod_base = OTHER; note = 2'-O-methyladenosine-3'-phosphate
  modified_base 12: mod_base = OTHER; note = 2'-O-methylguanosine-3'-phosphate
  modified_base 13: mod_base = OTHER; note = 2'-O-methyladenosine-3'-phosphate
  modified_base 14: mod_base = OTHER; note = 2'-deoxy-2'-fluoroguanosine-3'-phosphate
  modified_base 15: mod_base = OTHER; note = 2'-O-methyluridine-3'-phosphate
  modified_base 16: mod_base = OTHER; note = 2'-deoxy-2'-fluorouridine-3'-phosphate
  modified_base 17: mod_base = OTHER; note = 2'-O-methyluridine-3'-phosphate
  modified_base 18: mod_base = OTHER; note = 2'-O-methylguanosine-3'-phosphate
  modified_base 19: mod_base = OTHER; note = 2'-O-methyladenosine-3'-phosphate
  modified_base 20: mod_base = OTHER; note = 2'-O-methyladenosine-3'-phosphate
  modified_base 21: mod_base = OTHER; note = 2'-O-methyluridine-3'-phosphorothioate
  modified_base 22: mod_base = OTHER; note = 2'-O-methyluridine-3'-phosphorothioate
  modified_base 23: mod_base = OTHER; note = 2'-O-methyluridine
taacagaagtagagtttgaattt

SEQ ID NO: 772 - RNA, 23 nt, synthetic construct
  source 1..23: mol_type = other RNA
  modified_base 1: mod_base = OTHER; note = 2'-O-methyluridine-3'-phosphorothioate 5'-(E)-Vinylphosphonate
  modified_base 2: mod_base = OTHER; note = 2'-deoxy-2'-fluorouridine-3'-phosphorothioate
  modified_base 3: mod_base = OTHER; note = 2'-O-methyladenosine-3'-phosphate
  modified_base 4: mod_base = OTHER; note = 2'-O-methylcytidine-3'-phosphate
  modified_base 5: mod_base = OTHER; note = 2'-O-methyladenosine-3'-phosphate
  modified_base 6: mod_base = OTHER; note = 2'-deoxy-2'-fluoroguanosine-3'-phosphate
  modified_base 7: mod_base = OTHER; note = 2'-O-methyluridine-3'-phosphate
  modified_base 8: mod_base = OTHER; note = 2'-deoxy-2'-fluoroadenosine-3'-phosphate
  modified_base 9: mod_base = OTHER; note = 2'-deoxy-2'-fluorocytidine-3'-phosphate
  modified_base 10: mod_base = OTHER; note = 2'-O-methylcytidine-3'-phosphate
  modified_base 11: mod_base = OTHER; note = 2'-O-methyladenosine-3'-phosphate
  modified_base 12: mod_base = OTHER; note = 2'-O-methyluridine-3'-phosphate
  modified_base 13: mod_base = OTHER; note = 2'-O-methylguanosine-3'-phosphate
  modified_base 14: mod_base = OTHER; note = 2'-deoxy-2'-fluoroadenosine-3'-phosphate
  modified_base 15: mod_base = OTHER; note = 2'-O-methyluridine-3'-phosphate
  modified_base 16: mod_base = OTHER; note = 2'-deoxy-2'-fluoroadenosine-3'-phosphate
  modified_base 17: mod_base = OTHER; note = 2'-O-methyladenosine-3'-phosphate
  modified_base 18: mod_base = OTHER; note = 2'-O-methyladenosine-3'-phosphate
  modified_base 19: mod_base = OTHER; note = 2'-O-methylguanosine-3'-phosphate
  modified_base 20: mod_base = OTHER; note = 2'-O-methylguanosine-3'-phosphate
  modified_base 21: mod_base = OTHER; note = 2'-O-methyladenosine-3'-phosphorothioate
  modified_base 22: mod_base = OTHER; note = 2'-O-methylguanosine-3'-phosphorothioate
  modified_base 23: mod_base = OTHER; note = 2'-O-methyluridine
ttacagtaccatgataaaggagt

SEQ ID NO: 773 - RNA, 23 nt, synthetic construct
  source 1..23: mol_type = other RNA
  modified_base 1: mod_base = OTHER; note = 2'-O-methyluridine-3'-phosphorothioate 5'-(E)-Vinylphosphonate
  modified_base 2: mod_base = OTHER; note = 2'-deoxy-2'-fluoroadenosine-3'-phosphorothioate
  modified_base 3: mod_base = OTHER; note = 2'-O-methylguanosine-3'-phosphate
  modified_base 4: mod_base = OTHER; note = 2'-O-methyladenosine-3'-phosphate
  modified_base 5: mod_base = OTHER; note = 2'-O-methyladenosine-3'-phosphate
  modified_base 6: mod_base = OTHER; note = 2'-deoxy-2'-fluoroguanosine-3'-phosphate
  modified_base 7: mod_base = OTHER; note = 2'-O-methyladenosine-3'-phosphate
  modified_base 8: mod_base = OTHER; note = 2'-deoxy-2'-fluoroguanosine-3'-phosphate
  modified_base 9: mod_base = OTHER; note = 2'-deoxy-2'-fluorocytidine-3'-phosphate
  modified_base 10: mod_base = OTHER; note = 2'-O-methyluridine-3'-phosphate
  modified_base 11: mod_base = OTHER; note = 2'-O-methyluridine-3'-phosphate
  modified_base 12: mod_base = OTHER; note = 2'-O-methyladenosine-3'-phosphate
  modified_base 13: mod_base = OTHER; note = 2'-O-methyladenosine-3'-phosphate
  modified_base 14: mod_base = OTHER; note = 2'-deoxy-2'-fluorocytidine-3'-phosphate
  modified_base 15: mod_base = OTHER; note = 2'-O-methyladenosine-3'-phosphate
  modified_base 16: mod_base = OTHER; note = 2'-deoxy-2'-fluorouridine-3'-phosphate
  modified_base 17: mod_base = OTHER; note = 2'-O-methyluridine-3'-phosphate
  modified_base 18: mod_base = OTHER; note = 2'-O-methyluridine-3'-phosphate
  modified_base 19: mod_base = OTHER; note = 2'-O-methylcytidine-3'-phosphate
  modified_base 20: mod_base = OTHER; note = 2'-O-methyluridine-3'-phosphate
  modified_base 21: mod_base = OTHER; note = 2'-O-methyluridine-3'-phosphorothioate
  modified_base 22: mod_base = OTHER; note = 2'-O-methylguanosine-3'-phosphorothioate
  modified_base 23: mod_base = OTHER; note = 2'-O-methyladenosine
tagaagagcttaacatttcttga

SEQ ID NO: 774 - RNA, 23 nt, synthetic construct
  source 1..23: mol_type = other RNA
  modified_base 1: mod_base = OTHER; note = 2'-O-methyluridine-3'-phosphorothioate 5'-(E)-Vinylphosphonate
  modified_base 2: mod_base = OTHER; note = 2'-deoxy-2'-fluorouridine-3'-phosphorothioate
  modified_base 3: mod_base = OTHER; note = 2'-O-methylguanosine-3'-phosphate
  modified_base 4: mod_base = OTHER; note = 2'-O-methyladenosine-3'-phosphate
  modified_base 5: mod_base = OTHER; note = 2'-O-methyluridine-3'-phosphate
  modified_base 6: mod_base = OTHER; note = 2'-deoxy-2'-fluoroadenosine-3'-phosphate
  modified_base 7: mod_base = OTHER; note = 2'-O-methyladenosine-3'-phosphate
  modified_base 8: mod_base = OTHER; note = 2'-deoxy-2'-fluoroadenosine-3'-phosphate
  modified_base 9: mod_base = OTHER; note = 2'-deoxy-2'-fluoroguanosine-3'-phosphate
  modified_base 10: mod_base = OTHER; note = 2'-O-methylguanosine-3'-phosphate
  modified_base 11: mod_base = OTHER; note = 2'-O-methyladenosine-3'-phosphate
  modified_base 12: mod_base = OTHER; note = 2'-O-methylguanosine-3'-phosphate
  modified_base 13: mod_base = OTHER; note = 2'-O-methyluridine-3'-phosphate
  modified_base 14: mod_base = OTHER; note = 2'-deoxy-2'-fluoroadenosine-3'-phosphate
  modified_base 15: mod_base = OTHER; note = 2'-O-methyluridine-3'-phosphate
  modified_base 16: mod_base = OTHER; note = 2'-deoxy-2'-fluoroadenosine-3'-phosphate
  modified_base 17: mod_base = OTHER; note = 2'-O-methyladenosine-3'-phosphate
  modified_base 18: mod_base = OTHER; note = 2'-O-methyladenosine-3'-phosphate
  modified_base 19: mod_base = OTHER; note = 2'-O-methyladenosine-3'-phosphate
  modified_base 20: mod_base = OTHER; note = 2'-O-methyladenosine-3'-phosphate
  modified_base 21: mod_base = OTHER; note = 2'-O-methylguanosine-3'-phosphorothioate
  modified_base 22: mod_base = OTHER; note = 2'-O-methylguanosine-3'-phosphorothioate
  modified_base 23: mod_base = OTHER; note = 2'-O-methyluridine
ttgataaaggagtataaaaaggt

SEQ ID NO: 775 - RNA, 23 nt, synthetic construct
  source 1..23: mol_type = other RNA
  modified_base 1: mod_base = OTHER; note = 2'-O-methyluridine-3'-phosphorothioate 5'-(E)-Vinylphosphonate
  modified_base 2: mod_base = OTHER; note = 2'-deoxy-2'-fluorouridine-3'-phosphorothioate
  modified_base 3: mod_base = OTHER; note = 2'-O-methyladenosine-3'-phosphate
  modified_base 4: mod_base = OTHER; note = 2'-O-methyladenosine-3'-phosphate
  modified_base 5: mod_base = OTHER; note = 2'-O-methyladenosine-3'-phosphate
  modified_base 6: mod_base = OTHER; note = 2'-deoxy-2'-fluoroadenosine-3'-phosphate
  modified_base 7: mod_base = OTHER; note = 2'-O-methyladenosine-3'-phosphate
  modified_base 8: mod_base = OTHER; note = 2'-deoxy-2'-fluoroguanosine-3'-phosphate
  modified_base 9: mod_base = OTHER; note = 2'-deoxy-2'-fluoroguanosine-3'-phosphate
  modified_base 10: mod_base = OTHER; note = 2'-O-methyluridine-3'-phosphate
  modified_base 11: mod_base = OTHER; note = 2'-O-methyladenosine-3'-phosphate
  modified_base 12: mod_base = OTHER; note = 2'-O-methyluridine-3'-phosphate
  modified_base 13: mod_base = OTHER; note = 2'-O-methyluridine-3'-phosphate
  modified_base 14: mod_base = OTHER; note = 2'-deoxy-2'-fluorouridine-3'-phosphate
  modified_base 15: mod_base = OTHER; note = 2'-O-methyluridine-3'-phosphate
  modified_base 16: mod_base = OTHER; note = 2'-deoxy-2'-fluorocytidine-3'-phosphate
  modified_base 17: mod_base = OTHER; note = 2'-O-methylcytidine-3'-phosphate
  modified_base 18: mod_base = OTHER; note = 2'-O-methylcytidine-3'-phosphate
  modified_base 19: mod_base = OTHER; note = 2'-O-methyladenosine-3'-phosphate
  modified_base 20: mod_base = OTHER; note = 2'-O-methyladenosine-3'-phosphate
  modified_base 21: mod_base = OTHER; note = 2'-O-methyluridine-3'-phosphorothioate
  modified_base 22: mod_base = OTHER; note = 2'-O-methylguanosine-3'-phosphorothioate
  modified_base 23: mod_base = OTHER; note = 2'-O-methyladenosine
ttaaaaaggtattttcccaatga

SEQ ID NO: 776 - RNA, 23 nt, synthetic construct
  source 1..23: mol_type = other RNA
  modified_base 1: mod_base = OTHER; note = 2'-O-methyluridine-3'-phosphorothioate 5'-(E)-Vinylphosphonate
  modified_base 2: mod_base = OTHER; note = 2'-deoxy-2'-fluoroadenosine-3'-phosphorothioate
  modified_base 3: mod_base = OTHER; note = 2'-O-methylguanosine-3'-phosphate
  modified_base 4: mod_base = OTHER; note = 2'-O-methylcytidine-3'-phosphate
  modified_base 5: mod_base = OTHER; note = 2'-O-methyladenosine-3'-phosphate
  modified_base 6: mod_base = OTHER; note = 2'-deoxy-2'-fluoroadenosine-3'-phosphate
  modified_base 7: mod_base = OTHER; note = 2'-O-methyladenosine-3'-phosphate
  modified_base 8: mod_base = OTHER; note = 2'-deoxy-2'-fluoroadenosine-3'-phosphate
  modified_base 9: mod_base = OTHER; note = 2'-deoxy-2'-fluoroguanosine-3'-phosphate
  modified_base 10: mod_base = OTHER; note = 2'-O-methylguanosine-3'-phosphate
  modified_base 11: mod_base = OTHER; note = 2'-O-methyladenosine-3'-phosphate
  modified_base 12: mod_base = OTHER; note = 2'-O-methyladenosine-3'-phosphate
  modified_base 13: mod_base = OTHER; note = 2'-O-methyladenosine-3'-phosphate
  modified_base 14: mod_base = OTHER; note = 2'-deoxy-2'-fluorouridine-3'-phosphate
  modified_base 15: mod_base = OTHER; note = 2'-O-methyladenosine-3'-phosphate
  modified_base 16: mod_base = OTHER; note = 2'-deoxy-2'-fluorouridine-3'-phosphate
  modified_base 17: mod_base = OTHER; note = 2'-O-methylguanosine-3'-phosphate
  modified_base 18: mod_base = OTHER; note = 2'-O-methyluridine-3'-phosphate
  modified_base 19: mod_base = OTHER; note = 2'-O-methylcytidine-3'-phosphate
  modified_base 20: mod_base = OTHER; note = 2'-O-methyluridine-3'-phosphate
  modified_base 21: mod_base = OTHER; note = 2'-O-methyluridine-3'-phosphorothioate
  modified_base 22: mod_base = OTHER; note = 2'-O-methylguanosine-3'-phosphorothioate
  modified_base 23: mod_base = OTHER; note = 2'-O-methyladenosine
tagcaaaaggaaatatgtcttga

SEQ ID NO: 777 - RNA, 23 nt, synthetic construct
  source 1..23: mol_type = other RNA
  modified_base 1: mod_base = OTHER; note = 2'-O-methyluridine-3'-phosphorothioate 5'-(E)-Vinylphosphonate
  modified_base 2: mod_base = OTHER; note = 2'-deoxy-2'-fluoroadenosine-3'-phosphorothioate
  modified_base 3: mod_base = OTHER; note = 2'-O-methyluridine-3'-phosphate
  modified_base 4: mod_base = OTHER; note = 2'-O-methyladenosine-3'-phosphate
  modified_base 5: mod_base = OTHER; note = 2'-O-methylcytidine-3'-phosphate
  modified_base 6: mod_base = OTHER; note = 2'-deoxy-2'-fluorouridine-3'-phosphate
  modified_base 7: mod_base = OTHER; note = 2'-O-methyladenosine-3'-phosphate
  modified_base 8: mod_base = OTHER; note = 2'-deoxy-2'-fluoroguanosine-3'-phosphate
  modified_base 9: mod_base = OTHER; note = 2'-deoxy-2'-fluoroadenosine-3'-phosphate
  modified_base 10: mod_base = OTHER; note = 2'-O-methylcytidine-3'-phosphate
  modified_base 11: mod_base = OTHER; note = 2'-O-methyladenosine-3'-phosphate
  modified_base 12: mod_base = OTHER; note = 2'-O-methyladenosine-3'-phosphate
  modified_base 13: mod_base = OTHER; note = 2'-O-methylcytidine-3'-phosphate
  modified_base 14: mod_base = OTHER; note = 2'-deoxy-2'-fluoroadenosine-3'-phosphate
  modified_base 15: mod_base = OTHER; note = 2'-O-methylguanosine-3'-phosphate
  modified_base 16: mod_base = OTHER; note = 2'-deoxy-2'-fluoroadenosine-3'-phosphate
  modified_base 17: mod_base = OTHER; note = 2'-O-methyladenosine-3'-phosphate
  modified_base 18: mod_base = OTHER; note = 2'-O-methylguanosine-3'-phosphate
  modified_base 19: mod_base = OTHER; note = 2'-O-methyluridine-3'-phosphate
  modified_base 20: mod_base = OTHER; note = 2'-O-methyladenosine-3'-phosphate
  modified_base 21: mod_base = OTHER; note = 2'-O-methylguanosine-3'-phosphorothioate
  modified_base 22: mod_base = OTHER; note = 2'-O-methyladenosine-3'-phosphorothioate
  modified_base 23: mod_base = OTHER; note = 2'-O-methylguanosine
tatactagacaacagaagtagag

SEQ ID NO: 778 - RNA, 23 nt, synthetic construct
  source 1..23: mol_type = other RNA
  modified_base 1: mod_base = OTHER; note = 2'-O-methyluridine-3'-phosphorothioate 5'-(E)-Vinylphosphonate
  modified_base 2: mod_base = OTHER; note = 2'-deoxy-2'-fluoroadenosine-3'-phosphorothioate
  modified_base 3: mod_base = OTHER; note = 2'-O-methyluridine-3'-phosphate
  modified_base 4: mod_base = OTHER; note = 2'-O-methyluridine-3'-phosphate
  modified_base 5: mod_base = OTHER; note = 2'-O-methyluridine-3'-phosphate
  modified_base 6: mod_base = OTHER; note = 2'-deoxy-2'-fluorouridine-3'-phosphate
  modified_base 7: mod_base = OTHER; note = 2'-O-methylguanosine-3'-phosphate
  modified_base 8: mod_base = OTHER; note = 2'-deoxy-2'-fluorouridine-3'-phosphate
  modified_base 9: mod_base = OTHER; note = 2'-deoxy-2'-fluoroadenosine-3'-phosphate
  modified_base 10: mod_base = OTHER; note = 2'-O-methyladenosine-3'-phosphate
  modified_base 11: mod_base = OTHER; note = 2'-O-methyluridine-3'-phosphate
  modified_base 12: mod_base = OTHER; note = 2'-O-methyluridine-3'-phosphate
  modified_base 13: mod_base = OTHER; note = 2'-O-methylcytidine-3'-phosphate
  modified_base 14: mod_base = OTHER; note = 2'-deoxy-2'-fluorocytidine-3'-phosphate
  modified_base 15: mod_base = OTHER; note = 2'-O-methyluridine-3'-phosphate
  modified_base 16: mod_base = OTHER; note = 2'-deoxy-2'-fluoroadenosine-3'-phosphate
  modified_base 17: mod_base = OTHER; note = 2'-O-methyladenosine-3'-phosphate
  modified_base 18: mod_base = OTHER; note = 2'-O-methylcytidine-3'-phosphate
  modified_base 19: mod_base = OTHER; note = 2'-O-methyladenosine-3'-phosphate
  modified_base 20: mod_base = OTHER; note = 2'-O-methylcytidine-3'-phosphate
  modified_base 21: mod_base = OTHER; note = 2'-O-methyluridine-3'-phosphorothioate
  modified_base 22: mod_base = OTHER; note = 2'-O-methylguanosine-3'-phosphorothioate
  modified_base 23: mod_base = OTHER; note = 2'-O-methyluridine
tattttgtaattcctaacactgt

SEQ ID NO: 779 - RNA, 23 nt, synthetic construct
  source 1..23: mol_type = other RNA
  modified_base 1: mod_base = OTHER; note = 2'-O-methyluridine-3'-phosphorothioate 5'-(E)-Vinylphosphonate
  modified_base 2: mod_base = OTHER; note = 2'-deoxy-2'-fluoroadenosine-3'-phosphorothioate
  modified_base 3: mod_base = OTHER; note = 2'-O-methyladenosine-3'-phosphate
  modified_base 4: mod_base = OTHER; note = 2'-O-methylcytidine-3'-phosphate
  modified_base 5: mod_base = OTHER; note = 2'-O-methyladenosine-3'-phosphate
  modified_base 6: mod_base = OTHER; note = 2'-deoxy-2'-fluorouridine-3'-phosphate
  modified_base 7: mod_base = OTHER; note = 2'-O-methyluridine-3'-phosphate
  modified_base 8: mod_base = OTHER; note = 2'-deoxy-2'-fluorouridine-3'-phosphate
  modified_base 9: mod_base = OTHER; note = 2'-deoxy-2'-fluorocytidine-3'-phosphate
  modified_base 10: mod_base = OTHER; note = 2'-O-methyluridine-3'-phosphate
  modified_base 11: mod_base = OTHER; note = 2'-O-methyluridine-3'-phosphate
  modified_base 12: mod_base = OTHER; note = 2'-O-methylguanosine-3'-phosphate
  modified_base 13: mod_base = OTHER; note = 2'-O-methyladenosine-3'-phosphate
  modified_base 14: mod_base = OTHER; note = 2'-deoxy-2'-fluoroadenosine-3'-phosphate
  modified_base 15: mod_base = OTHER; note = 2'-O-methyladenosine-3'-phosphate
  modified_base 16: mod_base = OTHER; note = 2'-deoxy-2'-fluorocytidine-3'-phosphate
  modified_base 17: mod_base = OTHER; note = 2'-O-methylguanosine-3'-phosphate
  modified_base 18: mod_base = OTHER; note = 2'-O-methyluridine-3'-phosphate
  modified_base 19: mod_base = OTHER; note = 2'-O-methylguanosine-3'-phosphate
  modified_base 20: mod_base = OTHER; note = 2'-O-methyladenosine-3'-phosphate
  modified_base 21: mod_base = OTHER; note = 2'-O-methyluridine-3'-phosphorothioate
  modified_base 22: mod_base = OTHER; note = 2'-O-methyluridine-3'-phosphorothioate
  modified_base 23: mod_base = OTHER; note = 2'-O-methyluridine
taacatttcttgaaacgtgattt

SEQ ID NO: 780 - RNA, 23 nt, synthetic construct
  source 1..23: mol_type = other RNA
  modified_base 1: mod_base = OTHER; note = 2'-O-methyluridine-3'-phosphorothioate 5'-(E)-Vinylphosphonate
  modified_base 2: mod_base = OTHER; note = 2'-deoxy-2'-fluoroadenosine-3'-phosphorothioate
  modified_base 3: mod_base = OTHER; note = 2'-O-methyladenosine-3'-phosphate
  modified_base 4: mod_base = OTHER; note = 2'-O-methyladenosine-3'-phosphate
  modified_base 5: mod_base = OTHER; note = 2'-O-methyladenosine-3'-phosphate
  modified_base 6: mod_base = OTHER; note = 2'-deoxy-2'-fluorouridine-3'-phosphate
  modified_base 7: mod_base = OTHER; note = 2'-O-methylguanosine-3'-phosphate
  modified_base 8: mod_base = OTHER; note = 2'-deoxy-2'-fluoroguanosine-3'-phosphate
  modified_base 9: mod_base = OTHER; note = 2'-deoxy-2'-fluorocytidine-3'-phosphate
  modified_base 10: mod_base = OTHER; note = 2'-O-methyladenosine-3'-phosphate
  modified_base 11: mod_base = OTHER; note = 2'-O-methyluridine-3'-phosphate
  modified_base 12: mod_base = OTHER; note = 2'-O-methyluridine-3'-phosphate
  modified_base 13: mod_base = OTHER; note = 2'-O-methyluridine-3'-phosphate
  modified_base 14: mod_base = OTHER; note = 2'-deoxy-2'-fluorouridine-3'-phosphate
  modified_base 15: mod_base = OTHER; note = 2'-O-methylguanosine-3'-phosphate
  modified_base 16: mod_base = OTHER; note = 2'-deoxy-2'-fluoroadenosine-3'-phosphate
  modified_base 17: mod_base = OTHER; note = 2'-O-methyladenosine-3'-phosphate
  modified_base 18: mod_base = OTHER; note = 2'-O-methylcytidine-3'-phosphate
  modified_base 19: mod_base = OTHER; note = 2'-O-methylcytidine-3'-phosphate
  modified_base 20: mod_base = OTHER; note = 2'-O-methyladenosine-3'-phosphate
  modified_base 21: mod_base = OTHER; note = 2'-O-methylcytidine-3'-phosphorothioate
  modified_base 22: mod_base = OTHER; note = 2'-O-methyluridine-3'-phosphorothioate
  modified_base 23: mod_base = OTHER; note = 2'-O-methylcytidine
taaaatggcattttgaaccactc

SEQ ID NO: 781 - RNA, 23 nt, synthetic construct
  source 1..23: mol_type = other RNA
  modified_base 1: mod_base = OTHER; note = 2'-O-methyluridine-3'-phosphorothioate 5'-(E)-Vinylphosphonate
  modified_base 2: mod_base = OTHER; note = 2'-deoxy-2'-fluoroadenosine-3'-phosphorothioate
  modified_base 3: mod_base = OTHER; note = 2'-O-methylguanosine-3'-phosphate
  modified_base 4: mod_base = OTHER; note = 2'-O-methylcytidine-3'-phosphate
  modified_base 5: mod_base = OTHER; note = 2'-O-methyluridine-3'-phosphate
  modified_base 6: mod_base = OTHER; note = 2'-deoxy-2'-fluoroguanosine-3'-phosphate
  modified_base 7: mod_base = OTHER; note = 2'-O-methyluridine-3'-phosphate
  modified_base 8: mod_base = OTHER; note = 2'-deoxy-2'-fluorouridine-3'-phosphate
  modified_base 9: mod_base = OTHER; note = 2'-deoxy-2'-fluorouridine-3'-phosphate
  modified_base 10: mod_base = OTHER; note = 2'-O-methyladenosine-3'-phosphate
  modified_base 11: mod_base = OTHER; note = 2'-O-methyladenosine-3'-phosphate
  modified_base 12: mod_base = OTHER; note = 2'-O-methyluridine-3'-phosphate
  modified_base 13: mod_base = OTHER; note = 2'-O-methyladenosine-3'-phosphate
  modified_base 14: mod_base = OTHER; note = 2'-deoxy-2'-fluorouridine-3'-phosphate
  modified_base 15: mod_base = OTHER; note = 2'-O-methyladenosine-3'-phosphate
  modified_base 16: mod_base = OTHER; note = 2'-deoxy-2'-fluoroadenosine-3'-phosphate
  modified_base 17: mod_base = OTHER; note = 2'-O-methyladenosine-3'-phosphate
  modified_base 18: mod_base = OTHER; note = 2'-O-methylcytidine-3'-phosphate
  modified_base 19: mod_base = OTHER; note = 2'-O-methyladenosine-3'-phosphate
  modified_base 20: mod_base = OTHER; note = 2'-O-methyladenosine-3'-phosphate
  modified_base 21: mod_base = OTHER; note = 2'-O-methylguanosine-3'-phosphorothioate
  modified_base 22: mod_base = OTHER; note = 2'-O-methyluridine-3'-phosphorothioate
  modified_base 23: mod_base = OTHER; note = 2'-O-methylcytidine
tagctgtttaatataaacaagtc

SEQ ID NO: 782 - RNA, 23 nt, synthetic construct
  source 1..23: mol_type = other RNA
  modified_base 1: mod_base = OTHER; note = 2'-O-methyluridine-3'-phosphorothioate 5'-(E)-Vinylphosphonate
  modified_base 2: mod_base = OTHER; note = 2'-deoxy-2'-fluorouridine-3'-phosphorothioate
  modified_base 3: mod_base = OTHER; note = 2'-O-methyladenosine-3'-phosphate
  modified_base 4: mod_base = OTHER; note = 2'-O-methyluridine-3'-phosphate
  modified_base 5: mod_base = OTHER; note = 2'-O-methylcytidine-3'-phosphate
  modified_base 6: mod_base = OTHER; note = 2'-deoxy-2'-fluoroguanosine-3'-phosphate
  modified_base 7: mod_base = OTHER; note = 2'-O-methylguanosine-3'-phosphate
  modified_base 8: mod_base = OTHER; note = 2'-deoxy-2'-fluorouridine-3'-phosphate
  modified_base 9: mod_base = OTHER; note = 2'-deoxy-2'-fluorocytidine-3'-phosphate
  modified_base 10: mod_base = OTHER; note = 2'-O-methyluridine-3'-phosphate
  modified_base 11: mod_base = OTHER; note = 2'-O-methyluridine-3'-phosphate
  modified_base 12: mod_base = OTHER; note = 2'-O-methyladenosine-3'-phosphate
  modified_base 13: mod_base = OTHER; note = 2'-O-methyladenosine-3'-phosphate
  modified_base 14: mod_base = OTHER; note = 2'-deoxy-2'-fluoroguanosine-3'-phosphate
  modified_base 15: mod_base = OTHER; note = 2'-O-methyluridine-3'-phosphate
  modified_base 16: mod_base = OTHER; note = 2'-deoxy-2'-fluoroadenosine-3'-phosphate
  modified_base 17: mod_base = OTHER; note = 2'-O-methyladenosine-3'-phosphate
  modified_base 18: mod_base = OTHER; note = 2'-O-methyladenosine-3'-phosphate
  modified_base 19: mod_base = OTHER; note = 2'-O-methylcytidine-3'-phosphate
  modified_base 20: mod_base = OTHER; note = 2'-O-methyladenosine-3'-phosphate
  modified_base 21: mod_base = OTHER; note = 2'-O-methylcytidine-3'-phosphorothioate
  modified_base 22: mod_base = OTHER; note = 2'-O-methyladenosine-3'-phosphorothioate
  modified_base 23: mod_base = OTHER; note = 2'-O-methylguanosine
ttatcggtcttaagtaaacacag

SEQ ID NO: 783 - RNA, 23 nt, synthetic construct
  source 1..23: mol_type = other RNA
  modified_base 1: mod_base = OTHER; note = 2'-O-methyluridine-3'-phosphorothioate 5'-(E)-Vinylphosphonate
  modified_base 2: mod_base = OTHER; note = 2'-deoxy-2'-fluoroadenosine-3'-phosphorothioate
  modified_base 3: mod_base = OTHER; note = 2'-O-methyladenosine-3'-phosphate
  modified_base 4: mod_base = OTHER; note = 2'-O-methyladenosine-3'-phosphate
  modified_base 5: mod_base = OTHER; note = 2'-O-methyladenosine-3'-phosphate
  modified_base 6: mod_base = OTHER; note = 2'-deoxy-2'-fluorouridine-3'-phosphate
  modified_base 7: mod_base = OTHER; note = 2'-O-methylguanosine-3'-phosphate
  modified_base 8: mod_base = OTHER; note = 2'-deoxy-2'-fluoroadenosine-3'-phosphate
  modified_base 9: mod_base = OTHER; note = 2'-deoxy-2'-fluoroadenosine-3'-phosphate
  modified_base 10: mod_base = OTHER; note = 2'-O-methyladenosine-3'-phosphate
  modified_base 11: mod_base = OTHER; note = 2'-O-methyluridine-3'-phosphate
  modified_base 12: mod_base = OTHER; note = 2'-O-methyluridine-3'-phosphate
  modified_base 13: mod_base = OTHER; note = 2'-O-methyluridine-3'-phosphate
  modified_base 14: mod_base = OTHER; note = 2'-deoxy-2'-fluorocytidine-3'-phosphate
  modified_base 15: mod_base = OTHER; note = 2'-O-methyluridine-3'-phosphate
  modified_base 16: mod_base = OTHER; note = 2'-deoxy-2'-fluorocytidine-3'-phosphate
  modified_base 17: mod_base = OTHER; note = 2'-O-methyluridine-3'-phosphate
  modified_base 18: mod_base = OTHER; note = 2'-O-methylguanosine-3'-phosphate
  modified_base 19: mod_base = OTHER; note = 2'-O-methylguanosine-3'-phosphate
  modified_base 20: mod_base = OTHER; note = 2'-O-methyladenosine-3'-phosphate
  modified_base 21: mod_base = OTHER; note = 2'-O-methyladenosine-3'-phosphorothioate
  modified_base 22: mod_base = OTHER; note = 2'-O-methyladenosine-3'-phosphorothioate
  modified_base 23: mod_base = OTHER; note = 2'-O-methylguanosine
taaaatgaaatttctctggaaag

SEQ ID NO: 784 - RNA, 23 nt, synthetic construct
  source 1..23: mol_type = other RNA
  modified_base 1: mod_base = OTHER; note = 2'-O-methyluridine-3'-phosphorothioate 5'-(E)-Vinylphosphonate
  modified_base 2: mod_base = OTHER; note = 2'-deoxy-2'-fluoroadenosine-3'-phosphorothioate
  modified_base 3: mod_base = OTHER; note = 2'-O-methyluridine-3'-phosphate
  modified_base 4: mod_base = OTHER; note = 2'-O-methyladenosine-3'-phosphate
  modified_base 5: mod_base = OTHER; note = 2'-O-methyladenosine-3'-phosphate
  modified_base 6: mod_base = OTHER; note = 2'-deoxy-2'-fluorouridine-3'-phosphate
  modified_base 7: mod_base = OTHER; note = 2'-O-methyladenosine-3'-phosphate
  modified_base 8: mod_base = OTHER; note = 2'-deoxy-2'-fluorouridine-3'-phosphate
  modified_base 9: mod_base = OTHER; note = 2'-deoxy-2'-fluoroguanosine-3'-phosphate
  modified_base 10: mod_base = OTHER; note = 2'-O-methylguanosine-3'-phosphate
  modified_base 11: mod_base = OTHER; note = 2'-O-methyladenosine-3'-phosphate
  modified_base 12: mod_base = OTHER; note = 2'-O-methyluridine-3'-phosphate
  modified_base 13: mod_base = OTHER; note = 2'-O-methyladenosine-3'-phosphate
  modified_base 14: mod_base = OTHER; note = 2'-deoxy-2'-fluorocytidine-3'-phosphate
  modified_base 15: mod_base = OTHER; note = 2'-O-methyladenosine-3'-phosphate
  modified_base 16: mod_base = OTHER; note = 2'-deoxy-2'-fluoroguanosine-3'-phosphate
  modified_base 17: mod_base = OTHER; note = 2'-O-methyluridine-3'-phosphate
  modified_base 18: mod_base = OTHER; note = 2'-O-methyluridine-3'-phosphate
  modified_base 19: mod_base = OTHER; note = 2'-O-methyladenosine-3'-phosphate
  modified_base 20: mod_base = OTHER; note = 2'-O-methylcytidine-3'-phosphate
  modified_base 21: mod_base = OTHER; note = 2'-O-methyladenosine-3'-phosphorothioate
  modified_base 22: mod_base = OTHER; note = 2'-O-methylguanosine-3'-phosphorothioate
  modified_base 23: mod_base = OTHER; note = 2'-O-methyluridine
tataatatggatacagttacagt

SEQ ID NO: 785 - RNA, 23 nt, synthetic construct
  source 1..23: mol_type = other RNA
  modified_base 1: mod_base = OTHER; note = 2'-O-methyluridine-3'-phosphorothioate 5'-(E)-Vinylphosphonate
  modified_base 2: mod_base = OTHER; note = 2'-deoxy-2'-fluorouridine-3'-phosphorothioate
  modified_base 3: mod_base = OTHER; note = 2'-O-methylcytidine-3'-phosphate
  modified_base 4: mod_base = OTHER; note = 2'-O-methyluridine-3'-phosphate
  modified_base 5: mod_base = OTHER; note = 2'-O-methyluridine-3'-phosphate
  modified_base 6: mod_base = OTHER; note = 2'-deoxy-2'-fluorouridine-3'-phosphate
  modified_base 7: mod_base = OTHER; note = 2'-O-methylguanosine-3'-phosphate
  modified_base 8: mod_base = OTHER; note = 2'-deoxy-2'-fluorocytidine-3'-phosphate
  modified_base 9: mod_base = OTHER; note = 2'-deoxy-2'-fluorouridine-3'-phosphate
  modified_base 10: mod_base = OTHER; note = 2'-O-methyluridine-3'-phosphate
  modified_base 11: mod_base = OTHER; note = 2'-O-methyluridine-3'-phosphate
  modified_base 12: mod_base = OTHER; note = 2'-O-methylcytidine-3'-phosphate
  modified_base 13: mod_base = OTHER; note = 2'-O-methyladenosine-3'-phosphate
  modified_base 14: mod_base = OTHER; note = 2'-deoxy-2'-fluorouridine-3'-phosphate
  modified_base 15: mod_base = OTHER; note = 2'-O-methyladenosine-3'-phosphate
  modified_base 16: mod_base = OTHER; note = 2'-deoxy-2'-fluoroadenosine-3'-phosphate
  modified_base 17: mod_base = OTHER; note = 2'-O-methylcytidine-3'-phosphate
  modified_base 18: mod_base = OTHER; note = 2'-O-methyladenosine-3'-phosphate
  modified_base 19: mod_base = OTHER; note = 2'-O-methylguanosine-3'-phosphate
  modified_base 20: mod_base = OTHER; note = 2'-O-methylcytidine-3'-phosphate
  modified_base 21: mod_base = OTHER; note = 2'-O-methyladenosine-3'-phosphorothioate
  modified_base 22: mod_base = OTHER; note = 2'-O-methylguanosine-3'-phosphorothioate
  modified_base 23: mod_base = OTHER; note = 2'-O-methyladenosine
ttctttgctttcataacagcaga

SEQ ID NO: 786 - RNA, 23 nt, synthetic construct
  source 1..23: mol_type = other RNA
  modified_base 1: mod_base = OTHER; note = 2'-O-methyluridine-3'-phosphorothioate 5'-(E)-Vinylphosphonate
  modified_base 2: mod_base = OTHER; note = 2'-deoxy-2'-fluoroadenosine-3'-phosphorothioate
  modified_base 3: mod_base = OTHER; note = 2'-O-methyluridine-3'-phosphate
  modified_base 4: mod_base = OTHER; note = 2'-O-methyluridine-3'-phosphate
  modified_base 5: mod_base = OTHER; note = 2'-O-methyladenosine-3'-phosphate
  modified_base 6: mod_base = OTHER; note = 2'-deoxy-2'-fluoroguanosine-3'-phosphate
  modified_base 7: mod_base = OTHER; note = 2'-O-methylcytidine-3'-phosphate
  modified_base 8: mod_base = OTHER; note = 2'-deoxy-2'-fluorouridine-3'-phosphate
  modified_base 9: mod_base = OTHER; note = 2'-deoxy-2'-fluorocytidine-3'-phosphate
  modified_base 10: mod_base = OTHER; note = 2'-O-methyladenosine-3'-phosphate
  modified_base 11: mod_base = OTHER; note = 2'-O-methyladenosine-3'-phosphate
  modified_base 12: mod_base = OTHER; note = 2'-O-methyluridine-3'-phosphate
  modified_base 13: mod_base = OTHER; note = 2'-O-methyladenosine-3'-phosphate
  modified_base 14: mod_base = OTHER; note = 2'-deoxy-2'-fluoroadenosine-3'-phosphate
  modified_base 15: mod_base = OTHER; note = 2'-O-methylcytidine-3'-phosphate
  modified_base 16: mod_base = OTHER; note = 2'-deoxy-2'-fluoroadenosine-3'-phosphate
  modified_base 17: mod_base = OTHER; note = 2'-O-methyluridine-3'-phosphate
  modified_base 18: mod_base = OTHER; note = 2'-O-methyladenosine-3'-phosphate
  modified_base 19: mod_base = OTHER; note = 2'-O-methylcytidine-3'-phosphate
  modified_base 20: mod_base = OTHER; note = 2'-O-methyluridine-3'-phosphate
  modified_base 21: mod_base = OTHER; note = 2'-O-methyladenosine-3'-phosphorothioate
  modified_base 22: mod_base = OTHER; note = 2'-O-methylguanosine-3'-phosphorothioate
  modified_base 23: mod_base = OTHER; note = 2'-O-methyladenosine
tattagctcaataacatactaga

SEQ ID NO: 787 - RNA, 23 nt, synthetic construct
  source 1..23: mol_type = other RNA
  modified_base 1: mod_base = OTHER; note = 2'-O-methyluridine-3'-phosphorothioate 5'-(E)-Vinylphosphonate
  modified_base 2: mod_base = OTHER; note = 2'-deoxy-2'-fluoroguanosine-3'-phosphorothioate
  modified_base 3: mod_base = OTHER; note = 2'-O-methyladenosine-3'-phosphate
  modified_base 4: mod_base = OTHER; note = 2'-O-methylguanosine-3'-phosphate
  modified_base 5: mod_base = OTHER; note = 2'-O-methyluridine-3'-phosphate
  modified_base 6: mod_base = OTHER; note = 2'-deoxy-2'-fluoroadenosine-3'-phosphate
  modified_base 7: mod_base = OTHER; note = 2'-O-methyluridine-3'-phosphate
  modified_base 8: mod_base = OTHER; note = 2'-deoxy-2'-fluoroadenosine-3'-phosphate
  modified_base 9: mod_base = OTHER; note = 2'-deoxy-2'-fluoroadenosine-3'-phosphate
  modified_base 10: mod_base = OTHER; note = 2'-O-methyladenosine-3'-phosphate
  modified_base 11: mod_base = OTHER; note = 2'-O-methyluridine-3'-phosphate
  modified_base 12: mod_base = OTHER; note = 2'-O-methyladenosine-3'-phosphate
  modified_base 13: mod_base = OTHER; note = 2'-O-methylcytidine-3'-phosphate
  modified_base 14: mod_base = OTHER; note = 2'-deoxy-2'-fluorouridine-3'-phosphate
  modified_base 15: mod_base = OTHER; note = 2'-O-methyluridine-3'-phosphate
  modified_base 16: mod_base = OTHER; note = 2'-deoxy-2'-fluoroguanosine-3'-phosphate
  modified_base 17: mod_base = OTHER; note = 2'-O-methylguanosine-3'-phosphate
  modified_base 18: mod_base = OTHER; note = 2'-O-methyluridine-3'-phosphate
  modified_base 19: mod_base = OTHER; note = 2'-O-methyladenosine-3'-phosphate
  modified_base 20: mod_base = OTHER; note = 2'-O-methyladenosine-3'-phosphate
  modified_base 21: mod_base = OTHER; note = 2'-O-methyladenosine-3'-phosphorothioate
  modified_base 22: mod_base = OTHER; note = 2'-O-methyladenosine-3'-phosphorothioate
  modified_base 23: mod_base = OTHER; note = 2'-O-methylcytidine
tgagtataaatacttggtaaaac

SEQ ID NO: 788 - RNA, 23 nt, synthetic construct
  source 1..23: mol_type = other RNA
  modified_base 1: mod_base = OTHER; note = 2'-O-methyluridine-3'-phosphorothioate 5'-(E)-Vinylphosphonate
  modified_base 2: mod_base = OTHER; note = 2'-deoxy-2'-fluoroadenosine-3'-phosphorothioate
  modified_base 3: mod_base = OTHER; note = 2'-O-methylguanosine-3'-phosphate
  modified_base 4: mod_base = OTHER; note = 2'-O-methyluridine-3'-phosphate
  modified_base 5: mod_base = OTHER; note = 2'-O-methyluridine-3'-phosphate
  modified_base 6: mod_base = OTHER; note = 2'-deoxy-2'-fluoroguanosine-3'-phosphate
  modified_base 7: mod_base = OTHER; note = 2'-O-methyladenosine-3'-phosphate
  modified_base 8: mod_base = OTHER; note = 2'-deoxy-2'-fluoroadenosine-3'-phosphate
  modified_base 9: mod_base = OTHER; note = 2'-deoxy-2'-fluoroguanosine-3'-phosphate
  modified_base 10: mod_base = OTHER; note = 2'-O-methyladenosine-3'-phosphate
  modified_base 11: mod_base = OTHER; note = 2'-O-methyladenosine-3'-phosphate
  modified_base 12: mod_base = OTHER; note = 2'-O-methylguanosine-3'-phosphate
  modified_base 13: mod_base = OTHER; note = 2'-O-methyladenosine-3'-phosphate
  modified_base 14: mod_base = OTHER; note = 2'-deoxy-2'-fluorocytidine-3'-phosphate
  modified_base 15: mod_base = OTHER; note = 2'-O-methylguanosine-3'-phosphate
  modified_base 16: mod_base = OTHER; note = 2'-deoxy-2'-fluoroadenosine-3'-phosphate
  modified_base 17: mod_base = OTHER; note = 2'-O-methyladenosine-3'-phosphate
  modified_base 18: mod_base = OTHER; note = 2'-O-methylguanosine-3'-phosphate
  modified_base 19: mod_base = OTHER; note = 2'-O-methyladenosine-3'-phosphate
  modified_base 20: mod_base = OTHER; note = 2'-O-methylguanosine-3'-phosphate
  modified_base 21: mod_base = OTHER; note = 2'-O-methylguanosine-3'-phosphorothioate
  modified_base 22: mod_base = OTHER; note = 2'-O-methylcytidine-3'-phosphorothioate
  modified_base 23: mod_base = OTHER; note = 2'-O-methylguanosine
tagttgaagaagacgaagaggcg

SEQ ID NO: 789 - RNA, 23 nt, synthetic construct
  source 1..23: mol_type = other RNA
  modified_base 1: mod_base = OTHER; note = 2'-O-methyluridine-3'-phosphorothioate 5'-(E)-Vinylphosphonate
  modified_base 2: mod_base = OTHER; note = 2'-deoxy-2'-fluorouridine-3'-phosphorothioate
  modified_base 3: mod_base = OTHER; note = 2'-O-methyluridine-3'-phosphate
  modified_base 4: mod_base = OTHER; note = 2'-O-methylcytidine-3'-phosphate
  modified_base 5: mod_base = OTHER; note = 2'-O-methyladenosine-3'-phosphate
  modified_base 6: mod_base = OTHER; note = 2'-deoxy-2'-fluorouridine-3'-phosphate
  modified_base 7: mod_base = OTHER; note = 2'-O-methyluridine-3'-phosphate
  modified_base 8: mod_base = OTHER; note = 2'-deoxy-2'-fluoroguanosine-3'-phosphate
  modified_base 9: mod_base = OTHER; note = 2'-deoxy-2'-fluoroguanosine-3'-phosphate
  modified_base 10: mod_base = OTHER; note = 2'-O-methyluridine-3'-phosphate
  modified_base 11: mod_base = OTHER; note = 2'-O-methyladenosine-3'-phosphate
  modified_base 12: mod_base = OTHER; note = 2'-O-methyluridine-3'-phosphate
  modified_base 13: mod_base = OTHER; note = 2'-O-methyluridine-3'-phosphate
  modified_base 14: mod_base = OTHER; note = 2'-deoxy-2'-fluorouridine-3'-phosphate
  modified_base 15: mod_base = OTHER; note = 2'-O-methyladenosine-3'-phosphate
  modified_base 16: mod_base = OTHER; note = 2'-deoxy-2'-fluorouridine-3'-phosphate
  modified_base 17: mod_base = OTHER; note = 2'-O-methyluridine-3'-phosphate
  modified_base 18: mod_base = OTHER; note = 2'-O-methylguanosine-3'-phosphate
  modified_base 19: mod_base = OTHER; note = 2'-O-methylcytidine-3'-phosphate
  modified_base 20: mod_base = OTHER; note = 2'-O-methyladenosine-3'-phosphate
  modified_base 21: mod_base = OTHER; note = 2'-O-methylcytidine-3'-phosphorothioate
  modified_base 22: mod_base = OTHER; note = 2'-O-methyladenosine-3'-phosphorothioate
  modified_base 23: mod_base = OTHER; note = 2'-O-methyluridine
tttcattggtatttattgcacat

SEQ ID NO: 790 - RNA, 23 nt, synthetic construct
  source 1..23: mol_type = other RNA
  modified_base 1: mod_base = OTHER; note = 2'-O-methyluridine-3'-phosphorothioate 5'-(E)-Vinylphosphonate
  modified_base 2: mod_base = OTHER; note = 2'-deoxy-2'-fluorouridine-3'-phosphorothioate
  modified_base 3: mod_base = OTHER; note = 2'-O-methyladenosine-3'-phosphate
  modified_base 4: mod_base = OTHER; note = 2'-O-methylcytidine-3'-phosphate
  modified_base 5: mod_base = OTHER; note = 2'-O-methyluridine-3'-phosphate
  modified_base 6: mod_base = OTHER; note = 2'-deoxy-2'-fluorouridine-3'-phosphate
  modified_base 7: mod_base = OTHER; note = 2'-O-methylguanosine-3'-phosphate
  modified_base 8: mod_base = OTHER; note = 2'-deoxy-2'-fluoroguanosine-3'-phosphate
  modified_base 9: mod_base = OTHER; note = 2'-deoxy-2'-fluorouridine-3'-phosphate
  modified_base 10: mod_base = OTHER; note = 2'-O-methyladenosine-3'-phosphate
  modified_base 11: mod_base = OTHER; note = 2'-O-methyladenosine-3'-phosphate
  modified_base 12: mod_base = OTHER; note = 2'-O-methyladenosine-3'-phosphate
  modified_base 13: mod_base = OTHER; note = 2'-O-methyladenosine-3'-phosphate
  modified_base 14: mod_base = OTHER; note = 2'-deoxy-2'-fluorocytidine-3'-phosphate
  modified_base 15: mod_base = OTHER; note = 2'-O-methyladenosine-3'-phosphate
  modified_base 16: mod_base = OTHER; note = 2'-deoxy-2'-fluorocytidine-3'-phosphate
  modified_base 17: mod_base = OTHER; note = 2'-O-methyladenosine-3'-phosphate
  modified_base 18: mod_base = OTHER; note = 2'-O-methylcytidine-3'-phosphate
  modified_base 19: mod_base = OTHER; note = 2'-O-methyladenosine-3'-phosphate
  modified_base 20: mod_base = OTHER; note = 2'-O-methyladenosine-3'-phosphate
  modified_base 21: mod_base = OTHER; note = 2'-O-methylguanosine-3'-phosphorothioate
  modified_base 22: mod_base = OTHER; note = 2'-O-methyladenosine-3'-phosphorothioate
  modified_base 23: mod_base = OTHER; note = 2'-O-methylguanosine
ttacttggtaaaacacacaagag

SEQ ID NO: 791 - RNA, 23 nt, synthetic construct
  source 1..23: mol_type = other RNA
  modified_base 1: mod_base = OTHER; note = 2'-O-methyluridine-3'-phosphorothioate 5'-(E)-Vinylphosphonate
  modified_base 2: mod_base = OTHER; note = 2'-deoxy-2'-fluoroadenosine-3'-phosphorothioate
  modified_base 3: mod_base = OTHER; note = 2'-O-methylcytidine-3'-phosphate
  modified_base 4: mod_base = OTHER; note = 2'-O-methyladenosine-3'-phosphate
  modified_base 5: mod_base = OTHER; note = 2'-O-methyluridine-3'-phosphate
  modified_base 6: mod_base = OTHER; note = 2'-deoxy-2'-fluoroguanosine-3'-phosphate
  modified_base 7: mod_base = OTHER; note = 2'-O-methyladenosine-3'-phosphate
  modified_base 8: mod_base = OTHER; note = 2'-deoxy-2'-fluorouridine-3'-phosphate
  modified_base 9: mod_base = OTHER; note = 2'-deoxy-2'-fluoroguanosine-3'-phosphate
  modified_base 10: mod_base = OTHER; note = 2'-O-methyladenosine-3'-phosphate
  modified_base 11: mod_base = OTHER; note = 2'-O-methyladenosine-3'-phosphate
  modified_base 12: mod_base = OTHER; note = 2'-O-methylguanosine-3'-phosphate
  modified_base 13: mod_base = OTHER; note = 2'-O-methyladenosine-3'-phosphate
  modified_base 14: mod_base = OTHER; note = 2'-deoxy-2'-fluoroguanosine-3'-phosphate
  modified_base 15: mod_base = OTHER; note = 2'-O-methylguanosine-3'-phosphate
  modified_base 16: mod_base = OTHER; note = 2'-deoxy-2'-fluorouridine-3'-phosphate
  modified_base 17: mod_base = OTHER; note = 2'-O-methyluridine-3'-phosphate
  modified_base 18: mod_base = OTHER; note = 2'-O-methylguanosine-3'-phosphate
  modified_base 19: mod_base = OTHER; note = 2'-O-methylguanosine-3'-phosphate
  modified_base 20: mod_base = OTHER; note = 2'-O-methyluridine-3'-phosphate
  modified_base 21: mod_base = OTHER; note = 2'-O-methylguanosine-3'-phosphorothioate
  modified_base 22: mod_base = OTHER; note = 2'-O-methyladenosine-3'-phosphorothioate
  modified_base 23: mod_base = OTHER; note = 2'-O-methylguanosine
tacatgatgaagaggttggtgag

SEQ ID NO: 792 - RNA, 23 nt, synthetic construct
  source 1..23: mol_type = other RNA
  modified_base 1: mod_base = OTHER; note = 2'-O-methyluridine-3'-phosphorothioate 5'-(E)-Vinylphosphonate
  modified_base 2: mod_base = OTHER; note = 2'-deoxy-2'-fluorouridine-3'-phosphorothioate
  modified_base 3: mod_base = OTHER; note = 2'-O-methyladenosine-3'-phosphate
  modified_base 4: mod_base = OTHER; note = 2'-O-methyladenosine-3'-phosphate
  modified_base 5: mod_base = OTHER; note = 2'-O-methylcytidine-3'-phosphate
  modified_base 6: mod_base = OTHER; note = 2'-deoxy-2'-fluoroadenosine-3'-phosphate
  modified_base 7: mod_base = OTHER; note = 2'-O-methylguanosine-3'-phosphate
  modified_base 8: mod_base = OTHER; note = 2'-deoxy-2'-fluorocytidine-3'-phosphate
  modified_base 9: mod_base = OTHER; note = 2'-deoxy-2'-fluoroadenosine-3'-phosphate
  modified_base 10: mod_base = OTHER; note = 2'-O-methylguanosine-3'-phosphate
  modified_base 11: mod_base = OTHER; note = 2'-O-methyladenosine-3'-phosphate
  modified_base 12: mod_base = OTHER; note = 2'-O-methyladenosine-3'-phosphate
  modified_base 13: mod_base = OTHER; note = 2'-O-methyladenosine-3'-phosphate
  modified_base 14: mod_base = OTHER; note = 2'-deoxy-2'-fluorouridine-3'-phosphate
  modified_base 15: mod_base = OTHER; note = 2'-O-methylcytidine-3'-phosphate
  modified_base 16: mod_base = OTHER; note = 2'-deoxy-2'-fluoroadenosine-3'-phosphate
  modified_base 17: mod_base = OTHER; note = 2'-O-methyluridine-3'-phosphate
  modified_base 18: mod_base = OTHER; note = 2'-O-methyluridine-3'-phosphate
  modified_base 19: mod_base = OTHER; note = 2'-O-methyladenosine-3'-phosphate
  modified_base 20: mod_base = OTHER; note = 2'-O-methylcytidine-3'-phosphate
  modified_base 21: mod_base = OTHER; note = 2'-O-methyluridine-3'-phosphorothioate
  modified_base 22: mod_base = OTHER; note = 2'-O-methyluridine-3'-phosphorothioate
  modified_base 23: mod_base = OTHER; note = 2'-O-methyladenosine
ttaacagcagaaatcattactta

SEQ ID NO: 793 - RNA, 23 nt, synthetic construct
  source 1..23: mol_type = other RNA
  modified_base 1: mod_base = OTHER; note = 2'-O-methyluridine-3'-phosphorothioate 5'-(E)-Vinylphosphonate
  modified_base 2: mod_base = OTHER; note = 2'-deoxy-2'-fluoroadenosine-3'-phosphorothioate
  modified_base 3: mod_base = OTHER; note = 2'-O-methylguanosine-3'-phosphate
  modified_base 4: mod_base = OTHER; note = 2'-O-methyladenosine-3'-phosphate
  modified_base 5: mod_base = OTHER; note = 2'-O-methylguanosine-3'-phosphate
  modified_base 6: mod_base = OTHER; note = 2'-deoxy-2'-fluoroadenosine-3'-phosphate
  modified_base 7: mod_base = OTHER; note = 2'-O-methylguanosine-3'-phosphate
  modified_base 8: mod_base = OTHER; note = 2'-deoxy-2'-fluorouridine-3'-phosphate
  modified_base 9: mod_base = OTHER; note = 2'-deoxy-2'-fluoroguanosine-3'-phosphate
  modified_base 10: mod_base = OTHER; note = 2'-O-methyluridine-3'-phosphate
  modified_base 11: mod_base = OTHER; note = 2'-O-methylcytidine-3'-phosphate
  modified_base 12: mod_base = OTHER; note = 2'-O-methyladenosine-3'-phosphate
  modified_base 13: mod_base = OTHER; note = 2'-O-methyladenosine-3'-phosphate
  modified_base 14: mod_base = OTHER; note = 2'-deoxy-2'-fluoroadenosine-3'-phosphate
  modified_base 15: mod_base = OTHER; note = 2'-O-methyladenosine-3'-phosphate
  modified_base 16: mod_base = OTHER; note = 2'-deoxy-2'-fluoroadenosine-3'-phosphate
  modified_base 17: mod_base = OTHER; note = 2'-O-methylcytidine-3'-phosphate
  modified_base 18: mod_base = OTHER; note = 2'-O-methylcytidine-3'-phosphate
  modified_base 19: mod_base = OTHER; note = 2'-O-methyladenosine-3'-phosphate
  modified_base 20: mod_base = OTHER; note = 2'-O-methylcytidine-3'-phosphate
  modified_base 21: mod_base = OTHER; note = 2'-O-methylcytidine-3'-phosphorothioate
  modified_base 22: mod_base = OTHER; note = 2'-O-methyluridine-3'-phosphorothioate
  modified_base 23: mod_base = OTHER; note = 2'-O-methylguanosine
tagagagtgtcaaaaaccacctg

SEQ ID NO: 794 - RNA, 23 nt, synthetic construct
  source 1..23: mol_type = other RNA
  modified_base 1: mod_base = OTHER; note = 2'-O-methyluridine-3'-phosphorothioate 5'-(E)-Vinylphosphonate
  modified_base 2: mod_base = OTHER; note = 2'-deoxy-2'-fluorouridine-3'-phosphorothioate
  modified_base 3: mod_base = OTHER; note = 2'-O-methylguanosine-3'-phosphate
  modified_base 4: mod_base = OTHER; note = 2'-O-methyladenosine-3'-phosphate
  modified_base 5: mod_base = OTHER; note = 2'-O-methylcytidine-3'-phosphate
  modified_base 6: mod_base = OTHER; note = 2'-deoxy-2'-fluoroadenosine-3'-phosphate
  modified_base 7: mod_base = OTHER; note = 2'-O-methylguanosine-3'-phosphate
  modified_base 8: mod_base = OTHER; note = 2'-deoxy-2'-fluoroadenosine-3'-phosphate
  modified_base 9: mod_base = OTHER; note = 2'-deoxy-2'-fluoroguanosine-3'-phosphate
  modified_base 10: mod_base = OTHER; note = 2'-O-methyluridine-3'-phosphate
  modified_base 11: mod_base = OTHER; note = 2'-O-methylcytidine-3'-phosphate
  modified_base 12: mod_base = OTHER; note = 2'-O-methyladenosine-3'-phosphate
  modified_base 13: mod_base = OTHER; note = 2'-O-methylcytidine-3'-phosphate
  modified_base 14: mod_base = OTHER; note = 2'-deoxy-2'-fluoroadenosine-3'-phosphate
  modified_base 15: mod_base = OTHER; note = 2'-O-methyluridine-3'-phosphate
  modified_base 16: mod_base = OTHER; note = 2'-deoxy-2'-fluoroguanosine-3'-phosphate
  modified_base 17: mod_base = OTHER; note = 2'-O-methyluridine-3'-phosphate
  modified_base 18: mod_base = OTHER; note = 2'-O-methylcytidine-3'-phosphate
  modified_base 19: mod_base = OTHER; note = 2'-O-methyladenosine-3'-phosphate
  modified_base 20: mod_base = OTHER; note = 2'-O-methylcytidine-3'-phosphate
  modified_base 21: mod_base = OTHER; note = 2'-O-methyladenosine-3'-phosphorothioate
  modified_base 22: mod_base = OTHER; note = 2'-O-methylguanosine-3'-phosphorothioate
  modified_base 23: mod_base = OTHER; note = 2'-O-methyladenosine
ttgacagagtcacatgtcacaga

SEQ ID NO: 795 - RNA, 23 nt, synthetic construct
  source 1..23: mol_type = other RNA
  modified_base 1: mod_base = OTHER; note = 2'-O-methyluridine-3'-phosphorothioate 5'-(E)-Vinylphosphonate
  modified_base 2: mod_base = OTHER; note = 2'-deoxy-2'-fluoroadenosine-3'-phosphorothioate
  modified_base 3: mod_base = OTHER; note = 2'-O-methyladenosine-3'-phosphate
  modified_base 4: mod_base = OTHER; note = 2'-O-methylcytidine-3'-phosphate
  modified_base 5: mod_base = OTHER; note = 2'-O-methyladenosine-3'-phosphate
  modified_base 6: mod_base = OTHER; note = 2'-deoxy-2'-fluorocytidine-3'-phosphate
  modified_base 7: mod_base = OTHER; note = 2'-O-methyluridine-3'-phosphate
  modified_base 8: mod_base = OTHER; note = 2'-deoxy-2'-fluoroguanosine-3'-phosphate
  modified_base 9: mod_base = OTHER; note = 2'-deoxy-2'-fluorouridine-3'-phosphate
  modified_base 10: mod_base = OTHER; note = 2'-O-methylguanosine-3'-phosphate
  modified_base 11: mod_base = OTHER; note = 2'-O-methylcytidine-3'-phosphate
  modified_base 12: mod_base = OTHER; note = 2'-O-methyladenosine-3'-phosphate
  modified_base 13: mod_base = OTHER; note = 2'-O-methyladenosine-3'-phosphate
  modified_base 14: mod_base = OTHER; note = 2'-deoxy-2'-fluoroadenosine-3'-phosphate
  modified_base 15: mod_base = OTHER; note = 2'-O-methyladenosine-3'-phosphate
  modified_base 16: mod_base = OTHER; note = 2'-deoxy-2'-fluoroadenosine-3'-phosphate
  modified_base 17: mod_base = OTHER; note = 2'-O-methyluridine-3'-phosphate
  modified_base 18: mod_base = OTHER; note = 2'-O-methylguanosine-3'-phosphate
  modified_base 19: mod_base = OTHER; note = 2'-O-methylguanosine-3'-phosphate
  modified_base 20: mod_base = OTHER; note = 2'-O-methylcytidine-3'-phosphate
  modified_base 21: mod_base = OTHER; note = 2'-O-methyladenosine-3'-phosphorothioate
  modified_base 22: mod_base = OTHER; note = 2'-O-methyluridine-3'-phosphorothioate
  modified_base 23: mod_base = OTHER; note = 2'-O-methyluridine
taacactgtgcaaaaatggcatt

SEQ ID NO: 796 - RNA, 23 nt, synthetic construct
  source 1..23: mol_type = other RNA
  modified_base 1: mod_base = OTHER; note = 2'-O-methyluridine-3'-phosphorothioate 5'-(E)-Vinylphosphonate
  modified_base 2: mod_base = OTHER; note = 2'-deoxy-2'-fluoroadenosine-3'-phosphorothioate
  modified_base 3: mod_base = OTHER; note = 2'-O-methyladenosine-3'-phosphate
  modified_base 4: mod_base = OTHER; note = 2'-O-methyluridine-3'-phosphate
  modified_base 5: mod_base = OTHER; note = 2'-O-methyluridine-3'-phosphate
  modified_base 6: mod_base = OTHER; note = 2'-deoxy-2'-fluorocytidine-3'-phosphate
  modified_base 7: mod_base = OTHER; note = 2'-O-methylcytidine-3'-phosphate
  modified_base 8: mod_base = OTHER; note = 2'-deoxy-2'-fluorouridine-3'-phosphate
  modified_base 9: mod_base = OTHER; note = 2'-deoxy-2'-fluorocytidine-3'-phosphate
  modified_base 10: mod_base = OTHER; note = 2'-O-methyladenosine-3'-phosphate
  modified_base 11: mod_base = OTHER; note = 2'-O-methylcytidine-3'-phosphate
  modified_base 12: mod_base = OTHER; note = 2'-O-methyladenosine-3'-phosphate
  modified_base 13: mod_base = OTHER; note = 2'-O-methylcytidine-3'-phosphate
  modified_base 14: mod_base = OTHER; note = 2'-deoxy-2'-fluoroadenosine-3'-phosphate
  modified_base 15: mod_base = OTHER; note = 2'-O-methylguanosine-3'-phosphate
  modified_base 16: mod_base = OTHER; note = 2'-deoxy-2'-fluorouridine-3'-phosphate
  modified_base 17: mod_base = OTHER; note = 2'-O-methyladenosine-3'-phosphate
  modified_base 18: mod_base = OTHER; note = 2'-O-methylguanosine-3'-phosphate
  modified_base 19: mod_base = OTHER; note = 2'-O-methyluridine-3'-phosphate
  modified_base 20: mod_base = OTHER; note = 2'-O-methyluridine-3'-phosphate
  modified_base 21: mod_base = OTHER; note = 2'-O-methyladenosine-3'-phosphorothioate
  modified_base 22: mod_base = OTHER; note = 2'-O-methylguanosine-3'-phosphorothioate
  modified_base 23: mod_base = OTHER; note = 2'-O-methyluridine
taattcctcacacagtagttagt

SEQ ID NO: 797 - RNA, 23 nt, synthetic construct
  source 1..23: mol_type = other RNA
  modified_base 1: mod_base = OTHER; note = 2'-O-methyluridine-3'-phosphorothioate 5'-(E)-Vinylphosphonate
  modified_base 2: mod_base = OTHER; note = 2'-deoxy-2'-fluoroadenosine-3'-phosphorothioate
  modified_base 3: mod_base = OTHER; note = 2'-O-methylguanosine-3'-phosphate
  modified_base 4: mod_base = OTHER; note = 2'-O-methyluridine-3'-phosphate
  modified_base 5: mod_base = OTHER; note = 2'-O-methyladenosine-3'-phosphate
  modified_base 6: mod_base = OTHER; note = 2'-deoxy-2'-fluoroguanosine-3'-phosphate
  modified_base 7: mod_base = OTHER; note = 2'-O-methyladenosine-3'-phosphate
  modified_base 8: mod_base = OTHER; note = 2'-deoxy-2'-fluoroadenosine-3'-phosphate
  modified_base 9: mod_base = OTHER; note = 2'-deoxy-2'-fluorouridine-3'-phosphate
  modified_base 10: mod_base = OTHER; note = 2'-O-methyluridine-3'-phosphate
  modified_base 11: mod_base = OTHER; note = 2'-O-methyluridine-3'-phosphate
  modified_base 12: mod_base = OTHER; note = 2'-O-methyladenosine-3'-phosphate
  modified_base 13: mod_base = OTHER; note = 2'-O-methylcytidine-3'-phosphate
  modified_base 14: mod_base = OTHER; note = 2'-deoxy-2'-fluoroadenosine-3'-phosphate
  modified_base 15: mod_base = OTHER; note = 2'-O-methylcytidine-3'-phosphate
  modified_base 16: mod_base = OTHER; note = 2'-deoxy-2'-fluoroadenosine-3'-phosphate
  modified_base 17: mod_base = OTHER; note = 2'-O-methylcytidine-3'-phosphate
  modified_base 18: mod_base = OTHER; note = 2'-O-methyladenosine-3'-phosphate
  modified_base 19: mod_base = OTHER; note = 2'-O-methyladenosine-3'-phosphate
  modified_base 20: mod_base = OTHER; note = 2'-O-methylguanosine-3'-phosphate
  modified_base 21: mod_base = OTHER; note = 2'-O-methyluridine-3'-phosphorothioate
  modified_base 22: mod_base = OTHER; note = 2'-O-methylguanosine-3'-phosphorothioate
  modified_base 23: mod_base = OTHER; note = 2'-O-methylcytidine
tagtagaatttacacacaagtgc

SEQ ID NO: 798 - RNA, 23 nt, synthetic construct
  source 1..23: mol_type = other RNA
  modified_base 1: mod_base = OTHER; note = 2'-O-methyluridine-3'-phosphorothioate 5'-(E)-Vinylphosphonate
  modified_base 2: mod_base = OTHER; note = 2'-deoxy-2'-fluorouridine-3'-phosphorothioate
  modified_base 3: mod_base = OTHER; note = 2'-O-methyladenosine-3'-phosphate
  modified_base 4: mod_base = OTHER; note = 2'-O-methyluridine-3'-phosphate
  modified_base 5: mod_base = OTHER; note = 2'-O-methyladenosine-3'-phosphate
  modified_base 6: mod_base = OTHER; note = 2'-deoxy-2'-fluoroadenosine-3'-phosphate
  modified_base 7: mod_base = OTHER; note = 2'-O-methyladenosine-3'-phosphate
  modified_base 8: mod_base = OTHER; note = 2'-deoxy-2'-fluorocytidine-3'-phosphate
  modified_base 9: mod_base = OTHER; note = 2'-deoxy-2'-fluoroadenosine-3'-phosphate
  modified_base 10: mod_base = OTHER; note = 2'-O-methyladenosine-3'-phosphate
  modified_base 11: mod_base = OTHER; note = 2'-O-methylguanosine-3'-phosphate
  modified_base 12: mod_base = OTHER; note = 2'-O-methyluridine-3'-phosphate
  modified_base 13: mod_base = OTHER; note = 2'-O-methylcytidine-3'-phosphate
  modified_base 14: mod_base = OTHER; note = 2'-deoxy-2'-fluorouridine-3'-phosphate
  modified_base 15: mod_base = OTHER; note = 2'-O-methyluridine-3'-phosphate
  modified_base 16: mod_base = OTHER; note = 2'-deoxy-2'-fluorouridine-3'-phosphate
  modified_base 17: mod_base = OTHER; note = 2'-O-methylcytidine-3'-phosphate
  modified_base 18: mod_base = OTHER; note = 2'-O-methyluridine-3'-phosphate
  modified_base 19: mod_base = OTHER; note = 2'-O-methyladenosine-3'-phosphate
  modified_base 20: mod_base = OTHER; note = 2'-O-methyluridine-3'-phosphate
  modified_base 21: mod_base = OTHER; note = 2'-O-methylcytidine-3'-phosphorothioate
  modified_base 22: mod_base = OTHER; note = 2'-O-methyluridine-3'-phosphorothioate
  modified_base 23: mod_base = OTHER; note = 2'-O-methylguanosine
ttataaacaagtctttctatctg

SEQ ID NO: 799 - RNA, 23 nt, synthetic construct
  source 1..23: mol_type = other RNA
  modified_base 1: mod_base = OTHER; note = 2'-O-methyluridine-3'-phosphorothioate 5'-(E)-Vinylphosphonate
  modified_base 2: mod_base = OTHER; note = 2'-deoxy-2'-fluoroguanosine-3'-phosphorothioate
  modified_base 3: mod_base = OTHER; note = 2'-O-methylcytidine-3'-phosphate
  modified_base 4: mod_base = OTHER; note = 2'-O-methyluridine-3'-phosphate
  modified_base 5: mod_base = OTHER; note = 2'-O-methyluridine-3'-phosphate
  modified_base 6: mod_base = OTHER; note = 2'-deoxy-2'-fluoroguanosine-3'-phosphate
  modified_base 7: mod_base = OTHER; note = 2'-O-methyluridine-3'-phosphate
  modified_base 8: mod_base = OTHER; note = 2'-deoxy-2'-fluorouridine-3'-phosphate
  modified_base 9: mod_base = OTHER; note = 2'-deoxy-2'-fluorocytidine-3'-phosphate
  modified_base 10: mod_base = OTHER; note = 2'-O-methylcytidine-3'-phosphate
  modified_base 11: mod_base = OTHER; note = 2'-O-methyladenosine-3'-phosphate
  modified_base 12: mod_base = OTHER; note = 2'-O-methyladenosine-3'-phosphate
  modified_base 13: mod_base = OTHER; note = 2'-O-methylguanosine-3'-phosphate
  modified_base 14: mod_base = OTHER; note = 2'-deoxy-2'-fluoroadenosine-3'-phosphate
  modified_base 15: mod_base = OTHER; note = 2'-O-methyladenosine-3'-phosphate
  modified_base 16: mod_base = OTHER; note = 2'-deoxy-2'-fluoroguanosine-3'-phosphate
  modified_base 17: mod_base = OTHER; note = 2'-O-methyladenosine-3'-phosphate
  modified_base 18: mod_base = OTHER; note = 2'-O-methylguanosine-3'-phosphate
  modified_base 19: mod_base = OTHER; note = 2'-O-methylcytidine-3'-phosphate
  modified_base 20: mod_base = OTHER; note = 2'-O-methyluridine-3'-phosphate
  modified_base 21: mod_base = OTHER; note = 2'-O-methyluridine-3'-phosphorothioate
  modified_base 22: mod_base = OTHER; note = 2'-O-methyladenosine-3'-phosphorothioate
  modified_base 23: mod_base = OTHER; note = 2'-O-methyladenosine
tgcttgttccaagaagagcttaa

SEQ ID NO: 800 - RNA, 23 nt, synthetic construct
  source 1..23: mol_type = other RNA
  modified_base 1: mod_base = OTHER; note = 2'-O-methyluridine-3'-phosphorothioate 5'-(E)-Vinylphosphonate
  modified_base 2: mod_base = OTHER; note = 2'-deoxy-2'-fluoroguanosine-3'-phosphorothioate
  modified_base 3: mod_base = OTHER; note = 2'-O-methylcytidine-3'-phosphate
  modified_base 4: mod_base = OTHER; note = 2'-O-methyladenosine-3'-phosphate
  modified_base 5: mod_base = OTHER; note = 2'-O-methyladenosine-3'-phosphate
  modified_base 6: mod_base = OTHER; note = 2'-deoxy-2'-fluoroguanosine-3'-phosphate
  modified_base 7: mod_base = OTHER; note = 2'-O-methyluridine-3'-phosphate
  modified_base 8: mod_base = OTHER; note = 2'-deoxy-2'-fluoroadenosine-3'-phosphate
  modified_base 9: mod_base = OTHER; note = 2'-deoxy-2'-fluoroadenosine-3'-phosphate
  modified_base 10: mod_base = OTHER; note = 2'-O-methylcytidine-3'-phosphate
  modified_base 11: mod_base = OTHER; note = 2'-O-methyladenosine-3'-phosphate
  modified_base 12: mod_base = OTHER; note = 2'-O-methyluridine-3'-phosphate
  modified_base 13: mod_base = OTHER; note = 2'-O-methylcytidine-3'-phosphate
  modified_base 14: mod_base = OTHER; note = 2'-deoxy-2'-fluorouridine-3'-phosphate
  modified_base 15: mod_base = OTHER; note = 2'-O-methyluridine-3'-phosphate
  modified_base 16: mod_base = OTHER; note = 2'-deoxy-2'-fluorocytidine-3'-phosphate
  modified_base 17: mod_base = OTHER; note = 2'-O-methyluridine-3'-phosphate
  modified_base 18: mod_base = OTHER; note = 2'-O-methylguanosine-3'-phosphate
  modified_base 19: mod_base = OTHER; note = 2'-O-methyluridine-3'-phosphate
  modified_base 20: mod_base = OTHER; note = 2'-O-methylguanosine-3'-phosphate
  modified_base 21: mod_base = OTHER; note = 2'-O-methylguanosine-3'-phosphorothioate
  modified_base 22: mod_base = OTHER; note = 2'-O-methyladenosine-3'-phosphorothioate
  modified_base 23: mod_base = OTHER; note = 2'-O-methyluridine
tgcaagtaacatcttctgtggat

SEQ ID NO: 801 - RNA, 23 nt, synthetic construct
  source 1..23: mol_type = other RNA
  modified_base 1: mod_base = OTHER; note = 2'-O-methyluridine-3'-phosphorothioate 5'-(E)-Vinylphosphonate
  modified_base 2: mod_base = OTHER; note = 2'-deoxy-2'-fluorouridine-3'-phosphorothioate
  modified_base 3: mod_base = OTHER; note = 2'-O-methylcytidine-3'-phosphate
  modified_base 4: mod_base = OTHER; note = 2'-O-methylcytidine-3'-phosphate
  modified_base 5: mod_base = OTHER; note = 2'-O-methyluridine-3'-phosphate
  modified_base 6: mod_base = OTHER; note = 2'-deoxy-2'-fluoroguanosine-3'-phosphate
  modified_base 7: mod_base = OTHER; note = 2'-O-methyluridine-3'-phosphate
  modified_base 8: mod_base = OTHER; note = 2'-deoxy-2'-fluorocytidine-3'-phosphate
  modified_base 9: mod_base = OTHER; note = 2'-deoxy-2'-fluorouridine-3'-phosphate
  modified_base 10: mod_base = OTHER; note = 2'-O-methyluridine-3'-phosphate
  modified_base 11: mod_base = OTHER; note = 2'-O-methylcytidine-3'-phosphate
  modified_base 12: mod_base = OTHER; note = 2'-O-methyladenosine-3'-phosphate
  modified_base 13: mod_base = OTHER; note = 2'-O-methyladenosine-3'-phosphate
  modified_base 14: mod_base = OTHER; note = 2'-deoxy-2'-fluorouridine-3'-phosphate
  modified_base 15: mod_base = OTHER; note = 2'-O-methyluridine-3'-phosphate
  modified_base 16: mod_base = OTHER; note = 2'-deoxy-2'-fluoroguanosine-3'-phosphate
  modified_base 17: mod_base = OTHER; note = 2'-O-methyladenosine-3'-phosphate
  modified_base 18: mod_base = OTHER; note = 2'-O-methylcytidine-3'-phosphate
  modified_base 19: mod_base = OTHER; note = 2'-O-methyladenosine-3'-phosphate
  modified_base 20: mod_base = OTHER; note = 2'-O-methylguanosine-3'-phosphate
  modified_base 21: mod_base = OTHER; note = 2'-O-methyladenosine-3'-phosphorothioate
  modified_base 22: mod_base = OTHER; note = 2'-O-methylguanosine-3'-phosphorothioate
  modified_base 23: mod_base = OTHER; note = 2'-O-methyluridine
ttcctgtcttcaattgacagagt

SEQ ID NO: 802 - RNA, 23 nt, synthetic construct
  source 1..23: mol_type = other RNA
  modified_base 1: mod_base = OTHER; note = 2'-O-methyluridine-3'-phosphorothioate 5'-(E)-Vinylphosphonate
  modified_base 2: mod_base = OTHER; note = 2'-deoxy-2'-fluoroguanosine-3'-phosphorothioate
  modified_base 3: mod_base = OTHER; note = 2'-O-methylcytidine-3'-phosphate
  modified_base 4: mod_base = OTHER; note = 2'-O-methyladenosine-3'-phosphate
  modified_base 5: mod_base = OTHER; note = 2'-O-methylguanosine-3'-phosphate
  modified_base 6: mod_base = OTHER; note = 2'-deoxy-2'-fluorouridine-3'-phosphate
  modified_base 7: mod_base = OTHER; note = 2'-O-methyladenosine-3'-phosphate
  modified_base 8: mod_base = OTHER; note = 2'-deoxy-2'-fluoroadenosine-3'-phosphate
  modified_base 9: mod_base = OTHER; note = 2'-deoxy-2'-fluorouridine-3'-phosphate
  modified_base 10: mod_base = OTHER; note = 2'-O-methylcytidine-3'-phosphate
  modified_base 11: mod_base = OTHER; note = 2'-O-methyluridine-3'-phosphate
  modified_base 12: mod_base = OTHER; note = 2'-O-methylguanosine-3'-phosphate
  modified_base 13: mod_base = OTHER; note = 2'-O-methyladenosine-3'-phosphate
  modified_base 14: mod_base = OTHER; note = 2'-deoxy-2'-fluoroadenosine-3'-phosphate
  modified_base 15: mod_base = OTHER; note = 2'-O-methylcytidine-3'-phosphate
  modified_base 16: mod_base = OTHER; note = 2'-deoxy-2'-fluorouridine-3'-phosphate
  modified_base 17: mod_base = OTHER; note = 2'-O-methylguanosine-3'-phosphate
  modified_base 18: mod_base = OTHER; note = 2'-O-methyluridine-3'-phosphate
  modified_base 19: mod_base = OTHER; note = 2'-O-methyluridine-3'-phosphate
  modified_base 20: mod_base = OTHER; note = 2'-O-methyluridine-3'-phosphate
  modified_base 21: mod_base = OTHER; note = 2'-O-methylcytidine-3'-phosphorothioate
  modified_base 22: mod_base = OTHER; note = 2'-O-methyluridine-3'-phosphorothioate
  modified_base 23: mod_base = OTHER; note = 2'-O-methylcytidine
tgcagtaatctgaactgtttctc

SEQ ID NO: 803 - RNA, 23 nt, synthetic construct
  source 1..23: mol_type = other RNA
  modified_base 1: mod_base = OTHER; note = 2'-O-methyluridine-3'-phosphorothioate 5'-(E)-Vinylphosphonate
  modified_base 2: mod_base = OTHER; note = 2'-deoxy-2'-fluorocytidine-3'-phosphorothioate
  modified_base 3: mod_base = OTHER; note = 2'-O-methyladenosine-3'-phosphate
  modified_base 4: mod_base = OTHER; note = 2'-O-methyladenosine-3'-phosphate
  modified_base 5: mod_base = OTHER; note = 2'-O-methyluridine-3'-phosphate
  modified_base 6: mod_base = OTHER; note = 2'-deoxy-2'-fluoroguanosine-3'-phosphate
  modified_base 7: mod_base = OTHER; note = 2'-O-methyladenosine-3'-phosphate
  modified_base 8: mod_base = OTHER; note = 2'-deoxy-2'-fluoroadenosine-3'-phosphate
  modified_base 9: mod_base = OTHER; note = 2'-deoxy-2'-fluorouridine-3'-phosphate
  modified_base 10: mod_base = OTHER; note = 2'-O-methylcytidine-3'-phosphate
  modified_base 11: mod_base = OTHER; note = 2'-O-methyladenosine-3'-phosphate
  modified_base 12: mod_base = OTHER; note = 2'-O-methyluridine-3'-phosphate
  modified_base 13: mod_base = OTHER; note = 2'-O-methyluridine-3'-phosphate
  modified_base 14: mod_base = OTHER; note = 2'-deoxy-2'-fluoroadenosine-3'-phosphate
  modified_base 15: mod_base = OTHER; note = 2'-O-methylguanosine-3'-phosphate
  modified_base 16: mod_base = OTHER; note = 2'-deoxy-2'-fluorocytidine-3'-phosphate
  modified_base 17: mod_base = OTHER; note = 2'-O-methyluridine-3'-phosphate
  modified_base 18: mod_base = OTHER; note = 2'-O-methylcytidine-3'-phosphate
  modified_base 19: mod_base = OTHER; note = 2'-O-methyladenosine-3'-phosphate
  modified_base 20: mod_base = OTHER; note = 2'-O-methyladenosine-3'-phosphate
  modified_base 21: mod_base = OTHER; note = 2'-O-methyluridine-3'-phosphorothioate
  modified_base 22: mod_base = OTHER; note = 2'-O-methyladenosine-3'-phosphorothioate
  modified_base 23: mod_base = OTHER; note = 2'-O-methyladenosine
tcaatgaatcattagctcaataa

SEQ ID NO: 804 - RNA, 23 nt, synthetic construct
  source 1..23: mol_type = other RNA
  modified_base 1: mod_base = OTHER; note = 2'-O-methyluridine-3'-phosphorothioate 5'-(E)-Vinylphosphonate
  modified_base 2: mod_base = OTHER; note = 2'-deoxy-2'-fluorouridine-3'-phosphorothioate
  modified_base 3: mod_base = OTHER; note = 2'-O-methyluridine-3'-phosphate
  modified_base 4: mod_base = OTHER; note = 2'-O-methyluridine-3'-phosphate
  modified_base 5: mod_base = OTHER; note = 2'-O-methylcytidine-3'-phosphate
  modified_base 6: mod_base = OTHER; note = 2'-deoxy-2'-fluorouridine-3'-phosphate
  modified_base 7: mod_base = OTHER; note = 2'-O-methylcytidine-3'-phosphate
  modified_base 8: mod_base = OTHER; note = 2'-deoxy-2'-fluorouridine-3'-phosphate
  modified_base 9: mod_base = OTHER; note = 2'-deoxy-2'-fluoroguanosine-3'-phosphate
  modified_base 10: mod_base = OTHER; note = 2'-O-methylguanosine-3'-phosphate
  modified_base 11: mod_base = OTHER; note = 2'-O-methyladenosine-3'-phosphate
  modified_base 12: mod_base = OTHER; note = 2'-O-methyladenosine-3'-phosphate
  modified_base 13: mod_base = OTHER; note = 2'-O-methyladenosine-3'-phosphate
  modified_base 14: mod_base = OTHER; note = 2'-deoxy-2'-fluoroguanosine-3'-phosphate
  modified_base 15: mod_base = OTHER; note = 2'-O-methylcytidine-3'-phosphate
  modified_base 16: mod_base = OTHER; note = 2'-deoxy-2'-fluoroadenosine-3'-phosphate
  modified_base 17: mod_base = OTHER; note = 2'-O-methyladenosine-3'-phosphate
  modified_base 18: mod_base = OTHER; note = 2'-O-methyladenosine-3'-phosphate
  modified_base 19: mod_base = OTHER; note = 2'-O-methyladenosine-3'-phosphate
  modified_base 20: mod_base = OTHER; note = 2'-O-methylguanosine-3'-phosphate
  modified_base 21: mod_base = OTHER; note = 2'-O-methylguanosine-3'-phosphorothioate
  modified_base 22: mod_base = OTHER; note = 2'-O-methyladenosine-3'-phosphorothioate
  modified_base 23: mod_base = OTHER; note = 2'-O-methyladenosine
ttttctctggaaagcaaaaggaa

SEQ ID NO: 805 - RNA, 23 nt, synthetic construct
  source 1..23: mol_type = other RNA
  modified_base 1: mod_base = OTHER; note = 2'-O-methyluridine-3'-phosphorothioate 5'-(E)-Vinylphosphonate
  modified_base 2: mod_base = OTHER; note = 2'-deoxy-2'-fluoroadenosine-3'-phosphorothioate
  modified_base 3: mod_base = OTHER; note = 2'-O-methyladenosine-3'-phosphate
  modified_base 4: mod_base = OTHER; note = 2'-O-methyladenosine-3'-phosphate
  modified_base 5: mod_base = OTHER; note = 2'-O-methyladenosine-3'-phosphate
  modified_base 6: mod_base = OTHER; note = 2'-deoxy-2'-fluorouridine-3'-phosphate
  modified_base 7: mod_base = OTHER; note = 2'-O-methylcytidine-3'-phosphate
  modified_base 8: mod_base = OTHER; note = 2'-deoxy-2'-fluorouridine-3'-phosphate
  modified_base 9: mod_base = OTHER; note = 2'-deoxy-2'-fluoroadenosine-3'-phosphate
  modified_base 10: mod_base = OTHER; note = 2'-O-methyladenosine-3'-phosphate
  modified_base 11: mod_base = OTHER; note = 2'-O-methyladenosine-3'-phosphate
  modified_base 12: mod_base = OTHER; note = 2'-O-methylguanosine-3'-phosphate
  modified_base 13: mod_base = OTHER; note = 2'-O-methyladenosine-3'-phosphate
  modified_base 14: mod_base = OTHER; note = 2'-deoxy-2'-fluorouridine-3'-phosphate
  modified_base 15: mod_base = OTHER; note = 2'-O-methylguanosine-3'-phosphate
  modified_base 16: mod_base = OTHER; note = 2'-deoxy-2'-fluorocytidine-3'-phosphate
  modified_base 17: mod_base = OTHER; note = 2'-O-methyladenosine-3'-phosphate
  modified_base 18: mod_base = OTHER; note = 2'-O-methyluridine-3'-phosphate
  modified_base 19: mod_base = OTHER; note = 2'-O-methylcytidine-3'-phosphate
  modified_base 20: mod_base = OTHER; note = 2'-O-methyladenosine-3'-phosphate
  modified_base 21: mod_base = OTHER; note = 2'-O-methylcytidine-3'-phosphorothioate
  modified_base 22: mod_base = OTHER; note = 2'-O-methyladenosine-3'-phosphorothioate
  modified_base 23: mod_base = OTHER; note = 2'-O-methylcytidine
taaaatctaaagatgcatcacac

SEQ ID NO: 806 - RNA, 23 nt, synthetic construct
  source 1..23: mol_type = other RNA
  modified_base 1: mod_base = OTHER; note = 2'-O-methyluridine-3'-phosphorothioate 5'-(E)-Vinylphosphonate
  modified_base 2: mod_base = OTHER; note = 2'-deoxy-2'-fluoroguanosine-3'-phosphorothioate
  modified_base 3: mod_base = OTHER; note = 2'-O-methylguanosine-3'-phosphate
  modified_base 4: mod_base = OTHER; note = 2'-O-methyladenosine-3'-phosphate
  modified_base 5: mod_base = OTHER; note = 2'-O-methyluridine-3'-phosphate
  modified_base 6: mod_base = OTHER; note = 2'-deoxy-2'-fluoroguanosine-3'-phosphate
  modified_base 7: mod_base = OTHER; note = 2'-O-methyladenosine-3'-phosphate
  modified_base 8: mod_base = OTHER; note = 2'-deoxy-2'-fluorouridine-3'-phosphate
  modified_base 9: mod_base = OTHER; note = 2'-deoxy-2'-fluorouridine-3'-phosphate
  modified_base 10: mod_base = OTHER; note = 2'-O-methylcytidine-3'-phosphate
  modified_base 11: mod_base = OTHER; note = 2'-O-methyladenosine-3'-phosphate
  modified_base 12: mod_base = OTHER; note = 2'-O-methylguanosine-3'-phosphate
  modified_base 13: mod_base = OTHER; note = 2'-O-methyladenosine-3'-phosphate
  modified_base 14: mod_base = OTHER; note = 2'-deoxy-2'-fluorocytidine-3'-phosphate
  modified_base 15: mod_base = OTHER; note = 2'-O-methylguanosine-3'-phosphate
  modified_base 16: mod_base = OTHER; note = 2'-deoxy-2'-fluoroadenosine-3'-phosphate
  modified_base 17: mod_base = OTHER; note = 2'-O-methylguanosine-3'-phosphate
  modified_base 18: mod_base = OTHER; note = 2'-O-methylguanosine-3'-phosphate
  modified_base 19: mod_base = OTHER; note = 2'-O-methyladenosine-3'-phosphate
  modified_base 20: mod_base = OTHER; note = 2'-O-methyluridine-3'-phosphate
  modified_base 21: mod_base = OTHER; note = 2'-O-methyluridine-3'-phosphorothioate
  modified_base 22: mod_base = OTHER; note = 2'-O-methylguanosine-3'-phosphorothioate
  modified_base 23: mod_base = OTHER; note = 2'-O-methyluridine
tggatgattcagacgaggattgt

SEQ ID NO: 807 - RNA, 23 nt, synthetic construct
  source 1..23: mol_type = other RNA
  modified_base 1: mod_base = OTHER; note = 2'-O-methyluridine-3'-phosphorothioate 5'-(E)-Vinylphosphonate
  modified_base 2: mod_base = OTHER; note = 2'-deoxy-2'-fluorouridine-3'-phosphorothioate
  modified_base 3: mod_base = OTHER; note = 2'-O-methyladenosine-3'-phosphate
  modified_base 4: mod_base = OTHER; note = 2'-O-methylcytidine-3'-phosphate
  modified_base 5: mod_base = OTHER; note = 2'-O-methyladenosine-3'-phosphate
  modified_base 6: mod_base = OTHER; note = 2'-deoxy-2'-fluorocytidine-3'-phosphate
  modified_base 7: mod_base = OTHER; note = 2'-O-methyladenosine-3'-phosphate
  modified_base 8: mod_base = OTHER; note = 2'-deoxy-2'-fluorocytidine-3'-phosphate
  modified_base 9: mod_base = OTHER; note = 2'-deoxy-2'-fluoroadenosine-3'-phosphate
  modified_base 10: mod_base = OTHER; note = 2'-O-methyladenosine-3'-phosphate
  modified_base 11: mod_base = OTHER; note = 2'-O-methylguanosine-3'-phosphate
  modified_base 12: mod_base = OTHER; note = 2'-O-methyluridine-3'-phosphate
  modified_base 13: mod_base = OTHER; note = 2'-O-methylguanosine-3'-phosphate
  modified_base 14: mod_base = OTHER; note = 2'-deoxy-2'-fluorocytidine-3'-phosphate
  modified_base 15: mod_base = OTHER; note = 2'-O-methyluridine-3'-phosphate
  modified_base 16: mod_base = OTHER; note = 2'-deoxy-2'-fluoroadenosine-3'-phosphate
  modified_base 17: mod_base = OTHER; note = 2'-O-methyladenosine-3'-phosphate
  modified_base 18: mod_base = OTHER; note = 2'-O-methylcytidine-3'-phosphate
  modified_base 19: mod_base = OTHER; note = 2'-O-methyluridine-3'-phosphate
  modified_base 20: mod_base = OTHER; note = 2'-O-methyluridine-3'-phosphate
  modified_base 21: mod_base = OTHER; note = 2'-O-methyluridine-3'-phosphorothioate
  modified_base 22: mod_base = OTHER; note = 2'-O-methylcytidine-3'-phosphorothioate
  modified_base 23: mod_base = OTHER; note = 2'-O-methyladenosine
ttacacacaagtgctaactttca

SEQ ID NO: 808 - RNA, 23 nt, synthetic construct
  source 1..23: mol_type = other RNA
  modified_base 1: mod_base = OTHER; note = 2'-O-methyluridine-3'-phosphorothioate 5'-(E)-Vinylphosphonate
  modified_base 2: mod_base = OTHER; note = 2'-deoxy-2'-fluorocytidine-3'-phosphorothioate
  modified_base 3: mod_base = OTHER; note = 2'-O-methyluridine-3'-phosphate
  modified_base 4: mod_base = OTHER; note = 2'-O-methyluridine-3'-phosphate
  modified_base 5: mod_base = OTHER; note = 2'-O-methylcytidine-3'-phosphate
  modified_base 6: mod_base = OTHER; note = 2'-deoxy-2'-fluorouridine-3'-phosphate
  modified_base 7: mod_base = OTHER; note = 2'-O-methylguanosine-3'-phosphate
  modified_base 8: mod_base = OTHER; note = 2'-deoxy-2'-fluorouridine-3'-phosphate
  modified_base 9: mod_base = OTHER; note = 2'-deoxy-2'-fluoroguanosine-3'-phosphate
  modified_base 10: mod_base = OTHER; note = 2'-O-methylguanosine-3'-phosphate
  modified_base 11: mod_base = OTHER; note = 2'-O-methyladenosine-3'-phosphate
  modified_base 12: mod_base = OTHER; note = 2'-O-methyluridine-3'-phosphate
  modified_base 13: mod_base = OTHER; note = 2'-O-methyluridine-3'-phosphate
  modified_base 14: mod_base = OTHER; note = 2'-deoxy-2'-fluorouridine-3'-phosphate
  modified_base 15: mod_base = OTHER; note = 2'-O-methyluridine-3'-phosphate
  modified_base 16: mod_base = OTHER; note = 2'-deoxy-2'-fluoroguanosine-3'-phosphate
  modified_base 17: mod_base = OTHER; note = 2'-O-methyluridine-3'-phosphate
  modified_base 18: mod_base = OTHER; note = 2'-O-methyladenosine-3'-phosphate
  modified_base 19: mod_base = OTHER; note = 2'-O-methyladenosine-3'-phosphate
  modified_base 20: mod_base = OTHER; note = 2'-O-methyluridine-3'-phosphate
  modified_base 21: mod_base = OTHER; note = 2'-O-methyluridine-3'-phosphorothioate
  modified_base 22: mod_base = OTHER; note = 2'-O-methylcytidine-3'-phosphorothioate
  modified_base 23: mod_base = OTHER; note = 2'-O-methylcytidine
tcttctgtggattttgtaattcc

SEQ ID NO: 809 - RNA, 23 nt, synthetic construct
  source 1..23: mol_type = other RNA
  modified_base 1: mod_base = OTHER; note = 2'-O-methyluridine-3'-phosphorothioate 5'-(E)-Vinylphosphonate
  modified_base 2: mod_base = OTHER; note = 2'-deoxy-2'-fluoroadenosine-3'-phosphorothioate
  modified_base 3: mod_base = OTHER; note = 2'-O-methyluridine-3'-phosphate
  modified_base 4: mod_base = OTHER; note = 2'-O-methylguanosine-3'-phosphate
  modified_base 5: mod_base = OTHER; note = 2'-O-methyluridine-3'-phosphate
  modified_base 6: mod_base = OTHER; note = 2'-deoxy-2'-fluorocytidine-3'-phosphate
  modified_base 7: mod_base = OTHER; note = 2'-O-methyluridine-3'-phosphate
  modified_base 8: mod_base = OTHER; note = 2'-deoxy-2'-fluorouridine-3'-phosphate
  modified_base 9: mod_base = OTHER; note = 2'-deoxy-2'-fluoroguanosine-3'-phosphate
  modified_base 10: mod_base = OTHER; note = 2'-O-methyladenosine-3'-phosphate
  modified_base 11: mod_base = OTHER; note = 2'-O-methylcytidine-3'-phosphate
  modified_base 12: mod_base = OTHER; note = 2'-O-methyladenosine-3'-phosphate
  modified_base 13: mod_base = OTHER; note = 2'-O-methyladenosine-3'-phosphate
  modified_base 14: mod_base = OTHER; note = 2'-deoxy-2'-fluoroadenosine-3'-phosphate
  modified_base 15: mod_base = OTHER; note = 2'-O-methylcytidine-3'-phosphate
  modified_base 16: mod_base = OTHER; note = 2'-deoxy-2'-fluorouridine-3'-phosphate
  modified_base 17: mod_base = OTHER; note = 2'-O-methylguanosine-3'-phosphate
  modified_base 18: mod_base = OTHER; note = 2'-O-methyluridine-3'-phosphate
  modified_base 19: mod_base = OTHER; note = 2'-O-methylcytidine-3'-phosphate
  modified_base 20: mod_base = OTHER; note = 2'-O-methyladenosine-3'-phosphate
  modified_base 21: mod_base = OTHER; note = 2'-O-methyluridine-3'-phosphorothioate
  modified_base 22: mod_base = OTHER; note = 2'-O-methyluridine-3'-phosphorothioate
  modified_base 23: mod_base = OTHER; note = 2'-O-methylcytidine
tatgtcttgacaaactgtcattc

SEQ ID NO: 810 - RNA, 23 nt, synthetic construct
  source 1..23: mol_type = other RNA
  modified_base 1: mod_base = OTHER; note = 2'-O-methyluridine-3'-phosphorothioate 5'-(E)-Vinylphosphonate
  modified_base 2: mod_base = OTHER; note = 2'-deoxy-2'-fluoroadenosine-3'-phosphorothioate
  modified_base 3: mod_base = OTHER; note = 2'-O-methyluridine-3'-phosphate
  modified_base 4: mod_base = OTHER; note = 2'-O-methyluridine-3'-phosphate
  modified_base 5: mod_base = OTHER; note = 2'-O-methyluridine-3'-phosphate
  modified_base 6: mod_base = OTHER; note = 2'-deoxy-2'-fluorouridine-3'-phosphate
  modified_base 7: mod_base = OTHER; note = 2'-O-methyladenosine-3'-phosphate
  modified_base 8: mod_base = OTHER; note = 2'-deoxy-2'-fluorouridine-3'-phosphate
  modified_base 9: mod_base = OTHER; note = 2'-deoxy-2'-fluorouridine-3'-phosphate
  modified_base 10: mod_base = OTHER; note = 2'-O-methyluridine-3'-phosphate
  modified_base 11: mod_base = OTHER; note = 2'-O-methyladenosine-3'-phosphate
  modified_base 12: mod_base = OTHER; note = 2'-O-methyladenosine-3'-phosphate
  modified_base 13: mod_base = OTHER; note = 2'-O-methylguanosine-3'-phosphate
  modified_base 14: mod_base = OTHER; note = 2'-deoxy-2'-fluoroadenosine-3'-phosphate
  modified_base 15: mod_base = OTHER; note = 2'-O-methyluridine-3'-phosphate
  modified_base 16: mod_base = OTHER; note = 2'-deoxy-2'-fluorocytidine-3'-phosphate
  modified_base 17: mod_base = OTHER; note = 2'-O-methyluridine-3'-phosphate
  modified_base 18: mod_base = OTHER; note = 2'-O-methylguanosine-3'-phosphate
  modified_base 19: mod_base = OTHER; note = 2'-O-methylcytidine-3'-phosphate
  modified_base 20: mod_base = OTHER; note = 2'-O-methylcytidine-3'-phosphate
  modified_base 21: mod_base = OTHER; note = 2'-O-methylcytidine-3'-phosphorothioate
  modified_base 22: mod_base = OTHER; note = 2'-O-methyladenosine-3'-phosphorothioate
  modified_base 23: mod_base = OTHER; note = 2'-O-methylguanosine
tattttatttaagatctgcccag

SEQ ID NO: 811 - RNA, 23 nt, synthetic construct
  source 1..23: mol_type = other RNA
  modified_base 1: mod_base = OTHER; note = 2'-O-methyluridine-3'-phosphorothioate 5'-(E)-Vinylphosphonate
  modified_base 2: mod_base = OTHER; note = 2'-deoxy-2'-fluorocytidine-3'-phosphorothioate
  modified_base 3: mod_base = OTHER; note = 2'-O-methyladenosine-3'-phosphate
  modified_base 4: mod_base = OTHER; note = 2'-O-methylcytidine-3'-phosphate
  modified_base 5: mod_base = OTHER; note = 2'-O-methylguanosine-3'-phosphate
  modified_base 6: mod_base = OTHER; note = 2'-deoxy-2'-fluoroadenosine-3'-phosphate
  modified_base 7: mod_base = OTHER; note = 2'-O-methyluridine-3'-phosphate
  modified_base 8: mod_base = OTHER; note = 2'-deoxy-2'-fluoroguanosine-3'-phosphate
  modified_base 9: mod_base = OTHER; note = 2'-deoxy-2'-fluoroadenosine-3'-phosphate
  modified_base 10: mod_base = OTHER; note = 2'-O-methyluridine-3'-phosphate
  modified_base 11: mod_base = OTHER; note = 2'-O-methylcytidine-3'-phosphate
  modified_base 12: mod_base = OTHER; note = 2'-O-methylguanosine-3'-phosphate
  modified_base 13: mod_base = OTHER; note = 2'-O-methyladenosine-3'-phosphate
  modified_base 14: mod_base = OTHER; note = 2'-deoxy-2'-fluorouridine-3'-phosphate
  modified_base 15: mod_base = OTHER; note = 2'-O-methyluridine-3'-phosphate
  modified_base 16: mod_base = OTHER; note = 2'-deoxy-2'-fluorouridine-3'-phosphate
  modified_base 17: mod_base = OTHER; note = 2'-O-methyluridine-3'-phosphate
  modified_base 18: mod_base = OTHER; note = 2'-O-methyladenosine-3'-phosphate
  modified_base 19: mod_base = OTHER; note = 2'-O-methyladenosine-3'-phosphate
  modified_base 20: mod_base = OTHER; note = 2'-O-methyluridine-3'-phosphate
  modified_base 21: mod_base = OTHER; note = 2'-O-methylcytidine-3'-phosphorothioate
  modified_base 22: mod_base = OTHER; note = 2'-O-methylcytidine-3'-phosphorothioate
  modified_base 23: mod_base = OTHER; note = 2'-O-methylcytidine
tcacgatgatcgattttaatccc

SEQ ID NO: 812 - RNA, 23 nt, synthetic construct
  source 1..23: mol_type = other RNA
  modified_base 1: mod_base = OTHER; note = 2'-O-methyluridine-3'-phosphorothioate 5'-(E)-Vinylphosphonate
  modified_base 2: mod_base = OTHER; note = 2'-deoxy-2'-fluoroadenosine-3'-phosphorothioate
  modified_base 3: mod_base = OTHER; note = 2'-O-methylcytidine-3'-phosphate
  modified_base 4: mod_base = OTHER; note = 2'-O-methyladenosine-3'-phosphate
  modified_base 5: mod_base = OTHER; note = 2'-O-methyladenosine-3'-phosphate
  modified_base 6: mod_base = OTHER; note = 2'-deoxy-2'-fluorocytidine-3'-phosphate
  modified_base 7: mod_base = OTHER; note = 2'-O-methyladenosine-3'-phosphate
  modified_base 8: mod_base = OTHER; note = 2'-deoxy-2'-fluoroadenosine-3'-phosphate
  modified_base 9: mod_base = OTHER; note = 2'-deoxy-2'-fluoroguanosine-3'-phosphate
  modified_base 10: mod_base = OTHER; note = 2'-O-methylguanosine-3'-phosphate
  modified_base 11: mod_base = OTHER; note = 2'-O-methyladenosine-3'-phosphate
  modified_base 12: mod_base = OTHER; note = 2'-O-methyladenosine-3'-phosphate
  modified_base 13: mod_base = OTHER; note = 2'-O-methylcytidine-3'-phosphate
  modified_base 14: mod_base = OTHER; note = 2'-deoxy-2'-fluoroadenosine-3'-phosphate
  modified_base 15: mod_base = OTHER; note = 2'-O-methyluridine-3'-phosphate
  modified_base 16: mod_base = OTHER; note = 2'-deoxy-2'-fluorocytidine-3'-phosphate
  modified_base 17: mod_base = OTHER; note = 2'-O-methyladenosine-3'-phosphate
  modified_base 18: mod_base = OTHER; note = 2'-O-methylguanosine-3'-phosphate
  modified_base 19: mod_base = OTHER; note = 2'-O-methylcytidine-3'-phosphate
  modified_base 20: mod_base = OTHER; note = 2'-O-methyladenosine-3'-phosphate
  modified_base 21: mod_base = OTHER; note = 2'-O-methyladenosine-3'-phosphorothioate
  modified_base 22: mod_base = OTHER; note = 2'-O-methylguanosine-3'-phosphorothioate
  modified_base 23: mod_base = OTHER; note = 2'-O-methylcytidine
tacaacaaggaacatcagcaagc

SEQ ID NO: 813 - RNA, 23 nt, synthetic construct
  source 1..23: mol_type = other RNA
  modified_base 1: mod_base = OTHER; note = 2'-O-methyluridine-3'-phosphorothioate 5'-(E)-Vinylphosphonate
  modified_base 2: mod_base = OTHER; note = 2'-deoxy-2'-fluoroadenosine-3'-phosphorothioate
  modified_base 3: mod_base = OTHER; note = 2'-O-methyladenosine-3'-phosphate
  modified_base 4: mod_base = OTHER; note = 2'-O-methyladenosine-3'-phosphate
  modified_base 5: mod_base = OTHER; note = 2'-O-methyluridine-3'-phosphate
  modified_base 6: mod_base = OTHER; note = 2'-deoxy-2'-fluoroguanosine-3'-phosphate
  modified_base 7: mod_base = OTHER; note = 2'-O-methylcytidine-3'-phosphate
  modified_base 8: mod_base = OTHER; note = 2'-deoxy-2'-fluoroadenosine-3'-phosphate
  modified_base 9: mod_base = OTHER; note = 2'-deoxy-2'-fluorocytidine-3'-phosphate
  modified_base 10: mod_base = OTHER; note = 2'-O-methyladenosine-3'-phosphate
  modified_base 11: mod_base = OTHER; note = 2'-O-methylguanosine-3'-phosphate
  modified_base 12: mod_base = OTHER; note = 2'-O-methyluridine-3'-phosphate
  modified_base 13: mod_base = OTHER; note = 2'-O-methylguanosine-3'-phosphate
  modified_base 14: mod_base = OTHER; note = 2'-deoxy-2'-fluorouridine-3'-phosphate
  modified_base 15: mod_base = OTHER; note = 2'-O-methylguanosine-3'-phosphate
  modified_base 16: mod_base = OTHER; note = 2'-deoxy-2'-fluoroadenosine-3'-phosphate
  modified_base 17: mod_base = OTHER; note = 2'-O-methylguanosine-3'-phosphate
  modified_base 18: mod_base = OTHER; note = 2'-O-methylguanosine-3'-phosphate
  modified_base 19: mod_base = OTHER; note = 2'-O-methyluridine-3'-phosphate
  modified_base 20: mod_base = OTHER; note = 2'-O-methyladenosine-3'-phosphate
  modified_base 21: mod_base = OTHER; note = 2'-O-methylguanosine-3'-phosphorothioate
  modified_base 22: mod_base = OTHER; note = 2'-O-methyladenosine-3'-phosphorothioate
  modified_base 23: mod_base = OTHER; note = 2'-O-methyladenosine
taaatgcacagtgtgaggtagaa

SEQ ID NO: 814 - RNA, 23 nt, synthetic construct
  source 1..23: mol_type = other RNA
  modified_base 1: mod_base = OTHER; note = 2'-O-methyluridine-3'-phosphorothioate 5'-(E)-Vinylphosphonate
  modified_base 2: mod_base = OTHER; note = 2'-deoxy-2'-fluorocytidine-3'-phosphorothioate
  modified_base 3: mod_base = OTHER; note = 2'-O-methyluridine-3'-phosphate
  modified_base 4: mod_base = OTHER; note = 2'-O-methyluridine-3'-phosphate
  modified_base 5: mod_base = OTHER; note = 2'-O-methylcytidine-3'-phosphate
  modified_base 6: mod_base = OTHER; note = 2'-deoxy-2'-fluorocytidine-3'-phosphate
  modified_base 7: mod_base = OTHER; note = 2'-O-methyladenosine-3'-phosphate
  modified_base 8: mod_base = OTHER; note = 2'-deoxy-2'-fluoroadenosine-3'-phosphate
  modified_base 9: mod_base = OTHER; note = 2'-deoxy-2'-fluorocytidine-3'-phosphate
  modified_base 10: mod_base = OTHER; note = 2'-O-methyluridine-3'-phosphate
  modified_base 11: mod_base = OTHER; note = 2'-O-methyladenosine-3'-phosphate
  modified_base 12: mod_base = OTHER; note = 2'-O-methyladenosine-3'-phosphate
  modified_base 13: mod_base = OTHER; note = 2'-O-methyluridine-3'-phosphate
  modified_base 14: mod_base = OTHER; note = 2'-deoxy-2'-fluoroadenosine-3'-phosphate
  modified_base 15: mod_base = OTHER; note = 2'-O-methyluridine-3'-phosphate
  modified_base 16: mod_base = OTHER; note = 2'-deoxy-2'-fluorouridine-3'-phosphate
  modified_base 17: mod_base = OTHER; note = 2'-O-methylguanosine-3'-phosphate
  modified_base 18: mod_base = OTHER; note = 2'-O-methyladenosine-3'-phosphate
  modified_base 19: mod_base = OTHER; note = 2'-O-methyluridine-3'-phosphate
  modified_base 20: mod_base = OTHER; note = 2'-O-methyladenosine-3'-phosphate
  modified_base 21: mod_base = OTHER; note = 2'-O-methylcytidine-3'-phosphorothioate
  modified_base 22: mod_base = OTHER; note = 2'-O-methyladenosine-3'-phosphorothioate
  modified_base 23: mod_base = OTHER; note = 2'-O-methyluridine
tcttccaactaatattgatacat

SEQ ID NO: 815 - RNA, 23 nt, synthetic construct
  source 1..23: mol_type = other RNA
  modified_base 1: mod_base = OTHER; note = 2'-O-methyluridine-3'-phosphorothioate 5'-(E)-Vinylphosphonate
  modified_base 2: mod_base = OTHER; note = 2'-deoxy-2'-fluoroadenosine-3'-phosphorothioate
  modified_base 3: mod_base = OTHER; note = 2'-O-methyluridine-3'-phosphate
  modified_base 4: mod_base = OTHER; note = 2'-O-methylcytidine-3'-phosphate
  modified_base 5: mod_base = OTHER; note = 2'-O-methylcytidine-3'-phosphate
  modified_base 6: mod_base = OTHER; note = 2'-deoxy-2'-fluoroadenosine-3'-phosphate
  modified_base 7: mod_base = OTHER; note = 2'-O-methylcytidine-3'-phosphate
  modified_base 8: mod_base = OTHER; note = 2'-deoxy-2'-fluoroadenosine-3'-phosphate
  modified_base 9: mod_base = OTHER; note = 2'-deoxy-2'-fluorouridine-3'-phosphate
  modified_base 10: mod_base = OTHER; note = 2'-O-methylguanosine-3'-phosphate
  modified_base 11: mod_base = OTHER; note = 2'-O-methyluridine-3'-phosphate
  modified_base 12: mod_base = OTHER; note = 2'-O-methylguanosine-3'-phosphate
  modified_base 13: mod_base = OTHER; note = 2'-O-methylcytidine-3'-phosphate
  modified_base 14: mod_base = OTHER; note = 2'-deoxy-2'-fluoroadenosine-3'-phosphate
  modified_base 15: mod_base = OTHER; note = 2'-O-methylguanosine-3'-phosphate
  modified_base 16: mod_base = OTHER; note = 2'-deoxy-2'-fluorouridine-3'-phosphate
  modified_base 17: mod_base = OTHER; note = 2'-O-methyladenosine-3'-phosphate
  modified_base 18: mod_base = OTHER; note = 2'-O-methyladenosine-3'-phosphate
  modified_base 19: mod_base = OTHER; note = 2'-O-methyluridine-3'-phosphate
  modified_base 20: mod_base = OTHER; note = 2'-O-methylcytidine-3'-phosphate
  modified_base 21: mod_base = OTHER; note = 2'-O-methyluridine-3'-phosphorothioate
  modified_base 22: mod_base = OTHER; note = 2'-O-methylguanosine-3'-phosphorothioate
  modified_base 23: mod_base = OTHER; note = 2'-O-methyladenosine
tatccacatgtgcagtaatctga

SEQ ID NO: 816 - RNA, 23 nt, synthetic construct
  source 1..23: mol_type = other RNA
  modified_base 1: mod_base = OTHER; note = 2'-O-methyluridine-3'-phosphorothioate 5'-(E)-Vinylphosphonate
  modified_base 2: mod_base = OTHER; note = 2'-deoxy-2'-fluoroguanosine-3'-phosphorothioate
  modified_base 3: mod_base = OTHER; note = 2'-O-methyluridine-3'-phosphate
  modified_base 4: mod_base = OTHER; note = 2'-O-methylguanosine-3'-phosphate
  modified_base 5: mod_base = OTHER; note = 2'-O-methyluridine-3'-phosphate
  modified_base 6: mod_base = OTHER; note = 2'-deoxy-2'-fluoroguanosine-3'-phosphate
  modified_base 7: mod_base = OTHER; note = 2'-O-methyladenosine-3'-phosphate
  modified_base 8: mod_base = OTHER; note = 2'-deoxy-2'-fluoroguanosine-3'-phosphate
  modified_base 9: mod_base = OTHER; note = 2'-deoxy-2'-fluoroguanosine-3'-phosphate
  modified_base 10: mod_base = OTHER; note = 2'-O-methyluridine-3'-phosphate
  modified_base 11: mod_base = OTHER; note = 2'-O-methyladenosine-3'-phosphate
  modified_base 12: mod_base = OTHER; note = 2'-O-methylguanosine-3'-phosphate
  modified_base 13: mod_base = OTHER; note = 2'-O-methyladenosine-3'-phosphate
  modified_base 14: mod_base = OTHER; note = 2'-deoxy-2'-fluoroadenosine-3'-phosphate
  modified_base 15: mod_base = OTHER; note = 2'-O-methyladenosine-3'-phosphate
  modified_base 16: mod_base = OTHER; note = 2'-deoxy-2'-fluorouridine-3'-phosphate
  modified_base 17: mod_base = OTHER; note = 2'-O-methylcytidine-3'-phosphate
  modified_base 18: mod_base = OTHER; note = 2'-O-methylcytidine-3'-phosphate
  modified_base 19: mod_base = OTHER; note = 2'-O-methylcytidine-3'-phosphate
  modified_base 20: mod_base = OTHER; note = 2'-O-methyluridine-3'-phosphate
  modified_base 21: mod_base = OTHER; note = 2'-O-methylcytidine-3'-phosphorothioate
  modified_base 22: mod_base = OTHER; note = 2'-O-methyladenosine-3'-phosphorothioate
  modified_base 23: mod_base = OTHER; note = 2'-O-methylguanosine
tgtgtgaggtagaaatccctcag

SEQ ID NO: 817 - RNA, 23 nt, synthetic construct
  source 1..23: mol_type = other RNA
  modified_base 1: mod_base = OTHER; note = 2'-O-methyluridine-3'-phosphorothioate 5'-(E)-Vinylphosphonate
  modified_base 2: mod_base = OTHER; note = 2'-deoxy-2'-fluorocytidine-3'-phosphorothioate
  modified_base 3: mod_base = OTHER; note = 2'-O-methyluridine-3'-phosphate
  modified_base 4: mod_base = OTHER; note = 2'-O-methyluridine-3'-phosphate
  modified_base 5: mod_base = OTHER; note = 2'-O-methyluridine-3'-phosphate
  modified_base 6: mod_base = OTHER; note = 2'-deoxy-2'-fluorouridine-3'-phosphate
  modified_base 7: mod_base = OTHER; note = 2'-O-methyladenosine-3'-phosphate
  modified_base 8: mod_base = OTHER; note = 2'-deoxy-2'-fluoroadenosine-3'-phosphate
  modified_base 9: mod_base = OTHER; note = 2'-deoxy-2'-fluorouridine-3'-phosphate
  modified_base 10: mod_base = OTHER; note = 2'-O-methylguanosine-3'-phosphate
  modified_base 11: mod_base = OTHER; note = 2'-O-methyluridine-3'-phosphate
  modified_base 12: mod_base = OTHER; note = 2'-O-methylcytidine-3'-phosphate
  modified_base 13: mod_base = OTHER; note = 2'-O-methylcytidine-3'-phosphate
  modified_base 14: mod_base = OTHER; note = 2'-deoxy-2'-fluorouridine-3'-phosphate
  modified_base 15: mod_base = OTHER; note = 2'-O-methylguanosine-3'-phosphate
  modified_base 16: mod_base = OTHER; note = 2'-deoxy-2'-fluorouridine-3'-phosphate
  modified_base 17: mod_base = OTHER; note = 2'-O-methylcytidine-3'-phosphate
  modified_base 18: mod_base = OTHER; note = 2'-O-methyluridine-3'-phosphate
  modified_base 19: mod_base = OTHER; note = 2'-O-methyluridine-3'-phosphate
  modified_base 20: mod_base = OTHER; note = 2'-O-methylcytidine-3'-phosphate
  modified_base 21: mod_base = OTHER; note = 2'-O-methyladenosine-3'-phosphorothioate
  modified_base 22: mod_base = OTHER; note = 2'-O-methyladenosine-3'-phosphorothioate
  modified_base 23: mod_base = OTHER; note = 2'-O-methyluridine
tcttttaatgtcctgtcttcaat

SEQ ID NO: 818 - RNA, 23 nt, synthetic construct
  source 1..23: mol_type = other RNA
  modified_base 1: mod_base = OTHER; note = 2'-O-methyluridine-3'-phosphorothioate 5'-(E)-Vinylphosphonate
  modified_base 2: mod_base = OTHER; note = 2'-deoxy-2'-fluoroadenosine-3'-phosphorothioate
  modified_base 3: mod_base = OTHER; note = 2'-O-methyladenosine-3'-phosphate
  modified_base 4: mod_base = OTHER; note = 2'-O-methylguanosine-3'-phosphate
  modified_base 5: mod_base = OTHER; note = 2'-O-methyluridine-3'-phosphate
  modified_base 6: mod_base = OTHER; note = 2'-deoxy-2'-fluoroadenosine-3'-phosphate
  modified_base 7: mod_base = OTHER; note = 2'-O-methyladenosine-3'-phosphate
  modified_base 8: mod_base = OTHER; note = 2'-deoxy-2'-fluoroadenosine-3'-phosphate
  modified_base 9: mod_base = OTHER; note = 2'-deoxy-2'-fluorocytidine-3'-phosphate
  modified_base 10: mod_base = OTHER; note = 2'-O-methyladenosine-3'-phosphate
  modified_base 11: mod_base = OTHER; note = 2'-O-methylcytidine-3'-phosphate
  modified_base 12: mod_base = OTHER; note = 2'-O-methyladenosine-3'-phosphate
  modified_base 13: mod_base = OTHER; note = 2'-O-methylguanosine-3'-phosphate
  modified_base 14: mod_base = OTHER; note = 2'-deoxy-2'-fluoroadenosine-3'-phosphate
  modified_base 15: mod_base = OTHER; note = 2'-O-methyluridine-3'-phosphate
  modified_base 16: mod_base = OTHER; note = 2'-deoxy-2'-fluorocytidine-3'-phosphate
  modified_base 17: mod_base = OTHER; note = 2'-O-methyluridine-3'-phosphate
  modified_base 18: mod_base = OTHER; note = 2'-O-methylcytidine-3'-phosphate
  modified_base 19: mod_base = OTHER; note = 2'-O-methylcytidine-3'-phosphate
  modified_base 20: mod_base = OTHER; note = 2'-O-methyluridine-3'-phosphate
  modified_base 21: mod_base = OTHER; note = 2'-O-methylcytidine-3'-phosphorothioate
  modified_base 22: mod_base = OTHER; note = 2'-O-methylguanosine-3'-phosphorothioate
  modified_base 23: mod_base = OTHER; note = 2'-O-methyluridine
taagtaaacacagatctcctcgt

SEQ ID NO: 819 - RNA, 23 nt, synthetic construct
  source 1..23: mol_type = other RNA
  modified_base 1: mod_base = OTHER; note = 2'-O-methyluridine-3'-phosphorothioate 5'-(E)-Vinylphosphonate
  modified_base 2: mod_base = OTHER; note = 2'-deoxy-2'-fluoroguanosine-3'-phosphorothioate
  modified_base 3: mod_base = OTHER; note = 2'-O-methyluridine-3'-phosphate
  modified_base 4: mod_base = OTHER; note = 2'-O-methyladenosine-3'-phosphate
  modified_base 5: mod_base = OTHER; note = 2'-O-methylguanosine-3'-phosphate
  modified_base 6: mod_base = OTHER; note = 2'-deoxy-2'-fluorouridine-3'-phosphate
  modified_base 7: mod_base = OTHER; note = 2'-O-methyluridine-3'-phosphate
  modified_base 8: mod_base = OTHER; note = 2'-deoxy-2'-fluoroadenosine-3'-phosphate
  modified_base 9: mod_base = OTHER; note = 2'-deoxy-2'-fluoroguanosine-3'-phosphate
  modified_base 10: mod_base = OTHER; note = 2'-O-methyluridine-3'-phosphate
  modified_base 11: mod_base = OTHER; note = 2'-O-methyluridine-3'-phosphate
  modified_base 12: mod_base = OTHER; note = 2'-O-methylguanosine-3'-phosphate
  modified_base 13: mod_base = OTHER; note = 2'-O-methylcytidine-3'-phosphate
  modified_base 14: mod_base = OTHER; note = 2'-deoxy-2'-fluoroadenosine-3'-phosphate
  modified_base 15: mod_base = OTHER; note = 2'-O-methylcytidine-3'-phosphate
  modified_base 16: mod_base = OTHER; note = 2'-deoxy-2'-fluorocytidine-3'-phosphate
  modified_base 17: mod_base = OTHER; note = 2'-O-methyladenosine-3'-phosphate
  modified_base 18: mod_base = OTHER; note = 2'-O-methylguanosine-3'-phosphate
  modified_base 19: mod_base = OTHER; note = 2'-O-methyladenosine-3'-phosphate
  modified_base 20: mod_base = OTHER; note = 2'-O-methylguanosine-3'-phosphate
  modified_base 21: mod_base = OTHER; note = 2'-O-methyluridine-3'-phosphorothioate
  modified_base 22: mod_base = OTHER; note = 2'-O-methyladenosine-3'-phosphorothioate
  modified_base 23: mod_base = OTHER; note = 2'-O-methyluridine
tgtagttagttgcaccagagtat

SEQ ID NO: 820 - RNA, 23 nt, synthetic construct
  source 1..23: mol_type = other RNA
  modified_base 1: mod_base = OTHER; note = 2'-O-methyluridine-3'-phosphorothioate 5'-(E)-Vinylphosphonate
  modified_base 2: mod_base = OTHER; note = 2'-deoxy-2'-fluorouridine-3'-phosphorothioate
  modified_base 3: mod_base = OTHER; note = 2'-O-methyladenosine-3'-phosphate
  modified_base 4: mod_base = OTHER; note = 2'-O-methylcytidine-3'-phosphate
  modified_base 5: mod_base = OTHER; note = 2'-O-methyladenosine-3'-phosphate
  modified_base 6: mod_base = OTHER; note = 2'-deoxy-2'-fluorocytidine-3'-phosphate
  modified_base 7: mod_base = OTHER; note = 2'-O-methyladenosine-3'-phosphate
  modified_base 8: mod_base = OTHER; note = 2'-deoxy-2'-fluoroadenosine-3'-phosphate
  modified_base 9: mod_base = OTHER; note = 2'-deoxy-2'-fluoroguanosine-3'-phosphate
  modified_base 10: mod_base = OTHER; note = 2'-O-methylguanosine-3'-phosphate
  modified_base 11: mod_base = OTHER; note = 2'-O-methyladenosine-3'-phosphate
  modified_base 12: mod_base = OTHER; note = 2'-O-methyladenosine-3'-phosphate
  modified_base 13: mod_base = OTHER; note = 2'-O-methyladenosine-3'-phosphate
  modified_base 14: mod_base = OTHER; note = 2'-deoxy-2'-fluoroguanosine-3'-phosphate
  modified_base 15: mod_base = OTHER; note = 2'-O-methylcytidine-3'-phosphate
  modified_base 16: mod_base = OTHER; note = 2'-deoxy-2'-fluoroadenosine-3'-phosphate
  modified_base 17: mod_base = OTHER; note = 2'-O-methyladenosine-3'-phosphate
  modified_base 18: mod_base = OTHER; note = 2'-O-methylguanosine-3'-phosphate
  modified_base 19: mod_base = OTHER; note = 2'-O-methylguanosine-3'-phosphate
  modified_base 20: mod_base = OTHER; note = 2'-O-methyluridine-3'-phosphate
  modified_base 21: mod_base = OTHER; note = 2'-O-methylguanosine-3'-phosphorothioate
  modified_base 22: mod_base = OTHER; note = 2'-O-methylguanosine-3'-phosphorothioate
  modified_base 23: mod_base = OTHER; note = 2'-O-methylguanosine
ttacacaaggaaagcaaggtggg

SEQ ID NO: 821 - RNA, 23 nt, synthetic construct
  source 1..23: mol_type = other RNA
  modified_base 1: mod_base = OTHER; note = 2'-O-methyluridine-3'-phosphorothioate 5'-(E)-Vinylphosphonate
  modified_base 2: mod_base = OTHER; note = 2'-deoxy-2'-fluoroadenosine-3'-phosphorothioate
  modified_base 3: mod_base = OTHER; note = 2'-O-methylcytidine-3'-phosphate
  modified_base 4: mod_base = OTHER; note = 2'-O-methylguanosine-3'-phosphate
  modified_base 5: mod_base = OTHER; note = 2'-O-methyluridine-3'-phosphate
  modified_base 6: mod_base = OTHER; note = 2'-deoxy-2'-fluoroadenosine-3'-phosphate
  modified_base 7: mod_base = OTHER; note = 2'-O-methylguanosine-3'-phosphate
  modified_base 8: mod_base = OTHER; note = 2'-deoxy-2'-fluoroadenosine-3'-phosphate
  modified_base 9: mod_base = OTHER; note = 2'-deoxy-2'-fluoroadenosine-3'-phosphate
  modified_base 10: mod_base = OTHER; note = 2'-O-methylguanosine-3'-phosphate
  modified_base 11: mod_base = OTHER; note = 2'-O-methylguanosine-3'-phosphate
  modified_base 12: mod_base = OTHER; note = 2'-O-methyladenosine-3'-phosphate
  modified_base 13: mod_base = OTHER; note = 2'-O-methylguanosine-3'-phosphate
  modified_base 14: mod_base = OTHER; note = 2'-deoxy-2'-fluoroadenosine-3'-phosphate
  modified_base 15: mod_base = OTHER; note = 2'-O-methylcytidine-3'-phosphate
  modified_base 16: mod_base = OTHER; note = 2'-deoxy-2'-fluorouridine-3'-phosphate
  modified_base 17: mod_base = OTHER; note = 2'-O-methyladenosine-3'-phosphate
  modified_base 18: mod_base = OTHER; note = 2'-O-methylcytidine-3'-phosphate
  modified_base 19: mod_base = OTHER; note = 2'-O-methylguanosine-3'-phosphate
  modified_base 20: mod_base = OTHER; note = 2'-O-methylguanosine-3'-phosphate
  modified_base 21: mod_base = OTHER; note = 2'-O-methyladenosine-3'-phosphorothioate
  modified_base 22: mod_base = OTHER; note = 2'-O-methylcytidine-3'-phosphorothioate
  modified_base 23: mod_base = OTHER; note = 2'-O-methylguanosine
tacgtagaaggagactacggacg

SEQ ID NO: 822 - RNA, 23 nt, synthetic construct
  source 1..23: mol_type = other RNA
  modified_base 1: mod_base = OTHER; note = 2'-O-methyluridine-3'-phosphorothioate 5'-(E)-Vinylphosphonate
  modified_base 2: mod_base = OTHER; note = 2'-deoxy-2'-fluoroguanosine-3'-phosphorothioate
  modified_base 3: mod_base = OTHER; note = 2'-O-methyluridine-3'-phosphate
  modified_base 4: mod_base = OTHER; note = 2'-O-methylguanosine-3'-phosphate
  modified_base 5: mod_base = OTHER; note = 2'-O-methylcytidine-3'-phosphate
  modified_base 6: mod_base = OTHER; note = 2'-deoxy-2'-fluorouridine-3'-phosphate
  modified_base 7: mod_base = OTHER; note = 2'-O-methyladenosine-3'-phosphate
  modified_base 8: mod_base = OTHER; note = 2'-deoxy-2'-fluoroadenosine-3'-phosphate
  modified_base 9: mod_base = OTHER; note = 2'-deoxy-2'-fluorocytidine-3'-phosphate
  modified_base 10: mod_base = OTHER; note = 2'-O-methyluridine-3'-phosphate
  modified_base 11: mod_base = OTHER; note = 2'-O-methyluridine-3'-phosphate
  modified_base 12: mod_base = OTHER; note = 2'-O-methyluridine-3'-phosphate
  modified_base 13: mod_base = OTHER; note = 2'-O-methylcytidine-3'-phosphate
  modified_base 14: mod_base = OTHER; note = 2'-deoxy-2'-fluoroadenosine-3'-phosphate
  modified_base 15: mod_base = OTHER; note = 2'-O-methylcytidine-3'-phosphate
  modified_base 16: mod_base = OTHER; note = 2'-deoxy-2'-fluorocytidine-3'-phosphate
  modified_base 17: mod_base = OTHER; note = 2'-O-methyladenosine-3'-phosphate
  modified_base 18: mod_base = OTHER; note = 2'-O-methylguanosine-3'-phosphate
  modified_base 19: mod_base = OTHER; note = 2'-O-methylcytidine-3'-phosphate
  modified_base 20: mod_base = OTHER; note = 2'-O-methyladenosine-3'-phosphate
  modified_base 21: mod_base = OTHER; note = 2'-O-methyladenosine-3'-phosphorothioate
  modified_base 22: mod_base = OTHER; note = 2'-O-methyladenosine-3'-phosphorothioate
  modified_base 23: mod_base = OTHER; note = 2'-O-methyluridine
tgtgctaactttcaccagcaaat

SEQ ID NO: 823 - RNA, 23 nt, synthetic construct
  source 1..23: mol_type = other RNA
  modified_base 1: mod_base = OTHER; note = 2'-O-methyluridine-3'-phosphorothioate 5'-(E)-Vinylphosphonate
  modified_base 2: mod_base = OTHER; note = 2'-deoxy-2'-fluoroadenosine-3'-phosphorothioate
  modified_base 3: mod_base = OTHER; note = 2'-O-methylcytidine-3'-phosphate
  modified_base 4: mod_base = OTHER; note = 2'-O-methyladenosine-3'-phosphate
  modified_base 5: mod_base = OTHER; note = 2'-O-methylguanosine-3'-phosphate
  modified_base 6: mod_base = OTHER; note = 2'-deoxy-2'-fluorocytidine-3'-phosphate
  modified_base 7: mod_base = OTHER; note = 2'-O-methyluridine-3'-phosphate
  modified_base 8: mod_base = OTHER; note = 2'-deoxy-2'-fluorocytidine-3'-phosphate
  modified_base 9: mod_base = OTHER; note = 2'-deoxy-2'-fluoroguanosine-3'-phosphate
  modified_base 10: mod_base = OTHER; note = 2'-O-methylcytidine-3'-phosphate
  modified_base 11: mod_base = OTHER; note = 2'-O-methyladenosine-3'-phosphate
  modified_base 12: mod_base = OTHER; note = 2'-O-methylguanosine-3'-phosphate
  modified_base 13: mod_base = OTHER; note = 2'-O-methyladenosine-3'-phosphate
  modified_base 14: mod_base = OTHER; note = 2'-deoxy-2'-fluoroadenosine-3'-phosphate
  modified_base 15: mod_base = OTHER; note = 2'-O-methylguanosine-3'-phosphate
  modified_base 16: mod_base = OTHER; note = 2'-deoxy-2'-fluoroadenosine-3'-phosphate
  modified_base 17: mod_base = OTHER; note = 2'-O-methyladenosine-3'-phosphate
  modified_base 18: mod_base = OTHER; note = 2'-O-methylguanosine-3'-phosphate
  modified_base 19: mod_base = OTHER; note = 2'-O-methylguanosine-3'-phosphate
  modified_base 20: mod_base = OTHER; note = 2'-O-methyladenosine-3'-phosphate
  modified_base 21: mod_base = OTHER; note = 2'-O-methylguanosine-3'-phosphorothioate
  modified_base 22: mod_base = OTHER; note = 2'-O-methylcytidine-3'-phosphorothioate
  modified_base 23: mod_base = OTHER; note = 2'-O-methylcytidine
tacagctcgcagaagaaggagcc

SEQ ID NO: 824 - RNA, 23 nt, synthetic construct
  source 1..23: mol_type = other RNA
  modified_base 1: mod_base = OTHER; note = 2'-O-methyluridine-3'-phosphorothioate 5'-(E)-Vinylphosphonate
  modified_base 2: mod_base = OTHER; note = 2'-deoxy-2'-fluoroadenosine-3'-phosphorothioate
  modified_base 3: mod_base = OTHER; note = 2'-O-methyluridine-3'-phosphate
  modified_base 4: mod_base = OTHER; note = 2'-O-methyluridine-3'-phosphate
  modified_base 5: mod_base = OTHER; note = 2'-O-methylguanosine-3'-phosphate
  modified_base 6: mod_base = OTHER; note = 2'-deoxy-2'-fluorocytidine-3'-phosphate
  modified_base 7: mod_base = OTHER; note = 2'-O-methyladenosine-3'-phosphate
  modified_base 8: mod_base = OTHER; note = 2'-deoxy-2'-fluorocytidine-3'-phosphate
  modified_base 9: mod_base = OTHER; note = 2'-deoxy-2'-fluoroadenosine-3'-phosphate
  modified_base 10: mod_base = OTHER; note = 2'-O-methyluridine-3'-phosphate
  modified_base 11: mod_base = OTHER; note = 2'-O-methylguanosine-3'-phosphate
  modified_base 12: mod_base = OTHER; note = 2'-O-methylguanosine-3'-phosphate
  modified_base 13: mod_base = OTHER; note = 2'-O-methyladenosine-3'-phosphate
  modified_base 14: mod_base = OTHER; note = 2'-deoxy-2'-fluorocytidine-3'-phosphate
  modified_base 15: mod_base = OTHER; note = 2'-O-methylcytidine-3'-phosphate
  modified_base 16: mod_base = OTHER; note = 2'-deoxy-2'-fluoroadenosine-3'-phosphate
  modified_base 17: mod_base = OTHER; note = 2'-O-methyladenosine-3'-phosphate
  modified_base 18: mod_base = OTHER; note = 2'-O-methyluridine-3'-phosphate
  modified_base 19: mod_base = OTHER; note = 2'-O-methyluridine-3'-phosphate
  modified_base 20: mod_base = OTHER; note = 2'-O-methylcytidine-3'-phosphate
  modified_base 21: mod_base = OTHER; note = 2'-O-methylcytidine-3'-phosphorothioate
  modified_base 22: mod_base = OTHER; note = 2'-O-methyluridine-3'-phosphorothioate
  modified_base 23: mod_base = OTHER; note = 2'-O-methylcytidine
tattgcacatggaccaattcctc

SEQ ID NO: 825 - RNA, 23 nt, synthetic construct
  source 1..23: mol_type = other RNA
  modified_base 1: mod_base = OTHER; note = 2'-O-methyluridine-3'-phosphorothioate 5'-(E)-Vinylphosphonate
  modified_base 2: mod_base = OTHER; note = 2'-deoxy-2'-fluorouridine-3'-phosphorothioate
  modified_base 3: mod_base = OTHER; note = 2'-O-methylcytidine-3'-phosphate
  modified_base 4: mod_base = OTHER; note = 2'-O-methyluridine-3'-phosphate
  modified_base 5: mod_base = OTHER; note = 2'-O-methyluridine-3'-phosphate
  modified_base 6: mod_base = OTHER; note = 2'-deoxy-2'-fluorouridine-3'-phosphate
  modified_base 7: mod_base = OTHER; note = 2'-O-methylguanosine-3'-phosphate
  modified_base 8: mod_base = OTHER; note = 2'-deoxy-2'-fluorocytidine-3'-phosphate
  modified_base 9: mod_base = OTHER; note = 2'-deoxy-2'-fluorocytidine-3'-phosphate
  modified_base 10: mod_base = OTHER; note = 2'-O-methyluridine-3'-phosphate
  modified_base 11: mod_base = OTHER; note = 2'-O-methylcytidine-3'-phosphate
  modified_base 12: mod_base = OTHER; note = 2'-O-methylguanosine-3'-phosphate
  modified_base 13: mod_base = OTHER; note = 2'-O-methylguanosine-3'-phosphate
  modified_base 14: mod_base = OTHER; note = 2'-deoxy-2'-fluoroadenosine-3'-phosphate
  modified_base 15: mod_base = OTHER; note = 2'-O-methyluridine-3'-phosphate
  modified_base 16: mod_base = OTHER; note = 2'-deoxy-2'-fluoroguanosine-3'-phosphate
  modified_base 17: mod_base = OTHER; note = 2'-O-methyladenosine-3'-phosphate
  modified_base 18: mod_base = OTHER; note = 2'-O-methyluridine-3'-phosphate
  modified_base 19: mod_base = OTHER; note = 2'-O-methyluridine-3'-phosphate
  modified_base 20: mod_base = OTHER; note = 2'-O-methylcytidine-3'-phosphate
  modified_base 21: mod_base = OTHER; note = 2'-O-methyladenosine-3'-phosphorothioate
  modified_base 22: mod_base = OTHER; note = 2'-O-methylguanosine-3'-phosphorothioate
  modified_base 23: mod_base = OTHER; note = 2'-O-methyladenosine
ttctttgcctcggatgattcaga

SEQ ID NO: 826 - RNA, 23 nt, synthetic construct
  source 1..23: mol_type = other RNA
  modified_base 1: mod_base = OTHER; note = 2'-O-methyluridine-3'-phosphorothioate 5'-(E)-Vinylphosphonate
  modified_base 2: mod_base = OTHER; note = 2'-deoxy-2'-fluorocytidine-3'-phosphorothioate
  modified_base 3: mod_base = OTHER; note = 2'-O-methylcytidine-3'-phosphate
  modified_base 4: mod_base = OTHER; note = 2'-O-methyladenosine-3'-phosphate
  modified_base 5: mod_base = OTHER; note = 2'-O-methyluridine-3'-phosphate
  modified_base 6: mod_base = OTHER; note = 2'-deoxy-2'-fluorocytidine-3'-phosphate
  modified_base 7: mod_base = OTHER; note = 2'-O-methylcytidine-3'-phosphate
  modified_base 8: mod_base = OTHER; note = 2'-deoxy-2'-fluorouridine-3'-phosphate
  modified_base 9: mod_base = OTHER; note = 2'-deoxy-2'-fluorouridine-3'-phosphate
  modified_base 10: mod_base = OTHER; note = 2'-O-methyluridine-3'-phosphate
  modified_base 11: mod_base = OTHER; note = 2'-O-methylcytidine-3'-phosphate
  modified_base 12: mod_base = OTHER; note = 2'-O-methyluridine-3'-phosphate
  modified_base 13: mod_base = OTHER; note = 2'-O-methylcytidine-3'-phosphate
  modified_base 14: mod_base = OTHER; note = 2'-deoxy-2'-fluorouridine-3'-phosphate
  modified_base 15: mod_base = OTHER; note = 2'-O-methyluridine-3'-phosphate
  modified_base 16: mod_base = OTHER; note = 2'-deoxy-2'-fluorouridine-3'-phosphate
  modified_base 17: mod_base = OTHER; note = 2'-O-methylguanosine-3'-phosphate
  modified_base 18: mod_base = OTHER; note = 2'-O-methylcytidine-3'-phosphate
  modified_base 19: mod_base = OTHER; note = 2'-O-methyluridine-3'-phosphate
  modified_base 20: mod_base = OTHER; note = 2'-O-methyluridine-3'-phosphate
  modified_base 21: mod_base = OTHER; note = 2'-O-methyluridine-3'-phosphorothioate
  modified_base 22: mod_base = OTHER; note = 2'-O-methylcytidine-3'-phosphorothioate
  modified_base 23: mod_base = OTHER; note = 2'-O-methyladenosine
tccatcctttctctttgctttca

SEQ ID NO: 827 - RNA, 23 nt, synthetic construct
  source 1..23: mol_type = other RNA
  modified_base 1: mod_base = OTHER; note = 2'-O-methyluridine-3'-phosphorothioate 5'-(E)-Vinylphosphonate
  modified_base 2: mod_base = OTHER; note = 2'-deoxy-2'-fluorouridine-3'-phosphorothioate
  modified_base 3: mod_base = OTHER; note = 2'-O-methylcytidine-3'-phosphate
  modified_base 4: mod_base = OTHER; note = 2'-O-methyladenosine-3'-phosphate
  modified_base 5: mod_base = OTHER; note = 2'-O-methylcytidine-3'-phosphate
  modified_base 6: mod_base = OTHER; note = 2'-deoxy-2'-fluoroadenosine-3'-phosphate
  modified_base 7: mod_base = OTHER; note = 2'-O-methylcytidine-3'-phosphate
  modified_base 8: mod_base = OTHER; note = 2'-deoxy-2'-fluoroguanosine-3'-phosphate
  modified_base 9: mod_base = OTHER; note = 2'-deoxy-2'-fluorocytidine-3'-phosphate
  modified_base 10: mod_base = OTHER; note = 2'-O-methyladenosine-3'-phosphate
  modified_base 11: mod_base = OTHER; note = 2'-O-methylcytidine-3'-phosphate
  modified_base 12: mod_base = OTHER; note = 2'-O-methyladenosine-3'-phosphate
  modified_base 13: mod_base = OTHER; note = 2'-O-methylcytidine-3'-phosphate
  modified_base 14: mod_base = OTHER; note = 2'-deoxy-2'-fluoroadenosine-3'-phosphate
  modified_base 15: mod_base = OTHER; note = 2'-O-methylcytidine-3'-phosphate
  modified_base 16: mod_base = OTHER; note = 2'-deoxy-2'-fluoroadenosine-3'-phosphate
  modified_base 17: mod_base = OTHER; note = 2'-O-methyladenosine-3'-phosphate
  modified_base 18: mod_base = OTHER; note = 2'-O-methyladenosine-3'-phosphate
  modified_base 19: mod_base = OTHER; note = 2'-O-methyladenosine-3'-phosphate
  modified_base 20: mod_base = OTHER; note = 2'-O-methylguanosine-3'-phosphate
  modified_base 21: mod_base = OTHER; note = 2'-O-methyladenosine-3'-phosphorothioate
  modified_base 22: mod_base = OTHER; note = 2'-O-methyladenosine-3'-phosphorothioate
  modified_base 23: mod_base = OTHER; note = 2'-O-methylguanosine
ttcacacgcacacacaaaagaag

SEQ ID NO: 828 - RNA, 23 nt, synthetic construct
  source 1..23: mol_type = other RNA
  modified_base 1: mod_base = OTHER; note = 2'-O-methyluridine-3'-phosphorothioate 5'-(E)-Vinylphosphonate
  modified_base 2: mod_base = OTHER; note = 2'-deoxy-2'-fluorouridine-3'-phosphorothioate
  modified_base 3: mod_base = OTHER; note = 2'-O-methylcytidine-3'-phosphate
  modified_base 4: mod_base = OTHER; note = 2'-O-methyluridine-3'-phosphate
  modified_base 5: mod_base = OTHER; note = 2'-O-methyladenosine-3'-phosphate
  modified_base 6: mod_base = OTHER; note = 2'-deoxy-2'-fluorouridine-3'-phosphate
  modified_base 7: mod_base = OTHER; note = 2'-O-methylcytidine-3'-phosphate
  modified_base 8: mod_base = OTHER; note = 2'-deoxy-2'-fluorouridine-3'-phosphate
  modified_base 9: mod_base = OTHER; note = 2'-deoxy-2'-fluoroguanosine-3'-phosphate
  modified_base 10: mod_base = OTHER; note = 2'-O-methylcytidine-3'-phosphate
  modified_base 11: mod_base = OTHER; note = 2'-O-methyluridine-3'-phosphate
  modified_base 12: mod_base = OTHER; note = 2'-O-methylguanosine-3'-phosphate
  modified_base 13: mod_base = OTHER; note = 2'-O-methyluridine-3'-phosphate
  modified_base 14: mod_base = OTHER; note = 2'-deoxy-2'-fluoroguanosine-3'-phosphate
  modified_base 15: mod_base = OTHER; note = 2'-O-methylcytidine-3'-phosphate
  modified_base 16: mod_base = OTHER; note = 2'-deoxy-2'-fluoroadenosine-3'-phosphate
  modified_base 17: mod_base = OTHER; note = 2'-O-methyladenosine-3'-phosphate
  modified_base 18: mod_base = OTHER; note = 2'-O-methyladenosine-3'-phosphate
  modified_base 19: mod_base = OTHER; note = 2'-O-methyluridine-3'-phosphate
  modified_base 20: mod_base = OTHER; note = 2'-O-methylguanosine-3'-phosphate
  modified_base 21: mod_base = OTHER; note = 2'-O-methylcytidine-3'-phosphorothioate
  modified_base 22: mod_base = OTHER; note = 2'-O-methyladenosine-3'-phosphorothioate
  modified_base 23: mod_base = OTHER; note = 2'-O-methylcytidine
ttctatctgctgtgcaaatgcac

SEQ ID NO: 829 - RNA, 23 nt, synthetic construct
  source 1..23: mol_type = other RNA
  modified_base 1: mod_base = OTHER; note = 2'-O-methyluridine-3'-phosphorothioate 5'-(E)-Vinylphosphonate
  modified_base 2: mod_base = OTHER; note = 2'-deoxy-2'-fluoroadenosine-3'-phosphorothioate
  modified_base 3: mod_base = OTHER; note = 2'-O-methyluridine-3'-phosphate
  modified_base 4: mod_base = OTHER; note = 2'-O-methylcytidine-3'-phosphate
  modified_base 5: mod_base = OTHER; note = 2'-O-methylcytidine-3'-phosphate
  modified_base 6: mod_base = OTHER; note = 2'-deoxy-2'-fluorocytidine-3'-phosphate
  modified_base 7: mod_base = OTHER; note = 2'-O-methyluridine-3'-phosphate
  modified_base 8: mod_base = OTHER; note = 2'-deoxy-2'-fluorouridine-3'-phosphate
  modified_base 9: mod_base = OTHER; note = 2'-deoxy-2'-fluorocytidine-3'-phosphate
  modified_base 10: mod_base = OTHER; note = 2'-O-methylcytidine-3'-phosphate
  modified_base 11: mod_base = OTHER; note = 2'-O-methylcytidine-3'-phosphate
  modified_base 12: mod_base = OTHER; note = 2'-O-methyladenosine-3'-phosphate
  modified_base 13: mod_base = OTHER; note = 2'-O-methyladenosine-3'-phosphate
  modified_base 14: mod_base = OTHER; note = 2'-deoxy-2'-fluoroadenosine-3'-phosphate
  modified_base 15: mod_base = OTHER; note = 2'-O-methylcytidine-3'-phosphate
  modified_base 16: mod_base = OTHER; note = 2'-deoxy-2'-fluorouridine-3'-phosphate
  modified_base 17: mod_base = OTHER; note = 2'-O-methyluridine-3'-phosphate
  modified_base 18: mod_base = OTHER; note = 2'-O-methyluridine-3'-phosphate
  modified_base 19: mod_base = OTHER; note = 2'-O-methylcytidine-3'-phosphate
  modified_base 20: mod_base = OTHER; note = 2'-O-methylcytidine-3'-phosphate
  modified_base 21: mod_base = OTHER; note = 2'-O-methyluridine-3'-phosphorothioate
  modified_base 22: mod_base = OTHER; note = 2'-O-methyluridine-3'-phosphorothioate
  modified_base 23: mod_base = OTHER; note = 2'-O-methyluridine
tatcccttcccaaactttccttt

SEQ ID NO: 830 - RNA, 23 nt, synthetic construct
  source 1..23: mol_type = other RNA
  modified_base 1: mod_base = OTHER; note = 2'-O-methyluridine-3'-phosphorothioate 5'-(E)-Vinylphosphonate
  modified_base 2: mod_base = OTHER; note = 2'-deoxy-2'-fluoroadenosine-3'-phosphorothioate
  modified_base 3: mod_base = OTHER; note = 2'-O-methylcytidine-3'-phosphate
  modified_base 4: mod_base = OTHER; note = 2'-O-methyladenosine-3'-phosphate
  modified_base 5: mod_base = OTHER; note = 2'-O-methyluridine-3'-phosphate
  modified_base 6: mod_base = OTHER; note = 2'-deoxy-2'-fluoroguanosine-3'-phosphate
  modified_base 7: mod_base = OTHER; note = 2'-O-methyluridine-3'-phosphate
  modified_base 8: mod_base = OTHER; note = 2'-deoxy-2'-fluorocytidine-3'-phosphate
  modified_base 9: mod_base = OTHER; note = 2'-deoxy-2'-fluoroadenosine-3'-phosphate
  modified_base 10: mod_base = OTHER; note = 2'-O-methylcytidine-3'-phosphate
  modified_base 11: mod_base = OTHER; note = 2'-O-methyladenosine-3'-phosphate
  modified_base 12: mod_base = OTHER; note = 2'-O-methylguanosine-3'-phosphate
  modified_base 13: mod_base = OTHER; note = 2'-O-methyladenosine-3'-phosphate
  modified_base 14: mod_base = OTHER; note = 2'-deoxy-2'-fluoroguanosine-3'-phosphate
  modified_base 15: mod_base = OTHER; note = 2'-O-methyladenosine-3'-phosphate
  modified_base 16: mod_base = OTHER; note = 2'-deoxy-2'-fluoroguanosine-3'-phosphate
  modified_base 17: mod_base = OTHER; note = 2'-O-methyladenosine-3'-phosphate
  modified_base 18: mod_base = OTHER; note = 2'-O-methylguanosine-3'-phosphate
  modified_base 19: mod_base = OTHER; note = 2'-O-methylguanosine-3'-phosphate
  modified_base 20: mod_base = OTHER; note = 2'-O-methylcytidine-3'-phosphate
  modified_base 21: mod_base = OTHER; note = 2'-O-methyluridine-3'-phosphorothioate
  modified_base 22: mod_base = OTHER; note = 2'-O-methylcytidine-3'-phosphorothioate
  modified_base 23: mod_base = OTHER; note = 2'-O-methyluridine
tacatgtcacagagagaggctct

SEQ ID NO: 831 - RNA, 23 nt, synthetic construct
  source 1..23: mol_type = other RNA
  modified_base 1: mod_base = OTHER; note = 2'-O-methyluridine-3'-phosphorothioate 5'-(E)-Vinylphosphonate
  modified_base 2: mod_base = OTHER; note = 2'-deoxy-2'-fluoroadenosine-3'-phosphorothioate
  modified_base 3: mod_base = OTHER; note = 2'-O-methylguanosine-3'-phosphate
  modified_base 4: mod_base = OTHER; note = 2'-O-methylcytidine-3'-phosphate
  modified_base 5: mod_base = OTHER; note = 2'-O-methyladenosine-3'-phosphate
  modified_base 6: mod_base = OTHER; note = 2'-deoxy-2'-fluoroguanosine-3'-phosphate
  modified_base 7: mod_base = OTHER; note = 2'-O-methyladenosine-3'-phosphate
  modified_base 8: mod_base = OTHER; note = 2'-deoxy-2'-fluoroguanosine-3'-phosphate
  modified_base 9: mod_base = OTHER; note = 2'-deoxy-2'-fluorocytidine-3'-phosphate
  modified_base 10: mod_base = OTHER; note = 2'-O-methylguanosine-3'-phosphate
  modified_base 11: mod_base = OTHER; note = 2'-O-methyluridine-3'-phosphate
  modified_base 12: mod_base = OTHER; note = 2'-O-methylguanosine-3'-phosphate
  modified_base 13: mod_base = OTHER; note = 2'-O-methyladenosine-3'-phosphate
  modified_base 14: mod_base = OTHER; note = 2'-deoxy-2'-fluoroadenosine-3'-phosphate
  modified_base 15: mod_base = OTHER; note = 2'-O-methylguanosine-3'-phosphate
  modified_base 16: mod_base = OTHER; note = 2'-deoxy-2'-fluoroadenosine-3'-phosphate
  modified_base 17: mod_base = OTHER; note = 2'-O-methylcytidine-3'-phosphate
  modified_base 18: mod_base = OTHER; note = 2'-O-methylguanosine-3'-phosphate
  modified_base 19: mod_base = OTHER; note = 2'-O-methylcytidine-3'-phosphate
  modified_base 20: mod_base = OTHER; note = 2'-O-methylcytidine-3'-phosphate
  modified_base 21: mod_base = OTHER; note = 2'-O-methylcytidine-3'-phosphorothioate
  modified_base 22: mod_base = OTHER; note = 2'-O-methyladenosine-3'-phosphorothioate
  modified_base 23: mod_base = OTHER; note = 2'-O-methyluridine
tagcagagcgtgaagacgcccat

SEQ ID NO: 832 - RNA, 23 nt, synthetic construct
  source 1..23: mol_type = other RNA
  modified_base 1: mod_base = OTHER; note = 2'-O-methyluridine-3'-phosphorothioate 5'-(E)-Vinylphosphonate
  modified_base 2: mod_base = OTHER; note = 2'-deoxy-2'-fluoroadenosine-3'-phosphorothioate
  modified_base 3: mod_base = OTHER; note = 2'-O-methyluridine-3'-phosphate
  modified_base 4: mod_base = OTHER; note = 2'-O-methyluridine-3'-phosphate
  modified_base 5: mod_base = OTHER; note = 2'-O-methyluridine-3'-phosphate
  modified_base 6: mod_base = OTHER; note = 2'-deoxy-2'-fluorouridine-3'-phosphate
  modified_base 7: mod_base = OTHER; note = 2'-O-methylguanosine-3'-phosphate
  modified_base 8: mod_base = OTHER; note = 2'-deoxy-2'-fluorocytidine-3'-phosphate
  modified_base 9: mod_base = OTHER; note = 2'-deoxy-2'-fluorocytidine-3'-phosphate
  modified_base 10: mod_base = OTHER; note = 2'-O-methyluridine-3'-phosphate
  modified_base 11: mod_base = OTHER; note = 2'-O-methylcytidine-3'-phosphate
  modified_base 12: mod_base = OTHER; note = 2'-O-methylcytidine-3'-phosphate
  modified_base 13: mod_base = OTHER; note = 2'-O-methyladenosine-3'-phosphate
  modified_base 14: mod_base = OTHER; note = 2'-deoxy-2'-fluorouridine-3'-phosphate
  modified_base 15: mod_base = OTHER; note = 2'-O-methylcytidine-3'-phosphate
  modified_base 16: mod_base = OTHER; note = 2'-deoxy-2'-fluorocytidine-3'-phosphate
  modified_base 17: mod_base = OTHER; note = 2'-O-methyluridine-3'-phosphate
  modified_base 18: mod_base = OTHER; note = 2'-O-methyluridine-3'-phosphate
  modified_base 19: mod_base = OTHER; note = 2'-O-methyluridine-3'-phosphate
  modified_base 20: mod_base = OTHER; note = 2'-O-methylcytidine-3'-phosphate
  modified_base 21: mod_base = OTHER; note = 2'-O-methyluridine-3'-phosphorothioate
  modified_base 22: mod_base = OTHER; note = 2'-O-methylcytidine-3'-phosphorothioate
  modified_base 23: mod_base = OTHER; note = 2'-O-methyluridine
tattttgcctccatcctttctct

SEQ ID NO: 833 - RNA, 23 nt, synthetic construct
  source 1..23: mol_type = other RNA
  modified_base 1: mod_base = OTHER; note = 2'-O-methyluridine-3'-phosphorothioate 5'-(E)-Vinylphosphonate
  modified_base 2: mod_base = OTHER; note = 2'-deoxy-2'-fluorouridine-3'-phosphorothioate
  modified_base 3: mod_base = OTHER; note = 2'-O-methylcytidine-3'-phosphate
  modified_base 4: mod_base = OTHER; note = 2'-O-methyluridine-3'-phosphate
  modified_base 5: mod_base = OTHER; note = 2'-O-methylcytidine-3'-phosphate
  modified_base 6: mod_base = OTHER; note = 2'-deoxy-2'-fluoroguanosine-3'-phosphate
  modified_base 7: mod_base = OTHER; note = 2'-O-methylcytidine-3'-phosphate
  modified_base 8: mod_base = OTHER; note = 2'-deoxy-2'-fluorouridine-3'-phosphate
  modified_base 9: mod_base = OTHER; note = 2'-deoxy-2'-fluorocytidine-3'-phosphate
  modified_base 10: mod_base = OTHER; note = 2'-O-methyluridine-3'-phosphate
  modified_base 11: mod_base = OTHER; note = 2'-O-methylcytidine-3'-phosphate
  modified_base 12: mod_base = OTHER; note = 2'-O-methyluridine-3'-phosphate
  modified_base 13: mod_base = OTHER; note = 2'-O-methyluridine-3'-phosphate
  modified_base 14: mod_base = OTHER; note = 2'-deoxy-2'-fluorouridine-3'-phosphate
  modified_base 15: mod_base = OTHER; note = 2'-O-methyluridine-3'-phosphate
  modified_base 16: mod_base = OTHER; note = 2'-deoxy-2'-fluoroadenosine-3'-phosphate
  modified_base 17: mod_base = OTHER; note = 2'-O-methyladenosine-3'-phosphate
  modified_base 18: mod_base = OTHER; note = 2'-O-methyluridine-3'-phosphate
  modified_base 19: mod_base = OTHER; note = 2'-O-methylguanosine-3'-phosphate
  modified_base 20: mod_base = OTHER; note = 2'-O-methyluridine-3'-phosphate
  modified_base 21: mod_base = OTHER; note = 2'-O-methylcytidine-3'-phosphorothioate
  modified_base 22: mod_base = OTHER; note = 2'-O-methylcytidine-3'-phosphorothioate
  modified_base 23: mod_base = OTHER; note = 2'-O-methyluridine
ttctcgctctcttttaatgtcct

SEQ ID NO: 834 - RNA, 23 nt, synthetic construct
  source 1..23: mol_type = other RNA
  modified_base 1: mod_base = OTHER; note = 2'-O-methyluridine-3'-phosphorothioate 5'-(E)-Vinylphosphonate
  modified_base 2: mod_base = OTHER; note = 2'-deoxy-2'-fluoroguanosine-3'-phosphorothioate
  modified_base 3: mod_base = OTHER; note = 2'-O-methyluridine-3'-phosphate
  modified_base 4: mod_base = OTHER; note = 2'-O-methyladenosine-3'-phosphate
  modified_base 5: mod_base = OTHER; note = 2'-O-methylguanosine-3'-phosphate
  modified_base 6: mod_base = OTHER; note = 2'-deoxy-2'-fluorouridine-3'-phosphate
  modified_base 7: mod_base = OTHER; note = 2'-O-methylguanosine-3'-phosphate
  modified_base 8: mod_base = OTHER; note = 2'-deoxy-2'-fluorouridine-3'-phosphate
  modified_base 9: mod_base = OTHER; note = 2'-deoxy-2'-fluoroguanosine-3'-phosphate
  modified_base 10: mod_base = OTHER; note = 2'-O-methyluridine-3'-phosphate
  modified_base 11: mod_base = OTHER; note = 2'-O-methyluridine-3'-phosphate
  modified_base 12: mod_base = OTHER; note = 2'-O-methylcytidine-3'-phosphate
  modified_base 13: mod_base = OTHER; note = 2'-O-methylcytidine-3'-phosphate
  modified_base 14: mod_base = OTHER; note = 2'-deoxy-2'-fluorouridine-3'-phosphate
  modified_base 15: mod_base = OTHER; note = 2'-O-methylguanosine-3'-phosphate
  modified_base 16: mod_base = OTHER; note = 2'-deoxy-2'-fluorouridine-3'-phosphate
  modified_base 17: mod_base = OTHER; note = 2'-O-methyluridine-3'-phosphate
  modified_base 18: mod_base = OTHER; note = 2'-O-methylcytidine-3'-phosphate
  modified_base 19: mod_base = OTHER; note = 2'-O-methylcytidine-3'-phosphate
  modified_base 20: mod_base = OTHER; note = 2'-O-methylcytidine-3'-phosphate
  modified_base 21: mod_base = OTHER; note = 2'-O-methylguanosine-3'-phosphorothioate
  modified_base 22: mod_base = OTHER; note = 2'-O-methylguanosine-3'-phosphorothioate
  modified_base 23: mod_base = OTHER; note = 2'-O-methylguanosine
tgtagtgtgttcctgttcccggg

SEQ ID NO: 835 - RNA, 23 nt, synthetic construct
  source 1..23: mol_type = other RNA
  modified_base 1: mod_base = OTHER; note = 2'-O-methyluridine-3'-phosphorothioate 5'-(E)-Vinylphosphonate
  modified_base 2: mod_base = OTHER; note = 2'-deoxy-2'-fluoroadenosine-3'-phosphorothioate
  modified_base 3: mod_base = OTHER; note = 2'-O-methyladenosine-3'-phosphate
  modified_base 4: mod_base = OTHER; note = 2'-O-methyladenosine-3'-phosphate
  modified_base 5: mod_base = OTHER; note = 2'-O-methylcytidine-3'-phosphate
  modified_base 6: mod_base = OTHER; note = 2'-deoxy-2'-fluorouridine-3'-phosphate
  modified_base 7: mod_base = OTHER; note = 2'-O-methylguanosine-3'-phosphate
  modified_base 8: mod_base = OTHER; note = 2'-deoxy-2'-fluorouridine-3'-phosphate
  modified_base 9: mod_base = OTHER; note = 2'-deoxy-2'-fluorocytidine-3'-phosphate
  modified_base 10: mod_base = OTHER; note = 2'-O-methyladenosine-3'-phosphate
  modified_base 11: mod_base = OTHER; note = 2'-O-methyluridine-3'-phosphate
  modified_base 12: mod_base = OTHER; note = 2'-O-methyluridine-3'-phosphate
  modified_base 13: mod_base = OTHER; note = 2'-O-methylcytidine-3'-phosphate
  modified_base 14: mod_base = OTHER; note = 2'-deoxy-2'-fluorouridine-3'-phosphate
  modified_base 15: mod_base = OTHER; note = 2'-O-methylcytidine-3'-phosphate
  modified_base 16: mod_base = OTHER; note = 2'-deoxy-2'-fluorocytidine-3'-phosphate
  modified_base 17: mod_base = OTHER; note = 2'-O-methyluridine-3'-phosphate
  modified_base 18: mod_base = OTHER; note = 2'-O-methylcytidine-3'-phosphate
  modified_base 19: mod_base = OTHER; note = 2'-O-methyluridine-3'-phosphate
  modified_base 20: mod_base = OTHER; note = 2'-O-methylcytidine-3'-phosphate
  modified_base 21: mod_base = OTHER; note = 2'-O-methyluridine-3'-phosphorothioate
  modified_base 22: mod_base = OTHER; note = 2'-O-methylcytidine-3'-phosphorothioate
  modified_base 23: mod_base = OTHER; note = 2'-O-methyluridine
taaactgtcattctcctctctct

SEQ ID NO: 836 - RNA, 23 nt, synthetic construct
  source 1..23: mol_type = other RNA
  modified_base 1: mod_base = OTHER; note = 2'-O-methyluridine-3'-phosphorothioate 5'-(E)-Vinylphosphonate
  modified_base 2: mod_base = OTHER; note = 2'-deoxy-2'-fluoroguanosine-3'-phosphorothioate
  modified_base 3: mod_base = OTHER; note = 2'-O-methylguanosine-3'-phosphate
  modified_base 4: mod_base = OTHER; note = 2'-O-methyluridine-3'-phosphate
  modified_base 5: mod_base = OTHER; note = 2'-O-methyluridine-3'-phosphate
  modified_base 6: mod_base = OTHER; note = 2'-deoxy-2'-fluoroguanosine-3'-phosphate
  modified_base 7: mod_base = OTHER; note = 2'-O-methylguanosine-3'-phosphate
  modified_base 8: mod_base = OTHER; note = 2'-deoxy-2'-fluorouridine-3'-phosphate
  modified_base 9: mod_base = OTHER; note = 2'-deoxy-2'-fluoroguanosine-3'-phosphate
  modified_base 10: mod_base = OTHER; note = 2'-O-methyladenosine-3'-phosphate
  modified_base 11: mod_base = OTHER; note = 2'-O-methylcytidine-3'-phosphate
  modified_base 12: mod_base = OTHER; note = 2'-O-methylguanosine-3'-phosphate
  modified_base 13: mod_base = OTHER; note = 2'-O-methyladenosine-3'-phosphate
  modified_base 14: mod_base = OTHER; note = 2'-deoxy-2'-fluoroadenosine-3'-phosphate
  modified_base 15: mod_base = OTHER; note = 2'-O-methylguanosine-3'-phosphate
  modified_base 16: mod_base = OTHER; note = 2'-deoxy-2'-fluorouridine-3'-phosphate
  modified_base 17: mod_base = OTHER; note = 2'-O-methylcytidine-3'-phosphate
  modified_base 18: mod_base = OTHER; note = 2'-O-methylguanosine-3'-phosphate
  modified_base 19: mod_base = OTHER; note = 2'-O-methylcytidine-3'-phosphate
  modified_base 20: mod_base = OTHER; note = 2'-O-methyladenosine-3'-phosphate
  modified_base 21: mod_base = OTHER; note = 2'-O-methylguanosine-3'-phosphorothioate
  modified_base 22: mod_base = OTHER; note = 2'-O-methylcytidine-3'-phosphorothioate
  modified_base 23: mod_base = OTHER; note = 2'-O-methyladenosine
tggttggtgacgaagtcgcagca

SEQ ID NO: 837 - RNA, 23 nt, synthetic construct
  source 1..23: mol_type = other RNA
  modified_base 1: mod_base = OTHER; note = 2'-O-methyluridine-3'-phosphorothioate 5'-(E)-Vinylphosphonate
  modified_base 2: mod_base = OTHER; note = 2'-deoxy-2'-fluorocytidine-3'-phosphorothioate
  modified_base 3: mod_base = OTHER; note = 2'-O-methylguanosine-3'-phosphate
  modified_base 4: mod_base = OTHER; note = 2'-O-methyluridine-3'-phosphate
  modified_base 5: mod_base = OTHER; note = 2'-O-methyluridine-3'-phosphate
  modified_base 6: mod_base = OTHER; note = 2'-deoxy-2'-fluoroguanosine-3'-phosphate
  modified_base 7: mod_base = OTHER; note = 2'-O-methylguanosine-3'-phosphate
  modified_base 8: mod_base = OTHER; note = 2'-deoxy-2'-fluorocytidine-3'-phosphate
  modified_base 9: mod_base = OTHER; note = 2'-deoxy-2'-fluorocytidine-3'-phosphate
  modified_base 10: mod_base = OTHER; note = 2'-O-methyladenosine-3'-phosphate
  modified_base 11: mod_base = OTHER; note = 2'-O-methylguanosine-3'-phosphate
  modified_base 12: mod_base = OTHER; note = 2'-O-methylguanosine-3'-phosphate
  modified_base 13: mod_base = OTHER; note = 2'-O-methyladenosine-3'-phosphate
  modified_base 14: mod_base = OTHER; note = 2'-deoxy-2'-fluoroadenosine-3'-phosphate
  modified_base 15: mod_base = OTHER; note = 2'-O-methylguanosine-3'-phosphate
  modified_base 16: mod_base = OTHER; note = 2'-deoxy-2'-fluoroadenosine-3'-phosphate
  modified_base 17: mod_base = OTHER; note = 2'-O-methyladenosine-3'-phosphate
  modified_base 18: mod_base = OTHER; note = 2'-O-methylguanosine-3'-phosphate
  modified_base 19: mod_base = OTHER; note = 2'-O-methylguanosine-3'-phosphate
  modified_base 20: mod_base = OTHER; note = 2'-O-methylguanosine-3'-phosphate
  modified_base 21: mod_base = OTHER; note = 2'-O-methylcytidine-3'-phosphorothioate
  modified_base 22: mod_base = OTHER; note = 2'-O-methyladenosine-3'-phosphorothioate
  modified_base 23: mod_base = OTHER; note = 2'-O-methylguanosine
tcgttggccaggaagaagggcag

SEQ ID NO: 838 - RNA, 23 nt, synthetic construct
  source 1..23: mol_type = other RNA
  modified_base 1: mod_base = OTHER; note = 2'-O-methyluridine-3'-phosphorothioate 5'-(E)-Vinylphosphonate
  modified_base 2: mod_base = OTHER; note = 2'-deoxy-2'-fluorouridine-3'-phosphorothioate
  modified_base 3: mod_base = OTHER; note = 2'-O-methyluridine-3'-phosphate
  modified_base 4: mod_base = OTHER; note = 2'-O-methylcytidine-3'-phosphate
  modified_base 5: mod_base = OTHER; note = 2'-O-methyladenosine-3'-phosphate
  modified_base 6: mod_base = OTHER; note = 2'-deoxy-2'-fluorocytidine-3'-phosphate
  modified_base 7: mod_base = OTHER; note = 2'-O-methylcytidine-3'-phosphate
  modified_base 8: mod_base = OTHER; note = 2'-deoxy-2'-fluorouridine-3'-phosphate
  modified_base 9: mod_base = OTHER; note = 2'-deoxy-2'-fluoroguanosine-3'-phosphate
  modified_base 10: mod_base = OTHER; note = 2'-O-methylcytidine-3'-phosphate
  modified_base 11: mod_base = OTHER; note = 2'-O-methyluridine-3'-phosphate
  modified_base 12: mod_base = OTHER; note = 2'-O-methyladenosine-3'-phosphate
  modified_base 13: mod_base = OTHER; note = 2'-O-methyluridine-3'-phosphate
  modified_base 14: mod_base = OTHER; note = 2'-deoxy-2'-fluorocytidine-3'-phosphate
  modified_base 15: mod_base = OTHER; note = 2'-O-methylguanosine-3'-phosphate
  modified_base 16: mod_base = OTHER; note = 2'-deoxy-2'-fluoroguanosine-3'-phosphate
  modified_base 17: mod_base = OTHER; note = 2'-O-methyluridine-3'-phosphate
  modified_base 18: mod_base = OTHER; note = 2'-O-methylcytidine-3'-phosphate
  modified_base 19: mod_base = OTHER; note = 2'-O-methyluridine-3'-phosphate
  modified_base 20: mod_base = OTHER; note = 2'-O-methyluridine-3'-phosphate
  modified_base 21: mod_base = OTHER; note = 2'-O-methyladenosine-3'-phosphorothioate
  modified_base 22: mod_base = OTHER; note = 2'-O-methyladenosine-3'-phosphorothioate
  modified_base 23: mod_base = OTHER; note = 2'-O-methylguanosine
tttcacctgctatcggtcttaag

SEQ ID NO: 839 - RNA, 23 nt, synthetic construct
  source 1..23: mol_type = other RNA
  modified_base 1: mod_base = OTHER; note = 2'-O-methyluridine-3'-phosphorothioate 5'-(E)-Vinylphosphonate
  modified_base 2: mod_base = OTHER; note = 2'-deoxy-2'-fluoroadenosine-3'-phosphorothioate
  modified_base 3: mod_base = OTHER; note = 2'-O-methylguanosine-3'-phosphate
  modified_base 4: mod_base = OTHER; note = 2'-O-methylcytidine-3'-phosphate
  modified_base 5: mod_base = OTHER; note = 2'-O-methyluridine-3'-phosphate
  modified_base 6: mod_base = OTHER; note = 2'-deoxy-2'-fluoroguanosine-3'-phosphate
  modified_base 7: mod_base = OTHER; note = 2'-O-methyluridine-3'-phosphate
  modified_base 8: mod_base = OTHER; note = 2'-deoxy-2'-fluorocytidine-3'-phosphate
  modified_base 9: mod_base = OTHER; note = 2'-deoxy-2'-fluoroguanosine-3'-phosphate
  modified_base 10: mod_base = OTHER; note = 2'-O-methyladenosine-3'-phosphate
  modified_base 11: mod_base = OTHER; note = 2'-O-methyluridine-3'-phosphate
  modified_base 12: mod_base = OTHER; note = 2'-O-methylcytidine-3'-phosphate
  modified_base 13: mod_base = OTHER; note = 2'-O-methyluridine-3'-phosphate
  modified_base 14: mod_base = OTHER; note = 2'-deoxy-2'-fluorouridine-3'-phosphate
  modified_base 15: mod_base = OTHER; note = 2'-O-methylcytidine-3'-phosphate
  modified_base 16: mod_base = OTHER; note = 2'-deoxy-2'-fluorouridine-3'-phosphate
  modified_base 17: mod_base = OTHER; note = 2'-O-methyluridine-3'-phosphate
  modified_base 18: mod_base = OTHER; note = 2'-O-methylcytidine-3'-phosphate
  modified_base 19: mod_base = OTHER; note = 2'-O-methyladenosine-3'-phosphate
  modified_base 20: mod_base = OTHER; note = 2'-O-methylcytidine-3'-phosphate
  modified_base 21: mod_base = OTHER; note = 2'-O-methylcytidine-3'-phosphorothioate
  modified_base 22: mod_base = OTHER; note = 2'-O-methyluridine-3'-phosphorothioate
  modified_base 23: mod_base = OTHER; note = 2'-O-methylguanosine
tagctgtcgatcttcttcacctg

SEQ ID NO: 840 - RNA, 23 nt, synthetic construct
  source 1..23: mol_type = other RNA
  modified_base 1: mod_base = OTHER; note = 2'-O-methyluridine-3'-phosphorothioate 5'-(E)-Vinylphosphonate
  modified_base 2: mod_base = OTHER; note = 2'-deoxy-2'-fluorouridine-3'-phosphorothioate
  modified_base 3: mod_base = OTHER; note = 2'-O-methyluridine-3'-phosphate
  modified_base 4: mod_base = OTHER; note = 2'-O-methylcytidine-3'-phosphate
  modified_base 5: mod_base = OTHER; note = 2'-O-methyladenosine-3'-phosphate
  modified_base 6: mod_base = OTHER; note = 2'-deoxy-2'-fluorocytidine-3'-phosphate
  modified_base 7: mod_base = OTHER; note = 2'-O-methylcytidine-3'-phosphate
  modified_base 8: mod_base = OTHER; note = 2'-deoxy-2'-fluoroadenosine-3'-phosphate
  modified_base 9: mod_base = OTHER; note = 2'-deoxy-2'-fluoroguanosine-3'-phosphate
  modified_base 10: mod_base = OTHER; note = 2'-O-methylcytidine-3'-phosphate
  modified_base 11: mod_base = OTHER; note = 2'-O-methyladenosine-3'-phosphate
  modified_base 12: mod_base = OTHER; note = 2'-O-methyladenosine-3'-phosphate
  modified_base 13: mod_base = OTHER; note = 2'-O-methyladenosine-3'-phosphate
  modified_base 14: mod_base = OTHER; note = 2'-deoxy-2'-fluorouridine-3'-phosphate
  modified_base 15: mod_base = OTHER; note = 2'-O-methyluridine-3'-phosphate
  modified_base 16: mod_base = OTHER; note = 2'-deoxy-2'-fluorocytidine-3'-phosphate
  modified_base 17: mod_base = OTHER; note = 2'-O-methyladenosine-3'-phosphate
  modified_base 18: mod_base = OTHER; note = 2'-O-methylcytidine-3'-phosphate
  modified_base 19: mod_base = OTHER; note = 2'-O-methylguanosine-3'-phosphate
  modified_base 20: mod_base = OTHER; note = 2'-O-methyluridine-3'-phosphate
  modified_base 21: mod_base = OTHER; note = 2'-O-methylguanosine-3'-phosphorothioate
  modified_base 22: mod_base = OTHER; note = 2'-O-methylguanosine-3'-phosphorothioate
  modified_base 23: mod_base = OTHER; note = 2'-O-methylguanosine
tttcaccagcaaattcacgtggg

SEQ ID NO: 841 - RNA, 23 nt, synthetic construct
  source 1..23: mol_type = other RNA
  modified_base 1: mod_base = OTHER; note = 2'-O-methyluridine-3'-phosphorothioate 5'-(E)-Vinylphosphonate
  modified_base 2: mod_base = OTHER; note = 2'-deoxy-2'-fluoroadenosine-3'-phosphorothioate
  modified_base 3: mod_base = OTHER; note = 2'-O-methyladenosine-3'-phosphate
  modified_base 4: mod_base = OTHER; note = 2'-O-methylcytidine-3'-phosphate
  modified_base 5: mod_base = OTHER; note = 2'-O-methyluridine-3'-phosphate
  modified_base 6: mod_base = OTHER; note = 2'-deoxy-2'-fluoroguanosine-3'-phosphate
  modified_base 7: mod_base = OTHER; note = 2'-O-methyluridine-3'-phosphate
  modified_base 8: mod_base = OTHER; note = 2'-deoxy-2'-fluorouridine-3'-phosphate
  modified_base 9: mod_base = OTHER; note = 2'-deoxy-2'-fluorouridine-3'-phosphate
  modified_base 10: mod_base = OTHER; note = 2'-O-methylcytidine-3'-phosphate
  modified_base 11: mod_base = OTHER; note = 2'-O-methyluridine-3'-phosphate
  modified_base 12: mod_base = OTHER; note = 2'-O-methylcytidine-3'-phosphate
  modified_base 13: mod_base = OTHER; note = 2'-O-methyluridine-3'-phosphate
  modified_base 14: mod_base = OTHER; note = 2'-deoxy-2'-fluorocytidine-3'-phosphate
  modified_base 15: mod_base = OTHER; note = 2'-O-methyluridine-3'-phosphate
  modified_base 16: mod_base = OTHER; note = 2'-deoxy-2'-fluorocytidine-3'-phosphate
  modified_base 17: mod_base = OTHER; note = 2'-O-methyluridine-3'-phosphate
  modified_base 18: mod_base = OTHER; note = 2'-O-methylcytidine-3'-phosphate
  modified_base 19: mod_base = OTHER; note = 2'-O-methylguanosine-3'-phosphate
  modified_base 20: mod_base = OTHER; note = 2'-O-methylcytidine-3'-phosphate
  modified_base 21: mod_base = OTHER; note = 2'-O-methyluridine-3'-phosphorothioate
  modified_base 22: mod_base = OTHER; note = 2'-O-methylcytidine-3'-phosphorothioate
  modified_base 23: mod_base = OTHER; note = 2'-O-methyluridine
taactgtttctctctctcgctct

SEQ ID NO: 842 - RNA, 23 nt, synthetic construct
  source 1..23: mol_type = other RNA
  modified_base 1: mod_base = OTHER; note = 2'-O-methyluridine-3'-phosphorothioate 5'-(E)-Vinylphosphonate
  modified_base 2: mod_base = OTHER; note = 2'-deoxy-2'-fluoroguanosine-3'-phosphorothioate
  modified_base 3: mod_base = OTHER; note = 2'-O-methyluridine-3'-phosphate
  modified_base 4: mod_base = OTHER; note = 2'-O-methylguanosine-3'-phosphate
  modified_base 5: mod_base = OTHER; note = 2'-O-methylguanosine-3'-phosphate
  modified_base 6: mod_base = OTHER; note = 2'-deoxy-2'-fluorocytidine-3'-phosphate
  modified_base 7: mod_base = OTHER; note = 2'-O-methyluridine-3'-phosphate
  modified_base 8: mod_base = OTHER; note = 2'-deoxy-2'-fluorouridine-3'-phosphate
  modified_base 9: mod_base = OTHER; note = 2'-deoxy-2'-fluorouridine-3'-phosphate
  modified_base 10: mod_base = OTHER; note = 2'-O-methyluridine-3'-phosphate
  modified_base 11: mod_base = OTHER; note = 2'-O-methylcytidine-3'-phosphate
  modified_base 12: mod_base = OTHER; note = 2'-O-methyluridine-3'-phosphate
  modified_base 13: mod_base = OTHER; note = 2'-O-methylcytidine-3'-phosphate
  modified_base 14: mod_base = OTHER; note = 2'-deoxy-2'-fluorouridine-3'-phosphate
  modified_base 15: mod_base = OTHER; note = 2'-O-methyluridine-3'-phosphate
  modified_base 16: mod_base = OTHER; note = 2'-deoxy-2'-fluorouridine-3'-phosphate
  modified_base 17: mod_base = OTHER; note = 2'-O-methylguanosine-3'-phosphate
  modified_base 18: mod_base = OTHER; note = 2'-O-methylcytidine-3'-phosphate
  modified_base 19: mod_base = OTHER; note = 2'-O-methylcytidine-3'-phosphate
  modified_base 20: mod_base = OTHER; note = 2'-O-methyluridine-3'-phosphate
  modified_base 21: mod_base = OTHER; note = 2'-O-methylcytidine-3'-phosphorothioate
  modified_base 22: mod_base = OTHER; note = 2'-O-methylguanosine-3'-phosphorothioate
  modified_base 23: mod_base = OTHER; note = 2'-O-methylguanosine
tgtggcttttctctttgcctcgg

SEQ ID NO: 843 - RNA, 23 nt, synthetic construct
  source 1..23: mol_type = other RNA
  modified_base 1: mod_base = OTHER; note = 2'-O-methyluridine-3'-phosphorothioate 5'-(E)-Vinylphosphonate
  modified_base 2: mod_base = OTHER; note = 2'-deoxy-2'-fluoroadenosine-3'-phosphorothioate
  modified_base 3: mod_base = OTHER; note = 2'-O-methylcytidine-3'-phosphate
  modified_base 4: mod_base = OTHER; note = 2'-O-methylcytidine-3'-phosphate
  modified_base 5: mod_base = OTHER; note = 2'-O-methyladenosine-3'-phosphate
  modified_base 6: mod_base = OTHER; note = 2'-deoxy-2'-fluoroguanosine-3'-phosphate
  modified_base 7: mod_base = OTHER; note = 2'-O-methyluridine-3'-phosphate
  modified_base 8: mod_base = OTHER; note = 2'-deoxy-2'-fluoroguanosine-3'-phosphate
  modified_base 9: mod_base = OTHER; note = 2'-deoxy-2'-fluorocytidine-3'-phosphate
  modified_base 10: mod_base = OTHER; note = 2'-O-methyladenosine-3'-phosphate
  modified_base 11: mod_base = OTHER; note = 2'-O-methyluridine-3'-phosphate
  modified_base 12: mod_base = OTHER; note = 2'-O-methylguanosine-3'-phosphate
  modified_base 13: mod_base = OTHER; note = 2'-O-methyladenosine-3'-phosphate
  modified_base 14: mod_base = OTHER; note = 2'-deoxy-2'-fluoroguanosine-3'-phosphate
  modified_base 15: mod_base = OTHER; note = 2'-O-methylguanosine-3'-phosphate
  modified_base 16: mod_base = OTHER; note = 2'-deoxy-2'-fluoroadenosine-3'-phosphate
  modified_base 17: mod_base = OTHER; note = 2'-O-methyluridine-3'-phosphate
  modified_base 18: mod_base = OTHER; note = 2'-O-methylguanosine-3'-phosphate
  modified_base 19: mod_base = OTHER; note = 2'-O-methylguanosine-3'-phosphate
  modified_base 20: mod_base = OTHER; note = 2'-O-methylguanosine-3'-phosphate
  modified_base 21: mod_base = OTHER; note = 2'-O-methylcytidine-3'-phosphorothioate
  modified_base 22: mod_base = OTHER; note = 2'-O-methyladenosine-3'-phosphorothioate
  modified_base 23: mod_base = OTHER; note = 2'-O-methylguanosine
taccagtgcatgaggatgggcag

SEQ ID NO: 844 - RNA, 23 nt, synthetic construct
  source 1..23: mol_type = other RNA
  modified_base 1: mod_base = OTHER; note = 2'-O-methyluridine-3'-phosphorothioate 5'-(E)-Vinylphosphonate
  modified_base 2: mod_base = OTHER; note = 2'-deoxy-2'-fluoroadenosine-3'-phosphorothioate
  modified_base 3: mod_base = OTHER; note = 2'-O-methylguanosine-3'-phosphate
  modified_base 4: mod_base = OTHER; note = 2'-O-methylguanosine-3'-phosphate
  modified_base 5: mod_base = OTHER; note = 2'-O-methylguanosine-3'-phosphate
  modified_base 6: mod_base = OTHER; note = 2'-deoxy-2'-fluorocytidine-3'-phosphate
  modified_base 7: mod_base = OTHER; note = 2'-O-methyladenosine-3'-phosphate
  modified_base 8: mod_base = OTHER; note = 2'-deoxy-2'-fluoroadenosine-3'-phosphate
  modified_base 9: mod_base = OTHER; note = 2'-deoxy-2'-fluorouridine-3'-phosphate
  modified_base 10: mod_base = OTHER; note = 2'-O-methylguanosine-3'-phosphate
  modified_base 11: mod_base = OTHER; note = 2'-O-methyladenosine-3'-phosphate
  modified_base 12: mod_base = OTHER; note = 2'-O-methylcytidine-3'-phosphate
  modified_base 13: mod_base = OTHER; note = 2'-O-methyladenosine-3'-phosphate
  modified_base 14: mod_base = OTHER; note = 2'-deoxy-2'-fluorocytidine-3'-phosphate
  modified_base 15: mod_base = OTHER; note = 2'-O-methyladenosine-3'-phosphate
  modified_base 16: mod_base = OTHER; note = 2'-deoxy-2'-fluorocytidine-3'-phosphate
  modified_base 17: mod_base = OTHER; note = 2'-O-methyladenosine-3'-phosphate
  modified_base 18: mod_base = OTHER; note = 2'-O-methylguanosine-3'-phosphate
  modified_base 19: mod_base = OTHER; note = 2'-O-methylguanosine-3'-phosphate
  modified_base 20: mod_base = OTHER; note = 2'-O-methylguanosine-3'-phosphate
  modified_base 21: mod_base = OTHER; note = 2'-O-methyluridine-3'-phosphorothioate
  modified_base 22: mod_base = OTHER; note = 2'-O-methylcytidine-3'-phosphorothioate
  modified_base 23: mod_base = OTHER; note = 2'-O-methyluridine
tagggcaatgacacacagggtct

SEQ ID NO: 845 - RNA, 23 nt, synthetic construct
  source 1..23: mol_type = other RNA
  modified_base 1: mod_base = OTHER; note = 2'-O-methyluridine-3'-phosphorothioate 5'-(E)-Vinylphosphonate
  modified_base 2: mod_base = OTHER; note = 2'-deoxy-2'-fluoroguanosine-3'-phosphorothioate
  modified_base 3: mod_base = OTHER; note = 2'-O-methylguanosine-3'-phosphate
  modified_base 4: mod_base = OTHER; note = 2'-O-methylcytidine-3'-phosphate
  modified_base 5: mod_base = OTHER; note = 2'-O-methyluridine-3'-phosphate
  modified_base 6: mod_base = OTHER; note = 2'-deoxy-2'-fluorouridine-3'-phosphate
  modified_base 7: mod_base = OTHER; note = 2'-O-methylcytidine-3'-phosphate
  modified_base 8: mod_base = OTHER; note = 2'-deoxy-2'-fluoroguanosine-3'-phosphate
  modified_base 9: mod_base = OTHER; note = 2'-deoxy-2'-fluoroadenosine-3'-phosphate
  modified_base 10: mod_base = OTHER; note = 2'-O-methylguanosine-3'-phosphate
  modified_base 11: mod_base = OTHER; note = 2'-O-methyluridine-3'-phosphate
  modified_base 12: mod_base = OTHER; note = 2'-O-methyluridine-3'-phosphate
  modified_base 13: mod_base = OTHER; note = 2'-O-methylcytidine-3'-phosphate
  modified_base 14: mod_base = OTHER; note = 2'-deoxy-2'-fluoroadenosine-3'-phosphate
  modified_base 15: mod_base = OTHER; note = 2'-O-methylcytidine-3'-phosphate
  modified_base 16: mod_base = OTHER; note = 2'-deoxy-2'-fluorocytidine-3'-phosphate
  modified_base 17: mod_base = OTHER; note = 2'-O-methyluridine-3'-phosphate
  modified_base 18: mod_base = OTHER; note = 2'-O-methylguanosine-3'-phosphate
  modified_base 19: mod_base = OTHER; note = 2'-O-methylcytidine-3'-phosphate
  modified_base 20: mod_base = OTHER; note = 2'-O-methyluridine-3'-phosphate
  modified_base 21: mod_base = OTHER; note = 2'-O-methyladenosine-3'-phosphorothioate
  modified_base 22: mod_base = OTHER; note = 2'-O-methyluridine-3'-phosphorothioate
  modified_base 23: mod_base = OTHER; note = 2'-O-methylcytidine
tggcttcgagttcacctgctatc

SEQ ID NO: 846 - RNA, 23 nt, synthetic construct
  source 1..23: mol_type = other RNA
  modified_base 1: mod_base = OTHER; note = 2'-O-methyluridine-3'-phosphorothioate 5'-(E)-Vinylphosphonate
  modified_base 2: mod_base = OTHER; note = 2'-deoxy-2'-fluoroadenosine-3'-phosphorothioate
  modified_base 3: mod_base = OTHER; note = 2'-O-methyluridine-3'-phosphate
  modified_base 4: mod_base = OTHER; note = 2'-O-methylguanosine-3'-phosphate
  modified_base 5: mod_base = OTHER; note = 2'-O-methyladenosine-3'-phosphate
  modified_base 6: mod_base = OTHER; note = 2'-deoxy-2'-fluoroguanosine-3'-phosphate
  modified_base 7: mod_base = OTHER; note = 2'-O-methylcytidine-3'-phosphate
  modified_base 8: mod_base = OTHER; note = 2'-deoxy-2'-fluoroadenosine-3'-phosphate
  modified_base 9: mod_base = OTHER; note = 2'-deoxy-2'-fluoroguanosine-3'-phosphate
  modified_base 10: mod_base = OTHER; note = 2'-O-methylcytidine-3'-phosphate
  modified_base 11: mod_base = OTHER; note = 2'-O-methyladenosine-3'-phosphate
  modified_base 12: mod_base = OTHER; note = 2'-O-methylcytidine-3'-phosphate
  modified_base 13: mod_base = OTHER; note = 2'-O-methylguanosine-3'-phosphate
  modified_base 14: mod_base = OTHER; note = 2'-deoxy-2'-fluoroadenosine-3'-phosphate
  modified_base 15: mod_base = OTHER; note = 2'-O-methyluridine-3'-phosphate
  modified_base 16: mod_base = OTHER; note = 2'-deoxy-2'-fluoroguanosine-3'-phosphate
  modified_base 17: mod_base = OTHER; note = 2'-O-methyladenosine-3'-phosphate
  modified_base 18: mod_base = OTHER; note = 2'-O-methylguanosine-3'-phosphate
  modified_base 19: mod_base = OTHER; note = 2'-O-methylcytidine-3'-phosphate
  modified_base 20: mod_base = OTHER; note = 2'-O-methylguanosine-3'-phosphate
  modified_base 21: mod_base = OTHER; note = 2'-O-methylcytidine-3'-phosphorothioate
  modified_base 22: mod_base = OTHER; note = 2'-O-methylcytidine-3'-phosphorothioate
  modified_base 23: mod_base = OTHER; note = 2'-O-methyladenosine
tatgagcagcacgatgagcgcca

SEQ ID NO: 847 - RNA, 23 nt, synthetic construct
  source 1..23: mol_type = other RNA
  modified_base 1: mod_base = OTHER; note = 2'-O-methyluridine-3'-phosphorothioate 5'-(E)-Vinylphosphonate
  modified_base 2: mod_base = OTHER; note = 2'-deoxy-2'-fluoroadenosine-3'-phosphorothioate
  modified_base 3: mod_base = OTHER; note = 2'-O-methylcytidine-3'-phosphate
  modified_base 4: mod_base = OTHER; note = 2'-O-methylguanosine-3'-phosphate
  modified_base 5: mod_base = OTHER; note = 2'-O-methyladenosine-3'-phosphate
  modified_base 6: mod_base = OTHER; note = 2'-deoxy-2'-fluoroadenosine-3'-phosphate
  modified_base 7: mod_base = OTHER; note = 2'-O-methylguanosine-3'-phosphate
  modified_base 8: mod_base = OTHER; note = 2'-deoxy-2'-fluoroguanosine-3'-phosphate
  modified_base 9: mod_base = OTHER; note = 2'-deoxy-2'-fluorocytidine-3'-phosphate
  modified_base 10: mod_base = OTHER; note = 2'-O-methylcytidine-3'-phosphate
  modified_base 11: mod_base = OTHER; note = 2'-O-methyladenosine-3'-phosphate
  modified_base 12: mod_base = OTHER; note = 2'-O-methyluridine-3'-phosphate
  modified_base 13: mod_base = OTHER; note = 2'-O-methylguanosine-3'-phosphate
  modified_base 14: mod_base = OTHER; note = 2'-deoxy-2'-fluoroadenosine-3'-phosphate
  modified_base 15: mod_base = OTHER; note = 2'-O-methyluridine-3'-phosphate
  modified_base 16: mod_base = OTHER; note = 2'-deoxy-2'-fluoroguanosine-3'-phosphate
  modified_base 17: mod_base = OTHER; note = 2'-O-methylcytidine-3'-phosphate
  modified_base 18: mod_base = OTHER; note = 2'-O-methyladenosine-3'-phosphate
  modified_base 19: mod_base = OTHER; note = 2'-O-methylcytidine-3'-phosphate
  modified_base 20: mod_base = OTHER; note = 2'-O-methyladenosine-3'-phosphate
  modified_base 21: mod_base = OTHER; note = 2'-O-methylguanosine-3'-phosphorothioate
  modified_base 22: mod_base = OTHER; note = 2'-O-methylguanosine-3'-phosphorothioate
  modified_base 23: mod_base = OTHER; note = 2'-O-methylguanosine
tacgaaggccatgatgcacaggg

SEQ ID NO: 848 - RNA, 23 nt, synthetic construct
  source 1..23: mol_type = other RNA
  modified_base 1: mod_base = OTHER; note = 2'-O-methyluridine-3'-phosphorothioate 5'-(E)-Vinylphosphonate
  modified_base 2: mod_base = OTHER; note = 2'-deoxy-2'-fluoroguanosine-3'-phosphorothioate
  modified_base 3: mod_base = OTHER; note = 2'-O-methyluridine-3'-phosphate
  modified_base 4: mod_base = OTHER; note = 2'-O-methyluridine-3'-phosphate
  modified_base 5: mod_base = OTHER; note = 2'-O-methylcytidine-3'-phosphate
  modified_base 6: mod_base = OTHER; note = 2'-deoxy-2'-fluorocytidine-3'-phosphate
  modified_base 7: mod_base = OTHER; note = 2'-O-methylcytidine-3'-phosphate
  modified_base 8: mod_base = OTHER; note = 2'-deoxy-2'-fluoroguanosine-3'-phosphate
  modified_base 9: mod_base = OTHER; note = 2'-deoxy-2'-fluoroguanosine-3'-phosphate
  modified_base 10: mod_base = OTHER; note = 2'-O-methylguanosine-3'-phosphate
  modified_base 11: mod_base = OTHER; note = 2'-O-methyladenosine-3'-phosphate
  modified_base 12: mod_base = OTHER; note = 2'-O-methyladenosine-3'-phosphate
  modified_base 13: mod_base = OTHER; note = 2'-O-methyladenosine-3'-phosphate
  modified_base 14: mod_base = OTHER; note = 2'-deoxy-2'-fluoroguanosine-3'-phosphate
  modified_base 15: mod_base = OTHER; note = 2'-O-methylguanosine-3'-phosphate
  modified_base 16: mod_base = OTHER; note = 2'-deoxy-2'-fluoroguanosine-3'-phosphate
  modified_base 17: mod_base = OTHER; note = 2'-O-methyladenosine-3'-phosphate
  modified_base 18: mod_base = OTHER; note = 2'-O-methyluridine-3'-phosphate
  modified_base 19: mod_base = OTHER; note = 2'-O-methylguanosine-3'-phosphate
  modified_base 20: mod_base = OTHER; note = 2'-O-methylguanosine-3'-phosphate
  modified_base 21: mod_base = OTHER; note = 2'-O-methylguanosine-3'-phosphorothioate
  modified_base 22: mod_base = OTHER; note = 2'-O-methyladenosine-3'-phosphorothioate
  modified_base 23: mod_base = OTHER; note = 2'-O-methylguanosine
tgttcccgggaaagggatgggag

SEQ ID NO: 849 - RNA, 23 nt, synthetic construct
  source 1..23: mol_type = other RNA
  modified_base 1: mod_base = OTHER; note = 2'-O-methyluridine-3'-phosphorothioate 5'-(E)-Vinylphosphonate
  modified_base 2: mod_base = OTHER; note = 2'-deoxy-2'-fluorocytidine-3'-phosphorothioate
  modified_base 3: mod_base = OTHER; note = 2'-O-methyluridine-3'-phosphate
  modified_base 4: mod_base = OTHER; note = 2'-O-methyladenosine-3'-phosphate
  modified_base 5: mod_base = OTHER; note = 2'-O-methylcytidine-3'-phosphate
  modified_base 6: mod_base = OTHER; note = 2'-deoxy-2'-fluoroadenosine-3'-phosphate
  modified_base 7: mod_base = OTHER; note = 2'-O-methylcytidine-3'-phosphate
  modified_base 8: mod_base = OTHER; note = 2'-deoxy-2'-fluorocytidine-3'-phosphate
  modified_base 9: mod_base = OTHER; note = 2'-deoxy-2'-fluorouridine-3'-phosphate
  modified_base 10: mod_base = OTHER; note = 2'-O-methyluridine-3'-phosphate
  modified_base 11: mod_base = OTHER; note = 2'-O-methylguanosine-3'-phosphate
  modified_base 12: mod_base = OTHER; note = 2'-O-methylguanosine-3'-phosphate
  modified_base 13: mod_base = OTHER; note = 2'-O-methyladenosine-3'-phosphate
  modified_base 14: mod_base = OTHER; note = 2'-deoxy-2'-fluorouridine-3'-phosphate
  modified_base 15: mod_base = OTHER; note = 2'-O-methyluridine-3'-phosphate
  modified_base 16: mod_base = OTHER; note = 2'-deoxy-2'-fluorocytidine-3'-phosphate
  modified_base 17: mod_base = OTHER; note = 2'-O-methylcytidine-3'-phosphate
  modified_base 18: mod_base = OTHER; note = 2'-O-methylguanosine-3'-phosphate
  modified_base 19: mod_base = OTHER; note = 2'-O-methyladenosine-3'-phosphate
  modified_base 20: mod_base = OTHER; note = 2'-O-methylguanosine-3'-phosphate
  modified_base 21: mod_base = OTHER; note = 2'-O-methylguanosine-3'-phosphorothioate
  modified_base 22: mod_base = OTHER; note = 2'-O-methylcytidine-3'-phosphorothioate
  modified_base 23: mod_base = OTHER; note = 2'-O-methylguanosine
tctacaccttggattccgaggcg

SEQ ID NO: 850 - RNA, 23 nt, synthetic construct
  source 1..23: mol_type = other RNA
  modified_base 1: mod_base = OTHER; note = 2'-O-methyluridine-3'-phosphorothioate 5'-(E)-Vinylphosphonate
  modified_base 2: mod_base = OTHER; note = 2'-deoxy-2'-fluoroadenosine-3'-phosphorothioate
  modified_base 3: mod_base = OTHER; note = 2'-O-methylguanosine-3'-phosphate
  modified_base 4: mod_base = OTHER; note = 2'-O-methyladenosine-3'-phosphate
  modified_base 5: mod_base = OTHER; note = 2'-O-methylcytidine-3'-phosphate
  modified_base 6: mod_base = OTHER; note = 2'-deoxy-2'-fluoroguanosine-3'-phosphate
  modified_base 7: mod_base = OTHER; note = 2'-O-methyladenosine-3'-phosphate
  modified_base 8: mod_base = OTHER; note = 2'-deoxy-2'-fluoroguanosine-3'-phosphate
  modified_base 9: mod_base = OTHER; note = 2'-deoxy-2'-fluoroguanosine-3'-phosphate
  modified_base 10: mod_base = OTHER; note = 2'-O-methyladenosine-3'-phosphate
  modified_base 11: mod_base = OTHER; note = 2'-O-methyluridine-3'-phosphate
  modified_base 12: mod_base = OTHER; note = 2'-O-methyluridine-3'-phosphate
  modified_base 13: mod_base = OTHER; note = 2'-O-methylguanosine-3'-phosphate
  modified_base 14: mod_base = OTHER; note = 2'-deoxy-2'-fluorouridine-3'-phosphate
  modified_base 15: mod_base = OTHER; note = 2'-O-methylguanosine-3'-phosphate
  modified_base 16: mod_base = OTHER; note = 2'-deoxy-2'-fluoroguanosine-3'-phosphate
  modified_base 17: mod_base = OTHER; note = 2'-O-methylguanosine-3'-phosphate
  modified_base 18: mod_base = OTHER; note = 2'-O-methylcytidine-3'-phosphate
  modified_base 19: mod_base = OTHER; note = 2'-O-methyluridine-3'-phosphate
  modified_base 20: mod_base = OTHER; note = 2'-O-methyluridine-3'-phosphate
  modified_base 21: mod_base = OTHER; note = 2'-O-methylcytidine-3'-phosphorothioate
  modified_base 22: mod_base = OTHER; note = 2'-O-methylguanosine-3'-phosphorothioate
  modified_base 23: mod_base = OTHER; note = 2'-O-methyladenosine
tagacgaggattgtgggcttcga

SEQ ID NO: 851 - RNA, 23 nt, synthetic construct
  source 1..23: mol_type = other RNA
  modified_base 1: mod_base = OTHER; note = 2'-O-methyluridine-3'-phosphorothioate 5'-(E)-Vinylphosphonate
  modified_base 2: mod_base = OTHER; note = 2'-deoxy-2'-fluorocytidine-3'-phosphorothioate
  modified_base 3: mod_base = OTHER; note = 2'-O-methylguanosine-3'-phosphate
  modified_base 4: mod_base = OTHER; note = 2'-O-methylcytidine-3'-phosphate
  modified_base 5: mod_base = OTHER; note = 2'-O-methyladenosine-3'-phosphate
  modified_base 6: mod_base = OTHER; note = 2'-deoxy-2'-fluoroguanosine-3'-phosphate
  modified_base 7: mod_base = OTHER; note = 2'-O-methylguanosine-3'-phosphate
  modified_base 8: mod_base = OTHER; note = 2'-deoxy-2'-fluorouridine-3'-phosphate
  modified_base 9: mod_base = OTHER; note = 2'-deoxy-2'-fluoroadenosine-3'-phosphate
  modified_base 10: mod_base = OTHER; note = 2'-O-methylcytidine-3'-phosphate
  modified_base 11: mod_base = OTHER; note = 2'-O-methyladenosine-3'-phosphate
  modified_base 12: mod_base = OTHER; note = 2'-O-methylcytidine-3'-phosphate
  modified_base 13: mod_base = OTHER; note = 2'-O-methylguanosine-3'-phosphate
  modified_base 14: mod_base = OTHER; note = 2'-deoxy-2'-fluoroadenosine-3'-phosphate
  modified_base 15: mod_base = OTHER; note = 2'-O-methyladenosine-3'-phosphate
  modified_base 16: mod_base = OTHER; note = 2'-deoxy-2'-fluoroguanosine-3'-phosphate
  modified_base 17: mod_base = OTHER; note = 2'-O-methylguanosine-3'-phosphate
  modified_base 18: mod_base = OTHER; note = 2'-O-methylcytidine-3'-phosphate
  modified_base 19: mod_base = OTHER; note = 2'-O-methylcytidine-3'-phosphate
  modified_base 20: mod_base = OTHER; note = 2'-O-methyladenosine-3'-phosphate
  modified_base 21: mod_base = OTHER; note = 2'-O-methyluridine-3'-phosphorothioate
  modified_base 22: mod_base = OTHER; note = 2'-O-methylguanosine-3'-phosphorothioate
  modified_base 23: mod_base = OTHER; note = 2'-O-methyladenosine
tcgcaggtacacgaaggccatga

SEQ ID NO: 852 - RNA, 23 nt, synthetic construct
  source 1..23: mol_type = other RNA
  modified_base 1: mod_base = OTHER; note = 2'-O-methyluridine-3'-phosphorothioate 5'-(E)-Vinylphosphonate
  modified_base 2: mod_base = OTHER; note = 2'-deoxy-2'-fluoroadenosine-3'-phosphorothioate
  modified_base 3: mod_base = OTHER; note = 2'-O-methylcytidine-3'-phosphate
  modified_base 4: mod_base = OTHER; note = 2'-O-methylguanosine-3'-phosphate
  modified_base 5: mod_base = OTHER; note = 2'-O-methyluridine-3'-phosphate
  modified_base 6: mod_base = OTHER; note = 2'-deoxy-2'-fluoroguanosine-3'-phosphate
  modified_base 7: mod_base = OTHER; note = 2'-O-methylguanosine-3'-phosphate
  modified_base 8: mod_base = OTHER; note = 2'-deoxy-2'-fluoroguanosine-3'-phosphate
  modified_base 9: mod_base = OTHER; note = 2'-deoxy-2'-fluorocytidine-3'-phosphate
  modified_base 10: mod_base = OTHER; note = 2'-O-methyladenosine-3'-phosphate
  modified_base 11: mod_base = OTHER; note = 2'-O-methylcytidine-3'-phosphate
  modified_base 12: mod_base = OTHER; note = 2'-O-methyluridine-3'-phosphate
  modified_base 13: mod_base = OTHER; note = 2'-O-methyluridine-3'-phosphate
  modified_base 14: mod_base = OTHER; note = 2'-deoxy-2'-fluoroguanosine-3'-phosphate
  modified_base 15: mod_base = OTHER; note = 2'-O-methylguanosine-3'-phosphate
  modified_base 16: mod_base = OTHER; note = 2'-deoxy-2'-fluoroadenosine-3'-phosphate
  modified_base 17: mod_base = OTHER; note = 2'-O-methylcytidine-3'-phosphate
  modified_base 18: mod_base = OTHER; note = 2'-O-methyladenosine-3'-phosphate
  modified_base 19: mod_base = OTHER; note = 2'-O-methyluridine-3'-phosphate
  modified_base 20: mod_base = OTHER; note = 2'-O-methyladenosine-3'-phosphate
  modified_base 21: mod_base = OTHER; note = 2'-O-methyladenosine-3'-phosphorothioate
  modified_base 22: mod_base = OTHER; note = 2'-O-methyladenosine-3'-phosphorothioate
  modified_base 23: mod_base = OTHER; note = 2'-O-methyladenosine
tacgtgggcacttggacataaaa

SEQ ID NO: 853 - RNA, 23 nt, synthetic construct
  source 1..23: mol_type = other RNA
  modified_base 1: mod_base = OTHER; note = 2'-O-methyluridine-3'-phosphorothioate 5'-(E)-Vinylphosphonate
  modified_base 2: mod_base = OTHER; note = 2'-deoxy-2'-fluorocytidine-3'-phosphorothioate
  modified_base 3: mod_base = OTHER; note = 2'-O-methylguanosine-3'-phosphate
  modified_base 4: mod_base = OTHER; note = 2'-O-methylguanosine-3'-phosphate
  modified_base 5: mod_base = OTHER; note = 2'-O-methyluridine-3'-phosphate
  modified_base 6: mod_base = OTHER; note = 2'-deoxy-2'-fluorocytidine-3'-phosphate
  modified_base 7: mod_base = OTHER; note = 2'-O-methylcytidine-3'-phosphate
  modified_base 8: mod_base = OTHER; note = 2'-deoxy-2'-fluorouridine-3'-phosphate
  modified_base 9: mod_base = OTHER; note = 2'-deoxy-2'-fluorocytidine-3'-phosphate
  modified_base 10: mod_base = OTHER; note = 2'-O-methyluridine-3'-phosphate
  modified_base 11: mod_base = OTHER; note = 2'-O-methylcytidine-3'-phosphate
  modified_base 12: mod_base = OTHER; note = 2'-O-methyladenosine-3'-phosphate
  modified_base 13: mod_base = OTHER; note = 2'-O-methylguanosine-3'-phosphate
  modified_base 14: mod_base = OTHER; note = 2'-deoxy-2'-fluoroadenosine-3'-phosphate
  modified_base 15: mod_base = OTHER; note = 2'-O-methylguanosine-3'-phosphate
  modified_base 16: mod_base = OTHER; note = 2'-deoxy-2'-fluoroadenosine-3'-phosphate
  modified_base 17: mod_base = OTHER; note = 2'-O-methylguanosine-3'-phosphate
  modified_base 18: mod_base = OTHER; note = 2'-O-methyluridine-3'-phosphate
  modified_base 19: mod_base = OTHER; note = 2'-O-methylguanosine-3'-phosphate
  modified_base 20: mod_base = OTHER; note = 2'-O-methyluridine-3'-phosphate
  modified_base 21: mod_base = OTHER; note = 2'-O-methylcytidine-3'-phosphorothioate
  modified_base 22: mod_base = OTHER; note = 2'-O-methyladenosine-3'-phosphorothioate
  modified_base 23: mod_base = OTHER; note = 2'-O-methyladenosine
tcggtcctctcagagagtgtcaa

SEQ ID NO: 854 - RNA, 23 nt, synthetic construct
  source 1..23: mol_type = other RNA
  modified_base 1: mod_base = OTHER; note = 2'-O-methyluridine-3'-phosphorothioate 5'-(E)-Vinylphosphonate
  modified_base 2: mod_base = OTHER; note = 2'-deoxy-2'-fluorocytidine-3'-phosphorothioate
  modified_base 3: mod_base = OTHER; note = 2'-O-methylcytidine-3'-phosphate
  modified_base 4: mod_base = OTHER; note = 2'-O-methylguanosine-3'-phosphate
  modified_base 5: mod_base = OTHER; note = 2'-O-methyladenosine-3'-phosphate
  modified_base 6: mod_base = OTHER; note = 2'-deoxy-2'-fluorocytidine-3'-phosphate
  modified_base 7: mod_base = OTHER; note = 2'-O-methylguanosine-3'-phosphate
  modified_base 8: mod_base = OTHER; note = 2'-deoxy-2'-fluoroadenosine-3'-phosphate
  modified_base 9: mod_base = OTHER; note = 2'-deoxy-2'-fluorocytidine-3'-phosphate
  modified_base 10: mod_base = OTHER; note = 2'-O-methyladenosine-3'-phosphate
  modified_base 11: mod_base = OTHER; note = 2'-O-methyluridine-3'-phosphate
  modified_base 12: mod_base = OTHER; note = 2'-O-methylcytidine-3'-phosphate
  modified_base 13: mod_base = OTHER; note = 2'-O-methylguanosine-3'-phosphate
  modified_base 14: mod_base = OTHER; note = 2'-deoxy-2'-fluorouridine-3'-phosphate
  modified_base 15: mod_base = OTHER; note = 2'-O-methylcytidine-3'-phosphate
  modified_base 16: mod_base = OTHER; note = 2'-deoxy-2'-fluoroguanosine-3'-phosphate
  modified_base 17: mod_base = OTHER; note = 2'-O-methyluridine-3'-phosphate
  modified_base 18: mod_base = OTHER; note = 2'-O-methylcytidine-3'-phosphate
  modified_base 19: mod_base = OTHER; note = 2'-O-methylguanosine-3'-phosphate
  modified_base 20: mod_base = OTHER; note = 2'-O-methyluridine-3'-phosphate
  modified_base 21: mod_base = OTHER; note = 2'-O-methylcytidine-3'-phosphorothioate
  modified_base 22: mod_base = OTHER; note = 2'-O-methylguanosine-3'-phosphorothioate
  modified_base 23: mod_base = OTHER; note = 2'-O-methyluridine
tccgacgacatcgtcgtcgtcgt

SEQ ID NO: 855 - RNA, 23 nt, synthetic construct
  source 1..23: mol_type = other RNA
  modified_base 1: mod_base = OTHER; note = 2'-O-methyluridine-3'-phosphorothioate 5'-(E)-Vinylphosphonate
  modified_base 2: mod_base = OTHER; note = 2'-deoxy-2'-fluoroadenosine-3'-phosphorothioate
  modified_base 3: mod_base = OTHER; note = 2'-O-methyladenosine-3'-phosphate
  modified_base 4: mod_base = OTHER; note = 2'-O-methyladenosine-3'-phosphate
  modified_base 5: mod_base = OTHER; note = 2'-O-methylguanosine-3'-phosphate
  modified_base 6: mod_base = OTHER; note = 2'-deoxy-2'-fluoroguanosine-3'-phosphate
  modified_base 7: mod_base = OTHER; note = 2'-O-methylguanosine-3'-phosphate
  modified_base 8: mod_base = OTHER; note = 2'-deoxy-2'-fluoroadenosine-3'-phosphate
  modified_base 9: mod_base = OTHER; note = 2'-deoxy-2'-fluorouridine-3'-phosphate
  modified_base 10: mod_base = OTHER; note = 2'-O-methylguanosine-3'-phosphate
  modified_base 11: mod_base = OTHER; note = 2'-O-methylguanosine-3'-phosphate
  modified_base 12: mod_base = OTHER; note = 2'-O-methylguanosine-3'-phosphate
  modified_base 13: mod_base = OTHER; note = 2'-O-methyladenosine-3'-phosphate
  modified_base 14: mod_base = OTHER; note = 2'-deoxy-2'-fluoroguanosine-3'-phosphate
  modified_base 15: mod_base = OTHER; note = 2'-O-methylcytidine-3'-phosphate
  modified_base 16: mod_base = OTHER; note = 2'-deoxy-2'-fluorocytidine-3'-phosphate
  modified_base 17: mod_base = OTHER; note = 2'-O-methyladenosine-3'-phosphate
  modified_base 18: mod_base = OTHER; note = 2'-O-methylcytidine-3'-phosphate
  modified_base 19: mod_base = OTHER; note = 2'-O-methylguanosine-3'-phosphate
  modified_base 20: mod_base = OTHER; note = 2'-O-methyladenosine-3'-phosphate
  modified_base 21: mod_base = OTHER; note = 2'-O-methyluridine-3'-phosphorothioate
  modified_base 22: mod_base = OTHER; note = 2'-O-methylguanosine-3'-phosphorothioate
  modified_base 23: mod_base = OTHER; note = 2'-O-methyladenosine
taaagggatgggagccacgatga

SEQ ID NO: 856 - RNA, 23 nt, synthetic construct
  source 1..23: mol_type = other RNA
  modified_base 1: mod_base = OTHER; note = 2'-O-methyluridine-3'-phosphorothioate 5'-(E)-Vinylphosphonate
  modified_base 2: mod_base = OTHER; note = 2'-deoxy-2'-fluoroadenosine-3'-phosphorothioate
  modified_base 3: mod_base = OTHER; note = 2'-O-methyluridine-3'-phosphate
  modified_base 4: mod_base = OTHER; note = 2'-O-methylguanosine-3'-phosphate
  modified_base 5: mod_base = OTHER; note = 2'-O-methylguanosine-3'-phosphate
  modified_base 6: mod_base = OTHER; note = 2'-deoxy-2'-fluoroguanosine-3'-phosphate
  modified_base 7: mod_base = OTHER; note = 2'-O-methylcytidine-3'-phosphate
  modified_base 8: mod_base = OTHER; note = 2'-deoxy-2'-fluoroadenosine-3'-phosphate
  modified_base 9: mod_base = OTHER; note = 2'-deoxy-2'-fluoroguanosine-3'-phosphate
  modified_base 10: mod_base = OTHER; note = 2'-O-methylguanosine-3'-phosphate
  modified_base 11: mod_base = OTHER; note = 2'-O-methyladenosine-3'-phosphate
  modified_base 12: mod_base = OTHER; note = 2'-O-methyladenosine-3'-phosphate
  modified_base 13: mod_base = OTHER; note = 2'-O-methylguanosine-3'-phosphate
  modified_base 14: mod_base = OTHER; note = 2'-deoxy-2'-fluoroguanosine-3'-phosphate
  modified_base 15: mod_base = OTHER; note = 2'-O-methyladenosine-3'-phosphate
  modified_base 16: mod_base = OTHER; note = 2'-deoxy-2'-fluorocytidine-3'-phosphate
  modified_base 17: mod_base = OTHER; note = 2'-O-methyladenosine-3'-phosphate
  modified_base 18: mod_base = OTHER; note = 2'-O-methylcytidine-3'-phosphate
  modified_base 19: mod_base = OTHER; note = 2'-O-methylcytidine-3'-phosphate
  modified_base 20: mod_base = OTHER; note = 2'-O-methyladenosine-3'-phosphate
  modified_base 21: mod_base = OTHER; note = 2'-O-methylguanosine-3'-phosphorothioate
  modified_base 22: mod_base = OTHER; note = 2'-O-methylguanosine-3'-phosphorothioate
  modified_base 23: mod_base = OTHER; note = 2'-O-methylguanosine
tatgggcaggaaggacaccaggg

SEQ ID NO: 857 - RNA, 23 nt, synthetic construct
  source 1..23: mol_type = other RNA
  modified_base 1: mod_base = OTHER; note = 2'-O-methyluridine-3'-phosphorothioate 5'-(E)-Vinylphosphonate
  modified_base 2: mod_base = OTHER; note = 2'-deoxy-2'-fluorocytidine-3'-phosphorothioate
  modified_base 3: mod_base = OTHER; note = 2'-O-methylcytidine-3'-phosphate
  modified_base 4: mod_base = OTHER; note = 2'-O-methyluridine-3'-phosphate
  modified_base 5: mod_base = OTHER; note = 2'-O-methylcytidine-3'-phosphate
  modified_base 6: mod_base = OTHER; note = 2'-deoxy-2'-fluorocytidine-3'-phosphate
  modified_base 7: mod_base = OTHER; note = 2'-O-methyluridine-3'-phosphate
  modified_base 8: mod_base = OTHER; note = 2'-deoxy-2'-fluoroadenosine-3'-phosphate
  modified_base 9: mod_base = OTHER; note = 2'-deoxy-2'-fluoroadenosine-3'-phosphate
  modified_base 10: mod_base = OTHER; note = 2'-O-methyluridine-3'-phosphate
  modified_base 11: mod_base = OTHER; note = 2'-O-methylguanosine-3'-phosphate
  modified_base 12: mod_base = OTHER; note = 2'-O-methylcytidine-3'-phosphate
  modified_base 13: mod_base = OTHER; note = 2'-O-methyluridine-3'-phosphate
  modified_base 14: mod_base = OTHER; note = 2'-deoxy-2'-fluorouridine-3'-phosphate
  modified_base 15: mod_base = OTHER; note = 2'-O-methylcytidine-3'-phosphate
  modified_base 16: mod_base = OTHER; note = 2'-deoxy-2'-fluorouridine-3'-phosphate
  modified_base 17: mod_base = OTHER; note = 2'-O-methylcytidine-3'-phosphate
  modified_base 18: mod_base = OTHER; note = 2'-O-methylcytidine-3'-phosphate
  modified_base 19: mod_base = OTHER; note = 2'-O-methylcytidine-3'-phosphate
  modified_base 20: mod_base = OTHER; note = 2'-O-methyluridine-3'-phosphate
  modified_base 21: mod_base = OTHER; note = 2'-O-methyluridine-3'-phosphorothioate
  modified_base 22: mod_base = OTHER; note = 2'-O-methylcytidine-3'-phosphorothioate
  modified_base 23: mod_base = OTHER; note = 2'-O-methylcytidine
tcctcctaatgcttctcccttcc

SEQ ID NO: 858 - RNA, 23 nt, synthetic construct
  source 1..23: mol_type = other RNA
  modified_base 1: mod_base = OTHER; note = 2'-O-methyluridine-3'-phosphorothioate 5'-(E)-Vinylphosphonate
  modified_base 2: mod_base = OTHER; note = 2'-deoxy-2'-fluorouridine-3'-phosphorothioate
  modified_base 3: mod_base = OTHER; note = 2'-O-methylguanosine-3'-phosphate
  modified_base 4: mod_base = OTHER; note = 2'-O-methyluridine-3'-phosphate
  modified_base 5: mod_base = OTHER; note = 2'-O-methylcytidine-3'-phosphate
  modified_base 6: mod_base = OTHER; note = 2'-deoxy-2'-fluorocytidine-3'-phosphate
  modified_base 7: mod_base = OTHER; note = 2'-O-methyladenosine-3'-phosphate
  modified_base 8: mod_base = OTHER; note = 2'-deoxy-2'-fluorocytidine-3'-phosphate
  modified_base 9: mod_base = OTHER; note = 2'-deoxy-2'-fluorouridine-3'-phosphate
  modified_base 10: mod_base = OTHER; note = 2'-O-methylguanosine-3'-phosphate
  modified_base 11: mod_base = OTHER; note = 2'-O-methylcytidine-3'-phosphate
  modified_base 12: mod_base = OTHER; note = 2'-O-methyluridine-3'-phosphate
  modified_base 13: mod_base = OTHER; note = 2'-O-methylguanosine-3'-phosphate
  modified_base 14: mod_base = OTHER; note = 2'-deoxy-2'-fluoroadenosine-3'-phosphate
  modified_base 15: mod_base = OTHER; note = 2'-O-methylguanosine-3'-phosphate
  modified_base 16: mod_base = OTHER; note = 2'-deoxy-2'-fluoroadenosine-3'-phosphate
  modified_base 17: mod_base = OTHER; note = 2'-O-methylcytidine-3'-phosphate
  modified_base 18: mod_base = OTHER; note = 2'-O-methyladenosine-3'-phosphate
  modified_base 19: mod_base = OTHER; note = 2'-O-methylguanosine-3'-phosphate
  modified_base 20: mod_base = OTHER; note = 2'-O-methylcytidine-3'-phosphate
  modified_base 21: mod_base = OTHER; note = 2'-O-methylguanosine-3'-phosphorothioate
  modified_base 22: mod_base = OTHER; note = 2'-O-methylguanosine-3'-phosphorothioate
  modified_base 23: mod_base = OTHER; note = 2'-O-methylcytidine
ttgtccactgctgagacagcggc

SEQ ID NO: 859 - RNA, 23 nt, synthetic construct
  source 1..23: mol_type = other RNA
  modified_base 1: mod_base = OTHER; note = 2'-O-methyluridine-3'-phosphorothioate 5'-(E)-Vinylphosphonate
  modified_base 2: mod_base = OTHER; note = 2'-deoxy-2'-fluorouridine-3'-phosphorothioate
  modified_base 3: mod_base = OTHER; note = 2'-O-methyluridine-3'-phosphate
  modified_base 4: mod_base = OTHER; note = 2'-O-methylguanosine-3'-phosphate
  modified_base 5: mod_base = OTHER; note = 2'-O-methyladenosine-3'-phosphate
  modified_base 6: mod_base = OTHER; note = 2'-deoxy-2'-fluoroadenosine-3'-phosphate
  modified_base 7: mod_base = OTHER; note = 2'-O-methylguanosine-3'-phosphate
  modified_base 8: mod_base = OTHER; note = 2'-deoxy-2'-fluoroguanosine-3'-phosphate
  modified_base 9: mod_base = OTHER; note = 2'-deoxy-2'-fluorocytidine-3'-phosphate
  modified_base 10: mod_base = OTHER; note = 2'-O-methylcytidine-3'-phosphate
  modified_base 11: mod_base = OTHER; note = 2'-O-methylguanosine-3'-phosphate
  modified_base 12: mod_base = OTHER; note = 2'-O-methyladenosine-3'-phosphate
  modified_base 13: mod_base = OTHER; note = 2'-O-methylguanosine-3'-phosphate
  modified_base 14: mod_base = OTHER; note = 2'-deoxy-2'-fluorouridine-3'-phosphate
  modified_base 15: mod_base = OTHER; note = 2'-O-methyluridine-3'-phosphate
  modified_base 16: mod_base = OTHER; note = 2'-deoxy-2'-fluoroguanosine-3'-phosphate
  modified_base 17: mod_base = OTHER; note = 2'-O-methylguanosine-3'-phosphate
  modified_base 18: mod_base = OTHER; note = 2'-O-methylcytidine-3'-phosphate
  modified_base 19: mod_base = OTHER; note = 2'-O-methylguanosine-3'-phosphate
  modified_base 20: mod_base = OTHER; note = 2'-O-methyluridine-3'-phosphate
  modified_base 21: mod_base = OTHER; note = 2'-O-methyladenosine-3'-phosphorothioate
  modified_base 22: mod_base = OTHER; note = 2'-O-methylguanosine-3'-phosphorothioate
  modified_base 23: mod_base = OTHER; note = 2'-O-methylcytidine
tttgaaggccgagttggcgtagc

SEQ ID NO: 860 - RNA, 23 nt, synthetic construct
  source 1..23: mol_type = other RNA
  modified_base 1: mod_base = OTHER; note = 2'-O-methyluridine-3'-phosphorothioate 5'-(E)-Vinylphosphonate
  modified_base 2: mod_base = OTHER; note = 2'-deoxy-2'-fluoroadenosine-3'-phosphorothioate
  modified_base 3: mod_base = OTHER; note = 2'-O-methyladenosine-3'-phosphate
  modified_base 4: mod_base = OTHER; note = 2'-O-methylguanosine-3'-phosphate
  modified_base 5: mod_base = OTHER; note = 2'-O-methylguanosine-3'-phosphate
  modified_base 6: mod_base = OTHER; note = 2'-deoxy-2'-fluoroguanosine-3'-phosphate
  modified_base 7: mod_base = OTHER; note = 2'-O-methylcytidine-3'-phosphate
  modified_base 8: mod_base = OTHER; note = 2'-deoxy-2'-fluoroguanosine-3'-phosphate
  modified_base 9: mod_base = OTHER; note = 2'-deoxy-2'-fluoroadenosine-3'-phosphate
  modified_base 10: mod_base = OTHER; note = 2'-O-methylguanosine-3'-phosphate
  modified_base 11: mod_base = OTHER; note = 2'-O-methylguanosine-3'-phosphate
  modified_base 12: mod_base = OTHER; note = 2'-O-methyluridine-3'-phosphate
  modified_base 13: mod_base = OTHER; note = 2'-O-methylguanosine-3'-phosphate
  modified_base 14: mod_base = OTHER; note = 2'-deoxy-2'-fluoroadenosine-3'-phosphate
  modified_base 15: mod_base = OTHER; note = 2'-O-methyluridine-3'-phosphate
  modified_base 16: mod_base = OTHER; note = 2'-deoxy-2'-fluoroguanosine-3'-phosphate
  modified_base 17: mod_base = OTHER; note = 2'-O-methylguanosine-3'-phosphate
  modified_base 18: mod_base = OTHER; note = 2'-O-methylcytidine-3'-phosphate
  modified_base 19: mod_base = OTHER; note = 2'-O-methylguanosine-3'-phosphate
  modified_base 20: mod_base = OTHER; note = 2'-O-methyladenosine-3'-phosphate
  modified_base 21: mod_base = OTHER; note = 2'-O-methylguanosine-3'-phosphorothioate
  modified_base 22: mod_base = OTHER; note = 2'-O-methylguanosine-3'-phosphorothioate
  modified_base 23: mod_base = OTHER; note = 2'-O-methyluridine
taagggcgaggtgatggcgaggt

SEQ ID NO: 861 - RNA, 23 nt, synthetic construct
  source 1..23: mol_type = other RNA
  modified_base 1: mod_base = OTHER; note = 2'-O-methyluridine-3'-phosphorothioate 5'-(E)-Vinylphosphonate
  modified_base 2: mod_base = OTHER; note = 2'-deoxy-2'-fluorocytidine-3'-phosphorothioate
  modified_base 3: mod_base = OTHER; note = 2'-O-methyladenosine-3'-phosphate
  modified_base 4: mod_base = OTHER; note = 2'-O-methylcytidine-3'-phosphate
  modified_base 5: mod_base = OTHER; note = 2'-O-methyladenosine-3'-phosphate
  modified_base 6: mod_base = OTHER; note = 2'-deoxy-2'-fluorocytidine-3'-phosphate
  modified_base 7: mod_base = OTHER; note = 2'-O-methyladenosine-3'-phosphate
  modified_base 8: mod_base = OTHER; note = 2'-deoxy-2'-fluoroadenosine-3'-phosphate
  modified_base 9: mod_base = OTHER; note = 2'-deoxy-2'-fluoroadenosine-3'-phosphate
  modified_base 10: mod_base = OTHER; note = 2'-O-methyladenosine-3'-phosphate
  modified_base 11: mod_base = OTHER; note = 2'-O-methylguanosine-3'-phosphate
  modified_base 12: mod_base = OTHER; note = 2'-O-methyladenosine-3'-phosphate
  modified_base 13: mod_base = OTHER; note = 2'-O-methyladenosine-3'-phosphate
  modified_base 14: mod_base = OTHER; note = 2'-deoxy-2'-fluoroguanosine-3'-phosphate
  modified_base 15: mod_base = OTHER; note = 2'-O-methylguanosine-3'-phosphate
  modified_base 16: mod_base = OTHER; note = 2'-deoxy-2'-fluorocytidine-3'-phosphate
  modified_base 17: mod_base = OTHER; note = 2'-O-methylcytidine-3'-phosphate
  modified_base 18: mod_base = OTHER; note = 2'-O-methylguanosine-3'-phosphate
  modified_base 19: mod_base = OTHER; note = 2'-O-methylguanosine-3'-phosphate
  modified_base 20: mod_base = OTHER; note = 2'-O-methyladenosine-3'-phosphate
  modified_base 21: mod_base = OTHER; note = 2'-O-methylcytidine-3'-phosphorothioate
  modified_base 22: mod_base = OTHER; note = 2'-O-methylcytidine-3'-phosphorothioate
  modified_base 23: mod_base = OTHER; note = 2'-O-methyladenosine
tcacacaaaagaaggccggacca

SEQ ID NO: 862 - RNA, 23 nt, synthetic construct
  source 1..23: mol_type = other RNA
  modified_base 1: mod_base = OTHER; note = 2'-O-methyluridine-3'-phosphorothioate 5'-(E)-Vinylphosphonate
  modified_base 2: mod_base = OTHER; note = 2'-deoxy-2'-fluoroguanosine-3'-phosphorothioate
  modified_base 3: mod_base = OTHER; note = 2'-O-methyladenosine-3'-phosphate
  modified_base 4: mod_base = OTHER; note = 2'-O-methylguanosine-3'-phosphate
  modified_base 5: mod_base = OTHER; note = 2'-O-methyladenosine-3'-phosphate
  modified_base 6: mod_base = OTHER; note = 2'-deoxy-2'-fluorocytidine-3'-phosphate
  modified_base 7: mod_base = OTHER; note = 2'-O-methyluridine-3'-phosphate
  modified_base 8: mod_base = OTHER; note = 2'-deoxy-2'-fluoroadenosine-3'-phosphate
  modified_base 9: mod_base = OTHER; note = 2'-deoxy-2'-fluorocytidine-3'-phosphate
  modified_base 10: mod_base = OTHER; note = 2'-O-methylguanosine-3'-phosphate
  modified_base 11: mod_base = OTHER; note = 2'-O-methylguanosine-3'-phosphate
  modified_base 12: mod_base = OTHER; note = 2'-O-methyladenosine-3'-phosphate
  modified_base 13: mod_base = OTHER; note = 2'-O-methylcytidine-3'-phosphate
  modified_base 14: mod_base = OTHER; note = 2'-deoxy-2'-fluoroguanosine-3'-phosphate
  modified_base 15: mod_base = OTHER; note = 2'-O-methyladenosine-3'-phosphate
  modified_base 16: mod_base = OTHER; note = 2'-deoxy-2'-fluoroguanosine-3'-phosphate
  modified_base 17: mod_base = OTHER; note = 2'-O-methylguanosine-3'-phosphate
  modified_base 18: mod_base = OTHER; note = 2'-O-methylcytidine-3'-phosphate
  modified_base 19: mod_base = OTHER; note = 2'-O-methylguanosine-3'-phosphate
  modified_base 20: mod_base = OTHER; note = 2'-O-methyladenosine-3'-phosphate
  modified_base 21: mod_base = OTHER; note = 2'-O-methyluridine-3'-phosphorothioate
  modified_base 22: mod_base = OTHER; note = 2'-O-methylguanosine-3'-phosphorothioate
  modified_base 23: mod_base = OTHER; note = 2'-O-methylguanosine
tgagactacggacgaggcgatgg

SEQ ID NO: 863 - RNA, 23 nt, synthetic construct
  source 1..23: mol_type = other RNA
  modified_base 1: mod_base = OTHER; note = 2'-O-methyluridine-3'-phosphorothioate 5'-(E)-Vinylphosphonate
  modified_base 2: mod_base = OTHER; note = 2'-deoxy-2'-fluoroguanosine-3'-phosphorothioate
  modified_base 3: mod_base = OTHER; note = 2'-O-methyladenosine-3'-phosphate
  modified_base 4: mod_base = OTHER; note = 2'-O-methyluridine-3'-phosphate
  modified_base 5: mod_base = OTHER; note = 2'-O-methylcytidine-3'-phosphate
  modified_base 6: mod_base = OTHER; note = 2'-deoxy-2'-fluoroadenosine-3'-phosphate
  modified_base 7: mod_base = OTHER; note = 2'-O-methylcytidine-3'-phosphate
  modified_base 8: mod_base = OTHER; note = 2'-deoxy-2'-fluorocytidine-3'-phosphate
  modified_base 9: mod_base = OTHER; note = 2'-deoxy-2'-fluoroadenosine-3'-phosphate
  modified_base 10: mod_base = OTHER; note = 2'-O-methylguanosine-3'-phosphate
  modified_base 11: mod_base = OTHER; note = 2'-O-methylcytidine-3'-phosphate
  modified_base 12: mod_base = OTHER; note = 2'-O-methyladenosine-3'-phosphate
  modified_base 13: mod_base = OTHER; note = 2'-O-methylcytidine-3'-phosphate
  modified_base 14: mod_base = OTHER; note = 2'-deoxy-2'-fluoroadenosine-3'-phosphate
  modified_base 15: mod_base = OTHER; note = 2'-O-methyluridine-3'-phosphate
  modified_base 16: mod_base = OTHER; note = 2'-deoxy-2'-fluorouridine-3'-phosphate
  modified_base 17: mod_base = OTHER; note = 2'-O-methylguanosine-3'-phosphate
  modified_base 18: mod_base = OTHER; note = 2'-O-methylcytidine-3'-phosphate
  modified_base 19: mod_base = OTHER; note = 2'-O-methylcytidine-3'-phosphate
  modified_base 20: mod_base = OTHER; note = 2'-O-methylcytidine-3'-phosphate
  modified_base 21: mod_base = OTHER; note = 2'-O-methylguanosine-3'-phosphorothioate
  modified_base 22: mod_base = OTHER; note = 2'-O-methylcytidine-3'-phosphorothioate
  modified_base 23: mod_base = OTHER; note = 2'-O-methylcytidine
tgatcaccagcacattgcccgcc

SEQ ID NO: 864 - RNA, 23 nt, synthetic construct
  source 1..23: mol_type = other RNA
  modified_base 1: mod_base = OTHER; note = 2'-O-methyluridine-3'-phosphorothioate 5'-(E)-Vinylphosphonate
  modified_base 2: mod_base = OTHER; note = 2'-deoxy-2'-fluoroadenosine-3'-phosphorothioate
  modified_base 3: mod_base = OTHER; note = 2'-O-methylguanosine-3'-phosphate
  modified_base 4: mod_base = OTHER; note = 2'-O-methylcytidine-3'-phosphate
  modified_base 5: mod_base = OTHER; note = 2'-O-methylcytidine-3'-phosphate
  modified_base 6: mod_base = OTHER; note = 2'-deoxy-2'-fluorocytidine-3'-phosphate
  modified_base 7: mod_base = OTHER; note = 2'-O-methyladenosine-3'-phosphate
  modified_base 8: mod_base = OTHER; note = 2'-deoxy-2'-fluoroguanosine-3'-phosphate
  modified_base 9: mod_base = OTHER; note = 2'-deoxy-2'-fluorocytidine-3'-phosphate
  modified_base 10: mod_base = OTHER; note = 2'-O-methylcytidine-3'-phosphate
  modified_base 11: mod_base = OTHER; note = 2'-O-methyladenosine-3'-phosphate
  modified_base 12: mod_base = OTHER; note = 2'-O-methylguanosine-3'-phosphate
  modified_base 13: mod_base = OTHER; note = 2'-O-methyluridine-3'-phosphate
  modified_base 14: mod_base = OTHER; note = 2'-deoxy-2'-fluorouridine-3'-phosphate
  modified_base 15: mod_base = OTHER; note = 2'-O-methylguanosine-3'-phosphate
  modified_base 16: mod_base = OTHER; note = 2'-deoxy-2'-fluoroadenosine-3'-phosphate
  modified_base 17: mod_base = OTHER; note = 2'-O-methyladenosine-3'-phosphate
  modified_base 18: mod_base = OTHER; note = 2'-O-methylguanosine-3'-phosphate
  modified_base 19: mod_base = OTHER; note = 2'-O-methyladenosine-3'-phosphate
  modified_base 20: mod_base = OTHER; note = 2'-O-methyladenosine-3'-phosphate
  modified_base 21: mod_base = OTHER; note = 2'-O-methylguanosine-3'-phosphorothioate
  modified_base 22: mod_base = OTHER; note = 2'-O-methyladenosine-3'-phosphorothioate
  modified_base 23: mod_base = OTHER; note = 2'-O-methylcytidine
tagcccagccagttgaagaagac

SEQ ID NO: 865 - RNA, 23 nt, synthetic construct
  source 1..23: mol_type = other RNA
  modified_base 1: mod_base = OTHER; note = 2'-O-methyluridine-3'-phosphorothioate 5'-(E)-Vinylphosphonate
  modified_base 2: mod_base = OTHER; note = 2'-deoxy-2'-fluoroguanosine-3'-phosphorothioate
  modified_base 3: mod_base = OTHER; note = 2'-O-methylcytidine-3'-phosphate
  modified_base 4: mod_base = OTHER; note = 2'-O-methylguanosine-3'-phosphate
  modified_base 5: mod_base = OTHER; note = 2'-O-methylguanosine-3'-phosphate
  modified_base 6: mod_base = OTHER; note = 2'-deoxy-2'-fluoroguanosine-3'-phosphate
  modified_base 7: mod_base = OTHER; note = 2'-O-methyluridine-3'-phosphate
  modified_base 8: mod_base = OTHER; note = 2'-deoxy-2'-fluorouridine-3'-phosphate
  modified_base 9: mod_base = OTHER; note = 2'-deoxy-2'-fluorouridine-3'-phosphate
  modified_base 10: mod_base = OTHER; note = 2'-O-methylguanosine-3'-phosphate
  modified_base 11: mod_base = OTHER; note = 2'-O-methylcytidine-3'-phosphate
  modified_base 12: mod_base = OTHER; note = 2'-O-methylcytidine-3'-phosphate
  modified_base 13: mod_base = OTHER; note = 2'-O-methylcytidine-3'-phosphate
  modified_base 14: mod_base = OTHER; note = 2'-deoxy-2'-fluorouridine-3'-phosphate
  modified_base 15: mod_base = OTHER; note = 2'-O-methyladenosine-3'-phosphate
  modified_base 16: mod_base = OTHER; note = 2'-deoxy-2'-fluorocytidine-3'-phosphate
  modified_base 17: mod_base = OTHER; note = 2'-O-methyladenosine-3'-phosphate
  modified_base 18: mod_base = OTHER; note = 2'-O-methylcytidine-3'-phosphate
  modified_base 19: mod_base = OTHER; note = 2'-O-methyladenosine-3'-phosphate
  modified_base 20: mod_base = OTHER; note = 2'-O-methyladenosine-3'-phosphate
  modified_base 21: mod_base = OTHER; note = 2'-O-methylguanosine-3'-phosphorothioate
  modified_base 22: mod_base = OTHER; note = 2'-O-methylguanosine-3'-phosphorothioate
  modified_base 23: mod_base = OTHER; note = 2'-O-methyladenosine
tgcgggtttgccctacacaagga

SEQ ID NO: 866 - RNA, 23 nt, synthetic construct
  source 1..23: mol_type = other RNA
  modified_base 1: mod_base = OTHER; note = 2'-O-methyluridine-3'-phosphorothioate 5'-(E)-Vinylphosphonate
  modified_base 2: mod_base = OTHER; note = 2'-deoxy-2'-fluoroadenosine-3'-phosphorothioate
  modified_base 3: mod_base = OTHER; note = 2'-O-methylguanosine-3'-phosphate
  modified_base 4: mod_base = OTHER; note = 2'-O-methylguanosine-3'-phosphate
  modified_base 5: mod_base = OTHER; note = 2'-O-methylcytidine-3'-phosphate
  modified_base 6: mod_base = OTHER; note = 2'-deoxy-2'-fluorocytidine-3'-phosphate
  modified_base 7: mod_base = OTHER; note = 2'-O-methyluridine-3'-phosphate
  modified_base 8: mod_base = OTHER; note = 2'-deoxy-2'-fluorouridine-3'-phosphate
  modified_base 9: mod_base = OTHER; note = 2'-deoxy-2'-fluorocytidine-3'-phosphate
  modified_base 10: mod_base = OTHER; note = 2'-O-methyladenosine-3'-phosphate
  modified_base 11: mod_base = OTHER; note = 2'-O-methylcytidine-3'-phosphate
  modified_base 12: mod_base = OTHER; note = 2'-O-methylcytidine-3'-phosphate
  modified_base 13: mod_base = OTHER; note = 2'-O-methyladenosine-3'-phosphate
  modified_base 14: mod_base = OTHER; note = 2'-deoxy-2'-fluorocytidine-3'-phosphate
  modified_base 15: mod_base = OTHER; note = 2'-O-methylguanosine-3'-phosphate
  modified_base 16: mod_base = OTHER; note = 2'-deoxy-2'-fluorouridine-3'-phosphate
  modified_base 17: mod_base = OTHER; note = 2'-O-methyluridine-3'-phosphate
  modified_base 18: mod_base = OTHER; note = 2'-O-methylguanosine-3'-phosphate
  modified_base 19: mod_base = OTHER; note = 2'-O-methylguanosine-3'-phosphate
  modified_base 20: mod_base = OTHER; note = 2'-O-methylcytidine-3'-phosphate
  modified_base 21: mod_base = OTHER; note = 2'-O-methylcytidine-3'-phosphorothioate
  modified_base 22: mod_base = OTHER; note = 2'-O-methyladenosine-3'-phosphorothioate
  modified_base 23: mod_base = OTHER; note = 2'-O-methylguanosine
taggccttcaccacgttggccag

SEQ ID NO: 867 - RNA, 23 nt, synthetic construct
  source 1..23: mol_type = other RNA
  modified_base 1: mod_base = OTHER; note = 2'-O-methyluridine-3'-phosphorothioate 5'-(E)-Vinylphosphonate
  modified_base 2: mod_base = OTHER; note = 2'-deoxy-2'-fluoroadenosine-3'-phosphorothioate
  modified_base 3: mod_base = OTHER; note = 2'-O-methylguanosine-3'-phosphate
  modified_base 4: mod_base = OTHER; note = 2'-O-methyladenosine-3'-phosphate
  modified_base 5: mod_base = OTHER; note = 2'-O-methyladenosine-3'-phosphate
  modified_base 6: mod_base = OTHER; note = 2'-deoxy-2'-fluoroguanosine-3'-phosphate
  modified_base 7: mod_base = OTHER; note = 2'-O-methyladenosine-3'-phosphate
  modified_base 8: mod_base = OTHER; note = 2'-deoxy-2'-fluoroadenosine-3'-phosphate
  modified_base 9: mod_base = OTHER; note = 2'-deoxy-2'-fluoroguanosine-3'-phosphate
  modified_base 10: mod_base = OTHER; note = 2'-O-methylguanosine-3'-phosphate
  modified_base 11: mod_base = OTHER; note = 2'-O-methyladenosine-3'-phosphate
  modified_base 12: mod_base = OTHER; note = 2'-O-methylguanosine-3'-phosphate
  modified_base 13: mod_base = OTHER; note = 2'-O-methylcytidine-3'-phosphate
  modified_base 14: mod_base = OTHER; note = 2'-deoxy-2'-fluorocytidine-3'-phosphate
  modified_base 15: mod_base = OTHER; note = 2'-O-methylguanosine-3'-phosphate
  modified_base 16: mod_base = OTHER; note = 2'-deoxy-2'-fluorouridine-3'-phosphate
  modified_base 17: mod_base = OTHER; note = 2'-O-methyladenosine-3'-phosphate
  modified_base 18: mod_base = OTHER; note = 2'-O-methylcytidine-3'-phosphate
  modified_base 19: mod_base = OTHER; note = 2'-O-methyluridine-3'-phosphate
  modified_base 20: mod_base = OTHER; note = 2'-O-methylcytidine-3'-phosphate
  modified_base 21: mod_base = OTHER; note = 2'-O-methylcytidine-3'-phosphorothioate
  modified_base 22: mod_base = OTHER; note = 2'-O-methylcytidine-3'-phosphorothioate
  modified_base 23: mod_base = OTHER; note = 2'-O-methyladenosine
tagaagaaggagccgtactccca

SEQ ID NO: 868 - RNA, 23 nt, synthetic construct
  source 1..23: mol_type = other RNA
  modified_base 1: mod_base = OTHER; note = 2'-O-methyluridine-3'-phosphorothioate 5'-(E)-Vinylphosphonate
  modified_base 2: mod_base = OTHER; note = 2'-deoxy-2'-fluorouridine-3'-phosphorothioate
  modified_base 3: mod_base = OTHER; note = 2'-O-methyluridine-3'-phosphate
  modified_base 4: mod_base = OTHER; note = 2'-O-methylcytidine-3'-phosphate
  modified_base 5: mod_base = OTHER; note = 2'-O-methyluridine-3'-phosphate
  modified_base 6: mod_base = OTHER; note = 2'-deoxy-2'-fluorouridine-3'-phosphate
  modified_base 7: mod_base = OTHER; note = 2'-O-methylcytidine-3'-phosphate
  modified_base 8: mod_base = OTHER; note = 2'-deoxy-2'-fluoroadenosine-3'-phosphate
  modified_base 9: mod_base = OTHER; note = 2'-deoxy-2'-fluorocytidine-3'-phosphate
  modified_base 10: mod_base = OTHER; note = 2'-O-methylcytidine-3'-phosphate
  modified_base 11: mod_base = OTHER; note = 2'-O-methyluridine-3'-phosphate
  modified_base 12: mod_base = OTHER; note = 2'-O-methylguanosine-3'-phosphate
  modified_base 13: mod_base = OTHER; note = 2'-O-methylcytidine-3'-phosphate
  modified_base 14: mod_base = OTHER; note = 2'-deoxy-2'-fluorouridine-3'-phosphate
  modified_base 15: mod_base = OTHER; note = 2'-O-methyluridine-3'-phosphate
  modified_base 16: mod_base = OTHER; note = 2'-deoxy-2'-fluorocytidine-3'-phosphate
  modified_base 17: mod_base = OTHER; note = 2'-O-methyluridine-3'-phosphate
  modified_base 18: mod_base = OTHER; note = 2'-O-methylguanosine-3'-phosphate
  modified_base 19: mod_base = OTHER; note = 2'-O-methylguanosine-3'-phosphate
  modified_base 20: mod_base = OTHER; note = 2'-O-methylguanosine-3'-phosphate
  modified_base 21: mod_base = OTHER; note = 2'-O-methylcytidine-3'-phosphorothioate
  modified_base 22: mod_base = OTHER; note = 2'-O-methylcytidine-3'-phosphorothioate
  modified_base 23: mod_base = OTHER; note = 2'-O-methyluridine
tttcttcacctgcttctgggcct

SEQ ID NO: 869 - RNA, 23 nt, synthetic construct
  source 1..23: mol_type = other RNA
  modified_base 1: mod_base = OTHER; note = 2'-O-methyluridine-3'-phosphorothioate 5'-(E)-Vinylphosphonate
  modified_base 2: mod_base = OTHER; note = 2'-deoxy-2'-fluoroadenosine-3'-phosphorothioate
  modified_base 3: mod_base = OTHER; note = 2'-O-methylguanosine-3'-phosphate
  modified_base 4: mod_base = OTHER; note = 2'-O-methylcytidine-3'-phosphate
  modified_base 5: mod_base = OTHER; note = 2'-O-methylguanosine-3'-phosphate
  modified_base 6: mod_base = OTHER; note = 2'-deoxy-2'-fluorouridine-3'-phosphate
  modified_base 7: mod_base = OTHER; note = 2'-O-methylcytidine-3'-phosphate
  modified_base 8: mod_base = OTHER; note = 2'-deoxy-2'-fluorouridine-3'-phosphate
  modified_base 9: mod_base = OTHER; note = 2'-deoxy-2'-fluorouridine-3'-phosphate
  modified_base 10: mod_base = OTHER; note = 2'-O-methylguanosine-3'-phosphate
  modified_base 11: mod_base = OTHER; note = 2'-O-methyladenosine-3'-phosphate
  modified_base 12: mod_base = OTHER; note = 2'-O-methylguanosine-3'-phosphate
  modified_base 13: mod_base = OTHER; note = 2'-O-methylcytidine-3'-phosphate
  modified_base 14: mod_base = OTHER; note = 2'-deoxy-2'-fluoroguanosine-3'-phosphate
  modified_base 15: mod_base = OTHER; note = 2'-O-methylcytidine-3'-phosphate
  modified_base 16: mod_base = OTHER; note = 2'-deoxy-2'-fluorocytidine-3'-phosphate
  modified_base 17: mod_base = OTHER; note = 2'-O-methyluridine-3'-phosphate
  modified_base 18: mod_base = OTHER; note = 2'-O-methyluridine-3'-phosphate
  modified_base 19: mod_base = OTHER; note = 2'-O-methylcytidine-3'-phosphate
  modified_base 20: mod_base = OTHER; note = 2'-O-methyluridine-3'-phosphate
  modified_base 21: mod_base = OTHER; note = 2'-O-methylguanosine-3'-phosphorothioate
  modified_base 22: mod_base = OTHER; note = 2'-O-methylcytidine-3'-phosphorothioate
  modified_base 23: mod_base = OTHER; note = 2'-O-methyluridine
tagcgtcttgagcgccttctgct

SEQ ID NO: 870 - RNA, 23 nt, synthetic construct
  source 1..23: mol_type = other RNA
  modified_base 1: mod_base = OTHER; note = 2'-O-methyluridine-3'-phosphorothioate 5'-(E)-Vinylphosphonate
  modified_base 2: mod_base = OTHER; note = 2'-deoxy-2'-fluoroadenosine-3'-phosphorothioate
  modified_base 3: mod_base = OTHER; note = 2'-O-methylguanosine-3'-phosphate
  modified_base 4: mod_base = OTHER; note = 2'-O-methylcytidine-3'-phosphate
  modified_base 5: mod_base = OTHER; note = 2'-O-methyladenosine-3'-phosphate
  modified_base 6: mod_base = OTHER; note = 2'-deoxy-2'-fluoroguanosine-3'-phosphate
  modified_base 7: mod_base = OTHER; note = 2'-O-methylguanosine-3'-phosphate
  modified_base 8: mod_base = OTHER; note = 2'-deoxy-2'-fluorocytidine-3'-phosphate
  modified_base 9: mod_base = OTHER; note = 2'-deoxy-2'-fluorouridine-3'-phosphate
  modified_base 10: mod_base = OTHER; note = 2'-O-methylcytidine-3'-phosphate
  modified_base 11: mod_base = OTHER; note = 2'-O-methyluridine-3'-phosphate
  modified_base 12: mod_base = OTHER; note = 2'-O-methylguanosine-3'-phosphate
  modified_base 13: mod_base = OTHER; note = 2'-O-methylguanosine-3'-phosphate
  modified_base 14: mod_base = OTHER; note = 2'-deoxy-2'-fluorouridine-3'-phosphate
  modified_base 15: mod_base = OTHER; note = 2'-O-methyladenosine-3'-phosphate
  modified_base 16: mod_base = OTHER; note = 2'-deoxy-2'-fluoroguanosine-3'-phosphate
  modified_base 17: mod_base = OTHER; note = 2'-O-methylcytidine-3'-phosphate
  modified_base 18: mod_base = OTHER; note = 2'-O-methylguanosine-3'-phosphate
  modified_base 19: mod_base = OTHER; note = 2'-O-methylguanosine-3'-phosphate
  modified_base 20: mod_base = OTHER; note = 2'-O-methyladenosine-3'-phosphate
  modified_base 21: mod_base = OTHER; note = 2'-O-methyladenosine-3'-phosphorothioate
  modified_base 22: mod_base = OTHER; note = 2'-O-methylguanosine-3'-phosphorothioate
  modified_base 23: mod_base = OTHER; note = 2'-O-methylguanosine
tagcaggctctggtagcggaagg

SEQ ID NO: 871 - RNA, 23 nt, synthetic construct
  source 1..23: mol_type = other RNA
  modified_base 1: mod_base = OTHER; note = 2'-O-methyluridine-3'-phosphorothioate 5'-(E)-Vinylphosphonate
  modified_base 2: mod_base = OTHER; note = 2'-deoxy-2'-fluorocytidine-3'-phosphorothioate
  modified_base 3: mod_base = OTHER; note = 2'-O-methylcytidine-3'-phosphate
  modified_base 4: mod_base = OTHER; note = 2'-O-methyluridine-3'-phosphate
  modified_base 5: mod_base = OTHER; note = 2'-O-methylguanosine-3'-phosphate
  modified_base 6: mod_base = OTHER; note = 2'-deoxy-2'-fluoroguanosine-3'-phosphate
  modified_base 7: mod_base = OTHER; note = 2'-O-methyladenosine-3'-phosphate
  modified_base 8: mod_base = OTHER; note = 2'-deoxy-2'-fluoroadenosine-3'-phosphate
  modified_base 9: mod_base = OTHER; note = 2'-deoxy-2'-fluoroguanosine-3'-phosphate
  modified_base 10: mod_base = OTHER; note = 2'-O-methylguanosine-3'-phosphate
  modified_base 11: mod_base = OTHER; note = 2'-O-methylcytidine-3'-phosphate
  modified_base 12: mod_base = OTHER; note = 2'-O-methylcytidine-3'-phosphate
  modified_base 13: mod_base = OTHER; note = 2'-O-methyluridine-3'-phosphate
  modified_base 14: mod_base = OTHER; note = 2'-deoxy-2'-fluorouridine-3'-phosphate
  modified_base 15: mod_base = OTHER; note = 2'-O-methylguanosine-3'-phosphate
  modified_base 16: mod_base = OTHER; note = 2'-deoxy-2'-fluorocytidine-3'-phosphate
  modified_base 17: mod_base = OTHER; note = 2'-O-methylguanosine-3'-phosphate
  modified_base 18: mod_base = OTHER; note = 2'-O-methylguanosine-3'-phosphate
  modified_base 19: mod_base = OTHER; note = 2'-O-methyladenosine-3'-phosphate
  modified_base 20: mod_base = OTHER; note = 2'-O-methyladenosine-3'-phosphate
  modified_base 21: mod_base = OTHER; note = 2'-O-methylguanosine-3'-phosphorothioate
  modified_base 22: mod_base = OTHER; note = 2'-O-methyluridine-3'-phosphorothioate
  modified_base 23: mod_base = OTHER; note = 2'-O-methylcytidine
tcctggaaggccttgcggaagtc

SEQ ID NO: 872 - RNA, 23 nt, synthetic construct
  source 1..23: mol_type = other RNA
  modified_base 1: mod_base = OTHER; note = 2'-O-methyluridine-3'-phosphorothioate 5'-(E)-Vinylphosphonate
  modified_base 2: mod_base = OTHER; note = 2'-deoxy-2'-fluoroadenosine-3'-phosphorothioate
  modified_base 3: mod_base = OTHER; note = 2'-O-methyladenosine-3'-phosphate
  modified_base 4: mod_base = OTHER; note = 2'-O-methylcytidine-3'-phosphate
  modified_base 5: mod_base = OTHER; note = 2'-O-methylcytidine-3'-phosphate
  modified_base 6: mod_base = OTHER; note = 2'-deoxy-2'-fluorocytidine-3'-phosphate
  modified_base 7: mod_base = OTHER; note = 2'-O-methyladenosine-3'-phosphate
  modified_base 8: mod_base = OTHER; note = 2'-deoxy-2'-fluorocytidine-3'-phosphate
  modified_base 9: mod_base = OTHER; note = 2'-deoxy-2'-fluorocytidine-3'-phosphate
  modified_base 10: mod_base = OTHER; note = 2'-O-methylcytidine-3'-phosphate
  modified_base 11: mod_base = OTHER; note = 2'-O-methyladenosine-3'-phosphate
  modified_base 12: mod_base = OTHER; note = 2'-O-methyluridine-3'-phosphate
  modified_base 13: mod_base = OTHER; note = 2'-O-methylcytidine-3'-phosphate
  modified_base 14: mod_base = OTHER; note = 2'-deoxy-2'-fluorouridine-3'-phosphate
  modified_base 15: mod_base = OTHER; note = 2'-O-methyluridine-3'-phosphate
  modified_base 16: mod_base = OTHER; note = 2'-deoxy-2'-fluorocytidine-3'-phosphate
  modified_base 17: mod_base = OTHER; note = 2'-O-methylcytidine-3'-phosphate
  modified_base 18: mod_base = OTHER; note = 2'-O-methyladenosine-3'-phosphate
  modified_base 19: mod_base = OTHER; note = 2'-O-methylcytidine-3'-phosphate
  modified_base 20: mod_base = OTHER; note = 2'-O-methyluridine-3'-phosphate
  modified_base 21: mod_base = OTHER; note = 2'-O-methylcytidine-3'-phosphorothioate
  modified_base 22: mod_base = OTHER; note = 2'-O-methylcytidine-3'-phosphorothioate
  modified_base 23: mod_base = OTHER; note = 2'-O-methylguanosine
taacccacccatcttccactccg

SEQ ID NO: 873 - RNA, 23 nt, synthetic construct
  source 1..23: mol_type = other RNA
  modified_base 1: mod_base = OTHER; note = 2'-O-methyluridine-3'-phosphorothioate 5'-(E)-Vinylphosphonate
  modified_base 2: mod_base = OTHER; note = 2'-deoxy-2'-fluoroadenosine-3'-phosphorothioate
  modified_base 3: mod_base = OTHER; note = 2'-O-methylcytidine-3'-phosphate
  modified_base 4: mod_base = OTHER; note = 2'-O-methyladenosine-3'-phosphate
  modified_base 5: mod_base = OTHER; note = 2'-O-methylguanosine-3'-phosphate
  modified_base 6: mod_base = OTHER; note = 2'-deoxy-2'-fluoroguanosine-3'-phosphate
  modified_base 7: mod_base = OTHER; note = 2'-O-methylguanosine-3'-phosphate
  modified_base 8: mod_base = OTHER; note = 2'-deoxy-2'-fluorouridine-3'-phosphate
  modified_base 9: mod_base = OTHER; note = 2'-deoxy-2'-fluorocytidine-3'-phosphate
  modified_base 10: mod_base = OTHER; note = 2'-O-methyluridine-3'-phosphate
  modified_base 11: mod_base = OTHER; note = 2'-O-methylcytidine-3'-phosphate
  modified_base 12: mod_base = OTHER; note = 2'-O-methylguanosine-3'-phosphate
  modified_base 13: mod_base = OTHER; note = 2'-O-methyladenosine-3'-phosphate
  modified_base 14: mod_base = OTHER; note = 2'-deoxy-2'-fluorouridine-3'-phosphate
  modified_base 15: mod_base = OTHER; note = 2'-O-methylguanosine-3'-phosphate
  modified_base 16: mod_base = OTHER; note = 2'-deoxy-2'-fluorocytidine-3'-phosphate
  modified_base 17: mod_base = OTHER; note = 2'-O-methyluridine-3'-phosphate
  modified_base 18: mod_base = OTHER; note = 2'-O-methylguanosine-3'-phosphate
  modified_base 19: mod_base = OTHER; note = 2'-O-methylguanosine-3'-phosphate
  modified_base 20: mod_base = OTHER; note = 2'-O-methylcytidine-3'-phosphate
  modified_base 21: mod_base = OTHER; note = 2'-O-methylcytidine-3'-phosphorothioate
  modified_base 22: mod_base = OTHER; note = 2'-O-methylguanosine-3'-phosphorothioate
  modified_base 23: mod_base = OTHER; note = 2'-O-methyluridine
tacagggtctcgatgctggccgt

SEQ ID NO: 874 - RNA, 23 nt, synthetic construct
  source 1..23: mol_type = other RNA
  modified_base 1: mod_base = OTHER; note = 2'-O-methyluridine-3'-phosphorothioate 5'-(E)-Vinylphosphonate
  modified_base 2: mod_base = OTHER; note = 2'-deoxy-2'-fluoroguanosine-3'-phosphorothioate
  modified_base 3: mod_base = OTHER; note = 2'-O-methylguanosine-3'-phosphate
  modified_base 4: mod_base = OTHER; note = 2'-O-methyladenosine-3'-phosphate
  modified_base 5: mod_base = OTHER; note = 2'-O-methyladenosine-3'-phosphate
  modified_base 6: mod_base = OTHER; note = 2'-deoxy-2'-fluoroguanosine-3'-phosphate
  modified_base 7: mod_base = OTHER; note = 2'-O-methyladenosine-3'-phosphate
  modified_base 8: mod_base = OTHER; note = 2'-deoxy-2'-fluoroadenosine-3'-phosphate
  modified_base 9: mod_base = OTHER; note = 2'-deoxy-2'-fluoroguanosine-3'-phosphate
  modified_base 10: mod_base = OTHER; note = 2'-O-methylguanosine-3'-phosphate
  modified_base 11: mod_base = OTHER; note = 2'-O-methylguanosine-3'-phosphate
  modified_base 12: mod_base = OTHER; note = 2'-O-methylcytidine-3'-phosphate
  modified_base 13: mod_base = OTHER; note = 2'-O-methyladenosine-3'-phosphate
  modified_base 14: mod_base = OTHER; note = 2'-deoxy-2'-fluoroguanosine-3'-phosphate
  modified_base 15: mod_base = OTHER; note = 2'-O-methylcytidine-3'-phosphate
  modified_base 16: mod_base = OTHER; note = 2'-deoxy-2'-fluorocytidine-3'-phosphate
  modified_base 17: mod_base = OTHER; note = 2'-O-methyladenosine-3'-phosphate
  modified_base 18: mod_base = OTHER; note = 2'-O-methylguanosine-3'-phosphate
  modified_base 19: mod_base = OTHER; note = 2'-O-methylcytidine-3'-phosphate
  modified_base 20: mod_base = OTHER; note = 2'-O-methyladenosine-3'-phosphate
  modified_base 21: mod_base = OTHER; note = 2'-O-methylguanosine-3'-phosphorothioate
  modified_base 22: mod_base = OTHER; note = 2'-O-methyladenosine-3'-phosphorothioate
  modified_base 23: mod_base = OTHER; note = 2'-O-methylguanosine
tggaagaagggcagccagcagag

SEQ ID NO: 875 - RNA, 23 nt, synthetic construct
  source 1..23: mol_type = other RNA
  modified_base 1: mod_base = OTHER; note = 2'-O-methyluridine-3'-phosphorothioate 5'-(E)-Vinylphosphonate
  modified_base 2: mod_base = OTHER; note = 2'-deoxy-2'-fluoroguanosine-3'-phosphorothioate
  modified_base 3: mod_base = OTHER; note = 2'-O-methyluridine-3'-phosphate
  modified_base 4: mod_base = OTHER; note = 2'-O-methylguanosine-3'-phosphate
  modified_base 5: mod_base = OTHER; note = 2'-O-methyladenosine-3'-phosphate
  modified_base 6: mod_base = OTHER; note = 2'-deoxy-2'-fluorouridine-3'-phosphate
  modified_base 7: mod_base = OTHER; note = 2'-O-methylguanosine-3'-phosphate
  modified_base 8: mod_base = OTHER; note = 2'-deoxy-2'-fluoroguanosine-3'-phosphate
  modified_base 9: mod_base = OTHER; note = 2'-deoxy-2'-fluorocytidine-3'-phosphate
  modified_base 10: mod_base = OTHER; note = 2'-O-methylguanosine-3'-phosphate
  modified_base 11: mod_base = OTHER; note = 2'-O-methyladenosine-3'-phosphate
  modified_base 12: mod_base = OTHER; note = 2'-O-methylguanosine-3'-phosphate
  modified_base 13: mod_base = OTHER; note = 2'-O-methylguanosine-3'-phosphate
  modified_base 14: mod_base = OTHER; note = 2'-deoxy-2'-fluorouridine-3'-phosphate
  modified_base 15: mod_base = OTHER; note = 2'-O-methyladenosine-3'-phosphate
  modified_base 16: mod_base = OTHER; note = 2'-deoxy-2'-fluoroguanosine-3'-phosphate
  modified_base 17: mod_base = OTHER; note = 2'-O-methylcytidine-3'-phosphate
  modified_base 18: mod_base = OTHER; note = 2'-O-methylguanosine-3'-phosphate
  modified_base 19: mod_base = OTHER; note = 2'-O-methylguanosine-3'-phosphate
  modified_base 20: mod_base = OTHER; note = 2'-O-methyluridine-3'-phosphate
  modified_base 21: mod_base = OTHER; note = 2'-O-methylcytidine-3'-phosphorothioate
  modified_base 22: mod_base = OTHER; note = 2'-O-methylcytidine-3'-phosphorothioate
  modified_base 23: mod_base = OTHER; note = 2'-O-methyladenosine
tgtgatggcgaggtagcggtcca

SEQ ID NO: 876 - RNA, 23 nt, synthetic construct
  source 1..23: mol_type = other RNA
  modified_base 1: mod_base = OTHER; note = 2'-O-methyluridine-3'-phosphorothioate 5'-(E)-Vinylphosphonate
  modified_base 2: mod_base = OTHER; note = 2'-deoxy-2'-fluoroguanosine-3'-phosphorothioate
  modified_base 3: mod_base = OTHER; note = 2'-O-methylcytidine-3'-phosphate
  modified_base 4: mod_base = OTHER; note = 2'-O-methylguanosine-3'-phosphate
  modified_base 5: mod_base = OTHER; note = 2'-O-methyluridine-3'-phosphate
  modified_base 6: mod_base = OTHER; note = 2'-deoxy-2'-fluorocytidine-3'-phosphate
  modified_base 7: mod_base = OTHER; note = 2'-O-methyluridine-3'-phosphate
  modified_base 8: mod_base = OTHER; note = 2'-deoxy-2'-fluorouridine-3'-phosphate
  modified_base 9: mod_base = OTHER; note = 2'-deoxy-2'-fluoroguanosine-3'-phosphate
  modified_base 10: mod_base = OTHER; note = 2'-O-methylguanosine-3'-phosphate
  modified_base 11: mod_base = OTHER; note = 2'-O-methylcytidine-3'-phosphate
  modified_base 12: mod_base = OTHER; note = 2'-O-methylguanosine-3'-phosphate
  modified_base 13: mod_base = OTHER; note = 2'-O-methyladenosine-3'-phosphate
  modified_base 14: mod_base = OTHER; note = 2'-deoxy-2'-fluorouridine-3'-phosphate
  modified_base 15: mod_base = OTHER; note = 2'-O-methylguanosine-3'-phosphate
  modified_base 16: mod_base = OTHER; note = 2'-deoxy-2'-fluoroguanosine-3'-phosphate
  modified_base 17: mod_base = OTHER; note = 2'-O-methylcytidine-3'-phosphate
  modified_base 18: mod_base = OTHER; note = 2'-O-methylcytidine-3'-phosphate
  modified_base 19: mod_base = OTHER; note = 2'-O-methyladenosine-3'-phosphate
  modified_base 20: mod_base = OTHER; note = 2'-O-methylcytidine-3'-phosphate
  modified_base 21: mod_base = OTHER; note = 2'-O-methylguanosine-3'-phosphorothioate
  modified_base 22: mod_base = OTHER; note = 2'-O-methyladenosine-3'-phosphorothioate
  modified_base 23: mod_base = OTHER; note = 2'-O-methyluridine
tgcgtcttggcgatggccacgat

SEQ ID NO: 877 - RNA, 23 nt, synthetic construct
  source 1..23: mol_type = other RNA
  modified_base 1: mod_base = OTHER; note = 2'-O-methyluridine-3'-phosphorothioate 5'-(E)-Vinylphosphonate
  modified_base 2: mod_base = OTHER; note = 2'-deoxy-2'-fluoroadenosine-3'-phosphorothioate
  modified_base 3: mod_base = OTHER; note = 2'-O-methylguanosine-3'-phosphate
  modified_base 4: mod_base = OTHER; note = 2'-O-methylcytidine-3'-phosphate
  modified_base 5: mod_base = OTHER; note = 2'-O-methylguanosine-3'-phosphate
  modified_base 6: mod_base = OTHER; note = 2'-deoxy-2'-fluorocytidine-3'-phosphate
  modified_base 7: mod_base = OTHER; note = 2'-O-methylcytidine-3'-phosphate
  modified_base 8: mod_base = OTHER; note = 2'-deoxy-2'-fluoroadenosine-3'-phosphate
  modified_base 9: mod_base = OTHER; note = 2'-deoxy-2'-fluorouridine-3'-phosphate
  modified_base 10: mod_base = OTHER; note = 2'-O-methylcytidine-3'-phosphate
  modified_base 11: mod_base = OTHER; note = 2'-O-methyladenosine-3'-phosphate
  modified_base 12: mod_base = OTHER; note = 2'-O-methylguanosine-3'-phosphate
  modified_base 13: mod_base = OTHER; note = 2'-O-methylcytidine-3'-phosphate
  modified_base 14: mod_base = OTHER; note = 2'-deoxy-2'-fluoroadenosine-3'-phosphate
  modified_base 15: mod_base = OTHER; note = 2'-O-methylguanosine-3'-phosphate
  modified_base 16: mod_base = OTHER; note = 2'-deoxy-2'-fluoroadenosine-3'-phosphate
  modified_base 17: mod_base = OTHER; note = 2'-O-methylcytidine-3'-phosphate
  modified_base 18: mod_base = OTHER; note = 2'-O-methylcytidine-3'-phosphate
  modified_base 19: mod_base = OTHER; note = 2'-O-methylcytidine-3'-phosphate
  modified_base 20: mod_base = OTHER; note = 2'-O-methyladenosine-3'-phosphate
  modified_base 21: mod_base = OTHER; note = 2'-O-methyluridine-3'-phosphorothioate
  modified_base 22: mod_base = OTHER; note = 2'-O-methylguanosine-3'-phosphorothioate
  modified_base 23: mod_base = OTHER; note = 2'-O-methylcytidine
tagcgccatcagcagacccatgc

SEQ ID NO: 878 - RNA, 23 nt, synthetic construct
  source 1..23: mol_type = other RNA
  modified_base 1: mod_base = OTHER; note = 2'-O-methyluridine-3'-phosphorothioate 5'-(E)-Vinylphosphonate
  modified_base 2: mod_base = OTHER; note = 2'-deoxy-2'-fluoroadenosine-3'-phosphorothioate
  modified_base 3: mod_base = OTHER; note = 2'-O-methylguanosine-3'-phosphate
  modified_base 4: mod_base = OTHER; note = 2'-O-methyladenosine-3'-phosphate
  modified_base 5: mod_base = OTHER; note = 2'-O-methylcytidine-3'-phosphate
  modified_base 6: mod_base = OTHER; note = 2'-deoxy-2'-fluoroguanosine-3'-phosphate
  modified_base 7: mod_base = OTHER; note = 2'-O-methylcytidine-3'-phosphate
  modified_base 8: mod_base = OTHER; note = 2'-deoxy-2'-fluorocytidine-3'-phosphate
  modified_base 9: mod_base = OTHER; note = 2'-deoxy-2'-fluorocytidine-3'-phosphate
  modified_base 10: mod_base = OTHER; note = 2'-O-methyladenosine-3'-phosphate
  modified_base 11: mod_base = OTHER; note = 2'-O-methyluridine-3'-phosphate
  modified_base 12: mod_base = OTHER; note = 2'-O-methylguanosine-3'-phosphate
  modified_base 13: mod_base = OTHER; note = 2'-O-methyladenosine-3'-phosphate
  modified_base 14: mod_base = OTHER; note = 2'-deoxy-2'-fluorouridine-3'-phosphate
  modified_base 15: mod_base = OTHER; note = 2'-O-methylguanosine-3'-phosphate
  modified_base 16: mod_base = OTHER; note = 2'-deoxy-2'-fluoroadenosine-3'-phosphate
  modified_base 17: mod_base = OTHER; note = 2'-O-methyluridine-3'-phosphate
  modified_base 18: mod_base = OTHER; note = 2'-O-methylguanosine-3'-phosphate
  modified_base 19: mod_base = OTHER; note = 2'-O-methylcytidine-3'-phosphate
  modified_base 20: mod_base = OTHER; note = 2'-O-methylcytidine-3'-phosphate
  modified_base 21: mod_base = OTHER; note = 2'-O-methylcytidine-3'-phosphorothioate
  modified_base 22: mod_base = OTHER; note = 2'-O-methyladenosine-3'-phosphorothioate
  modified_base 23: mod_base = OTHER; note = 2'-O-methylguanosine
tagacgcccatgatgatgcccag

SEQ ID NO: 879 - RNA, 23 nt, synthetic construct
  source 1..23: mol_type = other RNA
  modified_base 1: mod_base = OTHER; note = 2'-O-methyluridine-3'-phosphorothioate 5'-(E)-Vinylphosphonate
  modified_base 2: mod_base = OTHER; note = 2'-deoxy-2'-fluorocytidine-3'-phosphorothioate
  modified_base 3: mod_base = OTHER; note = 2'-O-methyluridine-3'-phosphate
  modified_base 4: mod_base = OTHER; note = 2'-O-methylcytidine-3'-phosphate
  modified_base 5: mod_base = OTHER; note = 2'-O-methyluridine-3'-phosphate
  modified_base 6: mod_base = OTHER; note = 2'-deoxy-2'-fluoroguanosine-3'-phosphate
  modified_base 7: mod_base = OTHER; note = 2'-O-methylguanosine-3'-phosphate
  modified_base 8: mod_base = OTHER; note = 2'-deoxy-2'-fluorocytidine-3'-phosphate
  modified_base 9: mod_base = OTHER; note = 2'-deoxy-2'-fluorouridine-3'-phosphate
  modified_base 10: mod_base = OTHER; note = 2'-O-methylguanosine-3'-phosphate
  modified_base 11: mod_base = OTHER; note = 2'-O-methylguanosine-3'-phosphate
  modified_base 12: mod_base = OTHER; note = 2'-O-methyluridine-3'-phosphate
  modified_base 13: mod_base = OTHER; note = 2'-O-methyladenosine-3'-phosphate
  modified_base 14: mod_base = OTHER; note = 2'-deoxy-2'-fluoroguanosine-3'-phosphate
  modified_base 15: mod_base = OTHER; note = 2'-O-methyluridine-3'-phosphate
  modified_base 16: mod_base = OTHER; note = 2'-deoxy-2'-fluoroguanosine-3'-phosphate
  modified_base 17: mod_base = OTHER; note = 2'-O-methyluridine-3'-phosphate
  modified_base 18: mod_base = OTHER; note = 2'-O-methylguanosine-3'-phosphate
  modified_base 19: mod_base = OTHER; note = 2'-O-methyluridine-3'-phosphate
  modified_base 20: mod_base = OTHER; note = 2'-O-methyluridine-3'-phosphate
  modified_base 21: mod_base = OTHER; note = 2'-O-methylcytidine-3'-phosphorothioate
  modified_base 22: mod_base = OTHER; note = 2'-O-methylcytidine-3'-phosphorothioate
  modified_base 23: mod_base = OTHER; note = 2'-O-methyluridine
tctctggctggtagtgtgttcct

SEQ ID NO: 880 - RNA, 23 nt, synthetic construct
  source 1..23: mol_type = other RNA
  modified_base 1: mod_base = OTHER; note = 2'-O-methyluridine-3'-phosphorothioate 5'-(E)-Vinylphosphonate
  modified_base 2: mod_base = OTHER; note = 2'-deoxy-2'-fluoroadenosine-3'-phosphorothioate
  modified_base 3: mod_base = OTHER; note = 2'-O-methylguanosine-3'-phosphate
  modified_base 4: mod_base = OTHER; note = 2'-O-methylguanosine-3'-phosphate
  modified_base 5: mod_base = OTHER; note = 2'-O-methyluridine-3'-phosphate
  modified_base 6: mod_base = OTHER; note = 2'-deoxy-2'-fluoroadenosine-3'-phosphate
  modified_base 7: mod_base = OTHER; note = 2'-O-methylguanosine-3'-phosphate
  modified_base 8: mod_base = OTHER; note = 2'-deoxy-2'-fluorocytidine-3'-phosphate
  modified_base 9: mod_base = OTHER; note = 2'-deoxy-2'-fluoroguanosine-3'-phosphate
  modified_base 10: mod_base = OTHER; note = 2'-O-methylguanosine-3'-phosphate
  modified_base 11: mod_base = OTHER; note = 2'-O-methyluridine-3'-phosphate
  modified_base 12: mod_base = OTHER; note = 2'-O-methylcytidine-3'-phosphate
  modified_base 13: mod_base = OTHER; note = 2'-O-methylcytidine-3'-phosphate
  modified_base 14: mod_base = OTHER; note = 2'-deoxy-2'-fluoroadenosine-3'-phosphate
  modified_base 15: mod_base = OTHER; note = 2'-O-methylguanosine-3'-phosphate
  modified_base 16: mod_base = OTHER; note = 2'-deoxy-2'-fluoroguanosine-3'-phosphate
  modified_base 17: mod_base = OTHER; note = 2'-O-methylguanosine-3'-phosphate
  modified_base 18: mod_base = OTHER; note = 2'-O-methylcytidine-3'-phosphate
  modified_base 19: mod_base = OTHER; note = 2'-O-methyladenosine-3'-phosphate
  modified_base 20: mod_base = OTHER; note = 2'-O-methyladenosine-3'-phosphate
  modified_base 21: mod_base = OTHER; note = 2'-O-methyluridine-3'-phosphorothioate
  modified_base 22: mod_base = OTHER; note = 2'-O-methylguanosine-3'-phosphorothioate
  modified_base 23: mod_base = OTHER; note = 2'-O-methyladenosine
taggtagcggtccagggcaatga

SEQ ID NO: 881 - RNA, 23 nt, synthetic construct
  source 1..23: mol_type = other RNA
  modified_base 1: mod_base = OTHER; note = 2'-O-methyluridine-3'-phosphorothioate 5'-(E)-Vinylphosphonate
  modified_base 2: mod_base = OTHER; note = 2'-deoxy-2'-fluoroadenosine-3'-phosphorothioate
  modified_base 3: mod_base = OTHER; note = 2'-O-methyladenosine-3'-phosphate
  modified_base 4: mod_base = OTHER; note = 2'-O-methylguanosine-3'-phosphate
  modified_base 5: mod_base = OTHER; note = 2'-O-methylguanosine-3'-phosphate
  modified_base 6: mod_base = OTHER; note = 2'-deoxy-2'-fluoroadenosine-3'-phosphate
  modified_base 7: mod_base = OTHER; note = 2'-O-methylcytidine-3'-phosphate
  modified_base 8: mod_base = OTHER; note = 2'-deoxy-2'-fluoroadenosine-3'-phosphate
  modified_base 9: mod_base = OTHER; note = 2'-deoxy-2'-fluorocytidine-3'-phosphate
  modified_base 10: mod_base = OTHER; note = 2'-O-methylcytidine-3'-phosphate
  modified_base 11: mod_base = OTHER; note = 2'-O-methyladenosine-3'-phosphate
  modified_base 12: mod_base = OTHER; note = 2'-O-methylguanosine-3'-phosphate
  modified_base 13: mod_base = OTHER; note = 2'-O-methylguanosine-3'-phosphate
  modified_base 14: mod_base = OTHER; note = 2'-deoxy-2'-fluoroguanosine-3'-phosphate
  modified_base 15: mod_base = OTHER; note = 2'-O-methylcytidine-3'-phosphate
  modified_base 16: mod_base = OTHER; note = 2'-deoxy-2'-fluorocytidine-3'-phosphate
  modified_base 17: mod_base = OTHER; note = 2'-O-methylguanosine-3'-phosphate
  modified_base 18: mod_base = OTHER; note = 2'-O-methyladenosine-3'-phosphate
  modified_base 19: mod_base = OTHER; note = 2'-O-methylguanosine-3'-phosphate
  modified_base 20: mod_base = OTHER; note = 2'-O-methyladenosine-3'-phosphate
  modified_base 21: mod_base = OTHER; note = 2'-O-methyluridine-3'-phosphorothioate
  modified_base 22: mod_base = OTHER; note = 2'-O-methylguanosine-3'-phosphorothioate
  modified_base 23: mod_base = OTHER; note = 2'-O-methylguanosine
taaggacaccagggccgagatgg

SEQ ID NO: 882 - RNA, 23 nt, synthetic construct
  source 1..23: mol_type = other RNA
  modified_base 1: mod_base = OTHER; note = 2'-O-methyluridine-3'-phosphorothioate 5'-(E)-Vinylphosphonate
  modified_base 2: mod_base = OTHER; note = 2'-deoxy-2'-fluoroadenosine-3'-phosphorothioate
  modified_base 3: mod_base = OTHER; note = 2'-O-methylguanosine-3'-phosphate
  modified_base 4: mod_base = OTHER; note = 2'-O-methylguanosine-3'-phosphate
  modified_base 5: mod_base = OTHER; note = 2'-O-methyladenosine-3'-phosphate
  modified_base 6: mod_base = OTHER; note = 2'-deoxy-2'-fluoroadenosine-3'-phosphate
  modified_base 7: mod_base = OTHER; note = 2'-O-methyladenosine-3'-phosphate
  modified_base 8: mod_base = OTHER; note = 2'-deoxy-2'-fluorocytidine-3'-phosphate
  modified_base 9: mod_base = OTHER; note = 2'-deoxy-2'-fluoroguanosine-3'-phosphate
  modified_base 10: mod_base = OTHER; note = 2'-O-methylguanosine-3'-phosphate
  modified_base 11: mod_base = OTHER; note = 2'-O-methylcytidine-3'-phosphate
  modified_base 12: mod_base = OTHER; note = 2'-O-methylguanosine-3'-phosphate
  modified_base 13: mod_base = OTHER; note = 2'-O-methylcytidine-3'-phosphate
  modified_base 14: mod_base = OTHER; note = 2'-deoxy-2'-fluorouridine-3'-phosphate
  modified_base 15: mod_base = OTHER; note = 2'-O-methylcytidine-3'-phosphate
  modified_base 16: mod_base = OTHER; note = 2'-deoxy-2'-fluoroguanosine-3'-phosphate
  modified_base 17: mod_base = OTHER; note = 2'-O-methylcytidine-3'-phosphate
  modified_base 18: mod_base = OTHER; note = 2'-O-methyladenosine-3'-phosphate
  modified_base 19: mod_base = OTHER; note = 2'-O-methylguanosine-3'-phosphate
  modified_base 20: mod_base = OTHER; note = 2'-O-methylcytidine-3'-phosphate
  modified_base 21: mod_base = OTHER; note = 2'-O-methyluridine-3'-phosphorothioate
  modified_base 22: mod_base = OTHER; note = 2'-O-methylguanosine-3'-phosphorothioate
  modified_base 23: mod_base = OTHER; note = 2'-O-methyluridine
taggaaacggcgctcgcagctgt

SEQ ID NO: 883 - RNA, 23 nt, synthetic construct
  source 1..23: mol_type = other RNA
  modified_base 1: mod_base = OTHER; note = 2'-O-methyluridine-3'-phosphorothioate 5'-(E)-Vinylphosphonate
  modified_base 2: mod_base = OTHER; note = 2'-deoxy-2'-fluoroguanosine-3'-phosphorothioate
  modified_base 3: mod_base = OTHER; note = 2'-O-methylguanosine-3'-phosphate
  modified_base 4: mod_base = OTHER; note = 2'-O-methylcytidine-3'-phosphate
  modified_base 5: mod_base = OTHER; note = 2'-O-methyluridine-3'-phosphate
  modified_base 6: mod_base = OTHER; note = 2'-deoxy-2'-fluoroguanosine-3'-phosphate
  modified_base 7: mod_base = OTHER; note = 2'-O-methylcytidine-3'-phosphate
  modified_base 8: mod_base = OTHER; note = 2'-deoxy-2'-fluoroguanosine-3'-phosphate
  modified_base 9: mod_base = OTHER; note = 2'-deoxy-2'-fluoroguanosine-3'-phosphate
  modified_base 10: mod_base = OTHER; note = 2'-O-methylcytidine-3'-phosphate
  modified_base 11: mod_base = OTHER; note = 2'-O-methyladenosine-3'-phosphate
  modified_base 12: mod_base = OTHER; note = 2'-O-methylguanosine-3'-phosphate
  modified_base 13: mod_base = OTHER; note = 2'-O-methyluridine-3'-phosphate
  modified_base 14: mod_base = OTHER; note = 2'-deoxy-2'-fluoroadenosine-3'-phosphate
  modified_base 15: mod_base = OTHER; note = 2'-O-methylguanosine-3'-phosphate
  modified_base 16: mod_base = OTHER; note = 2'-deoxy-2'-fluoroadenosine-3'-phosphate
  modified_base 17: mod_base = OTHER; note = 2'-O-methyluridine-3'-phosphate
  modified_base 18: mod_base = OTHER; note = 2'-O-methylguanosine-3'-phosphate
  modified_base 19: mod_base = OTHER; note = 2'-O-methyladenosine-3'-phosphate
  modified_base 20: mod_base = OTHER; note = 2'-O-methyluridine-3'-phosphate
  modified_base 21: mod_base = OTHER; note = 2'-O-methylguanosine-3'-phosphorothioate
  modified_base 22: mod_base = OTHER; note = 2'-O-methylguanosine-3'-phosphorothioate
  modified_base 23: mod_base = OTHER; note = 2'-O-methylguanosine
tggctgcggcagtagatgatggg

SEQ ID NO: 884 - RNA, 23 nt, synthetic construct
  source 1..23: mol_type = other RNA
  modified_base 1: mod_base = OTHER; note = 2'-O-methyluridine-3'-phosphorothioate 5'-(E)-Vinylphosphonate
  modified_base 2: mod_base = OTHER; note = 2'-deoxy-2'-fluoroadenosine-3'-phosphorothioate
  modified_base 3: mod_base = OTHER; note = 2'-O-methylguanosine-3'-phosphate
  modified_base 4: mod_base = OTHER; note = 2'-O-methyladenosine-3'-phosphate
  modified_base 5: mod_base = OTHER; note = 2'-O-methylguanosine-3'-phosphate
  modified_base 6: mod_base = OTHER; note = 2'-deoxy-2'-fluoroguanosine-3'-phosphate
  modified_base 7: mod_base = OTHER; note = 2'-O-methyluridine-3'-phosphate
  modified_base 8: mod_base = OTHER; note = 2'-deoxy-2'-fluorouridine-3'-phosphate
  modified_base 9: mod_base = OTHER; note = 2'-deoxy-2'-fluoroguanosine-3'-phosphate
  modified_base 10: mod_base = OTHER; note = 2'-O-methylguanosine-3'-phosphate
  modified_base 11: mod_base = OTHER; note = 2'-O-methyluridine-3'-phosphate
  modified_base 12: mod_base = OTHER; note = 2'-O-methylguanosine-3'-phosphate
  modified_base 13: mod_base = OTHER; note = 2'-O-methyladenosine-3'-phosphate
  modified_base 14: mod_base = OTHER; note = 2'-deoxy-2'-fluoroguanosine-3'-phosphate
  modified_base 15: mod_base = OTHER; note = 2'-O-methylcytidine-3'-phosphate
  modified_base 16: mod_base = OTHER; note = 2'-deoxy-2'-fluoroguanosine-3'-phosphate
  modified_base 17: mod_base = OTHER; note = 2'-O-methyluridine-3'-phosphate
  modified_base 18: mod_base = OTHER; note = 2'-O-methylcytidine-3'-phosphate
  modified_base 19: mod_base = OTHER; note = 2'-O-methyluridine-3'-phosphate
  modified_base 20: mod_base = OTHER; note = 2'-O-methylguanosine-3'-phosphate
  modified_base 21: mod_base = OTHER; note = 2'-O-methylcytidine-3'-phosphorothioate
  modified_base 22: mod_base = OTHER; note = 2'-O-methyladenosine-3'-phosphorothioate
  modified_base 23: mod_base = OTHER; note = 2'-O-methylguanosine
tagaggttggtgagcgtctgcag

SEQ ID NO: 885 - RNA, 23 nt, synthetic construct
  source 1..23: mol_type = other RNA
  modified_base 1: mod_base = OTHER; note = 2'-O-methyluridine-3'-phosphorothioate 5'-(E)-Vinylphosphonate
  modified_base 2: mod_base = OTHER; note = 2'-deoxy-2'-fluoroadenosine-3'-phosphorothioate
  modified_base 3: mod_base = OTHER; note = 2'-O-methylguanosine-3'-phosphate
  modified_base 4: mod_base = OTHER; note = 2'-O-methylcytidine-3'-phosphate
  modified_base 5: mod_base = OTHER; note = 2'-O-methyladenosine-3'-phosphate
  modified_base 6: mod_base = OTHER; note = 2'-deoxy-2'-fluoroguanosine-3'-phosphate
  modified_base 7: mod_base = OTHER; note = 2'-O-methyladenosine-3'-phosphate
  modified_base 8: mod_base = OTHER; note = 2'-deoxy-2'-fluoroguanosine-3'-phosphate
  modified_base 9: mod_base = OTHER; note = 2'-deoxy-2'-fluorocytidine-3'-phosphate
  modified_base 10: mod_base = OTHER; note = 2'-O-methyladenosine-3'-phosphate
  modified_base 11: mod_base = OTHER; note = 2'-O-methylguanosine-3'-phosphate
  modified_base 12: mod_base = OTHER; note = 2'-O-methyluridine-3'-phosphate
  modified_base 13: mod_base = OTHER; note = 2'-O-methylcytidine-3'-phosphate
  modified_base 14: mod_base = OTHER; note = 2'-deoxy-2'-fluorocytidine-3'-phosphate
  modified_base 15: mod_base = OTHER; note = 2'-O-methylcytidine-3'-phosphate
  modified_base 16: mod_base = OTHER; note = 2'-deoxy-2'-fluorouridine-3'-phosphate
  modified_base 17: mod_base = OTHER; note = 2'-O-methylguanosine-3'-phosphate
  modified_base 18: mod_base = OTHER; note = 2'-O-methylguanosine-3'-phosphate
  modified_base 19: mod_base = OTHER; note = 2'-O-methyladenosine-3'-phosphate
  modified_base 20: mod_base = OTHER; note = 2'-O-methyladenosine-3'-phosphate
  modified_base 21: mod_base = OTHER; note = 2'-O-methylguanosine-3'-phosphorothioate
  modified_base 22: mod_base = OTHER; note = 2'-O-methylguanosine-3'-phosphorothioate
  modified_base 23: mod_base = OTHER; note = 2'-O-methylcytidine
tagcagagcagtccctggaaggc

SEQ ID NO: 886 - RNA, 23 nt, synthetic construct
  source 1..23: mol_type = other RNA
  modified_base 1: mod_base = OTHER; note = 2'-O-methyluridine-3'-phosphorothioate 5'-(E)-Vinylphosphonate
  modified_base 2: mod_base = OTHER; note = 2'-deoxy-2'-fluorouridine-3'-phosphorothioate
  modified_base 3: mod_base = OTHER; note = 2'-O-methylguanosine-3'-phosphate
  modified_base 4: mod_base = OTHER; note = 2'-O-methylguanosine-3'-phosphate
  modified_base 5: mod_base = OTHER; note = 2'-O-methylcytidine-3'-phosphate
  modified_base 6: mod_base = OTHER; note = 2'-deoxy-2'-fluorocytidine-3'-phosphate
  modified_base 7: mod_base = OTHER; note = 2'-O-methyladenosine-3'-phosphate
  modified_base 8: mod_base = OTHER; note = 2'-deoxy-2'-fluoroguanosine-3'-phosphate
  modified_base 9: mod_base = OTHER; note = 2'-deoxy-2'-fluoroguanosine-3'-phosphate
  modified_base 10: mod_base = OTHER; note = 2'-O-methylguanosine-3'-phosphate
  modified_base 11: mod_base = OTHER; note = 2'-O-methyladenosine-3'-phosphate
  modified_base 12: mod_base = OTHER; note = 2'-O-methylcytidine-3'-phosphate
  modified_base 13: mod_base = OTHER; note = 2'-O-methyladenosine-3'-phosphate
  modified_base 14: mod_base = OTHER; note = 2'-deoxy-2'-fluorouridine-3'-phosphate
  modified_base 15: mod_base = OTHER; note = 2'-O-methylguanosine-3'-phosphate
  modified_base 16: mod_base = OTHER; note = 2'-deoxy-2'-fluoroadenosine-3'-phosphate
  modified_base 17: mod_base = OTHER; note = 2'-O-methyluridine-3'-phosphate
  modified_base 18: mod_base = OTHER; note = 2'-O-methylguanosine-3'-phosphate
  modified_base 19: mod_base = OTHER; note = 2'-O-methyladenosine-3'-phosphate
  modified_base 20: mod_base = OTHER; note = 2'-O-methyladenosine-3'-phosphate
  modified_base 21: mod_base = OTHER; note = 2'-O-methylguanosine-3'-phosphorothioate
  modified_base 22: mod_base = OTHER; note = 2'-O-methyladenosine-3'-phosphorothioate
  modified_base 23: mod_base = OTHER; note = 2'-O-methylguanosine
ttggccagggacatgatgaagag

SEQ ID NO: 887 - RNA, 23 nt, synthetic construct
  source 1..23: mol_type = other RNA
  modified_base 1: mod_base = OTHER; note = 2'-O-methyluridine-3'-phosphorothioate 5'-(E)-Vinylphosphonate
  modified_base 2: mod_base = OTHER; note = 2'-deoxy-2'-fluoroguanosine-3'-phosphorothioate
  modified_base 3: mod_base = OTHER; note = 2'-O-methylcytidine-3'-phosphate
  modified_base 4: mod_base = OTHER; note = 2'-O-methylcytidine-3'-phosphate
  modified_base 5: mod_base = OTHER; note = 2'-O-methylguanosine-3'-phosphate
  modified_base 6: mod_base = OTHER; note = 2'-deoxy-2'-fluoroguanosine-3'-phosphate
  modified_base 7: mod_base = OTHER; note = 2'-O-methylguanosine-3'-phosphate
  modified_base 8: mod_base = OTHER; note = 2'-deoxy-2'-fluoroadenosine-3'-phosphate
  modified_base 9: mod_base = OTHER; note = 2'-deoxy-2'-fluorocytidine-3'-phosphate
  modified_base 10: mod_base = OTHER; note = 2'-O-methyluridine-3'-phosphate
  modified_base 11: mod_base = OTHER; note = 2'-O-methyluridine-3'-phosphate
  modified_base 12: mod_base = OTHER; note = 2'-O-methylcytidine-3'-phosphate
  modified_base 13: mod_base = OTHER; note = 2'-O-methyladenosine-3'-phosphate
  modified_base 14: mod_base = OTHER; note = 2'-deoxy-2'-fluoroguanosine-3'-phosphate
  modified_base 15: mod_base = OTHER; note = 2'-O-methylcytidine-3'-phosphate
  modified_base 16: mod_base = OTHER; note = 2'-deoxy-2'-fluoroadenosine-3'-phosphate
  modified_base 17: mod_base = OTHER; note = 2'-O-methyluridine-3'-phosphate
  modified_base 18: mod_base = OTHER; note = 2'-O-methylguanosine-3'-phosphate
  modified_base 19: mod_base = OTHER; note = 2'-O-methyluridine-3'-phosphate
  modified_base 20: mod_base = OTHER; note = 2'-O-methyluridine-3'-phosphate
  modified_base 21: mod_base = OTHER; note = 2'-O-methyluridine-3'-phosphorothioate
  modified_base 22: mod_base = OTHER; note = 2'-O-methylcytidine-3'-phosphorothioate
  modified_base 23: mod_base = OTHER; note = 2'-O-methyluridine
tgccgggacttcagcatgtttct

SEQ ID NO: 888 - RNA, 23 nt, synthetic construct
  source 1..23: mol_type = other RNA
  modified_base 1: mod_base = OTHER; note = 2'-O-methyluridine-3'-phosphorothioate 5'-(E)-Vinylphosphonate
  modified_base 2: mod_base = OTHER; note = 2'-deoxy-2'-fluoroadenosine-3'-phosphorothioate
  modified_base 3: mod_base = OTHER; note = 2'-O-methylguanosine-3'-phosphate
  modified_base 4: mod_base = OTHER; note = 2'-O-methylcytidine-3'-phosphate
  modified_base 5: mod_base = OTHER; note = 2'-O-methyluridine-3'-phosphate
  modified_base 6: mod_base = OTHER; note = 2'-deoxy-2'-fluorocytidine-3'-phosphate
  modified_base 7: mod_base = OTHER; note = 2'-O-methylguanosine-3'-phosphate
  modified_base 8: mod_base = OTHER; note = 2'-deoxy-2'-fluorocytidine-3'-phosphate
  modified_base 9: mod_base = OTHER; note = 2'-deoxy-2'-fluoroguanosine-3'-phosphate
  modified_base 10: mod_base = OTHER; note = 2'-O-methylguanosine-3'-phosphate
  modified_base 11: mod_base = OTHER; note = 2'-O-methyluridine-3'-phosphate
  modified_base 12: mod_base = OTHER; note = 2'-O-methylguanosine-3'-phosphate
  modified_base 13: mod_base = OTHER; note = 2'-O-methylguanosine-3'-phosphate
  modified_base 14: mod_base = OTHER; note = 2'-deoxy-2'-fluoroadenosine-3'-phosphate
  modified_base 15: mod_base = OTHER; note = 2'-O-methyladenosine-3'-phosphate
  modified_base 16: mod_base = OTHER; note = 2'-deoxy-2'-fluoroguanosine-3'-phosphate
  modified_base 17: mod_base = OTHER; note = 2'-O-methylguanosine-3'-phosphate
  modified_base 18: mod_base = OTHER; note = 2'-O-methylcytidine-3'-phosphate
  modified_base 19: mod_base = OTHER; note = 2'-O-methylcytidine-3'-phosphate
  modified_base 20: mod_base = OTHER; note = 2'-O-methyluridine-3'-phosphate
  modified_base 21: mod_base = OTHER; note = 2'-O-methyluridine-3'-phosphorothioate
  modified_base 22: mod_base = OTHER; note = 2'-O-methylcytidine-3'-phosphorothioate
  modified_base 23: mod_base = OTHER; note = 2'-O-methyladenosine
tagctcgcggtggaaggccttca

SEQ ID NO: 889 - RNA, 23 nt, synthetic construct
  source 1..23: mol_type = other RNA
  modified_base 1: mod_base = OTHER; note = 2'-O-methyluridine-3'-phosphorothioate 5'-(E)-Vinylphosphonate
  modified_base 2: mod_base = OTHER; note = 2'-deoxy-2'-fluoroadenosine-3'-phosphorothioate
  modified_base 3: mod_base = OTHER; note = 2'-O-methylguanosine-3'-phosphate
  modified_base 4: mod_base = OTHER; note = 2'-O-methyladenosine-3'-phosphate
  modified_base 5: mod_base = OTHER; note = 2'-O-methylguanosine-3'-phosphate
  modified_base 6: mod_base = OTHER; note = 2'-deoxy-2'-fluoroadenosine-3'-phosphate
  modified_base 7: mod_base = OTHER; note = 2'-O-methylguanosine-3'-phosphate
  modified_base 8: mod_base = OTHER; note = 2'-deoxy-2'-fluoroadenosine-3'-phosphate
  modified_base 9: mod_base = OTHER; note = 2'-deoxy-2'-fluoroguanosine-3'-phosphate
  modified_base 10: mod_base = OTHER; note = 2'-O-methylguanosine-3'-phosphate
  modified_base 11: mod_base = OTHER; note = 2'-O-methylcytidine-3'-phosphate
  modified_base 12: mod_base = OTHER; note = 2'-O-methyluridine-3'-phosphate
  modified_base 13: mod_base = OTHER; note = 2'-O-methylcytidine-3'-phosphate
  modified_base 14: mod_base = OTHER; note = 2'-deoxy-2'-fluorouridine-3'-phosphate
  modified_base 15: mod_base = OTHER; note = 2'-O-methylguanosine-3'-phosphate
  modified_base 16: mod_base = OTHER; note = 2'-deoxy-2'-fluorocytidine-3'-phosphate
  modified_base 17: mod_base = OTHER; note = 2'-O-methylguanosine-3'-phosphate
  modified_base 18: mod_base = OTHER; note = 2'-O-methylcytidine-3'-phosphate
  modified_base 19: mod_base = OTHER; note = 2'-O-methylcytidine-3'-phosphate
  modified_base 20: mod_base = OTHER; note = 2'-O-methyluridine-3'-phosphate
  modified_base 21: mod_base = OTHER; note = 2'-O-methylguanosine-3'-phosphorothioate
  modified_base 22: mod_base = OTHER; note = 2'-O-methylguanosine-3'-phosphorothioate
  modified_base 23: mod_base = OTHER; note = 2'-O-methyluridine
tagagagaggctctgcgcctggt

SEQ ID NO: 890 - RNA, 23 nt, synthetic construct
  source 1..23: mol_type = other RNA
  modified_base 1: mod_base = OTHER; note = 2'-O-methyluridine-3'-phosphorothioate 5'-(E)-Vinylphosphonate
  modified_base 2: mod_base = OTHER; note = 2'-deoxy-2'-fluoroadenosine-3'-phosphorothioate
  modified_base 3: mod_base = OTHER; note = 2'-O-methylcytidine-3'-phosphate
  modified_base 4: mod_base = OTHER; note = 2'-O-methylguanosine-3'-phosphate
  modified_base 5: mod_base = OTHER; note = 2'-O-methyladenosine-3'-phosphate
  modified_base 6: mod_base = OTHER; note = 2'-deoxy-2'-fluorocytidine-3'-phosphate
  modified_base 7: mod_base = OTHER; note = 2'-O-methyladenosine-3'-phosphate
  modified_base 8: mod_base = OTHER; note = 2'-deoxy-2'-fluoroguanosine-3'-phosphate
  modified_base 9: mod_base = OTHER; note = 2'-deoxy-2'-fluoroguanosine-3'-phosphate
  modified_base 10: mod_base = OTHER; note = 2'-O-methyluridine-3'-phosphate
  modified_base 11: mod_base = OTHER; note = 2'-O-methyluridine-3'-phosphate
  modified_base 12: mod_base = OTHER; note = 2'-O-methyladenosine-3'-phosphate
  modified_base 13: mod_base = OTHER; note = 2'-O-methylcytidine-3'-phosphate
  modified_base 14: mod_base = OTHER; note = 2'-deoxy-2'-fluorocytidine-3'-phosphate
  modified_base 15: mod_base = OTHER; note = 2'-O-methylguanosine-3'-phosphate
  modified_base 16: mod_base = OTHER; note = 2'-deoxy-2'-fluoroguanosine-3'-phosphate
  modified_base 17: mod_base = OTHER; note = 2'-O-methylguanosine-3'-phosphate
  modified_base 18: mod_base = OTHER; note = 2'-O-methylcytidine-3'-phosphate
  modified_base 19: mod_base = OTHER; note = 2'-O-methyluridine-3'-phosphate
  modified_base 20: mod_base = OTHER; note = 2'-O-methylcytidine-3'-phosphate
  modified_base 21: mod_base = OTHER; note = 2'-O-methylguanosine-3'-phosphorothioate
  modified_base 22: mod_base = OTHER; note = 2'-O-methylguanosine-3'-phosphorothioate
  modified_base 23: mod_base = OTHER; note = 2'-O-methyladenosine
tacgacaggttaccgggctcgga

SEQ ID NO: 891 - RNA, 23 nt, synthetic construct
  source 1..23: mol_type = other RNA
  modified_base 1: mod_base = OTHER; note = 2'-O-methyluridine-3'-phosphorothioate 5'-(E)-Vinylphosphonate
  modified_base 2: mod_base = OTHER; note = 2'-deoxy-2'-fluoroadenosine-3'-phosphorothioate
  modified_base 3: mod_base = OTHER; note = 2'-O-methylcytidine-3'-phosphate
  modified_base 4: mod_base = OTHER; note = 2'-O-methylguanosine-3'-phosphate
  modified_base 5: mod_base = OTHER; note = 2'-O-methyluridine-3'-phosphate
  modified_base 6: mod_base = OTHER; note = 2'-deoxy-2'-fluorocytidine-3'-phosphate
  modified_base 7: mod_base = OTHER; note = 2'-O-methylcytidine-3'-phosphate
  modified_base 8: mod_base = OTHER; note = 2'-deoxy-2'-fluoroadenosine-3'-phosphate
  modified_base 9: mod_base = OTHER; note = 2'-deoxy-2'-fluorocytidine-3'-phosphate
  modified_base 10: mod_base = OTHER; note = 2'-O-methyluridine-3'-phosphate
  modified_base 11: mod_base = OTHER; note = 2'-O-methylguanosine-3'-phosphate
  modified_base 12: mod_base = OTHER; note = 2'-O-methyladenosine-3'-phosphate
  modified_base 13: mod_base = OTHER; note = 2'-O-methylguanosine-3'-phosphate
  modified_base 14: mod_base = OTHER; note = 2'-deoxy-2'-fluoroguanosine-3'-phosphate
  modified_base 15: mod_base = OTHER; note = 2'-O-methyluridine-3'-phosphate
  modified_base 16: mod_base = OTHER; note = 2'-deoxy-2'-fluorocytidine-3'-phosphate
  modified_base 17: mod_base = OTHER; note = 2'-O-methylcytidine-3'-phosphate
  modified_base 18: mod_base = OTHER; note = 2'-O-methyladenosine-3'-phosphate
  modified_base 19: mod_base = OTHER; note = 2'-O-methylcytidine-3'-phosphate
  modified_base 20: mod_base = OTHER; note = 2'-O-methyladenosine-3'-phosphate
  modified_base 21: mod_base = OTHER; note = 2'-O-methylguanosine-3'-phosphorothioate
  modified_base 22: mod_base = OTHER; note = 2'-O-methylcytidine-3'-phosphorothioate
  modified_base 23: mod_base = OTHER; note = 2'-O-methyluridine
tacgtccactgaggtccacagct

SEQ ID NO: 892 - RNA, 23 nt, synthetic construct
  source 1..23: mol_type = other RNA
  modified_base 1: mod_base = OTHER; note = 2'-O-methyluridine-3'-phosphorothioate 5'-(E)-Vinylphosphonate
  modified_base 2: mod_base = OTHER; note = 2'-deoxy-2'-fluorouridine-3'-phosphorothioate
  modified_base 3: mod_base = OTHER; note = 2'-O-methyluridine-3'-phosphate
  modified_base 4: mod_base = OTHER; note = 2'-O-methyluridine-3'-phosphate
  modified_base 5: mod_base = OTHER; note = 2'-O-methylguanosine-3'-phosphate
  modified_base 6: mod_base = OTHER; note = 2'-deoxy-2'-fluorouridine-3'-phosphate
  modified_base 7: mod_base = OTHER; note = 2'-O-methylguanosine-3'-phosphate
  modified_base 8: mod_base = OTHER; note = 2'-deoxy-2'-fluorocytidine-3'-phosphate
  modified_base 9: mod_base = OTHER; note = 2'-deoxy-2'-fluoroadenosine-3'-phosphate
  modified_base 10: mod_base = OTHER; note = 2'-O-methyladenosine-3'-phosphate
  modified_base 11: mod_base = OTHER; note = 2'-O-methylcytidine-3'-phosphate
  modified_base 12: mod_base = OTHER; note = 2'-O-methylguanosine-3'-phosphate
  modified_base 13: mod_base = OTHER; note = 2'-O-methylguanosine-3'-phosphate
  modified_base 14: mod_base = OTHER; note = 2'-deoxy-2'-fluorouridine-3'-phosphate
  modified_base 15: mod_base = OTHER; note = 2'-O-methylcytidine-3'-phosphate
  modified_base 16: mod_base = OTHER; note = 2'-deoxy-2'-fluorocytidine-3'-phosphate
  modified_base 17: mod_base = OTHER; note = 2'-O-methylguanosine-3'-phosphate
  modified_base 18: mod_base = OTHER; note = 2'-O-methyluridine-3'-phosphate
  modified_base 19: mod_base = OTHER; note = 2'-O-methylguanosine-3'-phosphate
  modified_base 20: mod_base = OTHER; note = 2'-O-methylguanosine-3'-phosphate
  modified_base 21: mod_base = OTHER; note = 2'-O-methylcytidine-3'-phosphorothioate
  modified_base 22: mod_base = OTHER; note = 2'-O-methyluridine-3'-phosphorothioate
  modified_base 23: mod_base = OTHER; note = 2'-O-methyluridine
ttttgtgcaacggtccgtggctt

SEQ ID NO: 893 - RNA, 23 nt, synthetic construct
  source 1..23: mol_type = other RNA
  modified_base 1: mod_base = OTHER; note = 2'-O-methyluridine-3'-phosphorothioate 5'-(E)-Vinylphosphonate
  modified_base 2: mod_base = OTHER; note = 2'-deoxy-2'-fluorouridine-3'-phosphorothioate
  modified_base 3: mod_base = OTHER; note = 2'-O-methylguanosine-3'-phosphate
  modified_base 4: mod_base = OTHER; note = 2'-O-methylguanosine-3'-phosphate
  modified_base 5: mod_base = OTHER; note = 2'-O-methyluridine-3'-phosphate
  modified_base 6: mod_base = OTHER; note = 2'-deoxy-2'-fluoroadenosine-3'-phosphate
  modified_base 7: mod_base = OTHER; note = 2'-O-methylguanosine-3'-phosphate
  modified_base 8: mod_base = OTHER; note = 2'-deoxy-2'-fluorocytidine-3'-phosphate
  modified_base 9: mod_base = OTHER; note = 2'-deoxy-2'-fluoroguanosine-3'-phosphate
  modified_base 10: mod_base = OTHER; note = 2'-O-methylguanosine-3'-phosphate
  modified_base 11: mod_base = OTHER; note = 2'-O-methyladenosine-3'-phosphate
  modified_base 12: mod_base = OTHER; note = 2'-O-methyladenosine-3'-phosphate
  modified_base 13: mod_base = OTHER; note = 2'-O-methylguanosine-3'-phosphate
  modified_base 14: mod_base = OTHER; note = 2'-deoxy-2'-fluoroguanosine-3'-phosphate
  modified_base 15: mod_base = OTHER; note = 2'-O-methylguanosine-3'-phosphate
  modified_base 16: mod_base = OTHER; note = 2'-deoxy-2'-fluorocytidine-3'-phosphate
  modified_base 17: mod_base = OTHER; note = 2'-O-methylguanosine-3'-phosphate
  modified_base 18: mod_base = OTHER; note = 2'-O-methyladenosine-3'-phosphate
  modified_base 19: mod_base = OTHER; note = 2'-O-methylguanosine-3'-phosphate
  modified_base 20: mod_base = OTHER; note = 2'-O-methylguanosine-3'-phosphate
  modified_base 21: mod_base = OTHER; note = 2'-O-methyluridine-3'-phosphorothioate
  modified_base 22: mod_base = OTHER; note = 2'-O-methylguanosine-3'-phosphorothioate
  modified_base 23: mod_base = OTHER; note = 2'-O-methyladenosine
ttggtagcggaagggcgaggtga

SEQ ID NO: 894 - RNA, 23 nt, synthetic construct
  source 1..23: mol_type = other RNA
  modified_base 1: mod_base = OTHER; note = 2'-O-methyluridine-3'-phosphorothioate 5'-(E)-Vinylphosphonate
  modified_base 2: mod_base = OTHER; note = 2'-deoxy-2'-fluoroguanosine-3'-phosphorothioate
  modified_base 3: mod_base = OTHER; note = 2'-O-methyladenosine-3'-phosphate
  modified_base 4: mod_base = OTHER; note = 2'-O-methyluridine-3'-phosphate
  modified_base 5: mod_base = OTHER; note = 2'-O-methylguanosine-3'-phosphate
  modified_base 6: mod_base = OTHER; note = 2'-deoxy-2'-fluoroadenosine-3'-phosphate
  modified_base 7: mod_base = OTHER; note = 2'-O-methyluridine-3'-phosphate
  modified_base 8: mod_base = OTHER; note = 2'-deoxy-2'-fluoroguanosine-3'-phosphate
  modified_base 9: mod_base = OTHER; note = 2'-deoxy-2'-fluorocytidine-3'-phosphate
  modified_base 10: mod_base = OTHER; note = 2'-O-methylcytidine-3'-phosphate
  modified_base 11: mod_base = OTHER; note = 2'-O-methylcytidine-3'-phosphate
  modified_base 12: mod_base = OTHER; note = 2'-O-methyladenosine-3'-phosphate
  modified_base 13: mod_base = OTHER; note = 2'-O-methylguanosine-3'-phosphate
  modified_base 14: mod_base = OTHER; note = 2'-deoxy-2'-fluorocytidine-3'-phosphate
  modified_base 15: mod_base = OTHER; note = 2'-O-methylguanosine-3'-phosphate
  modified_base 16: mod_base = OTHER; note = 2'-deoxy-2'-fluorouridine-3'-phosphate
  modified_base 17: mod_base = OTHER; note = 2'-O-methylcytidine-3'-phosphate
  modified_base 18: mod_base = OTHER; note = 2'-O-methyluridine-3'-phosphate
  modified_base 19: mod_base = OTHER; note = 2'-O-methyluridine-3'-phosphate
  modified_base 20: mod_base = OTHER; note = 2'-O-methylguanosine-3'-phosphate
  modified_base 21: mod_base = OTHER; note = 2'-O-methyladenosine-3'-phosphorothioate
  modified_base 22: mod_base = OTHER; note = 2'-O-methylguanosine-3'-phosphorothioate
  modified_base 23: mod_base = OTHER; note = 2'-O-methylcytidine
tgatgatgcccagcgtcttgagc

SEQ ID NO: 895 - RNA, 23 nt, synthetic construct
  source 1..23: mol_type = other RNA
  modified_base 1: mod_base = OTHER; note = 2'-O-methyluridine-3'-phosphorothioate 5'-(E)-Vinylphosphonate
  modified_base 2: mod_base = OTHER; note = 2'-deoxy-2'-fluoroadenosine-3'-phosphorothioate
  modified_base 3: mod_base = OTHER; note = 2'-O-methylcytidine-3'-phosphate
  modified_base 4: mod_base = OTHER; note = 2'-O-methyladenosine-3'-phosphate
  modified_base 5: mod_base = OTHER; note = 2'-O-methyluridine-3'-phosphate
  modified_base 6: mod_base = OTHER; note = 2'-deoxy-2'-fluorocytidine-3'-phosphate
  modified_base 7: mod_base = OTHER; note = 2'-O-methyladenosine-3'-phosphate
  modified_base 8: mod_base = OTHER; note = 2'-deoxy-2'-fluoroguanosine-3'-phosphate
  modified_base 9: mod_base = OTHER; note = 2'-deoxy-2'-fluorocytidine-3'-phosphate
  modified_base 10: mod_base = OTHER; note = 2'-O-methyladenosine-3'-phosphate
  modified_base 11: mod_base = OTHER; note = 2'-O-methyladenosine-3'-phosphate
  modified_base 12: mod_base = OTHER; note = 2'-O-methylguanosine-3'-phosphate
  modified_base 13: mod_base = OTHER; note = 2'-O-methylcytidine-3'-phosphate
  modified_base 14: mod_base = OTHER; note = 2'-deoxy-2'-fluorocytidine-3'-phosphate
  modified_base 15: mod_base = OTHER; note = 2'-O-methyladenosine-3'-phosphate
  modified_base 16: mod_base = OTHER; note = 2'-deoxy-2'-fluorocytidine-3'-phosphate
  modified_base 17: mod_base = OTHER; note = 2'-O-methyluridine-3'-phosphate
  modified_base 18: mod_base = OTHER; note = 2'-O-methylcytidine-3'-phosphate
  modified_base 19: mod_base = OTHER; note = 2'-O-methyluridine-3'-phosphate
  modified_base 20: mod_base = OTHER; note = 2'-O-methylcytidine-3'-phosphate
  modified_base 21: mod_base = OTHER; note = 2'-O-methylcytidine-3'-phosphorothioate
  modified_base 22: mod_base = OTHER; note = 2'-O-methylcytidine-3'-phosphorothioate
  modified_base 23: mod_base = OTHER; note = 2'-O-methyladenosine
tacatcagcaagccactctccca

SEQ ID NO: 896 - RNA, 23 nt, synthetic construct
  source 1..23: mol_type = other RNA
  modified_base 1: mod_base = OTHER; note = 2'-O-methyluridine-3'-phosphorothioate 5'-(E)-Vinylphosphonate
  modified_base 2: mod_base = OTHER; note = 2'-deoxy-2'-fluorouridine-3'-phosphorothioate
  modified_base 3: mod_base = OTHER; note = 2'-O-methyluridine-3'-phosphate
  modified_base 4: mod_base = OTHER; note = 2'-O-methylguanosine-3'-phosphate
  modified_base 5: mod_base = OTHER; note = 2'-O-methylcytidine-3'-phosphate
  modified_base 6: mod_base = OTHER; note = 2'-deoxy-2'-fluorocytidine-3'-phosphate
  modified_base 7: mod_base = OTHER; note = 2'-O-methylcytidine-3'-phosphate
  modified_base 8: mod_base = OTHER; note = 2'-deoxy-2'-fluoroguanosine-3'-phosphate
  modified_base 9: mod_base = OTHER; note = 2'-deoxy-2'-fluorocytidine-3'-phosphate
  modified_base 10: mod_base = OTHER; note = 2'-O-methylcytidine-3'-phosphate
  modified_base 11: mod_base = OTHER; note = 2'-O-methyladenosine-3'-phosphate
  modified_base 12: mod_base = OTHER; note = 2'-O-methylcytidine-3'-phosphate
  modified_base 13: mod_base = OTHER; note = 2'-O-methylguanosine-3'-phosphate
  modified_base 14: mod_base = OTHER; note = 2'-deoxy-2'-fluoroadenosine-3'-phosphate
  modified_base 15: mod_base = OTHER; note = 2'-O-methyluridine-3'-phosphate
  modified_base 16: mod_base = OTHER; note = 2'-deoxy-2'-fluoroguanosine-3'-phosphate
  modified_base 17: mod_base = OTHER; note = 2'-O-methyladenosine-3'-phosphate
  modified_base 18: mod_base = OTHER; note = 2'-O-methylguanosine-3'-phosphate
  modified_base 19: mod_base = OTHER; note = 2'-O-methylcytidine-3'-phosphate
  modified_base 20: mod_base = OTHER; note = 2'-O-methyladenosine-3'-phosphate
  modified_base 21: mod_base = OTHER; note = 2'-O-methylguanosine-3'-phosphorothioate
  modified_base 22: mod_base = OTHER; note = 2'-O-methylcytidine-3'-phosphorothioate
  modified_base 23: mod_base = OTHER; note = 2'-O-methyladenosine
tttgcccgccacgatgagcagca

SEQ ID NO: 897 - RNA, 23 nt, synthetic construct
  source 1..23: mol_type = other RNA
  modified_base 1: mod_base = OTHER; note = 2'-O-methyluridine-3'-phosphorothioate 5'-(E)-Vinylphosphonate
  modified_base 2: mod_base = OTHER; note = 2'-deoxy-2'-fluorouridine-3'-phosphorothioate
  modified_base 3: mod_base = OTHER; note = 2'-O-methyluridine-3'-phosphate
  modified_base 4: mod_base = OTHER; note = 2'-O-methylcytidine-3'-phosphate
  modified_base 5: mod_base = OTHER; note = 2'-O-methyluridine-3'-phosphate
  modified_base 6: mod_base = OTHER; note = 2'-deoxy-2'-fluorocytidine-3'-phosphate
  modified_base 7: mod_base = OTHER; note = 2'-O-methylcytidine-3'-phosphate
  modified_base 8: mod_base = OTHER; note = 2'-deoxy-2'-fluorouridine-3'-phosphate
  modified_base 9: mod_base = OTHER; note = 2'-deoxy-2'-fluorocytidine-3'-phosphate
  modified_base 10: mod_base = OTHER; note = 2'-O-methyluridine-3'-phosphate
  modified_base 11: mod_base = OTHER; note = 2'-O-methylcytidine-3'-phosphate
  modified_base 12: mod_base = OTHER; note = 2'-O-methyluridine-3'-phosphate
  modified_base 13: mod_base = OTHER; note = 2'-O-methylcytidine-3'-phosphate
  modified_base 14: mod_base = OTHER; note = 2'-deoxy-2'-fluorouridine-3'-phosphate
  modified_base 15: mod_base = OTHER; note = 2'-O-methylguanosine-3'-phosphate
  modified_base 16: mod_base = OTHER; note = 2'-deoxy-2'-fluoroguanosine-3'-phosphate
  modified_base 17: mod_base = OTHER; note = 2'-O-methylcytidine-3'-phosphate
  modified_base 18: mod_base = OTHER; note = 2'-O-methyluridine-3'-phosphate
  modified_base 19: mod_base = OTHER; note = 2'-O-methylguanosine-3'-phosphate
  modified_base 20: mod_base = OTHER; note = 2'-O-methylguanosine-3'-phosphate
  modified_base 21: mod_base = OTHER; note = 2'-O-methyluridine-3'-phosphorothioate
  modified_base 22: mod_base = OTHER; note = 2'-O-methyladenosine-3'-phosphorothioate
  modified_base 23: mod_base = OTHER; note = 2'-O-methylguanosine
tttctcctctctctggctggtag

SEQ ID NO: 898 - RNA, 23 nt, synthetic construct
  source 1..23: mol_type = other RNA
  modified_base 1: mod_base = OTHER; note = 2'-O-methyluridine-3'-phosphorothioate 5'-(E)-Vinylphosphonate
  modified_base 2: mod_base = OTHER; note = 2'-deoxy-2'-fluorocytidine-3'-phosphorothioate
  modified_base 3: mod_base = OTHER; note = 2'-O-methylguanosine-3'-phosphate
  modified_base 4: mod_base = OTHER; note = 2'-O-methyladenosine-3'-phosphate
  modified_base 5: mod_base = OTHER; note = 2'-O-methyluridine-3'-phosphate
  modified_base 6: mod_base = OTHER; note = 2'-deoxy-2'-fluoroguanosine-3'-phosphate
  modified_base 7: mod_base = OTHER; note = 2'-O-methylguanosine-3'-phosphate
  modified_base 8: mod_base = OTHER; note = 2'-deoxy-2'-fluorocytidine-3'-phosphate
  modified_base 9: mod_base = OTHER; note = 2'-deoxy-2'-fluorocytidine-3'-phosphate
  modified_base 10: mod_base = OTHER; note = 2'-O-methyladenosine-3'-phosphate
  modified_base 11: mod_base = OTHER; note = 2'-O-methylcytidine-3'-phosphate
  modified_base 12: mod_base = OTHER; note = 2'-O-methylguanosine-3'-phosphate
  modified_base 13: mod_base = OTHER; note = 2'-O-methyladenosine-3'-phosphate
  modified_base 14: mod_base = OTHER; note = 2'-deoxy-2'-fluorouridine-3'-phosphate
  modified_base 15: mod_base = OTHER; note = 2'-O-methylcytidine-3'-phosphate
  modified_base 16: mod_base = OTHER; note = 2'-deoxy-2'-fluoroadenosine-3'-phosphate
  modified_base 17: mod_base = OTHER; note = 2'-O-methylcytidine-3'-phosphate
  modified_base 18: mod_base = OTHER; note = 2'-O-methylcytidine-3'-phosphate
  modified_base 19: mod_base = OTHER; note = 2'-O-methyladenosine-3'-phosphate
  modified_base 20: mod_base = OTHER; note = 2'-O-methylguanosine-3'-phosphate
  modified_base 21: mod_base = OTHER; note = 2'-O-methylcytidine-3'-phosphorothioate
  modified_base 22: mod_base = OTHER; note = 2'-O-methyladenosine-3'-phosphorothioate
  modified_base 23: mod_base = OTHER; note = 2'-O-methylcytidine
tcgatggccacgatcaccagcac

SEQ ID NO: 899 - RNA, 23 nt, synthetic construct
  source 1..23: mol_type = other RNA
  modified_base 1: mod_base = OTHER; note = 2'-O-methyluridine-3'-phosphorothioate 5'-(E)-Vinylphosphonate
  modified_base 2: mod_base = OTHER; note = 2'-deoxy-2'-fluorouridine-3'-phosphorothioate
  modified_base 3: mod_base = OTHER; note = 2'-O-methylguanosine-3'-phosphate
  modified_base 4: mod_base = OTHER; note = 2'-O-methylguanosine-3'-phosphate
  modified_base 5: mod_base = OTHER; note = 2'-O-methyladenosine-3'-phosphate
  modified_base 6: mod_base = OTHER; note = 2'-deoxy-2'-fluoroadenosine-3'-phosphate
  modified_base 7: mod_base = OTHER; note = 2'-O-methylguanosine-3'-phosphate
  modified_base 8: mod_base = OTHER; note = 2'-deoxy-2'-fluoroadenosine-3'-phosphate
  modified_base 9: mod_base = OTHER; note = 2'-deoxy-2'-fluoroguanosine-3'-phosphate
  modified_base 10: mod_base = OTHER; note = 2'-O-methylcytidine-3'-phosphate
  modified_base 11: mod_base = OTHER; note = 2'-O-methylcytidine-3'-phosphate
  modified_base 12: mod_base = OTHER; note = 2'-O-methylguanosine-3'-phosphate
  modified_base 13: mod_base = OTHER; note = 2'-O-methylcytidine-3'-phosphate
  modified_base 14: mod_base = OTHER; note = 2'-deoxy-2'-fluorocytidine-3'-phosphate
  modified_base 15: mod_base = OTHER; note = 2'-O-methylguanosine-3'-phosphate
  modified_base 16: mod_base = OTHER; note = 2'-deoxy-2'-fluoroguanosine-3'-phosphate
  modified_base 17: mod_base = OTHER; note = 2'-O-methylguanosine-3'-phosphate
  modified_base 18: mod_base = OTHER; note = 2'-O-methyladenosine-3'-phosphate
  modified_base 19: mod_base = OTHER; note = 2'-O-methylcytidine-3'-phosphate
  modified_base 20: mod_base = OTHER; note = 2'-O-methyluridine-3'-phosphate
  modified_base 21: mod_base = OTHER; note = 2'-O-methyluridine-3'-phosphorothioate
  modified_base 22: mod_base = OTHER; note = 2'-O-methylcytidine-3'-phosphorothioate
  modified_base 23: mod_base = OTHER; note = 2'-O-methyladenosine
ttggaagagccgccgggacttca

SEQ ID NO: 900 - RNA, 23 nt, synthetic construct
  source 1..23: mol_type = other RNA
  modified_base 1: mod_base = OTHER; note = 2'-O-methyluridine-3'-phosphorothioate 5'-(E)-Vinylphosphonate
  modified_base 2: mod_base = OTHER; note = 2'-deoxy-2'-fluoroadenosine-3'-phosphorothioate
  modified_base 3: mod_base = OTHER; note = 2'-O-methylguanosine-3'-phosphate
  modified_base 4: mod_base = OTHER; note = 2'-O-methyladenosine-3'-phosphate
  modified_base 5: mod_base = OTHER; note = 2'-O-methyladenosine-3'-phosphate
  modified_base 6: mod_base = OTHER; note = 2'-deoxy-2'-fluoroadenosine-3'-phosphate
  modified_base 7: mod_base = OTHER; note = 2'-O-methyluridine-3'-phosphate
  modified_base 8: mod_base = OTHER; note = 2'-deoxy-2'-fluorocytidine-3'-phosphate
  modified_base 9: mod_base = OTHER; note = 2'-deoxy-2'-fluorocytidine-3'-phosphate
  modified_base 10: mod_base = OTHER; note = 2'-O-methylcytidine-3'-phosphate
  modified_base 11: mod_base = OTHER; note = 2'-O-methyluridine-3'-phosphate
  modified_base 12: mod_base = OTHER; note = 2'-O-methylcytidine-3'-phosphate
  modified_base 13: mod_base = OTHER; note = 2'-O-methyladenosine-3'-phosphate
  modified_base 14: mod_base = OTHER; note = 2'-deoxy-2'-fluoroguanosine-3'-phosphate
  modified_base 15: mod_base = OTHER; note = 2'-O-methylcytidine-3'-phosphate
  modified_base 16: mod_base = OTHER; note = 2'-deoxy-2'-fluorocytidine-3'-phosphate
  modified_base 17: mod_base = OTHER; note = 2'-O-methyluridine-3'-phosphate
  modified_base 18: mod_base = OTHER; note = 2'-O-methylguanosine-3'-phosphate
  modified_base 19: mod_base = OTHER; note = 2'-O-methyladenosine-3'-phosphate
  modified_base 20: mod_base = OTHER; note = 2'-O-methylcytidine-3'-phosphate
  modified_base 21: mod_base = OTHER; note = 2'-O-methylcytidine-3'-phosphorothioate
  modified_base 22: mod_base = OTHER; note = 2'-O-methyladenosine-3'-phosphorothioate
  modified_base 23: mod_base = OTHER; note = 2'-O-methylcytidine
tagaaatccctcagcctgaccac

SEQ ID NO: 901 - RNA, 23 nt, synthetic construct
  source 1..23: mol_type = other RNA
  modified_base 1: mod_base = OTHER; note = 2'-O-methyluridine-3'-phosphorothioate 5'-(E)-Vinylphosphonate
  modified_base 2: mod_base = OTHER; note = 2'-deoxy-2'-fluoroadenosine-3'-phosphorothioate
  modified_base 3: mod_base = OTHER; note = 2'-O-methylcytidine-3'-phosphate
  modified_base 4: mod_base = OTHER; note = 2'-O-methylguanosine-3'-phosphate
  modified_base 5: mod_base = OTHER; note = 2'-O-methylcytidine-3'-phosphate
  modified_base 6: mod_base = OTHER; note = 2'-deoxy-2'-fluoroadenosine-3'-phosphate
  modified_base 7: mod_base = OTHER; note = 2'-O-methylcytidine-3'-phosphate
  modified_base 8: mod_base = OTHER; note = 2'-deoxy-2'-fluoroadenosine-3'-phosphate
  modified_base 9: mod_base = OTHER; note = 2'-deoxy-2'-fluoroguanosine-3'-phosphate
  modified_base 10: mod_base = OTHER; note = 2'-O-methylcytidine-3'-phosphate
  modified_base 11: mod_base = OTHER; note = 2'-O-methyladenosine-3'-phosphate
  modified_base 12: mod_base = OTHER; note = 2'-O-methylcytidine-3'-phosphate
  modified_base 13: mod_base = OTHER; note = 2'-O-methylguanosine-3'-phosphate
  modified_base 14: mod_base = OTHER; note = 2'-deoxy-2'-fluorouridine-3'-phosphate
  modified_base 15: mod_base = OTHER; note = 2'-O-methylcytidine-3'-phosphate
  modified_base 16: mod_base = OTHER; note = 2'-deoxy-2'-fluorocytidine-3'-phosphate
  modified_base 17: mod_base = OTHER; note = 2'-O-methyladenosine-3'-phosphate
  modified_base 18: mod_base = OTHER; note = 2'-O-methylcytidine-3'-phosphate
  modified_base 19: mod_base = OTHER; note = 2'-O-methyluridine-3'-phosphate
  modified_base 20: mod_base = OTHER; note = 2'-O-methylguanosine-3'-phosphate
  modified_base 21: mod_base = OTHER; note = 2'-O-methyladenosine-3'-phosphorothioate
  modified_base 22: mod_base = OTHER; note = 2'-O-methylguanosine-3'-phosphorothioate
  modified_base 23: mod_base = OTHER; note = 2'-O-methylguanosine
tacgcacagcacgtccactgagg

SEQ ID NO: 902 - RNA, 23 nt, synthetic construct
  source 1..23: mol_type = other RNA
  modified_base 1: mod_base = OTHER; note = 2'-O-methyluridine-3'-phosphorothioate 5'-(E)-Vinylphosphonate
  modified_base 2: mod_base = OTHER; note = 2'-deoxy-2'-fluorouridine-3'-phosphorothioate
  modified_base 3: mod_base = OTHER; note = 2'-O-methylcytidine-3'-phosphate
  modified_base 4: mod_base = OTHER; note = 2'-O-methylguanosine-3'-phosphate
  modified_base 5: mod_base = OTHER; note = 2'-O-methylcytidine-3'-phosphate
  modified_base 6: mod_base = OTHER; note = 2'-deoxy-2'-fluoroguanosine-3'-phosphate
  modified_base 7: mod_base = OTHER; note = 2'-O-methylguanosine-3'-phosphate
  modified_base 8: mod_base = OTHER; note = 2'-deoxy-2'-fluoroadenosine-3'-phosphate
  modified_base 9: mod_base = OTHER; note = 2'-deoxy-2'-fluoroadenosine-3'-phosphate
  modified_base 10: mod_base = OTHER; note = 2'-O-methylcytidine-3'-phosphate
  modified_base 11: mod_base = OTHER; note = 2'-O-methyladenosine-3'-phosphate
  modified_base 12: mod_base = OTHER; note = 2'-O-methylcytidine-3'-phosphate
  modified_base 13: mod_base = OTHER; note = 2'-O-methylcytidine-3'-phosphate
  modified_base 14: mod_base = OTHER; note = 2'-deoxy-2'-fluorocytidine-3'-phosphate
  modified_base 15: mod_base = OTHER; note = 2'-O-methylguanosine-3'-phosphate
  modified_base 16: mod_base = OTHER; note = 2'-deoxy-2'-fluorocytidine-3'-phosphate
  modified_base 17: mod_base = OTHER; note = 2'-O-methyladenosine-3'-phosphate
  modified_base 18: mod_base = OTHER; note = 2'-O-methylguanosine-3'-phosphate
  modified_base 19: mod_base = OTHER; note = 2'-O-methylguanosine-3'-phosphate
  modified_base 20: mod_base = OTHER; note = 2'-O-methyluridine-3'-phosphate
  modified_base 21: mod_base = OTHER; note = 2'-O-methyladenosine-3'-phosphorothioate
  modified_base 22: mod_base = OTHER; note = 2'-O-methylcytidine-3'-phosphorothioate
  modified_base 23: mod_base = OTHER; note = 2'-O-methyladenosine
ttcgcggaacacccgcaggtaca

SEQ ID NO: 903 - RNA, 23 nt, synthetic construct
  source 1..23: mol_type = other RNA
  modified_base 1: mod_base = OTHER; note = 2'-O-methyluridine-3'-phosphorothioate 5'-(E)-Vinylphosphonate
  modified_base 2: mod_base = OTHER; note = 2'-deoxy-2'-fluoroguanosine-3'-phosphorothioate
  modified_base 3: mod_base = OTHER; note = 2'-O-methylguanosine-3'-phosphate
  modified_base 4: mod_base = OTHER; note = 2'-O-methylcytidine-3'-phosphate
  modified_base 5: mod_base = OTHER; note = 2'-O-methylcytidine-3'-phosphate
  modified_base 6: mod_base = OTHER; note = 2'-deoxy-2'-fluoroguanosine-3'-phosphate
  modified_base 7: mod_base = OTHER; note = 2'-O-methylguanosine-3'-phosphate
  modified_base 8: mod_base = OTHER; note = 2'-deoxy-2'-fluoroadenosine-3'-phosphate
  modified_base 9: mod_base = OTHER; note = 2'-deoxy-2'-fluorocytidine-3'-phosphate
  modified_base 10: mod_base = OTHER; note = 2'-O-methylcytidine-3'-phosphate
  modified_base 11: mod_base = OTHER; note = 2'-O-methyladenosine-3'-phosphate
  modified_base 12: mod_base = OTHER; note = 2'-O-methylcytidine-3'-phosphate
  modified_base 13: mod_base = OTHER; note = 2'-O-methyladenosine-3'-phosphate
  modified_base 14: mod_base = OTHER; note = 2'-deoxy-2'-fluoroadenosine-3'-phosphate
  modified_base 15: mod_base = OTHER; note = 2'-O-methyladenosine-3'-phosphate
  modified_base 16: mod_base = OTHER; note = 2'-deoxy-2'-fluorocytidine-3'-phosphate
  modified_base 17: mod_base = OTHER; note = 2'-O-methyladenosine-3'-phosphate
  modified_base 18: mod_base = OTHER; note = 2'-O-methylguanosine-3'-phosphate
  modified_base 19: mod_base = OTHER; note = 2'-O-methyladenosine-3'-phosphate
  modified_base 20: mod_base = OTHER; note = 2'-O-methyladenosine-3'-phosphate
  modified_base 21: mod_base = OTHER; note = 2'-O-methyladenosine-3'-phosphorothioate
  modified_base 22: mod_base = OTHER; note = 2'-O-methyladenosine-3'-phosphorothioate
  modified_base 23: mod_base = OTHER; note = 2'-O-methyladenosine
tggccggaccacaaacagaaaaa

SEQ ID NO: 904 - RNA, 23 nt, synthetic construct
  source 1..23: mol_type = other RNA
  modified_base 1: mod_base = OTHER; note = 2'-O-methyluridine-3'-phosphorothioate 5'-(E)-Vinylphosphonate
  modified_base 2: mod_base = OTHER; note = 2'-deoxy-2'-fluoroadenosine-3'-phosphorothioate
  modified_base 3: mod_base = OTHER; note = 2'-O-methyluridine-3'-phosphate
  modified_base 4: mod_base = OTHER; note = 2'-O-methylguanosine-3'-phosphate
  modified_base 5: mod_base = OTHER; note = 2'-O-methylguanosine-3'-phosphate
  modified_base 6: mod_base = OTHER; note = 2'-deoxy-2'-fluorocytidine-3'-phosphate
  modified_base 7: mod_base = OTHER; note = 2'-O-methylguanosine-3'-phosphate
  modified_base 8: mod_base = OTHER; note = 2'-deoxy-2'-fluorouridine-3'-phosphate
  modified_base 9: mod_base = OTHER; note = 2'-deoxy-2'-fluoroadenosine-3'-phosphate
  modified_base 10: mod_base = OTHER; note = 2'-O-methylguanosine-3'-phosphate
  modified_base 11: mod_base = OTHER; note = 2'-O-methylguanosine-3'-phosphate
  modified_base 12: mod_base = OTHER; note = 2'-O-methylcytidine-3'-phosphate
  modified_base 13: mod_base = OTHER; note = 2'-O-methylcytidine-3'-phosphate
  modified_base 14: mod_base = OTHER; note = 2'-deoxy-2'-fluorocytidine-3'-phosphate
  modified_base 15: mod_base = OTHER; note = 2'-O-methylguanosine-3'-phosphate
  modified_base 16: mod_base = OTHER; note = 2'-deoxy-2'-fluoroguanosine-3'-phosphate
  modified_base 17: mod_base = OTHER; note = 2'-O-methyluridine-3'-phosphate
  modified_base 18: mod_base = OTHER; note = 2'-O-methyluridine-3'-phosphate
  modified_base 19: mod_base = OTHER; note = 2'-O-methylguanosine-3'-phosphate
  modified_base 20: mod_base = OTHER; note = 2'-O-methylguanosine-3'-phosphate
  modified_base 21: mod_base = OTHER; note = 2'-O-methyluridine-3'-phosphorothioate
  modified_base 22: mod_base = OTHER; note = 2'-O-methylguanosine-3'-phosphorothioate
  modified_base 23: mod_base = OTHER; note = 2'-O-methyladenosine
tatggcgtaggcccggttggtga

SEQ ID NO: 905 - RNA, 23 nt, synthetic construct
  source 1..23: mol_type = other RNA
tgtaaattctacttcctcttgtg

SEQ ID NO: 906 - RNA, 23 nt, synthetic construct
  source 1..23: mol_type = other RNA
aaattcaaactctacttctgttg

SEQ ID NO: 907 - RNA, 23 nt, synthetic construct
  source 1..23: mol_type = other RNA
actcctttatcatggtactgtaa

SEQ ID NO: 908 - RNA, 23 nt, synthetic construct
  source 1..23: mol_type = other RNA
tcaagaaatgttaagctcttctt

SEQ ID NO: 909 - RNA, 23 nt, synthetic construct
  source 1..23: mol_type = other RNA
acctttttatactcctttatcat

SEQ ID NO: 910 - RNA, 23 nt, synthetic construct
  source 1..23: mol_type = other RNA
tcattgggaaaatacctttttat

SEQ ID NO: 911 - RNA, 23 nt, synthetic construct
  source 1..23: mol_type = other RNA
tcaagacatatttccttttgctt

SEQ ID NO: 912 - RNA, 23 nt, synthetic construct
  source 1..23: mol_type = other RNA
ctctacttctgttgtctagtatg

SEQ ID NO: 913 - RNA, 23 nt, synthetic construct
  source 1..23: mol_type = other RNA
acagtgttaggaattacaaaatc

SEQ ID NO: 914 - RNA, 23 nt, synthetic construct
  source 1..23: mol_type = other RNA
aaatcacgtttcaagaaatgtta

SEQ ID NO: 915 - RNA, 23 nt, synthetic construct
  source 1..23: mol_type = other RNA
gagtggttcaaaatgccattttt

SEQ ID NO: 916 - RNA, 23 nt, synthetic construct
  source 1..23: mol_type = other RNA
gacttgtttatattaaacagctt

SEQ ID NO: 917 - RNA, 23 nt, synthetic construct
  source 1..23: mol_type = other RNA
ctgtgtttacttaagaccgatag

SEQ ID NO: 918 - RNA, 23 nt, synthetic construct
  source 1..23: mol_type = other RNA
ctttccagagaaatttcatttta

SEQ ID NO: 919 - RNA, 23 nt, synthetic construct
  source 1..23: mol_type = other RNA
actgtaactgtatccatattata

SEQ ID NO: 920 - RNA, 23 nt, synthetic construct
  source 1..23: mol_type = other RNA
tctgctgttatgaaagcaaagag

SEQ ID NO: 921 - RNA, 23 nt, synthetic construct
  source 1..23: mol_type = other RNA
tctagtatgttattgagctaatg

SEQ ID NO: 922 - RNA, 23 nt, synthetic construct
  source 1..23: mol_type = other RNA
gttttaccaagtatttatactct

SEQ ID NO: 923 - RNA, 23 nt, synthetic construct
  source 1..23: mol_type = other RNA
cgcctcttcgtcttcttcaactg

SEQ ID NO: 924 - RNA, 23 nt, synthetic construct
  source 1..23: mol_type = other RNA
atgtgcaataaataccaatgaag

SEQ ID NO: 925 - RNA, 23 nt, synthetic construct
  source 1..23: mol_type = other RNA
ctcttgtgtgttttaccaagtat

SEQ ID NO: 926 - RNA, 23 nt, synthetic construct
  source 1..23: mol_type = other RNA
ctcaccaacctcttcatcatgtc

SEQ ID NO: 927 - RNA, 23 nt, synthetic construct
  source 1..23: mol_type = other RNA
taagtaatgatttctgctgttat

SEQ ID NO: 928 - RNA, 23 nt, synthetic construct
  source 1..23: mol_type = other RNA
caggtggtttttgacactctctg

SEQ ID NO: 929 - RNA, 23 nt, synthetic construct
  source 1..23: mol_type = other RNA
tctgtgacatgtgactctgtcaa

SEQ ID NO: 930 - RNA, 23 nt, synthetic construct
  source 1..23: mol_type = other RNA
aatgccatttttgcacagtgtta

SEQ ID NO: 931 - RNA, 23 nt, synthetic construct
  source 1..23: mol_type = other RNA
actaactactgtgtgaggaattg

SEQ ID NO: 932 - RNA, 23 nt, synthetic construct
  source 1..23: mol_type = other RNA
gcacttgtgtgtaaattctactt

SEQ ID NO: 933 - RNA, 23 nt, synthetic construct
  source 1..23: mol_type = other RNA
cagatagaaagacttgtttatat

SEQ ID NO: 934 - RNA, 23 nt, synthetic construct
  source 1..23: mol_type = other RNA
ttaagctcttcttggaacaagcc

SEQ ID NO: 935 - RNA, 23 nt, synthetic construct
  source 1..23: mol_type = other RNA
atccacagaagatgttacttgca

SEQ ID NO: 936 - RNA, 23 nt, synthetic construct
  source 1..23: mol_type = other RNA
actctgtcaattgaagacaggac

SEQ ID NO: 937 - RNA, 23 nt, synthetic construct
  source 1..23: mol_type = other RNA
gagaaacagttcagattactgca

SEQ ID NO: 938 - RNA, 23 nt, synthetic construct
  source 1..23: mol_type = other RNA
ttattgagctaatgattcattgg

SEQ ID NO: 939 - RNA, 23 nt, synthetic construct
  source 1..23: mol_type = other RNA
ttccttttgctttccagagaaat

SEQ ID NO: 940 - RNA, 23 nt, synthetic construct
  source 1..23: mol_type = other RNA
gtgtgatgcatctttagattttt

SEQ ID NO: 941 - RNA, 23 nt, synthetic construct
  source 1..23: mol_type = other RNA
acaatcctcgtctgaatcatccg

SEQ ID NO: 942 - RNA, 23 nt, synthetic construct
  source 1..23: mol_type = other RNA
tgaaagttagcacttgtgtgtaa

SEQ ID NO: 943 - RNA, 23 nt, synthetic construct
  source 1..23: mol_type = other RNA
ggaattacaaaatccacagaaga

SEQ ID NO: 944 - RNA, 23 nt, synthetic construct
  source 1..23: mol_type = other RNA
gaatgacagtttgtcaagacata

SEQ ID NO: 945 - RNA, 23 nt, synthetic construct
  source 1..23: mol_type = other RNA
ctgggcagatcttaaataaaatt

SEQ ID NO: 946 - RNA, 23 nt, synthetic construct
  source 1..23: mol_type = other RNA
gggattaaaatcgatcatcgtgg

SEQ ID NO: 947 - RNA, 23 nt, synthetic construct
  source 1..23: mol_type = other RNA
gcttgctgatgttccttgttgtt

SEQ ID NO: 948 - RNA, 23 nt, synthetic construct
  source 1..23: mol_type = other RNA
ttctacctcacactgtgcatttg

SEQ ID NO: 949 - RNA, 23 nt, synthetic construct
  source 1..23: mol_type = other RNA
atgtatcaatattagttggaagg

SEQ ID NO: 950 - RNA, 23 nt, synthetic construct
  source 1..23: mol_type = other RNA
tcagattactgcacatgtggata

SEQ ID NO: 951 - RNA, 23 nt, synthetic construct
  source 1..23: mol_type = other RNA
ctgagggatttctacctcacact

SEQ ID NO: 952 - RNA, 23 nt, synthetic construct
  source 1..23: mol_type = other RNA
attgaagacaggacattaaaaga

SEQ ID NO: 953 - RNA, 23 nt, synthetic construct
  source 1..23: mol_type = other RNA
acgaggagatctgtgtttactta

SEQ ID NO: 954 - RNA, 23 nt, synthetic construct
  source 1..23: mol_type = other RNA
atactctggtgcaactaactact

SEQ ID NO: 955 - RNA, 23 nt, synthetic construct
  source 1..23: mol_type = other RNA
cccaccttgctttccttgtgtag

SEQ ID NO: 956 - RNA, 23 nt, synthetic construct
  source 1..23: mol_type = other RNA
cgtccgtagtctccttctacgtg

SEQ ID NO: 957 - RNA, 23 nt, synthetic construct
  source 1..23: mol_type = other RNA
atttgctggtgaaagttagcact

SEQ ID NO: 958 - RNA, 23 nt, synthetic construct
  source 1..23: mol_type = other RNA
ggctccttcttctgcgagctgtg

SEQ ID NO: 959 - RNA, 23 nt, synthetic construct
  source 1..23: mol_type = other RNA
gaggaattggtccatgtgcaata

SEQ ID NO: 960 - RNA, 23 nt, synthetic construct
  source 1..23: mol_type = other RNA
tctgaatcatccgaggcaaagag

SEQ ID NO: 961 - RNA, 23 nt, synthetic construct
  source 1..23: mol_type = other RNA
tgaaagcaaagagaaaggatgga

SEQ ID NO: 962 - RNA, 23 nt, synthetic construct
  source 1..23: mol_type = other RNA
cttcttttgtgtgtgcgtgtgat

SEQ ID NO: 963 - RNA, 23 nt, synthetic construct
  source 1..23: mol_type = other RNA
gtgcatttgcacagcagatagaa

SEQ ID NO: 964 - RNA, 23 nt, synthetic construct
  source 1..23: mol_type = other RNA
aaaggaaagtttgggaagggatg

SEQ ID NO: 965 - RNA, 23 nt, synthetic construct
  source 1..23: mol_type = other RNA
agagcctctctctgtgacatgtg

SEQ ID NO: 966 - RNA, 23 nt, synthetic construct
  source 1..23: mol_type = other RNA
atgggcgtcttcacgctctgctg

SEQ ID NO: 967 - RNA, 23 nt, synthetic construct
  source 1..23: mol_type = other RNA
agagaaaggatggaggcaaaata

SEQ ID NO: 968 - RNA, 23 nt, synthetic construct
  source 1..23: mol_type = other RNA
aggacattaaaagagagcgagag

SEQ ID NO: 969 - RNA, 23 nt, synthetic construct
  source 1..23: mol_type = other RNA
cccgggaacaggaacacactacc

SEQ ID NO: 970 - RNA, 23 nt, synthetic construct
  source 1..23: mol_type = other RNA
agagagaggagaatgacagtttg

SEQ ID NO: 971 - RNA, 23 nt, synthetic construct
  source 1..23: mol_type = other RNA
tgctgcgacttcgtcaccaaccg

SEQ ID NO: 972 - RNA, 23 nt, synthetic construct
  source 1..23: mol_type = other RNA
ctgcccttcttcctggccaacgt

SEQ ID NO: 973 - RNA, 23 nt, synthetic construct
  source 1..23: mol_type = other RNA
cttaagaccgatagcaggtgaac

SEQ ID NO: 974 - RNA, 23 nt, synthetic construct
  source 1..23: mol_type = other RNA
caggtgaagaagatcgacagctg

SEQ ID NO: 975 - RNA, 23 nt, synthetic construct
  source 1..23: mol_type = other RNA
cccacgtgaatttgctggtgaaa

SEQ ID NO: 976 - RNA, 23 nt, synthetic construct
  source 1..23: mol_type = other RNA
agagcgagagagagaaacagttc

SEQ ID NO: 977 - RNA, 23 nt, synthetic construct
  source 1..23: mol_type = other RNA
ccgaggcaaagagaaaagccacg

SEQ ID NO: 978 - RNA, 23 nt, synthetic construct
  source 1..23: mol_type = other RNA
ctgcccatcctcatgcactggtg

SEQ ID NO: 979 - RNA, 23 nt, synthetic construct
  source 1..23: mol_type = other RNA
agaccctgtgtgtcattgccctg

SEQ ID NO: 980 - RNA, 23 nt, synthetic construct
  source 1..23: mol_type = other RNA
gatagcaggtgaactcgaagccc

SEQ ID NO: 981 - RNA, 23 nt, synthetic construct
  source 1..23: mol_type = other RNA
tggcgctcatcgtgctgctcatc

SEQ ID NO: 982 - RNA, 23 nt, synthetic construct
  source 1..23: mol_type = other RNA
ccctgtgcatcatggccttcgtg

SEQ ID NO: 983 - RNA, 23 nt, synthetic construct
  source 1..23: mol_type = other RNA
ctcccatccctttcccgggaaca

SEQ ID NO: 984 - RNA, 23 nt, synthetic construct
  source 1..23: mol_type = other RNA
cgcctcggaatccaaggtgtagg

SEQ ID NO: 985 - RNA, 23 nt, synthetic construct
  source 1..23: mol_type = other RNA
tcgaagcccacaatcctcgtctg

SEQ ID NO: 986 - RNA, 23 nt, synthetic construct
  source 1..23: mol_type = other RNA
tcatggccttcgtgtacctgcgg

SEQ ID NO: 987 - RNA, 23 nt, synthetic construct
  source 1..23: mol_type = other RNA
ttttatgtccaagtgcccacgtg

SEQ ID NO: 988 - RNA, 23 nt, synthetic construct
  source 1..23: mol_type = other RNA
ttgacactctctgagaggaccgg

SEQ ID NO: 989 - RNA, 23 nt, synthetic construct
  source 1..23: mol_type = other RNA
acgacgacgacgatgtcgtcggg

SEQ ID NO: 990 - RNA, 23 nt, synthetic construct
  source 1..23: mol_type = other RNA
tcatcgtggctcccatccctttc

SEQ ID NO: 991 - RNA, 23 nt, synthetic construct
  source 1..23: mol_type = other RNA
ccctggtgtccttcctgcccatc

SEQ ID NO: 992 - RNA, 23 nt, synthetic construct
  source 1..23: mol_type = other RNA
ggaagggagaagcattaggaggg

SEQ ID NO: 993 - RNA, 23 nt, synthetic construct
  source 1..23: mol_type = other RNA
gccgctgtctcagcagtggacag

SEQ ID NO: 994 - RNA, 23 nt, synthetic construct
  source 1..23: mol_type = other RNA
gctacgccaactcggccttcaac

SEQ ID NO: 995 - RNA, 23 nt, synthetic construct
  source 1..23: mol_type = other RNA
acctcgccatcacctcgcccttc

SEQ ID NO: 996 - RNA, 23 nt, synthetic construct
  source 1..23: mol_type = other RNA
tggtccggccttcttttgtgtgt

SEQ ID NO: 997 - RNA, 23 nt, synthetic construct
  source 1..23: mol_type = other RNA
ccatcgcctcgtccgtagtctcc

SEQ ID NO: 998 - RNA, 23 nt, synthetic construct
  source 1..23: mol_type = other RNA
ggcgggcaatgtgctggtgatcg

SEQ ID NO: 999 - RNA, 23 nt, synthetic construct
  source 1..23: mol_type = other RNA
gtcttcttcaactggctgggcta

SEQ ID NO: 1000 - RNA, 23 nt, synthetic construct
  source 1..23: mol_type = other RNA
tccttgtgtagggcaaacccgct

SEQ ID NO: 1001 - RNA, 23 nt, synthetic construct
  source 1..23: mol_type = other RNA
ctggccaacgtggtgaaggcctt

SEQ ID NO: 1002 - RNA, 23 nt, synthetic construct
  source 1..23: mol_type = other RNA
tgggagtacggctccttcttctg

SEQ ID NO: 1003 - RNA, 23 nt, synthetic construct
  source 1..23: mol_type = other RNA
aggcccagaagcaggtgaagaag

SEQ ID NO: 1004 - RNA, 23 nt, synthetic construct
  source 1..23: mol_type = other RNA
agcagaaggcgctcaagacgctg

SEQ ID NO: 1005 - RNA, 23 nt, synthetic construct
  source 1..23: mol_type = other RNA
ccttccgctaccagagcctgctg

SEQ ID NO: 1006 - RNA, 23 nt, synthetic construct
  source 1..23: mol_type = other RNA
gacttccgcaaggccttccaggg

SEQ ID NO: 1007 - RNA, 23 nt, synthetic construct
  source 1..23: mol_type = other RNA
cggagtggaagatgggtgggtta

SEQ ID NO: 1008 - RNA, 23 nt, synthetic construct
  source 1..23: mol_type = other RNA
acggccagcatcgagaccctgtg

SEQ ID NO: 1009 - RNA, 23 nt, synthetic construct
  source 1..23: mol_type = other RNA
ctctgctggctgcccttcttcct

SEQ ID NO: 1010 - RNA, 23 nt, synthetic construct
  source 1..23: mol_type = other RNA
tggaccgctacctcgccatcacc

SEQ ID NO: 1011 - RNA, 23 nt, synthetic construct
  source 1..23: mol_type = other RNA
atcgtggccatcgccaagacgcc

SEQ ID NO: 1012 - RNA, 23 nt, synthetic construct
  source 1..23: mol_type = other RNA
gcatgggtctgctgatggcgctc

SEQ ID NO: 1013 - RNA, 23 nt, synthetic construct
  source 1..23: mol_type = other RNA
ctgggcatcatcatgggcgtctt

SEQ ID NO: 1014 - RNA, 23 nt, synthetic construct
  source 1..23: mol_type = other RNA
aggaacacactaccagccagaga

SEQ ID NO: 1015 - RNA, 23 nt, synthetic construct
  source 1..23: mol_type = other RNA
tcattgccctggaccgctacctc

SEQ ID NO: 1016 - RNA, 23 nt, synthetic construct
  source 1..23: mol_type = other RNA
ccatctcggccctggtgtccttc

SEQ ID NO: 1017 - RNA, 23 nt, synthetic construct
  source 1..23: mol_type = other RNA
acagctgcgagcgccgtttcctc

SEQ ID NO: 1018 - RNA, 23 nt, synthetic construct
  source 1..23: mol_type = other RNA
cccatcatctactgccgcagccc

SEQ ID NO: 1019 - RNA, 23 nt, synthetic construct
  source 1..23: mol_type = other RNA
ctgcagacgctcaccaacctctt

SEQ ID NO: 1020 - RNA, 23 nt, synthetic construct
  source 1..23: mol_type = other RNA
gccttccagggactgctctgctg

SEQ ID NO: 1021 - RNA, 23 nt, synthetic construct
  source 1..23: mol_type = other RNA
ctcttcatcatgtccctggccag

SEQ ID NO: 1022 - RNA, 23 nt, synthetic construct
  source 1..23: mol_type = other RNA
agaaacatgctgaagtcccggcg

SEQ ID NO: 1023 - RNA, 23 nt, synthetic construct
  source 1..23: mol_type = other RNA
tgaaggccttccaccgcgagctg

SEQ ID NO: 1024 - RNA, 23 nt, synthetic construct
  source 1..23: mol_type = other RNA
accaggcgcagagcctctctctg

SEQ ID NO: 1025 - RNA, 23 nt, synthetic construct
  source 1..23: mol_type = other RNA
tccgagcccggtaacctgtcgtc

SEQ ID NO: 1026 - RNA, 23 nt, synthetic construct
  source 1..23: mol_type = other RNA
agctgtggacctcagtggacgtg

SEQ ID NO: 1027 - RNA, 23 nt, synthetic construct
  source 1..23: mol_type = other RNA
aagccacggaccgttgcacaaaa

SEQ ID NO: 1028 - RNA, 23 nt, synthetic construct
  source 1..23: mol_type = other RNA
tcacctcgcccttccgctaccag

SEQ ID NO: 1029 - RNA, 23 nt, synthetic construct
  source 1..23: mol_type = other RNA
gctcaagacgctgggcatcatca

SEQ ID NO: 1030 - RNA, 23 nt, synthetic construct
  source 1..23: mol_type = other RNA
tgggagagtggcttgctgatgtt

SEQ ID NO: 1031 - RNA, 23 nt, synthetic construct
  source 1..23: mol_type = other RNA
tgctgctcatcgtggcgggcaat

SEQ ID NO: 1032 - RNA, 23 nt, synthetic construct
  source 1..23: mol_type = other RNA
ctaccagccagagagaggagaat

SEQ ID NO: 1033 - RNA, 23 nt, synthetic construct
  source 1..23: mol_type = other RNA
gtgctggtgatcgtggccatcgc

SEQ ID NO: 1034 - RNA, 23 nt, synthetic construct
  source 1..23: mol_type = other RNA
tgaagtcccggcggctcttccag

SEQ ID NO: 1035 - RNA, 23 nt, synthetic construct
  source 1..23: mol_type = other RNA
gtggtcaggctgagggatttcta

SEQ ID NO: 1036 - RNA, 23 nt, synthetic construct
  source 1..23: mol_type = other RNA
cctcagtggacgtgctgtgcgtg

SEQ ID NO: 1037 - RNA, 23 nt, synthetic construct
  source 1..23: mol_type = other RNA
tgtacctgcgggtgttccgcgag

SEQ ID NO: 1038 - RNA, 23 nt, synthetic construct
  source 1..23: mol_type = other RNA
tttttctgtttgtggtccggcct

SEQ ID NO: 1039 - RNA, 23 nt, synthetic construct
  source 1..23: mol_type = other RNA
tcaccaaccgggcctacgccatc

SEQ ID NO: 1040 - RNA, 21 nt, synthetic construct
  source 1..21: mol_type = other RNA
aaacatgctgaagtcccggct

SEQ ID NO: 1041 - RNA, 21 nt, synthetic construct
  source 1..21: mol_type = other RNA
aagtcccggcggctcttccat

SEQ ID NO: 1042 - RNA, 21 nt, synthetic construct
  source 1..21: mol_type = other RNA
cgagcccggtaacctgtcgtt

SEQ ID NO: 1043 - RNA, 21 nt, synthetic construct
  source 1..21: mol_type = other RNA
cgctgtctcagcagtggacat

SEQ ID NO: 1044 - RNA, 21 nt, synthetic construct
  source 1..21: mol_type = other RNA
atgggtctgctgatggcgctt

SEQ ID NO: 1045 - RNA, 21 nt, synthetic construct
  source 1..21: mol_type = other RNA
gcgctcatcgtgctgctcatt

SEQ ID NO: 1046 - RNA, 21 nt, synthetic construct
  source 1..21: mol_type = other RNA
ctgctcatcgtggcgggcaat

SEQ ID NO: 1047 - RNA, 21 nt, synthetic construct
  source 1..21: mol_type = other RNA
cgggcaatgtgctggtgatct

SEQ ID NO: 1048 - RNA, 21 nt, synthetic construct
  source 1..21: mol_type = other RNA
gctggtgatcgtggccatcgt

SEQ ID NO: 1049 - RNA, 21 nt, synthetic construct
  source 1..21: mol_type = other RNA
cgtggccatcgccaagacgct

SEQ ID NO: 1050 - RNA, 21 nt, synthetic construct
  source 1..21: mol_type = other RNA
gcagacgctcaccaacctctt

SEQ ID NO: 1051 - RNA, 21 nt, synthetic construct
  source 1..21: mol_type = other RNA
caccaacctcttcatcatgtt

SEQ ID NO: 1052 - RNA, 21 nt, synthetic construct
  source 1..21: mol_type = other RNA
cttcatcatgtccctggccat

SEQ ID NO: 1053 - RNA, 21 nt, synthetic construct
  source 1..21: mol_type = other RNA
ggagtacggctccttcttctt

SEQ ID NO: 1054 - RNA, 21 nt, synthetic construct
  source 1..21: mol_type = other RNA
ctccttcttctgcgagctgtt

SEQ ID NO: 1055 - RNA, 21 nt, synthetic construct
  source 1..21: mol_type = other RNA
ctgtggacctcagtggacgtt

SEQ ID NO: 1056 - RNA, 21 nt, synthetic construct
  source 1..21: mol_type = other RNA
tcagtggacgtgctgtgcgtt

SEQ ID NO: 1057 - RNA, 21 nt, synthetic construct
  source 1..21: mol_type = other RNA
ggccagcatcgagaccctgtt

SEQ ID NO: 1058 - RNA, 21 nt, synthetic construct
  source 1..21: mol_type = other RNA
accctgtgtgtcattgccctt

SEQ ID NO: 1059 - RNA, 21 nt, synthetic construct
  source 1..21: mol_type = other RNA
attgccctggaccgctacctt

SEQ ID NO: 1060 - RNA, 21 nt, synthetic construct
  source 1..21: mol_type = other RNA
gaccgctacctcgccatcact

SEQ ID NO: 1061 - RNA, 21 nt, synthetic construct
  source 1..21: mol_type = other RNA
ctcgccatcacctcgcccttt

SEQ ID NO: 1062 - RNA, 21 nt, synthetic construct
  source 1..21: mol_type = other RNA
acctcgcccttccgctaccat

SEQ ID NO: 1063 - RNA, 21 nt, synthetic construct
  source 1..21: mol_type = other RNA
ttccgctaccagagcctgctt

SEQ ID NO: 1064 - RNA, 21 nt, synthetic construct
  source 1..21: mol_type = other RNA
atctcggccctggtgtccttt

SEQ ID NO: 1065 - RNA, 21 nt, synthetic construct
  source 1..21: mol_type = other RNA
ctggtgtccttcctgcccatt

SEQ ID NO: 1066 - RNA, 21 nt, synthetic construct
  source 1..21: mol_type = other RNA
gcccatcctcatgcactggtt

SEQ ID NO: 1067 - RNA, 21 nt, synthetic construct
  source 1..21: mol_type = other RNA
ctgcgacttcgtcaccaacct

SEQ ID NO: 1068 - RNA, 21 nt, synthetic construct
  source 1..21: mol_type = other RNA
accaaccgggcctacgccatt

SEQ ID NO: 1069 - RNA, 21 nt, synthetic construct
  source 1..21: mol_type = other RNA
atcgcctcgtccgtagtctct

SEQ ID NO: 1070 - RNA, 21 nt, synthetic construct
  source 1..21: mol_type = other RNA
tccgtagtctccttctacgtt

SEQ ID NO: 1071 - RNA, 21 nt, synthetic construct
  source 1..21: mol_type = other RNA
ctgtgcatcatggccttcgtt

SEQ ID NO: 1072 - RNA, 21 nt, synthetic construct
  source 1..21: mol_type = other RNA
atggccttcgtgtacctgcgt

SEQ ID NO: 1073 - RNA, 21 nt, synthetic construct
  source 1..21: mol_type = other RNA
tacctgcgggtgttccgcgat

SEQ ID NO: 1074 - RNA, 21 nt, synthetic construct
  source 1..21: mol_type = other RNA
gcccagaagcaggtgaagaat

SEQ ID NO: 1075 - RNA, 21 nt, synthetic construct
  source 1..21: mol_type = other RNA
ggtgaagaagatcgacagctt

SEQ ID NO: 1076 - RNA, 21 nt, synthetic construct
  source 1..21: mol_type = other RNA
agctgcgagcgccgtttcctt

SEQ ID NO: 1077 - RNA, 21 nt, synthetic construct
  source 1..21: mol_type = other RNA
cagaaggcgctcaagacgctt

SEQ ID NO: 1078 - RNA, 21 nt, synthetic construct
  source 1..21: mol_type = other RNA
tcaagacgctgggcatcatct

SEQ ID NO: 1079 - RNA, 21 nt, synthetic construct
  source 1..21: mol_type = other RNA
gggcatcatcatgggcgtctt

SEQ ID NO: 1080 - RNA, 21 nt, synthetic construct
  source 1..21: mol_type = other RNA
gggcgtcttcacgctctgctt

SEQ ID NO: 1081 - RNA, 21 nt, synthetic construct
  source 1..21: mol_type = other RNA
ctgctggctgcccttcttcct

SEQ ID NO: 1082 - RNA, 21 nt, synthetic construct
  source 1..21: mol_type = other RNA
gcccttcttcctggccaacgt

SEQ ID NO: 1083 - RNA, 21 nt, synthetic construct
  source 1..21: mol_type = other RNA
ggccaacgtggtgaaggcctt

SEQ ID NO: 1084 - RNA, 21 nt, synthetic construct
  source 1..21: mol_type = other RNA
aaggccttccaccgcgagctt

SEQ ID NO: 1085 - RNA, 21 nt, synthetic construct
  source 1..21: mol_type = other RNA
cctcttcgtcttcttcaactt

SEQ ID NO: 1086 - RNA, 21 nt, synthetic construct
  source 1..21: mol_type = other RNA
cttcttcaactggctgggctt

SEQ ID NO: 1087 - RNA, 21 nt, synthetic construct
  source 1..21: mol_type = other RNA
tacgccaactcggccttcaat

SEQ ID NO: 1088 - RNA, 21 nt, synthetic construct
  source 1..21: mol_type = other RNA
catcatctactgccgcagcct

SEQ ID NO: 1089 - RNA, 21 nt, synthetic construct
  source 1..21: mol_type = other RNA
cttccgcaaggccttccaggt

SEQ ID NO: 1090 - RNA, 21 nt, synthetic construct
  source 1..21: mol_type = other RNA
cttccagggactgctctgctt

SEQ ID NO: 1091 - RNA, 21 nt, synthetic construct
  source 1..21: mol_type = other RNA
gacgacgacgatgtcgtcggt

SEQ ID NO: 1092 - RNA, 21 nt, synthetic construct
  source 1..21: mol_type = other RNA
cctcggaatccaaggtgtagt

SEQ ID NO: 1093 - RNA, 21 nt, synthetic construct
  source 1..21: mol_type = other RNA
gaggagatctgtgtttacttt

SEQ ID NO: 1094 - RNA, 21 nt, synthetic construct
  source 1..21: mol_type = other RNA
gtgtttacttaagaccgatat

SEQ ID NO: 1095 - RNA, 21 nt, synthetic construct
  source 1..21: mol_type = other RNA
taagaccgatagcaggtgaat

SEQ ID NO: 1096 - RNA, 21 nt, synthetic construct
  source 1..21: mol_type = other RNA
tagcaggtgaactcgaagcct

SEQ ID NO: 1097 - RNA, 21 nt, synthetic construct
  source 1..21: mol_type = other RNA
gaagcccacaatcctcgtctt

SEQ ID NO: 1098 - RNA, 21 nt, synthetic construct
  source 1..21: mol_type = other RNA
aatcctcgtctgaatcatcct

SEQ ID NO: 1099 - RNA, 21 nt, synthetic construct
  source 1..21: mol_type = other RNA
tgaatcatccgaggcaaagat

SEQ ID NO: 1100 - RNA, 21 nt, synthetic construct
  source 1..21: mol_type = other RNA
gaggcaaagagaaaagccact

SEQ ID NO: 1101 - RNA, 21 nt, synthetic construct
  source 1..21: mol_type = other RNA
gccacggaccgttgcacaaat

SEQ ID NO: 1102 - RNA, 21 nt, synthetic construct
  source 1..21: mol_type = other RNA
aggaaagtttgggaagggatt

SEQ ID NO: 1103 - RNA, 21 nt, synthetic construct
  source 1..21: mol_type = other RNA
ggagagtggcttgctgatgtt

SEQ ID NO: 1104 - RNA, 21 nt, synthetic construct
  source 1..21: mol_type = other RNA
ttgctgatgttccttgttgtt

SEQ ID NO: 1105 - RNA, 21 nt, synthetic construct
  source 1..21: mol_type = other RNA
tttctgtttgtggtccggcct

SEQ ID NO: 1106 - RNA, 21 nt, synthetic construct
  source 1..21: mol_type = other RNA
gtccggccttcttttgtgtgt

SEQ ID NO: 1107 - RNA, 21 nt, synthetic construct
  source 1..21: mol_type = other RNA
tcttttgtgtgtgcgtgtgat

SEQ ID NO: 1108 - RNA, 21 nt, synthetic construct
  source 1..21: mol_type = other RNA
gtgatgcatctttagattttt

SEQ ID NO: 1109 - RNA, 21 nt, synthetic construct
  source 1..21: mol_type = other RNA
ggtggtttttgacactctctt

SEQ ID NO: 1110 - RNA, 21 nt, synthetic construct
  source 1..21: mol_type = other RNA
gacactctctgagaggaccgt

SEQ ID NO: 1111 - RNA, 21 nt, synthetic construct
  source 1..21: mol_type = other RNA
gagtggaagatgggtgggttt

SEQ ID NO: 1112 - RNA, 21 nt, synthetic construct
  source 1..21: mol_type = other RNA
aagggagaagcattaggaggt

SEQ ID NO: 1113 - RNA, 21 nt, synthetic construct
  source 1..21: mol_type = other RNA
gattaaaatcgatcatcgtgt

SEQ ID NO: 1114 - RNA, 21 nt, synthetic construct
  source 1..21: mol_type = other RNA
atcgtggctcccatccctttt

SEQ ID NO: 1115 - RNA, 21 nt, synthetic construct
  source 1..21: mol_type = other RNA
cccatccctttcccgggaact

SEQ ID NO: 1116 - RNA, 21 nt, synthetic construct
  source 1..21: mol_type = other RNA
cgggaacaggaacacactact

SEQ ID NO: 1117 - RNA, 21 nt, synthetic construct
  source 1..21: mol_type = other RNA
gaacacactaccagccagagt

SEQ ID NO: 1118 - RNA, 21 nt, synthetic construct
  source 1..21: mol_type = other RNA
accagccagagagaggagaat

SEQ ID NO: 1119 - RNA, 21 nt, synthetic construct
  source 1..21: mol_type = other RNA
agagaggagaatgacagtttt

SEQ ID NO: 1120 - RNA, 21 nt, synthetic construct
  source 1..21: mol_type = other RNA
atgacagtttgtcaagacatt

SEQ ID NO: 1121 - RNA, 21 nt, synthetic construct
  source 1..21: mol_type = other RNA
aagacatatttccttttgctt

SEQ ID NO: 1122 - RNA, 21 nt, synthetic construct
  source 1..21: mol_type = other RNA
ccttttgctttccagagaaat

SEQ ID NO: 1123 - RNA, 21 nt, synthetic construct
  source 1..21: mol_type = other RNA
ttccagagaaatttcattttt

SEQ ID NO: 1124 - RNA, 21 nt, synthetic construct
  source 1..21: mol_type = other RNA
agtaatgatttctgctgttat

SEQ ID NO: 1125 - RNA, 21 nt, synthetic construct
  source 1..21: mol_type = other RNA
tgctgttatgaaagcaaagat

SEQ ID NO: 1126 - RNA, 21 nt, synthetic construct
  source 1..21: mol_type = other RNA
aaagcaaagagaaaggatggt

SEQ ID NO: 1127 - RNA, 21 nt, synthetic construct
  source 1..21: mol_type = other RNA
agaaaggatggaggcaaaatt

SEQ ID NO: 1128 - RNA, 21 nt, synthetic construct
  source 1..21: mol_type = other RNA
atcacgtttcaagaaatgttt

SEQ ID NO: 1129 - RNA, 21 nt, synthetic construct
  source 1..21: mol_type = other RNA
aagaaatgttaagctcttctt

SEQ ID NO: 1130 - RNA, 21 nt, synthetic construct
  source 1..21: mol_type = other RNA
aagctcttcttggaacaagct

SEQ ID NO: 1131 - RNA, 21 nt, synthetic construct
  source 1..21: mol_type = other RNA
caccttgctttccttgtgtat

SEQ ID NO: 1132 - RNA, 21 nt, synthetic construct
  source 1..21: mol_type = other RNA
cttgtgtagggcaaacccgct

SEQ ID NO: 1133 - RNA, 21 nt, synthetic construct
  source 1..21: mol_type = other RNA
ggtcaggctgagggatttctt

SEQ ID NO: 1134 - RNA, 21 nt, synthetic construct
  source 1..21: mol_type = other RNA
gagggatttctacctcacact

SEQ ID NO: 1135 - RNA, 21 nt, synthetic construct
  source 1..21: mol_type = other RNA
ctacctcacactgtgcatttt

SEQ ID NO: 1136 - RNA, 21 nt, synthetic construct
  source 1..21: mol_type = other RNA
gcatttgcacagcagatagat

SEQ ID NO: 1137 - RNA, 21 nt, synthetic construct
  source 1..21: mol_type = other RNA
gatagaaagacttgtttatat

SEQ ID NO: 1138 - RNA, 21 nt, synthetic construct
  source 1..21: mol_type = other RNA
cttgtttatattaaacagctt

SEQ ID NO: 1139 - RNA, 21 nt, synthetic construct
  source 1..21: mol_type = other RNA
gtatcaatattagttggaagt

SEQ ID NO: 1140 - RNA, 21 nt, synthetic construct
  source 1..21: mol_type = other RNA
caggcgcagagcctctctctt

SEQ ID NO: 1141 - RNA, 21 nt, synthetic construct
  source 1..21: mol_type = other RNA
agcctctctctgtgacatgtt

SEQ ID NO: 1142 - RNA, 21 nt, synthetic construct
  source 1..21: mol_type = other RNA
tgtgacatgtgactctgtcat

SEQ ID NO: 1143 - RNA, 21 nt, synthetic construct
  source 1..21: mol_type = other RNA
tctgtcaattgaagacaggat

SEQ ID NO: 1144 - RNA, 21 nt, synthetic construct
  source 1..21: mol_type = other RNA
tgaagacaggacattaaaagt

SEQ ID NO: 1145 - RNA, 21 nt, synthetic construct
  source 1..21: mol_type = other RNA
gacattaaaagagagcgagat

SEQ ID NO: 1146 - RNA, 21 nt, synthetic construct
  source 1..21: mol_type = other RNA
agcgagagagagaaacagttt

SEQ ID NO: 1147 - RNA, 21 nt, synthetic construct
  source 1..21: mol_type = other RNA
gaaacagttcagattactgct

SEQ ID NO: 1148 - RNA, 21 nt, synthetic construct
  source 1..21: mol_type = other RNA
agattactgcacatgtggatt

SEQ ID NO: 1149 - RNA, 21 nt, synthetic construct
  source 1..21: mol_type = other RNA
gtggttcaaaatgccattttt

SEQ ID NO: 1150 - RNA, 21 nt, synthetic construct
  source 1..21: mol_type = other RNA
tgccatttttgcacagtgttt

SEQ ID NO: 1151 - RNA, 21 nt, synthetic construct
  source 1..21: mol_type = other RNA
agtgttaggaattacaaaatt

SEQ ID NO: 1152 - RNA, 21 nt, synthetic construct
  source 1..21: mol_type = other RNA
aattacaaaatccacagaagt

SEQ ID NO: 1153 - RNA, 21 nt, synthetic construct
  source 1..21: mol_type = other RNA
ccacagaagatgttacttgct

SEQ ID NO: 1154 - RNA, 21 nt, synthetic construct
  source 1..21: mol_type = other RNA
gggcagatcttaaataaaatt

SEQ ID NO: 1155 - RNA, 21 nt, synthetic construct
  source 1..21: mol_type = other RNA
attcaaactctacttctgttt

SEQ ID NO: 1156 - RNA, 21 nt, synthetic construct
  source 1..21: mol_type = other RNA
ctacttctgttgtctagtatt

SEQ ID NO: 1157 - RNA, 21 nt, synthetic construct
  source 1..21: mol_type = other RNA
tagtatgttattgagctaatt

SEQ ID NO: 1158 - RNA, 21 nt, synthetic construct
  source 1..21: mol_type = other RNA
attgagctaatgattcattgt

SEQ ID NO: 1159 - RNA, 21 nt, synthetic construct
  source 1..21: mol_type = other RNA
attgggaaaatacctttttat

SEQ ID NO: 1160 - RNA, 21 nt, synthetic construct
  source 1..21: mol_type = other RNA
ctttttatactcctttatcat

SEQ ID NO: 1161 - RNA, 21 nt, synthetic construct
  source 1..21: mol_type = other RNA
tcctttatcatggtactgtat

SEQ ID NO: 1162 - RNA, 21 nt, synthetic construct
  source 1..21: mol_type = other RNA
tgtaactgtatccatattatt

SEQ ID NO: 1163 - RNA, 21 nt, synthetic construct
  source 1..21: mol_type = other RNA
ttatgtccaagtgcccacgtt

SEQ ID NO: 1164 - RNA, 21 nt, synthetic construct
  source 1..21: mol_type = other RNA
cacgtgaatttgctggtgaat

SEQ ID NO: 1165 - RNA, 21 nt, synthetic construct
  source 1..21: mol_type = other RNA
ttgctggtgaaagttagcact

SEQ ID NO: 1166 - RNA, 21 nt, synthetic construct
  source 1..21: mol_type = other RNA
aaagttagcacttgtgtgtat

SEQ ID NO: 1167 - RNA, 21 nt, synthetic construct
  source 1..21: mol_type = other RNA
acttgtgtgtaaattctactt

SEQ ID NO: 1168 - RNA, 21 nt, synthetic construct
  source 1..21: mol_type = other RNA
taaattctacttcctcttgtt

SEQ ID NO: 1169 - RNA, 21 nt, synthetic construct
  source 1..21: mol_type = other RNA
cttgtgtgttttaccaagtat

SEQ ID NO: 1170 - RNA, 21 nt, synthetic construct
  source 1..21: mol_type = other RNA
tttaccaagtatttatactct

SEQ ID NO: 1171 - RNA, 21 nt, synthetic construct
  source 1..21: mol_type = other RNA
actctggtgcaactaactact

SEQ ID NO: 1172 - RNA, 21 nt, synthetic construct
  source 1..21: mol_type = other RNA
taactactgtgtgaggaattt

SEQ ID NO: 1173 - RNA, 21 nt, synthetic construct
  source 1..21: mol_type = other RNA
ggaattggtccatgtgcaatt

SEQ ID NO: 1174 - RNA, 21 nt, synthetic construct
  source 1..21: mol_type = other RNA
gtgcaataaataccaatgaat

SEQ ID NO: 1175 - RNA, 23 nt, synthetic construct
  source 1..23: mol_type = other RNA
atgtccactgctgagacagcggc

SEQ ID NO: 1176 - RNA, 23 nt, synthetic construct
  source 1..23: mol_type = other RNA
aagcgccatcagcagacccatgc

SEQ ID NO: 1177 - RNA, 23 nt, synthetic construct
  source 1..23: mol_type = other RNA
aatgagcagcacgatgagcgcca

SEQ ID NO: 1178 - RNA, 23 nt, synthetic construct
  source 1..23: mol_type = other RNA
attgcccgccacgatgagcagca

SEQ ID NO: 1179 - RNA, 23 nt, synthetic construct
  source 1..23: mol_type = other RNA
agatcaccagcacattgcccgcc

SEQ ID NO: 1180 - RNA, 23 nt, synthetic construct
  source 1..23: mol_type = other RNA
acgatggccacgatcaccagcac

SEQ ID NO: 1181 - RNA, 23 nt, synthetic construct
  source 1..23: mol_type = other RNA
agcgtcttggcgatggccacgat

SEQ ID NO: 1182 - RNA, 23 nt, synthetic construct
  source 1..23: mol_type = other RNA
aagaggttggtgagcgtctgcag

SEQ ID NO: 1183 - RNA, 23 nt, synthetic construct
  source 1..23: mol_type = other RNA
aacatgatgaagaggttggtgag

SEQ ID NO: 1184 - RNA, 23 nt, synthetic construct
  source 1..23: mol_type = other RNA
atggccagggacatgatgaagag

SEQ ID NO: 1185 - RNA, 23 nt, synthetic construct
  source 1..23: mol_type = other RNA
aagaagaaggagccgtactccca

SEQ ID NO: 1186 - RNA, 23 nt, synthetic construct
  source 1..23: mol_type = other RNA
aacagctcgcagaagaaggagcc

SEQ ID NO: 1187 - RNA, 23 nt, synthetic construct
  source 1..23: mol_type = other RNA
aacgtccactgaggtccacagct

SEQ ID NO: 1188 - RNA, 23 nt, synthetic construct
  source 1..23: mol_type = other RNA
aacgcacagcacgtccactgagg

SEQ ID NO: 1189 - RNA, 23 nt, synthetic construct
  source 1..23: mol_type = other RNA
aacagggtctcgatgctggccgt

SEQ ID NO: 1190 - RNA, 23 nt, synthetic construct
  source 1..23: mol_type = other RNA
aagggcaatgacacacagggtct

SEQ ID NO: 1191 - RNA, 23 nt, synthetic construct
  source 1..23: mol_type = other RNA
aaggtagcggtccagggcaatga

SEQ ID NO: 1192 - RNA, 23 nt, synthetic construct
  source 1..23: mol_type = other RNA
agtgatggcgaggtagcggtcca

SEQ ID NO: 1193 - RNA, 23 nt, synthetic construct
  source 1..23: mol_type = other RNA
aaagggcgaggtgatggcgaggt

SEQ ID NO: 1194 - RNA, 23 nt, synthetic construct
  source 1..23: mol_type = other RNA
atggtagcggaagggcgaggtga

SEQ ID NO: 1195 - RNA, 23 nt, synthetic construct
  source 1..23: mol_type = other RNA
aagcaggctctggtagcggaagg

SEQ ID NO: 1196 - RNA, 23 nt, synthetic construct
  source 1..23: mol_type = other RNA
aaaggacaccagggccgagatgg

SEQ ID NO: 1197 - RNA, 23 nt, synthetic construct
  source 1..23: mol_type = other RNA
aatgggcaggaaggacaccaggg

SEQ ID NO: 1198 - RNA, 23 nt, synthetic construct
  source 1..23: mol_type = other RNA
aaccagtgcatgaggatgggcag

SEQ ID NO: 1199 - RNA, 23 nt, synthetic construct
  source 1..23: mol_type = other RNA
aggttggtgacgaagtcgcagca

SEQ ID NO: 1200 - RNA, 23 nt, synthetic construct
  source 1..23: mol_type = other RNA
aatggcgtaggcccggttggtga

SEQ ID NO: 1201 - RNA, 23 nt, synthetic construct
  source 1..23: mol_type = other RNA
agagactacggacgaggcgatgg

SEQ ID NO: 1202 - RNA, 23 nt, synthetic construct
  source 1..23: mol_type = other RNA
aacgtagaaggagactacggacg

SEQ ID NO: 1203 - RNA, 23 nt, synthetic construct
  source 1..23: mol_type = other RNA
aacgaaggccatgatgcacaggg

SEQ ID NO: 1204 - RNA, 23 nt, synthetic construct
  source 1..23: mol_type = other RNA
acgcaggtacacgaaggccatga

SEQ ID NO: 1205 - RNA, 23 nt, synthetic construct
  source 1..23: mol_type = other RNA
atcgcggaacacccgcaggtaca

SEQ ID NO: 1206 - RNA, 23 nt, synthetic construct
  source 1..23: mol_type = other RNA
attcttcacctgcttctgggcct

SEQ ID NO: 1207 - RNA, 23 nt, synthetic construct
  source 1..23: mol_type = other RNA
aagctgtcgatcttcttcacctg

SEQ ID NO: 1208 - RNA, 23 nt, synthetic construct
  source 1..23: mol_type = other RNA
aaggaaacggcgctcgcagctgt

SEQ ID NO: 1209 - RNA, 23 nt, synthetic construct
  source 1..23: mol_type = other RNA
aagcgtcttgagcgccttctgct

SEQ ID NO: 1210 - RNA, 23 nt, synthetic construct
  source 1..23: mol_type = other RNA
agatgatgcccagcgtcttgagc

SEQ ID NO: 1211 - RNA, 23 nt, synthetic construct
  source 1..23: mol_type = other RNA
aagacgcccatgatgatgcccag

SEQ ID NO: 1212 - RNA, 23 nt, synthetic construct
  source 1..23: mol_type = other RNA
aagcagagcgtgaagacgcccat

SEQ ID NO: 1213 - RNA, 23 nt, synthetic construct
  source 1..23: mol_type = other RNA
aggaagaagggcagccagcagag

SEQ ID NO: 1214 - RNA, 23 nt, synthetic construct
  source 1..23: mol_type = other RNA
acgttggccaggaagaagggcag

SEQ ID NO: 1215 - RNA, 23 nt, synthetic construct
  source 1..23: mol_type = other RNA
aaggccttcaccacgttggccag

SEQ ID NO: 1216 - RNA, 23 nt, synthetic construct
  source 1..23: mol_type = other RNA
aagctcgcggtggaaggccttca

SEQ ID NO: 1217 - RNA, 23 nt, synthetic construct
  source 1..23: mol_type = other RNA
aagttgaagaagacgaagaggcg

SEQ ID NO: 1218 - RNA, 23 nt, synthetic construct
  source 1..23: mol_type = other RNA
aagcccagccagttgaagaagac

SEQ ID NO: 1219 - RNA, 23 nt, synthetic construct
  source 1..23: mol_type = other RNA
attgaaggccgagttggcgtagc

SEQ ID NO: 1220 - RNA, 23 nt, synthetic construct
  source 1..23: mol_type = other RNA
aggctgcggcagtagatgatggg

SEQ ID NO: 1221 - RNA, 23 nt, synthetic construct
  source 1..23: mol_type = other RNA
acctggaaggccttgcggaagtc

SEQ ID NO: 1222 - RNA, 23 nt, synthetic construct
  source 1..23: mol_type = other RNA
aagcagagcagtccctggaaggc

SEQ ID NO: 1223 - RNA, 23 nt, synthetic construct
  source 1..23: mol_type = other RNA
accgacgacatcgtcgtcgtcgt

SEQ ID NO: 1224 - RNA, 23 nt, synthetic construct
  source 1..23: mol_type = other RNA
actacaccttggattccgaggcg

SEQ ID NO: 1225 - RNA, 23 nt, synthetic construct
  source 1..23: mol_type = other RNA
aaagtaaacacagatctcctcgt

SEQ ID NO: 1226 - RNA, 23 nt, synthetic construct
  source 1..23: mol_type = other RNA
atatcggtcttaagtaaacacag

SEQ ID NO: 1227 - RNA, 23 nt, synthetic construct
  source 1..23: mol_type = other RNA
attcacctgctatcggtcttaag

SEQ ID NO: 1228 - RNA, 23 nt, synthetic construct
  source 1..23: mol_type = other RNA
aggcttcgagttcacctgctatc

SEQ ID NO: 1229 - RNA, 23 nt, synthetic construct
  source 1..23: mol_type = other RNA
aagacgaggattgtgggcttcga

SEQ ID NO: 1230 - RNA, 23 nt, synthetic construct
  source 1..23: mol_type = other RNA
aggatgattcagacgaggattgt

SEQ ID NO: 1231 - RNA, 23 nt, synthetic construct
  source 1..23: mol_type = other RNA
atctttgcctcggatgattcaga

SEQ ID NO: 1232 - RNA, 23 nt, synthetic construct
  source 1..23: mol_type = other RNA
agtggcttttctctttgcctcgg

SEQ ID NO: 1233 - RNA, 23 nt, synthetic construct
  source 1..23: mol_type = other RNA
atttgtgcaacggtccgtggctt

SEQ ID NO: 1234 - RNA, 23 nt, synthetic construct
  source 1..23: mol_type = other RNA
aatcccttcccaaactttccttt

SEQ ID NO: 1235 - RNA, 23 nt, synthetic construct
  source 1..23: mol_type = other RNA
aacatcagcaagccactctccca

SEQ ID NO: 1236 - RNA, 23 nt, synthetic construct
  source 1..23: mol_type = other RNA
aacaacaaggaacatcagcaagc

SEQ ID NO: 1237 - RNA, 23 nt, synthetic construct
  source 1..23: mol_type = other RNA
aggccggaccacaaacagaaaaa

SEQ ID NO: 1238 - RNA, 23 nt, synthetic construct
  source 1..23: mol_type = other RNA
acacacaaaagaaggccggacca

SEQ ID NO: 1239 - RNA, 23 nt, synthetic construct
  source 1..23: mol_type = other RNA
atcacacgcacacacaaaagaag

SEQ ID NO: 1240 - RNA, 23 nt, synthetic construct
  source 1..23: mol_type = other RNA
aaaaatctaaagatgcatcacac

SEQ ID NO: 1241 - RNA, 23 nt, synthetic construct
  source 1..23: mol_type = other RNA
aagagagtgtcaaaaaccacctg

SEQ ID NO: 1242 - RNA, 23 nt, synthetic construct
  source 1..23: mol_type = other RNA
acggtcctctcagagagtgtcaa

SEQ ID NO: 1243 - RNA, 23 nt, synthetic construct
  source 1..23: mol_type = other RNA
aaacccacccatcttccactccg

SEQ ID NO: 1244 - RNA, 23 nt, synthetic construct
  source 1..23: mol_type = other RNA
acctcctaatgcttctcccttcc

SEQ ID NO: 1245 - RNA, 23 nt, synthetic construct
  source 1..23: mol_type = other RNA
acacgatgatcgattttaatccc

SEQ ID NO: 1246 - RNA, 23 nt, synthetic construct
  source 1..23: mol_type = other RNA
aaaagggatgggagccacgatga

SEQ ID NO: 1247 - RNA, 23 nt, synthetic construct
  source 1..23: mol_type = other RNA
agttcccgggaaagggatgggag

SEQ ID NO: 1248 - RNA, 23 nt, synthetic construct
  source 1..23: mol_type = other RNA
agtagtgtgttcctgttcccggg

SEQ ID NO: 1249 - RNA, 23 nt, synthetic construct
  source 1..23: mol_type = other RNA
actctggctggtagtgtgttcct

SEQ ID NO: 1250 - RNA, 23 nt, synthetic construct
  source 1..23: mol_type = other RNA
attctcctctctctggctggtag

SEQ ID NO: 1251 - RNA, 23 nt, synthetic construct
  source 1..23: mol_type = other RNA
aaaactgtcattctcctctctct

SEQ ID NO: 1252 - RNA, 23 nt, synthetic construct
  source 1..23: mol_type = other RNA
aatgtcttgacaaactgtcattc

SEQ ID NO: 1253 - RNA, 23 nt, synthetic construct
  source 1..23: mol_type = other RNA
aagcaaaaggaaatatgtcttga

SEQ ID NO: 1254 - RNA, 23 nt, synthetic construct
  source 1..23: mol_type = other RNA
atttctctggaaagcaaaaggaa

SEQ ID NO: 1255 - RNA, 23 nt, synthetic construct
  source 1..23: mol_type = other RNA
aaaaatgaaatttctctggaaag

SEQ ID NO: 1256 - RNA, 23 nt, synthetic construct
  source 1..23: mol_type = other RNA
ataacagcagaaatcattactta

SEQ ID NO: 1257 - RNA, 23 nt, synthetic construct
  source 1..23: mol_type = other RNA
atctttgctttcataacagcaga

SEQ ID NO: 1258 - RNA, 23 nt, synthetic construct
  source 1..23: mol_type = other RNA
accatcctttctctttgctttca

SEQ ID NO: 1259 - RNA, 23 nt, synthetic construct
  source 1..23: mol_type = other RNA
aattttgcctccatcctttctct

SEQ ID NO: 1260 - RNA, 23 nt, synthetic construct
  source 1..23: mol_type = other RNA
aaacatttcttgaaacgtgattt

SEQ ID NO: 1261 - RNA, 23 nt, synthetic construct
  source 1..23: mol_type = other RNA
aagaagagcttaacatttcttga

SEQ ID NO: 1262 - RNA, 23 nt, synthetic construct
  source 1..23: mol_type = other RNA
agcttgttccaagaagagcttaa

SEQ ID NO: 1263 - RNA, 23 nt, synthetic construct
  source 1..23: mol_type = other RNA
atacacaaggaaagcaaggtggg

SEQ ID NO: 1264 - RNA, 23 nt, synthetic construct
  source 1..23: mol_type = other RNA
agcgggtttgccctacacaagga

SEQ ID NO: 1265 - RNA, 23 nt, synthetic construct
  source 1..23: mol_type = other RNA
aagaaatccctcagcctgaccac

SEQ ID NO: 1266 - RNA, 23 nt, synthetic construct
  source 1..23: mol_type = other RNA
agtgtgaggtagaaatccctcag

SEQ ID NO: 1267 - RNA, 23 nt, synthetic construct
  source 1..23: mol_type = other RNA
aaaatgcacagtgtgaggtagaa

SEQ ID NO: 1268 - RNA, 23 nt, synthetic construct
  source 1..23: mol_type = other RNA
atctatctgctgtgcaaatgcac

SEQ ID NO: 1269 - RNA, 23 nt, synthetic construct
  source 1..23: mol_type = other RNA
atataaacaagtctttctatctg

SEQ ID NO: 1270 - RNA, 23 nt, synthetic construct
  source 1..23: mol_type = other RNA
aagctgtttaatataaacaagtc

SEQ ID NO: 1271 - RNA, 23 nt, synthetic construct
  source 1..23: mol_type = other RNA
acttccaactaatattgatacat

SEQ ID NO: 1272 - RNA, 23 nt, synthetic construct
  source 1..23: mol_type = other RNA
aagagagaggctctgcgcctggt

SEQ ID NO: 1273 - RNA, 23 nt, synthetic construct
  source 1..23: mol_type = other RNA
aacatgtcacagagagaggctct

SEQ ID NO: 1274 - RNA, 23 nt, synthetic construct
  source 1..23: mol_type = other RNA
atgacagagtcacatgtcacaga

SEQ ID NO: 1275 - RNA, 23 nt, synthetic construct
  source 1..23: mol_type = other RNA
atcctgtcttcaattgacagagt

SEQ ID NO: 1276 - RNA, 23 nt, synthetic construct
  source 1..23: mol_type = other RNA
acttttaatgtcctgtcttcaat

SEQ ID NO: 1277 - RNA, 23 nt, synthetic construct
  source 1..23: mol_type = other RNA
atctcgctctcttttaatgtcct

SEQ ID NO: 1278 - RNA, 23 nt, synthetic construct
  source 1..23: mol_type = other RNA
aaactgtttctctctctcgctct

SEQ ID NO: 1279 - RNA, 23 nt, synthetic construct
  source 1..23: mol_type = other RNA
agcagtaatctgaactgtttctc

SEQ ID NO: 1280 - RNA, 23 nt, synthetic construct
  source 1..23: mol_type = other RNA
aatccacatgtgcagtaatctga

SEQ ID NO: 1281 - RNA, 23 nt, synthetic construct
  source 1..23: mol_type = other RNA
aaaaatggcattttgaaccactc

SEQ ID NO: 1282 - RNA, 23 nt, synthetic construct
  source 1..23: mol_type = other RNA
aaacactgtgcaaaaatggcatt

SEQ ID NO: 1283 - RNA, 23 nt, synthetic construct
  source 1..23: mol_type = other RNA
aattttgtaattcctaacactgt

SEQ ID NO: 1284 - RNA, 23 nt, synthetic construct
  source 1..23: mol_type = other RNA
acttctgtggattttgtaattcc

SEQ ID NO: 1285 - RNA, 23 nt, synthetic construct
  source 1..23: mol_type = other RNA
agcaagtaacatcttctgtggat

SEQ ID NO: 1286 - RNA, 23 nt, synthetic construct
  source 1..23: mol_type = other RNA
aattttatttaagatctgcccag

SEQ ID NO: 1287 - RNA, 23 nt, synthetic construct
  source 1..23: mol_type = other RNA
aaacagaagtagagtttgaattt

SEQ ID NO: 1288 - RNA, 23 nt, synthetic construct
  source 1..23: mol_type = other RNA
aatactagacaacagaagtagag

SEQ ID NO: 1289 - RNA, 23 nt, synthetic construct
  source 1..23: mol_type = other RNA
aattagctcaataacatactaga

SEQ ID NO: 1290 - RNA, 23 nt, synthetic construct
  source 1..23: mol_type = other RNA
acaatgaatcattagctcaataa

SEQ ID NO: 1291 - RNA, 23 nt, synthetic construct
  source 1..23: mol_type = other RNA
ataaaaaggtattttcccaatga

SEQ ID NO: 1292 - RNA, 23 nt, synthetic construct
  source 1..23: mol_type = other RNA
atgataaaggagtataaaaaggt

SEQ ID NO: 1293 - RNA, 23 nt, synthetic construct
  source 1..23: mol_type = other RNA
atacagtaccatgataaaggagt

SEQ ID NO: 1294 - RNA, 23 nt, synthetic construct
  source 1..23: mol_type = other RNA
aataatatggatacagttacagt

SEQ ID NO: 1295 - RNA, 23 nt, synthetic construct
  source 1..23: mol_type = other RNA
aacgtgggcacttggacataaaa

SEQ ID NO: 1296 - RNA, 23 nt, synthetic construct
  source 1..23: mol_type = other RNA
attcaccagcaaattcacgtggg

SEQ ID NO: 1297 - RNA, 23 nt, synthetic construct
  source 1..23: mol_type = other RNA
agtgctaactttcaccagcaaat

SEQ ID NO: 1298 - RNA, 23 nt, synthetic construct
  source 1..23: mol_type = other RNA
atacacacaagtgctaactttca

SEQ ID NO: 1299 - RNA, 23 nt, synthetic construct
  source 1..23: mol_type = other RNA
aagtagaatttacacacaagtgc

SEQ ID NO: 1300 - RNA, 23 nt, synthetic construct
  source 1..23: mol_type = other RNA
aacaagaggaagtagaatttaca

SEQ ID NO: 1301 - RNA, 23 nt, synthetic construct
  source 1..23: mol_type = other RNA
atacttggtaaaacacacaagag

SEQ ID NO: 1302 - RNA, 23 nt, synthetic construct
  source 1..23: mol_type = other RNA
agagtataaatacttggtaaaac

SEQ ID NO: 1303 - RNA, 23 nt, synthetic construct
  source 1..23: mol_type = other RNA
agtagttagttgcaccagagtat

SEQ ID NO: 1304 - RNA, 23 nt, synthetic construct
  source 1..23: mol_type = other RNA
aaattcctcacacagtagttagt

SEQ ID NO: 1305 - RNA, 23 nt, synthetic construct
  source 1..23: mol_type = other RNA
aattgcacatggaccaattcctc

SEQ ID NO: 1306 - RNA, 23 nt, synthetic construct
  source 1..23: mol_type = other RNA
attcattggtatttattgcacat

SEQ ID NO: 1307 - RNA, 21 nt, synthetic construct
  source 1..21: mol_type = other RNA
  modified_base 1: mod_base = OTHER; note = 2'-O-methyladenosine-3'-phosphorothioate
  modified_base 2: mod_base = OTHER; note = 2'-O-methyladenosine-3'-phosphorothioate
  modified_base 3: mod_base = OTHER; note = 2'-O-methyladenosine-3'-phosphate
  modified_base 4: mod_base = OTHER; note = 2'-O-methylcytidine-3'-phosphate
  modified_base 5: mod_base = OTHER; note = 2'-O-methyladenosine-3'-phosphate
  modified_base 6: mod_base = OTHER; note = 2'-O-methyluridine-3'-phosphate
  modified_base 7: mod_base = OTHER; note = 2'-deoxy-2'-fluoroguanosine-3'-phosphate
  modified_base 8: mod_base = OTHER; note = 2'-O-methylcytidine-3'-phosphate
  modified_base 9: mod_base = OTHER; note = 2'-deoxy-2'-fluorouridine-3'-phosphate
  modified_base 10: mod_base = OTHER; note = 2'-deoxy-2'-fluoroguanosine-3'-phosphate
  modified_base 11: mod_base = OTHER; note = 2'-deoxy-2'-fluoroadenosine-3'-phosphate
  modified_base 12: mod_base = OTHER; note = 2'-O-methyladenosine-3'-phosphate
  modified_base 13: mod_base = OTHER; note = 2'-O-methylguanosine-3'-phosphate
  modified_base 14: mod_base = OTHER; note = 2'-O-methyluridine-3'-phosphate
  modified_base 15: mod_base = OTHER; note = 2'-O-methylcytidine-3'-phosphate
  modified_base 16: mod_base = OTHER; note = 2'-O-methylcytidine-3'-phosphate
  modified_base 17: mod_base = OTHER; note = 2'-O-methylcytidine-3'-phosphate
  modified_base 18: mod_base = OTHER; note = 2'-O-methylguanosine-3'-phosphate
  modified_base 19: mod_base = OTHER; note = 2'-O-methylguanosine-3'-phosphate
  modified_base 20: mod_base = OTHER; note = 2'-O-methylcytidine-3'-phosphate
  modified_base 21: mod_base = OTHER; note = 2'-O-methyluridine-3'-phosphate ((2S,4R)-1-[29-[[2-(acetylamino)-2-deoxy-beta-D-galactopyra nosyl]oxy]-14,14-bis[[3-[[3-[[5-[[2-(acetylamino)-2-deoxy-b eta-D-galactopyranosyl]oxy]-1-oxopentyl]amino]propyl]amino] -3-oxopropoxy]methyl]-1,12,19,25-tetraoxo-16-oxa-13,20,24-t riazanonacos-1-yl]-4-hydroxy-2-pyrrolidinyl)methyl ester
aaacatgctgaagtcccggct

SEQ ID NO: 1308 - RNA, 21 nt, synthetic construct
  source 1..21: mol_type = other RNA
  modified_base 1: mod_base = OTHER; note = 2'-O-methyladenosine-3'-phosphorothioate
  modified_base 2: mod_base = OTHER; note = 2'-O-methyladenosine-3'-phosphorothioate
  modified_base 3: mod_base = OTHER; note = 2'-O-methylguanosine-3'-phosphate
  modified_base 4: mod_base = OTHER; note = 2'-O-methyluridine-3'-phosphate
  modified_base 5: mod_base = OTHER; note = 2'-O-methylcytidine-3'-phosphate
  modified_base 6: mod_base = OTHER; note = 2'-O-methylcytidine-3'-phosphate
  modified_base 7: mod_base = OTHER; note = 2'-deoxy-2'-fluorocytidine-3'-phosphate
  modified_base 8: mod_base = OTHER; note = 2'-O-methylguanosine-3'-phosphate
  modified_base 9: mod_base = OTHER; note = 2'-deoxy-2'-fluoroguanosine-3'-phosphate
  modified_base 10: mod_base = OTHER; note = 2'-deoxy-2'-fluorocytidine-3'-phosphate
  modified_base 11: mod_base = OTHER; note = 2'-deoxy-2'-fluoroguanosine-3'-phosphate
  modified_base 12: mod_base = OTHER; note = 2'-O-methylguanosine-3'-phosphate
  modified_base 13: mod_base = OTHER; note = 2'-O-methylcytidine-3'-phosphate
  modified_base 14: mod_base = OTHER; note = 2'-O-methyluridine-3'-phosphate
  modified_base 15: mod_base = OTHER; note = 2'-O-methylcytidine-3'-phosphate
  modified_base 16: mod_base = OTHER; note = 2'-O-methyluridine-3'-phosphate
  modified_base 17: mod_base = OTHER; note = 2'-O-methyluridine-3'-phosphate
  modified_base 18: mod_base = OTHER; note = 2'-O-methylcytidine-3'-phosphate
  modified_base 19: mod_base = OTHER; note = 2'-O-methylcytidine-3'-phosphate
  modified_base 20: mod_base = OTHER; note = 2'-O-methyladenosine-3'-phosphate
  modified_base 21: mod_base = OTHER; note = 2'-O-methyluridine-3'-phosphate ((2S,4R)-1-[29-[[2-(acetylamino)-2-deoxy-beta-D-galactopyra nosyl]oxy]-14,14-bis[[3-[[3-[[5-[[2-(acetylamino)-2-deoxy-b eta-D-galactopyranosyl]oxy]-1-oxopentyl]amino]propyl]amino] -3-oxopropoxy]methyl]-1,12,19,25-tetraoxo-16-oxa-13,20,24-t riazanonacos-1-yl]-4-hydroxy-2-pyrrolidinyl)methyl ester
aagtcccggcggctcttccat

SEQ ID NO: 1309 - RNA, 21 nt, synthetic construct
  source 1..21: mol_type = other RNA
  modified_base 1: mod_base = OTHER; note = 2'-O-methylcytidine-3'-phosphorothioate
  modified_base 2: mod_base = OTHER; note = 2'-O-methylguanosine-3'-phosphorothioate
  modified_base 3: mod_base = OTHER; note = 2'-O-methyladenosine-3'-phosphate
  modified_base 4: mod_base = OTHER; note = 2'-O-methylguanosine-3'-phosphate
  modified_base 5: mod_base = OTHER; note = 2'-O-methylcytidine-3'-phosphate
  modified_base 6: mod_base = OTHER; note = 2'-O-methylcytidine-3'-phosphate
  modified_base 7: mod_base = OTHER; note = 2'-deoxy-2'-fluorocytidine-3'-phosphate
  modified_base 8: mod_base = OTHER; note = 2'-O-methylguanosine-3'-phosphate
  modified_base 9: mod_base = OTHER; note = 2'-deoxy-2'-fluoroguanosine-3'-phosphate
  modified_base 10: mod_base = OTHER; note = 2'-deoxy-2'-fluorouridine-3'-phosphate
  modified_base 11: mod_base = OTHER; note = 2'-deoxy-2'-fluoroadenosine-3'-phosphate
  modified_base 12: mod_base = OTHER; note = 2'-O-methyladenosine-3'-phosphate
  modified_base 13: mod_base = OTHER; note = 2'-O-methylcytidine-3'-phosphate
  modified_base 14: mod_base = OTHER; note = 2'-O-methylcytidine-3'-phosphate
  modified_base 15: mod_base = OTHER; note = 2'-O-methyluridine-3'-phosphate
  modified_base 16: mod_base = OTHER; note = 2'-O-methylguanosine-3'-phosphate
  modified_base 17: mod_base = OTHER; note = 2'-O-methyluridine-3'-phosphate
  modified_base 18: mod_base = OTHER; note = 2'-O-methylcytidine-3'-phosphate
  modified_base 19: mod_base = OTHER; note = 2'-O-methylguanosine-3'-phosphate
  modified_base 20: mod_base = OTHER; note = 2'-O-methyluridine-3'-phosphate
  modified_base 21: mod_base = OTHER; note = 2'-O-methyluridine-3'-phosphate ((2S,4R)-1-[29-[[2-(acetylamino)-2-deoxy-beta-D-galactopyra nosyl]oxy]-14,14-bis[[3-[[3-[[5-[[2-(acetylamino)-2-deoxy-b eta-D-galactopyranosyl]oxy]-1-oxopentyl]amino]propyl]amino] -3-oxopropoxy]methyl]-1,12,19,25-tetraoxo-16-oxa-13,20,24-t riazanonacos-1-yl]-4-hydroxy-2-pyrrolidinyl)methyl ester
cgagcccggtaacctgtcgtt

SEQ ID NO: 1310 - RNA, 21 nt, synthetic construct
  source 1..21: mol_type = other RNA
  modified_base 1: mod_base = OTHER; note = 2'-O-methylcytidine-3'-phosphorothioate
  modified_base 2: mod_base = OTHER; note = 2'-O-methylguanosine-3'-phosphorothioate
  modified_base 3: mod_base = OTHER; note = 2'-O-methylcytidine-3'-phosphate
  modified_base 4: mod_base = OTHER; note = 2'-O-methyluridine-3'-phosphate
  modified_base 5: mod_base = OTHER; note = 2'-O-methylguanosine-3'-phosphate
  modified_base 6: mod_base = OTHER; note = 2'-O-methyluridine-3'-phosphate
  modified_base 7: mod_base = OTHER; note = 2'-deoxy-2'-fluorocytidine-3'-phosphate
  modified_base 8: mod_base = OTHER; note = 2'-O-methyluridine-3'-phosphate
  modified_base 9: mod_base = OTHER; note = 2'-deoxy-2'-fluorocytidine-3'-phosphate
  modified_base 10: mod_base = OTHER; note = 2'-deoxy-2'-fluoroadenosine-3'-phosphate
  modified_base 11: mod_base = OTHER; note = 2'-deoxy-2'-fluoroguanosine-3'-phosphate
  modified_base 12: mod_base = OTHER; note = 2'-O-methylcytidine-3'-phosphate
  modified_base 13: mod_base = OTHER; note = 2'-O-methyladenosine-3'-phosphate
  modified_base 14: mod_base = OTHER; note = 2'-O-methylguanosine-3'-phosphate
  modified_base 15: mod_base = OTHER; note = 2'-O-methyluridine-3'-phosphate
  modified_base 16: mod_base = OTHER; note = 2'-O-methylguanosine-3'-phosphate
  modified_base 17: mod_base = OTHER; note = 2'-O-methylguanosine-3'-phosphate
  modified_base 18: mod_base = OTHER; note = 2'-O-methyladenosine-3'-phosphate
  modified_base 19: mod_base = OTHER; note = 2'-O-methylcytidine-3'-phosphate
  modified_base 20: mod_base = OTHER; note = 2'-O-methyladenosine-3'-phosphate
  modified_base 21: mod_base = OTHER; note = 2'-O-methyluridine-3'-phosphate ((2S,4R)-1-[29-[[2-(acetylamino)-2-deoxy-beta-D-galactopyra nosyl]oxy]-14,14-bis[[3-[[3-[[5-[[2-(acetylamino)-2-deoxy-b eta-D-galactopyranosyl]oxy]-1-oxopentyl]amino]propyl]amino] -3-oxopropoxy]methyl]-1,12,19,25-tetraoxo-16-oxa-13,20,24-t riazanonacos-1-yl]-4-hydroxy-2-pyrrolidinyl)methyl ester
cgctgtctcagcagtggacat

SEQ ID NO: 1311 - RNA, 21 nt, synthetic construct
  source 1..21: mol_type = other RNA
  modified_base 1: mod_base = OTHER; note = 2'-O-methyladenosine-3'-phosphorothioate
  modified_base 2: mod_base = OTHER; note = 2'-O-methyluridine-3'-phosphorothioate
  modified_base 3: mod_base = OTHER; note = 2'-O-methylguanosine-3'-phosphate
  modified_base 4: mod_base = OTHER; note = 2'-O-methylguanosine-3'-phosphate
  modified_base 5: mod_base = OTHER; note = 2'-O-methylguanosine-3'-phosphate
  modified_base 6: mod_base = OTHER; note = 2'-O-methyluridine-3'-phosphate
  modified_base 7: mod_base = OTHER; note = 2'-deoxy-2'-fluorocytidine-3'-phosphate
  modified_base 8: mod_base = OTHER; note = 2'-O-methyluridine-3'-phosphate
  modified_base 9: mod_base = OTHER; note = 2'-deoxy-2'-fluoroguanosine-3'-phosphate
  modified_base 10: mod_base = OTHER; note = 2'-deoxy-2'-fluorocytidine-3'-phosphate
  modified_base 11: mod_base = OTHER; note = 2'-deoxy-2'-fluorouridine-3'-phosphate
  modified_base 12: mod_base = OTHER; note = 2'-O-methylguanosine-3'-phosphate
  modified_base 13: mod_base = OTHER; note = 2'-O-methyladenosine-3'-phosphate
  modified_base 14: mod_base = OTHER; note = 2'-O-methyluridine-3'-phosphate
  modified_base 15: mod_base = OTHER; note = 2'-O-methylguanosine-3'-phosphate
  modified_base 16: mod_base = OTHER; note = 2'-O-methylguanosine-3'-phosphate
  modified_base 17: mod_base = OTHER; note = 2'-O-methylcytidine-3'-phosphate
  modified_base 18: mod_base = OTHER; note = 2'-O-methylguanosine-3'-phosphate
  modified_base 19: mod_base = OTHER; note = 2'-O-methylcytidine-3'-phosphate
  modified_base 20: mod_base = OTHER; note = 2'-O-methyluridine-3'-phosphate
  modified_base 21: mod_base = OTHER; note = 2'-O-methyluridine-3'-phosphate ((2S,4R)-1-[29-[[2-(acetylamino)-2-deoxy-beta-D-galactopyra nosyl]oxy]-14,14-bis[[3-[[3-[[5-[[2-(acetylamino)-2-deoxy-b eta-D-galactopyranosyl]oxy]-1-oxopentyl]amino]propyl]amino] -3-oxopropoxy]methyl]-1,12,19,25-tetraoxo-16-oxa-13,20,24-t riazanonacos-1-yl]-4-hydroxy-2-pyrrolidinyl)methyl ester
atgggtctgctgatggcgctt

SEQ ID NO: 1312 - RNA, 21 nt, synthetic construct
  source 1..21: mol_type = other RNA
  modified_base 1: mod_base = OTHER; note = 2'-O-methylguanosine-3'-phosphorothioate
  modified_base 2: mod_base = OTHER; note = 2'-O-methylcytidine-3'-phosphorothioate
  modified_base 3: mod_base = OTHER; note = 2'-O-methylguanosine-3'-phosphate
  modified_base 4: mod_base = OTHER; note = 2'-O-methylcytidine-3'-phosphate
  modified_base 5: mod_base = OTHER; note = 2'-O-methyluridine-3'-phosphate
  modified_base 6: mod_base = OTHER; note = 2'-O-methylcytidine-3'-phosphate
  modified_base 7: mod_base = OTHER; note = 2'-deoxy-2'-fluoroadenosine-3'-phosphate
  modified_base 8: mod_base = OTHER; note = 2'-O-methyluridine-3'-phosphate
  modified_base 9: mod_base = OTHER; note = 2'-deoxy-2'-fluorocytidine-3'-phosphate
  modified_base 10: mod_base = OTHER; note = 2'-deoxy-2'-fluoroguanosine-3'-phosphate
  modified_base 11: mod_base = OTHER; note = 2'-deoxy-2'-fluorouridine-3'-phosphate
  modified_base 12: mod_base = OTHER; note = 2'-O-methylguanosine-3'-phosphate
  modified_base 13: mod_base = OTHER; note = 2'-O-methylcytidine-3'-phosphate
  modified_base 14: mod_base = OTHER; note = 2'-O-methyluridine-3'-phosphate
  modified_base 15: mod_base = OTHER; note = 2'-O-methylguanosine-3'-phosphate
  modified_base 16: mod_base = OTHER; note = 2'-O-methylcytidine-3'-phosphate
  modified_base 17: mod_base = OTHER; note = 2'-O-methyluridine-3'-phosphate
  modified_base 18: mod_base = OTHER; note = 2'-O-methylcytidine-3'-phosphate
  modified_base 19: mod_base = OTHER; note = 2'-O-methyladenosine-3'-phosphate
  modified_base 20: mod_base = OTHER; note = 2'-O-methyluridine-3'-phosphate
  modified_base 21: mod_base = OTHER; note = 2'-O-methyluridine-3'-phosphate ((2S,4R)-1-[29-[[2-(acetylamino)-2-deoxy-beta-D-galactopyra nosyl]oxy]-14,14-bis[[3-[[3-[[5-[[2-(acetylamino)-2-deoxy-b eta-D-galactopyranosyl]oxy]-1-oxopentyl]amino]propyl]amino] -3-oxopropoxy]methyl]-1,12,19,25-tetraoxo-16-oxa-13,20,24-t riazanonacos-1-yl]-4-hydroxy-2-pyrrolidinyl)methyl ester
gcgctcatcgtgctgctcatt

SEQ ID NO: 1313 - RNA, 21 nt, synthetic construct
  source 1..21: mol_type = other RNA
  modified_base 1: mod_base = OTHER; note = 2'-O-methylcytidine-3'-phosphorothioate
  modified_base 2: mod_base = OTHER; note = 2'-O-methyluridine-3'-phosphorothioate
  modified_base 3: mod_base = OTHER; note = 2'-O-methylguanosine-3'-phosphate
  modified_base 4: mod_base = OTHER; note = 2'-O-methylcytidine-3'-phosphate
  modified_base 5: mod_base = OTHER; note = 2'-O-methyluridine-3'-phosphate
  modified_base 6: mod_base = OTHER; note = 2'-O-methylcytidine-3'-phosphate
  modified_base 7: mod_base = OTHER; note = 2'-deoxy-2'-fluoroadenosine-3'-phosphate
  modified_base 8: mod_base = OTHER; note = 2'-O-methyluridine-3'-phosphate
  modified_base 9: mod_base = OTHER; note = 2'-deoxy-2'-fluorocytidine-3'-phosphate
  modified_base 10: mod_base = OTHER; note = 2'-deoxy-2'-fluoroguanosine-3'-phosphate
  modified_base 11: mod_base = OTHER; note = 2'-deoxy-2'-fluorouridine-3'-phosphate
  modified_base 12: mod_base = OTHER; note = 2'-O-methylguanosine-3'-phosphate
  modified_base 13: mod_base = OTHER; note = 2'-O-methylguanosine-3'-phosphate
  modified_base 14: mod_base = OTHER; note = 2'-O-methylcytidine-3'-phosphate
  modified_base 15: mod_base = OTHER; note = 2'-O-methylguanosine-3'-phosphate
  modified_base 16: mod_base = OTHER; note = 2'-O-methylguanosine-3'-phosphate
  modified_base 17: mod_base = OTHER; note = 2'-O-methylguanosine-3'-phosphate
  modified_base 18: mod_base = OTHER; note = 2'-O-methylcytidine-3'-phosphate
  modified_base 19: mod_base = OTHER; note = 2'-O-methyladenosine-3'-phosphate
  modified_base 20: mod_base = OTHER; note = 2'-O-methyladenosine-3'-phosphate
  modified_base 21: mod_base = OTHER; note = 2'-O-methyluridine-3'-phosphate ((2S,4R)-1-[29-[[2-(acetylamino)-2-deoxy-beta-D-galactopyra nosyl]oxy]-14,14-bis[[3-[[3-[[5-[[2-(acetylamino)-2-deoxy-b eta-D-galactopyranosyl]oxy]-1-oxopentyl]amino]propyl]amino] -3-oxopropoxy]methyl]-1,12,19,25-tetraoxo-16-oxa-13,20,24-t riazanonacos-1-yl]-4-hydroxy-2-pyrrolidinyl)methyl ester
ctgctcatcgtggcgggcaat

SEQ ID NO: 1314 - RNA, 21 nt, synthetic construct
  source 1..21: mol_type = other RNA
  modified_base 1: mod_base = OTHER; note = 2'-O-methylcytidine-3'-phosphorothioate
  modified_base 2: mod_base = OTHER; note = 2'-O-methylguanosine-3'-phosphorothioate
  modified_base 3: mod_base = OTHER; note = 2'-O-methylguanosine-3'-phosphate
  modified_base 4: mod_base = OTHER; note = 2'-O-methylguanosine-3'-phosphate
  modified_base 5: mod_base = OTHER; note = 2'-O-methylcytidine-3'-phosphate
  modified_base 6: mod_base = OTHER; note = 2'-O-methyladenosine-3'-phosphate
  modified_base 7: mod_base = OTHER; note = 2'-deoxy-2'-fluoroadenosine-3'-phosphate
  modified_base 8: mod_base = OTHER; note = 2'-O-methyluridine-3'-phosphate
  modified_base 9: mod_base = OTHER; note = 2'-deoxy-2'-fluoroguanosine-3'-phosphate
  modified_base 10: mod_base = OTHER; note = 2'-deoxy-2'-fluorouridine-3'-phosphate
  modified_base 11: mod_base = OTHER; note = 2'-deoxy-2'-fluoroguanosine-3'-phosphate
  modified_base 12: mod_base = OTHER; note = 2'-O-methylcytidine-3'-phosphate
  modified_base 13: mod_base = OTHER; note = 2'-O-methyluridine-3'-phosphate
  modified_base 14: mod_base = OTHER; note = 2'-O-methylguanosine-3'-phosphate
  modified_base 15: mod_base = OTHER; note = 2'-O-methylguanosine-3'-phosphate
  modified_base 16: mod_base = OTHER; note = 2'-O-methyluridine-3'-phosphate
  modified_base 17: mod_base = OTHER; note = 2'-O-methylguanosine-3'-phosphate
  modified_base 18: mod_base = OTHER; note = 2'-O-methyladenosine-3'-phosphate
  modified_base 19: mod_base = OTHER; note = 2'-O-methyluridine-3'-phosphate
  modified_base 20: mod_base = OTHER; note = 2'-O-methylcytidine-3'-phosphate
  modified_base 21: mod_base = OTHER; note = 2'-O-methyluridine-3'-phosphate ((2S,4R)-1-[29-[[2-(acetylamino)-2-deoxy-beta-D-galactopyra nosyl]oxy]-14,14-bis[[3-[[3-[[5-[[2-(acetylamino)-2-deoxy-b eta-D-galactopyranosyl]oxy]-1-oxopentyl]amino]propyl]amino] -3-oxopropoxy]methyl]-1,12,19,25-tetraoxo-16-oxa-13,20,24-t riazanonacos-1-yl]-4-hydroxy-2-pyrrolidinyl)methyl ester
cgggcaatgtgctggtgatct

SEQ ID NO: 1315 - RNA, 21 nt, synthetic construct
  source 1..21: mol_type = other RNA
  modified_base 1: mod_base = OTHER; note = 2'-O-methylguanosine-3'-phosphorothioate
  modified_base 2: mod_base = OTHER; note = 2'-O-methylcytidine-3'-phosphorothioate
  modified_base 3: mod_base = OTHER; note = 2'-O-methyluridine-3'-phosphate
  modified_base 4: mod_base = OTHER; note = 2'-O-methylguanosine-3'-phosphate
  modified_base 5: mod_base = OTHER; note = 2'-O-methylguanosine-3'-phosphate
  modified_base 6: mod_base = OTHER; note = 2'-O-methyluridine-3'-phosphate
  modified_base 7: mod_base = OTHER; note = 2'-deoxy-2'-fluoroguanosine-3'-phosphate
  modified_base 8: mod_base = OTHER; note = 2'-O-methyladenosine-3'-phosphate
  modified_base 9: mod_base = OTHER; note = 2'-deoxy-2'-fluorouridine-3'-phosphate
  modified_base 10: mod_base = OTHER; note = 2'-deoxy-2'-fluorocytidine-3'-phosphate
  modified_base 11: mod_base = OTHER; note = 2'-deoxy-2'-fluoroguanosine-3'-phosphate
  modified_base 12: mod_base = OTHER; note = 2'-O-methyluridine-3'-phosphate
  modified_base 13: mod_base = OTHER; note = 2'-O-methylguanosine-3'-phosphate
  modified_base 14: mod_base = OTHER; note = 2'-O-methylguanosine-3'-phosphate
  modified_base 15: mod_base = OTHER; note = 2'-O-methylcytidine-3'-phosphate
  modified_base 16: mod_base = OTHER; note = 2'-O-methylcytidine-3'-phosphate
  modified_base 17: mod_base = OTHER; note = 2'-O-methyladenosine-3'-phosphate
  modified_base 18: mod_base = OTHER; note = 2'-O-methyluridine-3'-phosphate
  modified_base 19: mod_base = OTHER; note = 2'-O-methylcytidine-3'-phosphate
  modified_base 20: mod_base = OTHER; note = 2'-O-methylguanosine-3'-phosphate
  modified_base 21: mod_base = OTHER; note = 2'-O-methyluridine-3'-phosphate ((2S,4R)-1-[29-[[2-(acetylamino)-2-deoxy-beta-D-galactopyra nosyl]oxy]-14,14-bis[[3-[[3-[[5-[[2-(acetylamino)-2-deoxy-b eta-D-galactopyranosyl]oxy]-1-oxopentyl]amino]propyl]amino] -3-oxopropoxy]methyl]-1,12,19,25-tetraoxo-16-oxa-13,20,24-t riazanonacos-1-yl]-4-hydroxy-2-pyrrolidinyl)methyl ester
gctggtgatcgtggccatcgt

SEQ ID NO: 1316 - RNA, 21 nt, synthetic construct
  source 1..21: mol_type = other RNA
  modified_base 1: mod_base = OTHER; note = 2'-O-methylcytidine-3'-phosphorothioate
  modified_base 2: mod_base = OTHER; note = 2'-O-methylguanosine-3'-phosphorothioate
  modified_base 3: mod_base = OTHER; note = 2'-O-methyluridine-3'-phosphate
  modified_base 4: mod_base = OTHER; note = 2'-O-methylguanosine-3'-phosphate
  modified_base 5: mod_base = OTHER; note = 2'-O-methylguanosine-3'-phosphate
  modified_base 6: mod_base = OTHER; note = 2'-O-methylcytidine-3'-phosphate
  modified_base 7: mod_base = OTHER; note = 2'-deoxy-2'-fluorocytidine-3'-phosphate
  modified_base 8: mod_base = OTHER; note = 2'-O-methyladenosine-3'-phosphate
  modified_base 9: mod_base = OTHER; note = 2'-deoxy-2'-fluorouridine-3'-phosphate
  modified_base 10: mod_base = OTHER; note = 2'-deoxy-2'-fluorocytidine-3'-phosphate
  modified_base 11: mod_base = OTHER; note = 2'-deoxy-2'-fluoroguanosine-3'-phosphate
  modified_base 12: mod_base = OTHER; note = 2'-O-methylcytidine-3'-phosphate
  modified_base 13: mod_base = OTHER; note = 2'-O-methylcytidine-3'-phosphate
  modified_base 14: mod_base = OTHER; note = 2'-O-methyladenosine-3'-phosphate
  modified_base 15: mod_base = OTHER; note = 2'-O-methyladenosine-3'-phosphate
  modified_base 16: mod_base = OTHER; note = 2'-O-methylguanosine-3'-phosphate
  modified_base 17: mod_base = OTHER; note = 2'-O-methyladenosine-3'-phosphate
  modified_base 18: mod_base = OTHER; note = 2'-O-methylcytidine-3'-phosphate
  modified_base 19: mod_base = OTHER; note = 2'-O-methylguanosine-3'-phosphate
  modified_base 20: mod_base = OTHER; note = 2'-O-methylcytidine-3'-phosphate
  modified_base 21: mod_base = OTHER; note = 2'-O-methyluridine-3'-phosphate ((2S,4R)-1-[29-[[2-(acetylamino)-2-deoxy-beta-D-galactopyra nosyl]oxy]-14,14-bis[[3-[[3-[[5-[[2-(acetylamino)-2-deoxy-b eta-D-galactopyranosyl]oxy]-1-oxopentyl]amino]propyl]amino] -3-oxopropoxy]methyl]-1,12,19,25-tetraoxo-16-oxa-13,20,24-t riazanonacos-1-yl]-4-hydroxy-2-pyrrolidinyl)methyl ester
cgtggccatcgccaagacgct

SEQ ID NO: 1317 - RNA, 21 nt, synthetic construct
  source 1..21: mol_type = other RNA
  modified_base 1: mod_base = OTHER; note = 2'-O-methylguanosine-3'-phosphorothioate
  modified_base 2: mod_base = OTHER; note = 2'-O-methylcytidine-3'-phosphorothioate
  modified_base 3: mod_base = OTHER; note = 2'-O-methyladenosine-3'-phosphate
  modified_base 4: mod_base = OTHER; note = 2'-O-methylguanosine-3'-phosphate
  modified_base 5: mod_base = OTHER; note = 2'-O-methyladenosine-3'-phosphate
  modified_base 6: mod_base = OTHER; note = 2'-O-methylcytidine-3'-phosphate
  modified_base 7: mod_base = OTHER; note = 2'-deoxy-2'-fluoroguanosine-3'-phosphate
  modified_base 8: mod_base = OTHER; note = 2'-O-methylcytidine-3'-phosphate
  modified_base 9: mod_base = OTHER; note = 2'-deoxy-2'-fluorouridine-3'-phosphate
  modified_base 10: mod_base = OTHER; note = 2'-deoxy-2'-fluorocytidine-3'-phosphate
  modified_base 11: mod_base = OTHER; note = 2'-deoxy-2'-fluoroadenosine-3'-phosphate
  modified_base 12: mod_base = OTHER; note = 2'-O-methylcytidine-3'-phosphate
  modified_base 13: mod_base = OTHER; note = 2'-O-methylcytidine-3'-phosphate
  modified_base 14: mod_base = OTHER; note = 2'-O-methyladenosine-3'-phosphate
  modified_base 15: mod_base = OTHER; note = 2'-O-methyladenosine-3'-phosphate
  modified_base 16: mod_base = OTHER; note = 2'-O-methylcytidine-3'-phosphate
  modified_base 17: mod_base = OTHER; note = 2'-O-methylcytidine-3'-phosphate
  modified_base 18: mod_base = OTHER; note = 2'-O-methyluridine-3'-phosphate
  modified_base 19: mod_base = OTHER; note = 2'-O-methylcytidine-3'-phosphate
  modified_base 20: mod_base = OTHER; note = 2'-O-methyluridine-3'-phosphate
  modified_base 21: mod_base = OTHER; note = 2'-O-methyluridine-3'-phosphate ((2S,4R)-1-[29-[[2-(acetylamino)-2-deoxy-beta-D-galactopyra nosyl]oxy]-14,14-bis[[3-[[3-[[5-[[2-(acetylamino)-2-deoxy-b eta-D-galactopyranosyl]oxy]-1-oxopentyl]amino]propyl]amino] -3-oxopropoxy]methyl]-1,12,19,25-tetraoxo-16-oxa-13,20,24-t riazanonacos-1-yl]-4-hydroxy-2-pyrrolidinyl)methyl ester
gcagacgctcaccaacctctt

SEQ ID NO: 1318 - RNA, 21 nt, synthetic construct
  source 1..21: mol_type = other RNA
  modified_base 1: mod_base = OTHER; note = 2'-O-methylcytidine-3'-phosphorothioate
  modified_base 2: mod_base = OTHER; note = 2'-O-methyladenosine-3'-phosphorothioate
  modified_base 3: mod_base = OTHER; note = 2'-O-methylcytidine-3'-phosphate
  modified_base 4: mod_base = OTHER; note = 2'-O-methylcytidine-3'-phosphate
  modified_base 5: mod_base = OTHER; note = 2'-O-methyladenosine-3'-phosphate
  modified_base 6: mod_base = OTHER; note = 2'-O-methyladenosine-3'-phosphate
  modified_base 7: mod_base = OTHER; note = 2'-deoxy-2'-fluorocytidine-3'-phosphate
  modified_base 8: mod_base = OTHER; note = 2'-O-methylcytidine-3'-phosphate
  modified_base 9: mod_base = OTHER; note = 2'-deoxy-2'-fluorouridine-3'-phosphate
  modified_base 10: mod_base = OTHER; note = 2'-deoxy-2'-fluorocytidine-3'-phosphate
  modified_base 11: mod_base = OTHER; note = 2'-deoxy-2'-fluorouridine-3'-phosphate
  modified_base 12: mod_base = OTHER; note = 2'-O-methyluridine-3'-phosphate
  modified_base 13: mod_base = OTHER; note = 2'-O-methylcytidine-3'-phosphate
  modified_base 14: mod_base = OTHER; note = 2'-O-methyladenosine-3'-phosphate
  modified_base 15: mod_base = OTHER; note = 2'-O-methyluridine-3'-phosphate
  modified_base 16: mod_base = OTHER; note = 2'-O-methylcytidine-3'-phosphate
  modified_base 17: mod_base = OTHER; note = 2'-O-methyladenosine-3'-phosphate
  modified_base 18: mod_base = OTHER; note = 2'-O-methyluridine-3'-phosphate
  modified_base 19: mod_base = OTHER; note = 2'-O-methylguanosine-3'-phosphate
  modified_base 20: mod_base = OTHER; note = 2'-O-methyluridine-3'-phosphate
  modified_base 21: mod_base = OTHER; note = 2'-O-methyluridine-3'-phosphate ((2S,4R)-1-[29-[[2-(acetylamino)-2-deoxy-beta-D-galactopyra nosyl]oxy]-14,14-bis[[3-[[3-[[5-[[2-(acetylamino)-2-deoxy-b eta-D-galactopyranosyl]oxy]-1-oxopentyl]amino]propyl]amino] -3-oxopropoxy]methyl]-1,12,19,25-tetraoxo-16-oxa-13,20,24-t riazanonacos-1-yl]-4-hydroxy-2-pyrrolidinyl)methyl ester
caccaacctcttcatcatgtt

SEQ ID NO: 1319 - RNA, 21 nt, synthetic construct
  source 1..21: mol_type = other RNA
  modified_base 1: mod_base = OTHER; note = 2'-O-methylcytidine-3'-phosphorothioate
  modified_base 2: mod_base = OTHER; note = 2'-O-methyluridine-3'-phosphorothioate
  modified_base 3: mod_base = OTHER; note = 2'-O-methyluridine-3'-phosphate
  modified_base 4: mod_base = OTHER; note = 2'-O-methylcytidine-3'-phosphate
  modified_base 5: mod_base = OTHER; note = 2'-O-methyladenosine-3'-phosphate
  modified_base 6: mod_base = OTHER; note = 2'-O-methyluridine-3'-phosphate
  modified_base 7: mod_base = OTHER; note = 2'-deoxy-2'-fluorocytidine-3'-phosphate
  modified_base 8: mod_base = OTHER; note = 2'-O-methyladenosine-3'-phosphate
  modified_base 9: mod_base = OTHER; note = 2'-deoxy-2'-fluorouridine-3'-phosphate
  modified_base 10: mod_base = OTHER; note = 2'-deoxy-2'-fluoroguanosine-3'-phosphate
  modified_base 11: mod_base = OTHER; note = 2'-deoxy-2'-fluorouridine-3'-phosphate
  modified_base 12: mod_base = OTHER; note = 2'-O-methylcytidine-3'-phosphate
  modified_base 13: mod_base = OTHER; note = 2'-O-methylcytidine-3'-phosphate
  modified_base 14: mod_base = OTHER; note = 2'-O-methylcytidine-3'-phosphate
  modified_base 15: mod_base = OTHER; note = 2'-O-methyluridine-3'-phosphate
  modified_base 16: mod_base = OTHER; note = 2'-O-methylguanosine-3'-phosphate
  modified_base 17: mod_base = OTHER; note = 2'-O-methylguanosine-3'-phosphate
  modified_base 18: mod_base = OTHER; note = 2'-O-methylcytidine-3'-phosphate
  modified_base 19: mod_base = OTHER; note = 2'-O-methylcytidine-3'-phosphate
  modified_base 20: mod_base = OTHER; note = 2'-O-methyladenosine-3'-phosphate
  modified_base 21: mod_base = OTHER; note = 2'-O-methyluridine-3'-phosphate ((2S,4R)-1-[29-[[2-(acetylamino)-2-deoxy-beta-D-galactopyra nosyl]oxy]-14,14-bis[[3-[[3-[[5-[[2-(acetylamino)-2-deoxy-b eta-D-galactopyranosyl]oxy]-1-oxopentyl]amino]propyl]amino] -3-oxopropoxy]methyl]-1,12,19,25-tetraoxo-16-oxa-13,20,24-t riazanonacos-1-yl]-4-hydroxy-2-pyrrolidinyl)methyl ester
cttcatcatgtccctggccat

SEQ ID NO: 1320 - RNA, 21 nt, synthetic construct
  source 1..21: mol_type = other RNA
  modified_base 1: mod_base = OTHER; note = 2'-O-methylguanosine-3'-phosphorothioate
  modified_base 2: mod_base = OTHER; note = 2'-O-methylguanosine-3'-phosphorothioate
  modified_base 3: mod_base = OTHER; note = 2'-O-methyladenosine-3'-phosphate
  modified_base 4: mod_base = OTHER; note = 2'-O-methylguanosine-3'-phosphate
  modified_base 5: mod_base = OTHER; note = 2'-O-methyluridine-3'-phosphate
  modified_base 6: mod_base = OTHER; note = 2'-O-methyladenosine-3'-phosphate
  modified_base 7: mod_base = OTHER; note = 2'-deoxy-2'-fluorocytidine-3'-phosphate
  modified_base 8: mod_base = OTHER; note = 2'-O-methylguanosine-3'-phosphate
  modified_base 9: mod_base = OTHER; note = 2'-deoxy-2'-fluoroguanosine-3'-phosphate
  modified_base 10: mod_base = OTHER; note = 2'-deoxy-2'-fluorocytidine-3'-phosphate
  modified_base 11: mod_base = OTHER; note = 2'-deoxy-2'-fluorouridine-3'-phosphate
  modified_base 12: mod_base = OTHER; note = 2'-O-methylcytidine-3'-phosphate
  modified_base 13: mod_base = OTHER; note = 2'-O-methylcytidine-3'-phosphate
  modified_base 14: mod_base = OTHER; note = 2'-O-methyluridine-3'-phosphate
  modified_base 15: mod_base = OTHER; note = 2'-O-methyluridine-3'-phosphate
  modified_base 16: mod_base = OTHER; note = 2'-O-methylcytidine-3'-phosphate
  modified_base 17: mod_base = OTHER; note = 2'-O-methyluridine-3'-phosphate
  modified_base 18: mod_base = OTHER; note = 2'-O-methyluridine-3'-phosphate
  modified_base 19: mod_base = OTHER; note = 2'-O-methylcytidine-3'-phosphate
  modified_base 20: mod_base = OTHER; note = 2'-O-methyluridine-3'-phosphate
  modified_base 21: mod_base = OTHER; note = 2'-O-methyluridine-3'-phosphate ((2S,4R)-1-[29-[[2-(acetylamino)-2-deoxy-beta-D-galactopyra nosyl]oxy]-14,14-bis[[3-[[3-[[5-[[2-(acetylamino)-2-deoxy-b eta-D-galactopyranosyl]oxy]-1-oxopentyl]amino]propyl]amino] -3-oxopropoxy]methyl]-1,12,19,25-tetraoxo-16-oxa-13,20,24-t riazanonacos-1-yl]-4-hydroxy-2-pyrrolidinyl)methyl ester
ggagtacggctccttcttctt

SEQ ID NO: 1321 - RNA, 21 nt, synthetic construct
  source 1..21: mol_type = other RNA
  modified_base 1: mod_base = OTHER; note = 2'-O-methylcytidine-3'-phosphorothioate
  modified_base 2: mod_base = OTHER; note = 2'-O-methyluridine-3'-phosphorothioate
  modified_base 3: mod_base = OTHER; note = 2'-O-methylcytidine-3'-phosphate
  modified_base 4: mod_base = OTHER; note = 2'-O-methylcytidine-3'-phosphate
  modified_base 5: mod_base = OTHER; note = 2'-O-methyluridine-3'-phosphate
  modified_base 6: mod_base = OTHER; note = 2'-O-methyluridine-3'-phosphate
  modified_base 7: mod_base = OTHER; note = 2'-deoxy-2'-fluorocytidine-3'-phosphate
  modified_base 8: mod_base = OTHER; note = 2'-O-methyluridine-3'-phosphate
  modified_base 9: mod_base = OTHER; note = 2'-deoxy-2'-fluorouridine-3'-phosphate
  modified_base 10: mod_base = OTHER; note = 2'-deoxy-2'-fluorocytidine-3'-phosphate
  modified_base 11: mod_base = OTHER; note = 2'-deoxy-2'-fluorouridine-3'-phosphate
  modified_base 12: mod_base = OTHER; note = 2'-O-methylguanosine-3'-phosphate
  modified_base 13: mod_base = OTHER; note = 2'-O-methylcytidine-3'-phosphate
  modified_base 14: mod_base = OTHER; note = 2'-O-methylguanosine-3'-phosphate
  modified_base 15: mod_base = OTHER; note = 2'-O-methyladenosine-3'-phosphate
  modified_base 16: mod_base = OTHER; note = 2'-O-methylguanosine-3'-phosphate
  modified_base 17: mod_base = OTHER; note = 2'-O-methylcytidine-3'-phosphate
  modified_base 18: mod_base = OTHER; note = 2'-O-methyluridine-3'-phosphate
  modified_base 19: mod_base = OTHER; note = 2'-O-methylguanosine-3'-phosphate
  modified_base 20: mod_base = OTHER; note = 2'-O-methyluridine-3'-phosphate
  modified_base 21: mod_base = OTHER; note = 2'-O-methyluridine-3'-phosphate ((2S,4R)-1-[29-[[2-(acetylamino)-2-deoxy-beta-D-galactopyra nosyl]oxy]-14,14-bis[[3-[[3-[[5-[[2-(acetylamino)-2-deoxy-b eta-D-galactopyranosyl]oxy]-1-oxopentyl]amino]propyl]amino] -3-oxopropoxy]methyl]-1,12,19,25-tetraoxo-16-oxa-13,20,24-t riazanonacos-1-yl]-4-hydroxy-2-pyrrolidinyl)methyl ester
ctccttcttctgcgagctgtt

SEQ ID NO: 1322 - RNA, 21 nt, synthetic construct
  source 1..21: mol_type = other RNA
  modified_base 1: mod_base = OTHER; note = 2'-O-methylcytidine-3'-phosphorothioate
  modified_base 2: mod_base = OTHER; note = 2'-O-methyluridine-3'-phosphorothioate
  modified_base 3: mod_base = OTHER; note = 2'-O-methylguanosine-3'-phosphate
  modified_base 4: mod_base = OTHER; note = 2'-O-methyluridine-3'-phosphate
  modified_base 5: mod_base = OTHER; note = 2'-O-methylguanosine-3'-phosphate
  modified_base 6: mod_base = OTHER; note = 2'-O-methylguanosine-3'-phosphate
  modified_base 7: mod_base = OTHER; note = 2'-deoxy-2'-fluoroadenosine-3'-phosphate
  modified_base 8: mod_base = OTHER; note = 2'-O-methylcytidine-3'-phosphate
  modified_base 9: mod_base = OTHER; note = 2'-deoxy-2'-fluorocytidine-3'-phosphate
  modified_base 10: mod_base = OTHER; note = 2'-deoxy-2'-fluorouridine-3'-phosphate
  modified_base 11: mod_base = OTHER; note = 2'-deoxy-2'-fluorocytidine-3'-phosphate
  modified_base 12: mod_base = OTHER; note = 2'-O-methyladenosine-3'-phosphate
  modified_base 13: mod_base = OTHER; note = 2'-O-methylguanosine-3'-phosphate
  modified_base 14: mod_base = OTHER; note = 2'-O-methyluridine-3'-phosphate
  modified_base 15: mod_base = OTHER; note = 2'-O-methylguanosine-3'-phosphate
  modified_base 16: mod_base = OTHER; note = 2'-O-methylguanosine-3'-phosphate
  modified_base 17: mod_base = OTHER; note = 2'-O-methyladenosine-3'-phosphate
  modified_base 18: mod_base = OTHER; note = 2'-O-methylcytidine-3'-phosphate
  modified_base 19: mod_base = OTHER; note = 2'-O-methylguanosine-3'-phosphate
  modified_base 20: mod_base = OTHER; note = 2'-O-methyluridine-3'-phosphate
  modified_base 21: mod_base = OTHER; note = 2'-O-methyluridine-3'-phosphate ((2S,4R)-1-[29-[[2-(acetylamino)-2-deoxy-beta-D-galactopyra nosyl]oxy]-14,14-bis[[3-[[3-[[5-[[2-(acetylamino)-2-deoxy-b eta-D-galactopyranosyl]oxy]-1-oxopentyl]amino]propyl]amino] -3-oxopropoxy]methyl]-1,12,19,25-tetraoxo-16-oxa-13,20,24-t riazanonacos-1-yl]-4-hydroxy-2-pyrrolidinyl)methyl ester
ctgtggacctcagtggacgtt

SEQ ID NO: 1323 - RNA, 21 nt, synthetic construct
  source 1..21: mol_type = other RNA
  modified_base 1: mod_base = OTHER; note = 2'-O-methyluridine-3'-phosphorothioate
  modified_base 2: mod_base = OTHER; note = 2'-O-methylcytidine-3'-phosphorothioate
  modified_base 3: mod_base = OTHER; note = 2'-O-methyladenosine-3'-phosphate
  modified_base 4: mod_base = OTHER; note = 2'-O-methylguanosine-3'-phosphate
  modified_base 5: mod_base = OTHER; note = 2'-O-methyluridine-3'-phosphate
  modified_base 6: mod_base = OTHER; note = 2'-O-methylguanosine-3'-phosphate
  modified_base 7: mod_base = OTHER; note = 2'-deoxy-2'-fluoroguanosine-3'-phosphate
  modified_base 8: mod_base = OTHER; note = 2'-O-methyladenosine-3'-phosphate
  modified_base 9: mod_base = OTHER; note = 2'-deoxy-2'-fluorocytidine-3'-phosphate
  modified_base 10: mod_base = OTHER; note = 2'-deoxy-2'-fluoroguanosine-3'-phosphate
  modified_base 11: mod_base = OTHER; note = 2'-deoxy-2'-fluorouridine-3'-phosphate
  modified_base 12: mod_base = OTHER; note = 2'-O-methylguanosine-3'-phosphate
  modified_base 13: mod_base = OTHER; note = 2'-O-methylcytidine-3'-phosphate
  modified_base 14: mod_base = OTHER; note = 2'-O-methyluridine-3'-phosphate
  modified_base 15: mod_base = OTHER; note = 2'-O-methylguanosine-3'-phosphate
  modified_base 16: mod_base = OTHER; note = 2'-O-methyluridine-3'-phosphate
  modified_base 17: mod_base = OTHER; note = 2'-O-methylguanosine-3'-phosphate
  modified_base 18: mod_base = OTHER; note = 2'-O-methylcytidine-3'-phosphate
  modified_base 19: mod_base = OTHER; note = 2'-O-methylguanosine-3'-phosphate
  modified_base 20: mod_base = OTHER; note = 2'-O-methyluridine-3'-phosphate
  modified_base 21: mod_base = OTHER; note = 2'-O-methyluridine-3'-phosphate ((2S,4R)-1-[29-[[2-(acetylamino)-2-deoxy-beta-D-galactopyra nosyl]oxy]-14,14-bis[[3-[[3-[[5-[[2-(acetylamino)-2-deoxy-b eta-D-galactopyranosyl]oxy]-1-oxopentyl]amino]propyl]amino] -3-oxopropoxy]methyl]-1,12,19,25-tetraoxo-16-oxa-13,20,24-t riazanonacos-1-yl]-4-hydroxy-2-pyrrolidinyl)methyl ester
tcagtggacgtgctgtgcgtt

SEQ ID NO: 1324 - RNA, 21 nt, synthetic construct
  source 1..21: mol_type = other RNA
  modified_base 1: mod_base = OTHER; note = 2'-O-methylguanosine-3'-phosphorothioate
  modified_base 2: mod_base = OTHER; note = 2'-O-methylguanosine-3'-phosphorothioate
  modified_base 3: mod_base = OTHER; note = 2'-O-methylcytidine-3'-phosphate
  modified_base 4: mod_base = OTHER; note = 2'-O-methylcytidine-3'-phosphate
  modified_base 5: mod_base = OTHER; note = 2'-O-methyladenosine-3'-phosphate
  modified_base 6: mod_base = OTHER; note = 2'-O-methylguanosine-3'-phosphate
  modified_base 7: mod_base = OTHER; note = 2'-deoxy-2'-fluorocytidine-3'-phosphate
  modified_base 8: mod_base = OTHER; note = 2'-O-methyladenosine-3'-phosphate
  modified_base 9: mod_base = OTHER; note = 2'-deoxy-2'-fluorouridine-3'-phosphate
  modified_base 10: mod_base = OTHER; note = 2'-deoxy-2'-fluorocytidine-3'-phosphate
  modified_base 11: mod_base = OTHER; note = 2'-deoxy-2'-fluoroguanosine-3'-phosphate
  modified_base 12: mod_base = OTHER; note = 2'-O-methyladenosine-3'-phosphate
  modified_base 13: mod_base = OTHER; note = 2'-O-methylguanosine-3'-phosphate
  modified_base 14: mod_base = OTHER; note = 2'-O-methyladenosine-3'-phosphate
  modified_base 15: mod_base = OTHER; note = 2'-O-methylcytidine-3'-phosphate
  modified_base 16: mod_base = OTHER; note = 2'-O-methylcytidine-3'-phosphate
  modified_base 17: mod_base = OTHER; note = 2'-O-methylcytidine-3'-phosphate
  modified_base 18: mod_base = OTHER; note = 2'-O-methyluridine-3'-phosphate
  modified_base 19: mod_base = OTHER; note = 2'-O-methylguanosine-3'-phosphate
  modified_base 20: mod_base = OTHER; note = 2'-O-methyluridine-3'-phosphate
  modified_base 21: mod_base = OTHER; note = 2'-O-methyluridine-3'-phosphate ((2S,4R)-1-[29-[[2-(acetylamino)-2-deoxy-beta-D-galactopyra nosyl]oxy]-14,14-bis[[3-[[3-[[5-[[2-(acetylamino)-2-deoxy-b eta-D-galactopyranosyl]oxy]-1-oxopentyl]amino]propyl]amino] -3-oxopropoxy]methyl]-1,12,19,25-tetraoxo-16-oxa-13,20,24-t riazanonacos-1-yl]-4-hydroxy-2-pyrrolidinyl)methyl ester
ggccagcatcgagaccctgtt

SEQ ID NO: 1325 - RNA, 21 nt, synthetic construct
  source 1..21: mol_type = other RNA
  modified_base 1: mod_base = OTHER; note = 2'-O-methyladenosine-3'-phosphorothioate
  modified_base 2: mod_base = OTHER; note = 2'-O-methylcytidine-3'-phosphorothioate
  modified_base 3: mod_base = OTHER; note = 2'-O-methylcytidine-3'-phosphate
  modified_base 4: mod_base = OTHER; note = 2'-O-methylcytidine-3'-phosphate
  modified_base 5: mod_base = OTHER; note = 2'-O-methyluridine-3'-phosphate
  modified_base 6: mod_base = OTHER; note = 2'-O-methylguanosine-3'-phosphate
  modified_base 7: mod_base = OTHER; note = 2'-deoxy-2'-fluorouridine-3'-phosphate
  modified_base 8: mod_base = OTHER; note = 2'-O-methylguanosine-3'-phosphate
  modified_base 9: mod_base = OTHER; note = 2'-deoxy-2'-fluorouridine-3'-phosphate
  modified_base 10: mod_base = OTHER; note = 2'-deoxy-2'-fluoroguanosine-3'-phosphate
  modified_base 11: mod_base = OTHER; note = 2'-deoxy-2'-fluorouridine-3'-phosphate
  modified_base 12: mod_base = OTHER; note = 2'-O-methylcytidine-3'-phosphate
  modified_base 13: mod_base = OTHER; note = 2'-O-methyladenosine-3'-phosphate
  modified_base 14: mod_base = OTHER; note = 2'-O-methyluridine-3'-phosphate
  modified_base 15: mod_base = OTHER; note = 2'-O-methyluridine-3'-phosphate
  modified_base 16: mod_base = OTHER; note = 2'-O-methylguanosine-3'-phosphate
  modified_base 17: mod_base = OTHER; note = 2'-O-methylcytidine-3'-phosphate
  modified_base 18: mod_base = OTHER; note = 2'-O-methylcytidine-3'-phosphate
  modified_base 19: mod_base = OTHER; note = 2'-O-methylcytidine-3'-phosphate
  modified_base 20: mod_base = OTHER; note = 2'-O-methyluridine-3'-phosphate
  modified_base 21: mod_base = OTHER; note = 2'-O-methyluridine-3'-phosphate ((2S,4R)-1-[29-[[2-(acetylamino)-2-deoxy-beta-D-galactopyra nosyl]oxy]-14,14-bis[[3-[[3-[[5-[[2-(acetylamino)-2-deoxy-b eta-D-galactopyranosyl]oxy]-1-oxopentyl]amino]propyl]amino] -3-oxopropoxy]methyl]-1,12,19,25-tetraoxo-16-oxa-13,20,24-t riazanonacos-1-yl]-4-hydroxy-2-pyrrolidinyl)methyl ester
accctgtgtgtcattgccctt

SEQ ID NO: 1326 - RNA, 21 nt, synthetic construct
  source 1..21: mol_type = other RNA
  modified_base 1: mod_base = OTHER; note = 2'-O-methyladenosine-3'-phosphorothioate
  modified_base 2: mod_base = OTHER; note = 2'-O-methyluridine-3'-phosphorothioate
  modified_base 3: mod_base = OTHER; note = 2'-O-methyluridine-3'-phosphate
  modified_base 4: mod_base = OTHER; note = 2'-O-methylguanosine-3'-phosphate
  modified_base 5: mod_base = OTHER; note = 2'-O-methylcytidine-3'-phosphate
  modified_base 6: mod_base = OTHER; note = 2'-O-methylcytidine-3'-phosphate
  modified_base 7: mod_base = OTHER; note = 2'-deoxy-2'-fluorocytidine-3'-phosphate
  modified_base 8: mod_base = OTHER; note = 2'-O-methyluridine-3'-phosphate
  modified_base 9: mod_base = OTHER; note = 2'-deoxy-2'-fluoroguanosine-3'-phosphate
  modified_base 10: mod_base = OTHER; note = 2'-deoxy-2'-fluoroguanosine-3'-phosphate
  modified_base 11: mod_base = OTHER; note = 2'-deoxy-2'-fluoroadenosine-3'-phosphate
  modified_base 12: mod_base = OTHER; note = 2'-O-methylcytidine-3'-phosphate
  modified_base 13: mod_base = OTHER; note = 2'-O-methylcytidine-3'-phosphate
  modified_base 14: mod_base = OTHER; note = 2'-O-methylguanosine-3'-phosphate
  modified_base 15: mod_base = OTHER; note = 2'-O-methylcytidine-3'-phosphate
  modified_base 16: mod_base = OTHER; note = 2'-O-methyluridine-3'-phosphate
  modified_base 17: mod_base = OTHER; note = 2'-O-methyladenosine-3'-phosphate
  modified_base 18: mod_base = OTHER; note = 2'-O-methylcytidine-3'-phosphate
  modified_base 19: mod_base = OTHER; note = 2'-O-methylcytidine-3'-phosphate
  modified_base 20: mod_base = OTHER; note = 2'-O-methyluridine-3'-phosphate
  modified_base 21: mod_base = OTHER; note = 2'-O-methyluridine-3'-phosphate ((2S,4R)-1-[29-[[2-(acetylamino)-2-deoxy-beta-D-galactopyra nosyl]oxy]-14,14-bis[[3-[[3-[[5-[[2-(acetylamino)-2-deoxy-b eta-D-galactopyranosyl]oxy]-1-oxopentyl]amino]propyl]amino] -3-oxopropoxy]methyl]-1,12,19,25-tetraoxo-16-oxa-13,20,24-t riazanonacos-1-yl]-4-hydroxy-2-pyrrolidinyl)methyl ester
attgccctggaccgctacctt

SEQ ID NO: 1327 - RNA, 21 nt, synthetic construct
  source 1..21: mol_type = other RNA
  modified_base 1: mod_base = OTHER; note = 2'-O-methylguanosine-3'-phosphorothioate
  modified_base 2: mod_base = OTHER; note = 2'-O-methyladenosine-3'-phosphorothioate
  modified_base 3: mod_base = OTHER; note = 2'-O-methylcytidine-3'-phosphate
  modified_base 4: mod_base = OTHER; note = 2'-O-methylcytidine-3'-phosphate
  modified_base 5: mod_base = OTHER; note = 2'-O-methylguanosine-3'-phosphate
  modified_base 6: mod_base = OTHER; note = 2'-O-methylcytidine-3'-phosphate
  modified_base 7: mod_base = OTHER; note = 2'-deoxy-2'-fluorouridine-3'-phosphate
  modified_base 8: mod_base = OTHER; note = 2'-O-methyladenosine-3'-phosphate
  modified_base 9: mod_base = OTHER; note = 2'-deoxy-2'-fluorocytidine-3'-phosphate
  modified_base 10: mod_base = OTHER; note = 2'-deoxy-2'-fluorocytidine-3'-phosphate
  modified_base 11: mod_base = OTHER; note = 2'-deoxy-2'-fluorouridine-3'-phosphate
  modified_base 12: mod_base = OTHER; note = 2'-O-methylcytidine-3'-phosphate
  modified_base 13: mod_base = OTHER; note = 2'-O-methylguanosine-3'-phosphate
  modified_base 14: mod_base = OTHER; note = 2'-O-methylcytidine-3'-phosphate
  modified_base 15: mod_base = OTHER; note = 2'-O-methylcytidine-3'-phosphate
  modified_base 16: mod_base = OTHER; note = 2'-O-methyladenosine-3'-phosphate
  modified_base 17: mod_base = OTHER; note = 2'-O-methyluridine-3'-phosphate
  modified_base 18: mod_base = OTHER; note = 2'-O-methylcytidine-3'-phosphate
  modified_base 19: mod_base = OTHER; note = 2'-O-methyladenosine-3'-phosphate
  modified_base 20: mod_base = OTHER; note = 2'-O-methylcytidine-3'-phosphate
  modified_base 21: mod_base = OTHER; note = 2'-O-methyluridine-3'-phosphate ((2S,4R)-1-[29-[[2-(acetylamino)-2-deoxy-beta-D-galactopyra nosyl]oxy]-14,14-bis[[3-[[3-[[5-[[2-(acetylamino)-2-deoxy-b eta-D-galactopyranosyl]oxy]-1-oxopentyl]amino]propyl]amino] -3-oxopropoxy]methyl]-1,12,19,25-tetraoxo-16-oxa-13,20,24-t riazanonacos-1-yl]-4-hydroxy-2-pyrrolidinyl)methyl ester
gaccgctacctcgccatcact

SEQ ID NO: 1328 - RNA, 21 nt, synthetic construct
  source 1..21: mol_type = other RNA
  modified_base 1: mod_base = OTHER; note = 2'-O-methylcytidine-3'-phosphorothioate
  modified_base 2: mod_base = OTHER; note = 2'-O-methyluridine-3'-phosphorothioate
  modified_base 3: mod_base = OTHER; note = 2'-O-methylcytidine-3'-phosphate
  modified_base 4: mod_base = OTHER; note = 2'-O-methylguanosine-3'-phosphate
  modified_base 5: mod_base = OTHER; note = 2'-O-methylcytidine-3'-phosphate
  modified_base 6: mod_base = OTHER; note = 2'-O-methylcytidine-3'-phosphate
  modified_base 7: mod_base = OTHER; note = 2'-deoxy-2'-fluoroadenosine-3'-phosphate
  modified_base 8: mod_base = OTHER; note = 2'-O-methyluridine-3'-phosphate
  modified_base 9: mod_base = OTHER; note = 2'-deoxy-2'-fluorocytidine-3'-phosphate
  modified_base 10: mod_base = OTHER; note = 2'-deoxy-2'-fluoroadenosine-3'-phosphate
  modified_base 11: mod_base = OTHER; note = 2'-deoxy-2'-fluorocytidine-3'-phosphate
  modified_base 12: mod_base = OTHER; note = 2'-O-methylcytidine-3'-phosphate
  modified_base 13: mod_base = OTHER; note = 2'-O-methyluridine-3'-phosphate
  modified_base 14: mod_base = OTHER; note = 2'-O-methylcytidine-3'-phosphate
  modified_base 15: mod_base = OTHER; note = 2'-O-methylguanosine-3'-phosphate
  modified_base 16: mod_base = OTHER; note = 2'-O-methylcytidine-3'-phosphate
  modified_base 17: mod_base = OTHER; note = 2'-O-methylcytidine-3'-phosphate
  modified_base 18: mod_base = OTHER; note = 2'-O-methylcytidine-3'-phosphate
  modified_base 19: mod_base = OTHER; note = 2'-O-methyluridine-3'-phosphate
  modified_base 20: mod_base = OTHER; note = 2'-O-methyluridine-3'-phosphate
  modified_base 21: mod_base = OTHER; note = 2'-O-methyluridine-3'-phosphate ((2S,4R)-1-[29-[[2-(acetylamino)-2-deoxy-beta-D-galactopyra nosyl]oxy]-14,14-bis[[3-[[3-[[5-[[2-(acetylamino)-2-deoxy-b eta-D-galactopyranosyl]oxy]-1-oxopentyl]amino]propyl]amino] -3-oxopropoxy]methyl]-1,12,19,25-tetraoxo-16-oxa-13,20,24-t riazanonacos-1-yl]-4-hydroxy-2-pyrrolidinyl)methyl ester
ctcgccatcacctcgcccttt

SEQ ID NO: 1329 - RNA, 21 nt, synthetic construct
  source 1..21: mol_type = other RNA
  modified_base 1: mod_base = OTHER; note = 2'-O-methyladenosine-3'-phosphorothioate
  modified_base 2: mod_base = OTHER; note = 2'-O-methylcytidine-3'-phosphorothioate
  modified_base 3: mod_base = OTHER; note = 2'-O-methylcytidine-3'-phosphate
  modified_base 4: mod_base = OTHER; note = 2'-O-methyluridine-3'-phosphate
  modified_base 5: mod_base = OTHER; note = 2'-O-methylcytidine-3'-phosphate
  modified_base 6: mod_base = OTHER; note = 2'-O-methylguanosine-3'-phosphate
  modified_base 7: mod_base = OTHER; note = 2'-deoxy-2'-fluorocytidine-3'-phosphate
  modified_base 8: mod_base = OTHER; note = 2'-O-methylcytidine-3'-phosphate
  modified_base 9: mod_base = OTHER; note = 2'-deoxy-2'-fluorocytidine-3'-phosphate
  modified_base 10: mod_base = OTHER; note = 2'-deoxy-2'-fluorouridine-3'-phosphate
  modified_base 11: mod_base = OTHER; note = 2'-deoxy-2'-fluorouridine-3'-phosphate
  modified_base 12: mod_base = OTHER; note = 2'-O-methylcytidine-3'-phosphate
  modified_base 13: mod_base = OTHER; note = 2'-O-methylcytidine-3'-phosphate
  modified_base 14: mod_base = OTHER; note = 2'-O-methylguanosine-3'-phosphate
  modified_base 15: mod_base = OTHER; note = 2'-O-methylcytidine-3'-phosphate
  modified_base 16: mod_base = OTHER; note = 2'-O-methyluridine-3'-phosphate
  modified_base 17: mod_base = OTHER; note = 2'-O-methyladenosine-3'-phosphate
  modified_base 18: mod_base = OTHER; note = 2'-O-methylcytidine-3'-phosphate
  modified_base 19: mod_base = OTHER; note = 2'-O-methylcytidine-3'-phosphate
  modified_base 20: mod_base = OTHER; note = 2'-O-methyladenosine-3'-phosphate
  modified_base 21: mod_base = OTHER; note = 2'-O-methyluridine-3'-phosphate ((2S,4R)-1-[29-[[2-(acetylamino)-2-deoxy-beta-D-galactopyra nosyl]oxy]-14,14-bis[[3-[[3-[[5-[[2-(acetylamino)-2-deoxy-b eta-D-galactopyranosyl]oxy]-1-oxopentyl]amino]propyl]amino] -3-oxopropoxy]methyl]-1,12,19,25-tetraoxo-16-oxa-13,20,24-t riazanonacos-1-yl]-4-hydroxy-2-pyrrolidinyl)methyl ester
acctcgcccttccgctaccat

SEQ ID NO: 1330 - RNA, 21 nt, synthetic construct
  source 1..21: mol_type = other RNA
  modified_base 1: mod_base = OTHER; note = 2'-O-methyluridine-3'-phosphorothioate
  modified_base 2: mod_base = OTHER; note = 2'-O-methyluridine-3'-phosphorothioate
  modified_base 3: mod_base = OTHER; note = 2'-O-methylcytidine-3'-phosphate
  modified_base 4: mod_base = OTHER; note = 2'-O-methylcytidine-3'-phosphate
  modified_base 5: mod_base = OTHER; note = 2'-O-methylguanosine-3'-phosphate
  modified_base 6: mod_base = OTHER; note = 2'-O-methylcytidine-3'-phosphate
  modified_base 7: mod_base = OTHER; note = 2'-deoxy-2'-fluorouridine-3'-phosphate
  modified_base 8: mod_base = OTHER; note = 2'-O-methyladenosine-3'-phosphate
  modified_base 9: mod_base = OTHER; note = 2'-deoxy-2'-fluorocytidine-3'-phosphate
  modified_base 10: mod_base = OTHER; note = 2'-deoxy-2'-fluorocytidine-3'-phosphate
  modified_base 11: mod_base = OTHER; note = 2'-deoxy-2'-fluoroadenosine-3'-phosphate
  modified_base 12: mod_base = OTHER; note = 2'-O-methylguanosine-3'-phosphate
  modified_base 13: mod_base = OTHER; note = 2'-O-methyladenosine-3'-phosphate
  modified_base 14: mod_base = OTHER; note = 2'-O-methylguanosine-3'-phosphate
  modified_base 15: mod_base = OTHER; note = 2'-O-methylcytidine-3'-phosphate
  modified_base 16: mod_base = OTHER; note = 2'-O-methylcytidine-3'-phosphate
  modified_base 17: mod_base = OTHER; note = 2'-O-methyluridine-3'-phosphate
  modified_base 18: mod_base = OTHER; note = 2'-O-methylguanosine-3'-phosphate
  modified_base 19: mod_base = OTHER; note = 2'-O-methylcytidine-3'-phosphate
  modified_base 20: mod_base = OTHER; note = 2'-O-methyluridine-3'-phosphate
  modified_base 21: mod_base = OTHER; note = 2'-O-methyluridine-3'-phosphate ((2S,4R)-1-[29-[[2-(acetylamino)-2-deoxy-beta-D-galactopyra nosyl]oxy]-14,14-bis[[3-[[3-[[5-[[2-(acetylamino)-2-deoxy-b eta-D-galactopyranosyl]oxy]-1-oxopentyl]amino]propyl]amino] -3-oxopropoxy]methyl]-1,12,19,25-tetraoxo-16-oxa-13,20,24-t riazanonacos-1-yl]-4-hydroxy-2-pyrrolidinyl)methyl ester
ttccgctaccagagcctgctt

SEQ ID NO: 1331 - RNA, 21 nt, synthetic construct
  source 1..21: mol_type = other RNA
  modified_base 1: mod_base = OTHER; note = 2'-O-methyladenosine-3'-phosphorothioate
  modified_base 2: mod_base = OTHER; note = 2'-O-methyluridine-3'-phosphorothioate
  modified_base 3: mod_base = OTHER; note = 2'-O-methylcytidine-3'-phosphate
  modified_base 4: mod_base = OTHER; note = 2'-O-methyluridine-3'-phosphate
  modified_base 5: mod_base = OTHER; note = 2'-O-methylcytidine-3'-phosphate
  modified_base 6: mod_base = OTHER; note = 2'-O-methylguanosine-3'-phosphate
  modified_base 7: mod_base = OTHER; note = 2'-deoxy-2'-fluoroguanosine-3'-phosphate
  modified_base 8: mod_base = OTHER; note = 2'-O-methylcytidine-3'-phosphate
  modified_base 9: mod_base = OTHER; note = 2'-deoxy-2'-fluorocytidine-3'-phosphate
  modified_base 10: mod_base = OTHER; note = 2'-deoxy-2'-fluorocytidine-3'-phosphate
  modified_base 11: mod_base = OTHER; note = 2'-deoxy-2'-fluorouridine-3'-phosphate
  modified_base 12: mod_base = OTHER; note = 2'-O-methylguanosine-3'-phosphate
  modified_base 13: mod_base = OTHER; note = 2'-O-methylguanosine-3'-phosphate
  modified_base 14: mod_base = OTHER; note = 2'-O-methyluridine-3'-phosphate
  modified_base 15: mod_base = OTHER; note = 2'-O-methylguanosine-3'-phosphate
  modified_base 16: mod_base = OTHER; note = 2'-O-methyluridine-3'-phosphate
  modified_base 17: mod_base = OTHER; note = 2'-O-methylcytidine-3'-phosphate
  modified_base 18: mod_base = OTHER; note = 2'-O-methylcytidine-3'-phosphate
  modified_base 19: mod_base = OTHER; note = 2'-O-methyluridine-3'-phosphate
  modified_base 20: mod_base = OTHER; note = 2'-O-methyluridine-3'-phosphate
  modified_base 21: mod_base = OTHER; note = 2'-O-methyluridine-3'-phosphate ((2S,4R)-1-[29-[[2-(acetylamino)-2-deoxy-beta-D-galactopyra nosyl]oxy]-14,14-bis[[3-[[3-[[5-[[2-(acetylamino)-2-deoxy-b eta-D-galactopyranosyl]oxy]-1-oxopentyl]amino]propyl]amino] -3-oxopropoxy]methyl]-1,12,19,25-tetraoxo-16-oxa-13,20,24-t riazanonacos-1-yl]-4-hydroxy-2-pyrrolidinyl)methyl ester
atctcggccctggtgtccttt

SEQ ID NO: 1332 - RNA, 21 nt, synthetic construct
  source 1..21: mol_type = other RNA
  modified_base 1: mod_base = OTHER; note = 2'-O-methylcytidine-3'-phosphorothioate
  modified_base 2: mod_base = OTHER; note = 2'-O-methyluridine-3'-phosphorothioate
  modified_base 3: mod_base = OTHER; note = 2'-O-methylguanosine-3'-phosphate
  modified_base 4: mod_base = OTHER; note = 2'-O-methylguanosine-3'-phosphate
  modified_base 5: mod_base = OTHER; note = 2'-O-methyluridine-3'-phosphate
  modified_base 6: mod_base = OTHER; note = 2'-O-methylguanosine-3'-phosphate
  modified_base 7: mod_base = OTHER; note = 2'-deoxy-2'-fluorouridine-3'-phosphate
  modified_base 8: mod_base = OTHER; note = 2'-O-methylcytidine-3'-phosphate
  modified_base 9: mod_base = OTHER; note = 2'-deoxy-2'-fluorocytidine-3'-phosphate
  modified_base 10: mod_base = OTHER; note = 2'-deoxy-2'-fluorouridine-3'-phosphate
  modified_base 11: mod_base = OTHER; note = 2'-deoxy-2'-fluorouridine-3'-phosphate
  modified_base 12: mod_base = OTHER; note = 2'-O-methylcytidine-3'-phosphate
  modified_base 13: mod_base = OTHER; note = 2'-O-methylcytidine-3'-phosphate
  modified_base 14: mod_base = OTHER; note = 2'-O-methyluridine-3'-phosphate
  modified_base 15: mod_base = OTHER; note = 2'-O-methylguanosine-3'-phosphate
  modified_base 16: mod_base = OTHER; note = 2'-O-methylcytidine-3'-phosphate
  modified_base 17: mod_base = OTHER; note = 2'-O-methylcytidine-3'-phosphate
  modified_base 18: mod_base = OTHER; note = 2'-O-methylcytidine-3'-phosphate
  modified_base 19: mod_base = OTHER; note = 2'-O-methyladenosine-3'-phosphate
  modified_base 20: mod_base = OTHER; note = 2'-O-methyluridine-3'-phosphate
  modified_base 21: mod_base = OTHER; note = 2'-O-methyluridine-3'-phosphate ((2S,4R)-1-[29-[[2-(acetylamino)-2-deoxy-beta-D-galactopyra nosyl]oxy]-14,14-bis[[3-[[3-[[5-[[2-(acetylamino)-2-deoxy-b eta-D-galactopyranosyl]oxy]-1-oxopentyl]amino]propyl]amino] -3-oxopropoxy]methyl]-1,12,19,25-tetraoxo-16-oxa-13,20,24-t riazanonacos-1-yl]-4-hydroxy-2-pyrrolidinyl)methyl ester
ctggtgtccttcctgcccatt

SEQ ID NO: 1333 - RNA, 21 nt, synthetic construct
  source 1..21: mol_type = other RNA
  modified_base 1: mod_base = OTHER; note = 2'-O-methylguanosine-3'-phosphorothioate
  modified_base 2: mod_base = OTHER; note = 2'-O-methylcytidine-3'-phosphorothioate
  modified_base 3: mod_base = OTHER; note = 2'-O-methylcytidine-3'-phosphate
  modified_base 4: mod_base = OTHER; note = 2'-O-methylcytidine-3'-phosphate
  modified_base 5: mod_base = OTHER; note = 2'-O-methyladenosine-3'-phosphate
  modified_base 6: mod_base = OTHER; note = 2'-O-methyluridine-3'-phosphate
  modified_base 7: mod_base = OTHER; note = 2'-deoxy-2'-fluorocytidine-3'-phosphate
  modified_base 8: mod_base = OTHER; note = 2'-O-methylcytidine-3'-phosphate
  modified_base 9: mod_base = OTHER; note = 2'-deoxy-2'-fluorouridine-3'-phosphate
  modified_base 10: mod_base = OTHER; note = 2'-deoxy-2'-fluorocytidine-3'-phosphate
  modified_base 11: mod_base = OTHER; note = 2'-deoxy-2'-fluoroadenosine-3'-phosphate
  modified_base 12: mod_base = OTHER; note = 2'-O-methyluridine-3'-phosphate
  modified_base 13: mod_base = OTHER; note = 2'-O-methylguanosine-3'-phosphate
  modified_base 14: mod_base = OTHER; note = 2'-O-methylcytidine-3'-phosphate
  modified_base 15: mod_base = OTHER; note = 2'-O-methyladenosine-3'-phosphate
  modified_base 16: mod_base = OTHER; note = 2'-O-methylcytidine-3'-phosphate
  modified_base 17: mod_base = OTHER; note = 2'-O-methyluridine-3'-phosphate
  modified_base 18: mod_base = OTHER; note = 2'-O-methylguanosine-3'-phosphate
  modified_base 19: mod_base = OTHER; note = 2'-O-methylguanosine-3'-phosphate
  modified_base 20: mod_base = OTHER; note = 2'-O-methyluridine-3'-phosphate
  modified_base 21: mod_base = OTHER; note = 2'-O-methyluridine-3'-phosphate ((2S,4R)-1-[29-[[2-(acetylamino)-2-deoxy-beta-D-galactopyra nosyl]oxy]-14,14-bis[[3-[[3-[[5-[[2-(acetylamino)-2-deoxy-b eta-D-galactopyranosyl]oxy]-1-oxopentyl]amino]propyl]amino] -3-oxopropoxy]methyl]-1,12,19,25-tetraoxo-16-oxa-13,20,24-t riazanonacos-1-yl]-4-hydroxy-2-pyrrolidinyl)methyl ester
gcccatcctcatgcactggtt

SEQ ID NO: 1334 - RNA, 21 nt, synthetic construct
  source 1..21: mol_type = other RNA
  modified_base 1: mod_base = OTHER; note = 2'-O-methylcytidine-3'-phosphorothioate
  modified_base 2: mod_base = OTHER; note = 2'-O-methyluridine-3'-phosphorothioate
  modified_base 3: mod_base = OTHER; note = 2'-O-methylguanosine-3'-phosphate
  modified_base 4: mod_base = OTHER; note = 2'-O-methylcytidine-3'-phosphate
  modified_base 5: mod_base = OTHER; note = 2'-O-methylguanosine-3'-phosphate
  modified_base 6: mod_base = OTHER; note = 2'-O-methyladenosine-3'-phosphate
  modified_base 7: mod_base = OTHER; note = 2'-deoxy-2'-fluorocytidine-3'-phosphate
  modified_base 8: mod_base = OTHER; note = 2'-O-methyluridine-3'-phosphate
  modified_base 9: mod_base = OTHER; note = 2'-deoxy-2'-fluorouridine-3'-phosphate
  modified_base 10: mod_base = OTHER; note = 2'-deoxy-2'-fluorocytidine-3'-phosphate
  modified_base 11: mod_base = OTHER; note = 2'-deoxy-2'-fluoroguanosine-3'-phosphate
  modified_base 12: mod_base = OTHER; note = 2'-O-methyluridine-3'-phosphate
  modified_base 13: mod_base = OTHER; note = 2'-O-methylcytidine-3'-phosphate
  modified_base 14: mod_base = OTHER; note = 2'-O-methyladenosine-3'-phosphate
  modified_base 15: mod_base = OTHER; note = 2'-O-methylcytidine-3'-phosphate
  modified_base 16: mod_base = OTHER; note = 2'-O-methylcytidine-3'-phosphate
  modified_base 17: mod_base = OTHER; note = 2'-O-methyladenosine-3'-phosphate
  modified_base 18: mod_base = OTHER; note = 2'-O-methyladenosine-3'-phosphate
  modified_base 19: mod_base = OTHER; note = 2'-O-methylcytidine-3'-phosphate
  modified_base 20: mod_base = OTHER; note = 2'-O-methylcytidine-3'-phosphate
  modified_base 21: mod_base = OTHER; note = 2'-O-methyluridine-3'-phosphate ((2S,4R)-1-[29-[[2-(acetylamino)-2-deoxy-beta-D-galactopyra nosyl]oxy]-14,14-bis[[3-[[3-[[5-[[2-(acetylamino)-2-deoxy-b eta-D-galactopyranosyl]oxy]-1-oxopentyl]amino]propyl]amino] -3-oxopropoxy]methyl]-1,12,19,25-tetraoxo-16-oxa-13,20,24-t riazanonacos-1-yl]-4-hydroxy-2-pyrrolidinyl)methyl ester
ctgcgacttcgtcaccaacct

SEQ ID NO: 1335 - RNA, 21 nt, synthetic construct
  source 1..21: mol_type = other RNA
  modified_base 1: mod_base = OTHER; note = 2'-O-methyladenosine-3'-phosphorothioate
  modified_base 2: mod_base = OTHER; note = 2'-O-methylcytidine-3'-phosphorothioate
  modified_base 3: mod_base = OTHER; note = 2'-O-methylcytidine-3'-phosphate
  modified_base 4: mod_base = OTHER; note = 2'-O-methyladenosine-3'-phosphate
  modified_base 5: mod_base = OTHER; note = 2'-O-methyladenosine-3'-phosphate
  modified_base 6: mod_base = OTHER; note = 2'-O-methylcytidine-3'-phosphate
  modified_base 7: mod_base = OTHER; note = 2'-deoxy-2'-fluorocytidine-3'-phosphate
  modified_base 8: mod_base = OTHER; note = 2'-O-methylguanosine-3'-phosphate
  modified_base 9: mod_base = OTHER; note = 2'-deoxy-2'-fluoroguanosine-3'-phosphate
  modified_base 10: mod_base = OTHER; note = 2'-deoxy-2'-fluoroguanosine-3'-phosphate
  modified_base 11: mod_base = OTHER; note = 2'-deoxy-2'-fluorocytidine-3'-phosphate
  modified_base 12: mod_base = OTHER; note = 2'-O-methylcytidine-3'-phosphate
  modified_base 13: mod_base = OTHER; note = 2'-O-methyluridine-3'-phosphate
  modified_base 14: mod_base = OTHER; note = 2'-O-methyladenosine-3'-phosphate
  modified_base 15: mod_base = OTHER; note = 2'-O-methylcytidine-3'-phosphate
  modified_base 16: mod_base = OTHER; note = 2'-O-methylguanosine-3'-phosphate
  modified_base 17: mod_base = OTHER; note = 2'-O-methylcytidine-3'-phosphate
  modified_base 18: mod_base = OTHER; note = 2'-O-methylcytidine-3'-phosphate
  modified_base 19: mod_base = OTHER; note = 2'-O-methyladenosine-3'-phosphate
  modified_base 20: mod_base = OTHER; note = 2'-O-methyluridine-3'-phosphate
  modified_base 21: mod_base = OTHER; note = 2'-O-methyluridine-3'-phosphate ((2S,4R)-1-[29-[[2-(acetylamino)-2-deoxy-beta-D-galactopyra nosyl]oxy]-14,14-bis[[3-[[3-[[5-[[2-(acetylamino)-2-deoxy-b eta-D-galactopyranosyl]oxy]-1-oxopentyl]amino]propyl]amino] -3-oxopropoxy]methyl]-1,12,19,25-tetraoxo-16-oxa-13,20,24-t riazanonacos-1-yl]-4-hydroxy-2-pyrrolidinyl)methyl ester
accaaccgggcctacgccatt

SEQ ID NO: 1336 - RNA, 21 nt, synthetic construct
  source 1..21: mol_type = other RNA
  modified_base 1: mod_base = OTHER; note = 2'-O-methyladenosine-3'-phosphorothioate
  modified_base 2: mod_base = OTHER; note = 2'-O-methyluridine-3'-phosphorothioate
  modified_base 3: mod_base = OTHER; note = 2'-O-methylcytidine-3'-phosphate
  modified_base 4: mod_base = OTHER; note = 2'-O-methylguanosine-3'-phosphate
  modified_base 5: mod_base = OTHER; note = 2'-O-methylcytidine-3'-phosphate
  modified_base 6: mod_base = OTHER; note = 2'-O-methylcytidine-3'-phosphate
  modified_base 7: mod_base = OTHER; note = 2'-deoxy-2'-fluorouridine-3'-phosphate
  modified_base 8: mod_base = OTHER; note = 2'-O-methylcytidine-3'-phosphate
  modified_base 9: mod_base = OTHER; note = 2'-deoxy-2'-fluoroguanosine-3'-phosphate
  modified_base 10: mod_base = OTHER; note = 2'-deoxy-2'-fluorouridine-3'-phosphate
  modified_base 11: mod_base = OTHER; note = 2'-deoxy-2'-fluorocytidine-3'-phosphate
  modified_base 12: mod_base = OTHER; note = 2'-O-methylcytidine-3'-phosphate
  modified_base 13: mod_base = OTHER; note = 2'-O-methylguanosine-3'-phosphate
  modified_base 14: mod_base = OTHER; note = 2'-O-methyluridine-3'-phosphate
  modified_base 15: mod_base = OTHER; note = 2'-O-methyladenosine-3'-phosphate
  modified_base 16: mod_base = OTHER; note = 2'-O-methylguanosine-3'-phosphate
  modified_base 17: mod_base = OTHER; note = 2'-O-methyluridine-3'-phosphate
  modified_base 18: mod_base = OTHER; note = 2'-O-methylcytidine-3'-phosphate
  modified_base 19: mod_base = OTHER; note = 2'-O-methyluridine-3'-phosphate
  modified_base 20: mod_base = OTHER; note = 2'-O-methylcytidine-3'-phosphate
  modified_base 21: mod_base = OTHER; note = 2'-O-methyluridine-3'-phosphate ((2S,4R)-1-[29-[[2-(acetylamino)-2-deoxy-beta-D-galactopyra nosyl]oxy]-14,14-bis[[3-[[3-[[5-[[2-(acetylamino)-2-deoxy-b eta-D-galactopyranosyl]oxy]-1-oxopentyl]amino]propyl]amino] -3-oxopropoxy]methyl]-1,12,19,25-tetraoxo-16-oxa-13,20,24-t riazanonacos-1-yl]-4-hydroxy-2-pyrrolidinyl)methyl ester
atcgcctcgtccgtagtctct

SEQ ID NO: 1337 - RNA, 21 nt, synthetic construct
  source 1..21: mol_type = other RNA
  modified_base 1: mod_base = OTHER; note = 2'-O-methyluridine-3'-phosphorothioate
  modified_base 2: mod_base = OTHER; note = 2'-O-methylcytidine-3'-phosphorothioate
  modified_base 3: mod_base = OTHER; note = 2'-O-methylcytidine-3'-phosphate
  modified_base 4: mod_base = OTHER; note = 2'-O-methylguanosine-3'-phosphate
  modified_base 5: mod_base = OTHER; note = 2'-O-methyluridine-3'-phosphate
  modified_base 6: mod_base = OTHER; note = 2'-O-methyladenosine-3'-phosphate
  modified_base 7: mod_base = OTHER; note = 2'-deoxy-2'-fluoroguanosine-3'-phosphate
  modified_base 8: mod_base = OTHER; note = 2'-O-methyluridine-3'-phosphate
  modified_base 9: mod_base = OTHER; note = 2'-deoxy-2'-fluorocytidine-3'-phosphate
  modified_base 10: mod_base = OTHER; note = 2'-deoxy-2'-fluorouridine-3'-phosphate
  modified_base 11: mod_base = OTHER; note = 2'-deoxy-2'-fluorocytidine-3'-phosphate
  modified_base 12: mod_base = OTHER; note = 2'-O-methylcytidine-3'-phosphate
  modified_base 13: mod_base = OTHER; note = 2'-O-methyluridine-3'-phosphate
  modified_base 14: mod_base = OTHER; note = 2'-O-methyluridine-3'-phosphate
  modified_base 15: mod_base = OTHER; note = 2'-O-methylcytidine-3'-phosphate
  modified_base 16: mod_base = OTHER; note = 2'-O-methyluridine-3'-phosphate
  modified_base 17: mod_base = OTHER; note = 2'-O-methyladenosine-3'-phosphate
  modified_base 18: mod_base = OTHER; note = 2'-O-methylcytidine-3'-phosphate
  modified_base 19: mod_base = OTHER; note = 2'-O-methylguanosine-3'-phosphate
  modified_base 20: mod_base = OTHER; note = 2'-O-methyluridine-3'-phosphate
  modified_base 21: mod_base = OTHER; note = 2'-O-methyluridine-3'-phosphate ((2S,4R)-1-[29-[[2-(acetylamino)-2-deoxy-beta-D-galactopyra nosyl]oxy]-14,14-bis[[3-[[3-[[5-[[2-(acetylamino)-2-deoxy-b eta-D-galactopyranosyl]oxy]-1-oxopentyl]amino]propyl]amino] -3-oxopropoxy]methyl]-1,12,19,25-tetraoxo-16-oxa-13,20,24-t riazanonacos-1-yl]-4-hydroxy-2-pyrrolidinyl)methyl ester
tccgtagtctccttctacgtt

SEQ ID NO: 1338 - RNA, 21 nt, synthetic construct
  source 1..21: mol_type = other RNA
  modified_base 1: mod_base = OTHER; note = 2'-O-methylcytidine-3'-phosphorothioate
  modified_base 2: mod_base = OTHER; note = 2'-O-methyluridine-3'-phosphorothioate
  modified_base 3: mod_base = OTHER; note = 2'-O-methylguanosine-3'-phosphate
  modified_base 4: mod_base = OTHER; note = 2'-O-methyluridine-3'-phosphate
  modified_base 5: mod_base = OTHER; note = 2'-O-methylguanosine-3'-phosphate
  modified_base 6: mod_base = OTHER; note = 2'-O-methylcytidine-3'-phosphate
  modified_base 7: mod_base = OTHER; note = 2'-deoxy-2'-fluoroadenosine-3'-phosphate
  modified_base 8: mod_base = OTHER; note = 2'-O-methyluridine-3'-phosphate
  modified_base 9: mod_base = OTHER; note = 2'-deoxy-2'-fluorocytidine-3'-phosphate
  modified_base 10: mod_base = OTHER; note = 2'-deoxy-2'-fluoroadenosine-3'-phosphate
  modified_base 11: mod_base = OTHER; note = 2'-deoxy-2'-fluorouridine-3'-phosphate
  modified_base 12: mod_base = OTHER; note = 2'-O-methylguanosine-3'-phosphate
  modified_base 13: mod_base = OTHER; note = 2'-O-methylguanosine-3'-phosphate
  modified_base 14: mod_base = OTHER; note = 2'-O-methylcytidine-3'-phosphate
  modified_base 15: mod_base = OTHER; note = 2'-O-methylcytidine-3'-phosphate
  modified_base 16: mod_base = OTHER; note = 2'-O-methyluridine-3'-phosphate
  modified_base 17: mod_base = OTHER; note = 2'-O-methyluridine-3'-phosphate
  modified_base 18: mod_base = OTHER; note = 2'-O-methylcytidine-3'-phosphate
  modified_base 19: mod_base = OTHER; note = 2'-O-methylguanosine-3'-phosphate
  modified_base 20: mod_base = OTHER; note = 2'-O-methyluridine-3'-phosphate
  modified_base 21: mod_base = OTHER; note = 2'-O-methyluridine-3'-phosphate ((2S,4R)-1-[29-[[2-(acetylamino)-2-deoxy-beta-D-galactopyra nosyl]oxy]-14,14-bis[[3-[[3-[[5-[[2-(acetylamino)-2-deoxy-b eta-D-galactopyranosyl]oxy]-1-oxopentyl]amino]propyl]amino] -3-oxopropoxy]methyl]-1,12,19,25-tetraoxo-16-oxa-13,20,24-t riazanonacos-1-yl]-4-hydroxy-2-pyrrolidinyl)methyl ester
ctgtgcatcatggccttcgtt

SEQ ID NO: 1339 - RNA, 21 nt, synthetic construct
  source 1..21: mol_type = other RNA
  modified_base 1: mod_base = OTHER; note = 2'-O-methyladenosine-3'-phosphorothioate
  modified_base 2: mod_base = OTHER; note = 2'-O-methyluridine-3'-phosphorothioate
  modified_base 3: mod_base = OTHER; note = 2'-O-methylguanosine-3'-phosphate
  modified_base 4: mod_base = OTHER; note = 2'-O-methylguanosine-3'-phosphate
  modified_base 5: mod_base = OTHER; note = 2'-O-methylcytidine-3'-phosphate
  modified_base 6: mod_base = OTHER; note = 2'-O-methylcytidine-3'-phosphate
  modified_base 7: mod_base = OTHER; note = 2'-deoxy-2'-fluorouridine-3'-phosphate
  modified_base 8: mod_base = OTHER; note = 2'-O-methyluridine-3'-phosphate
  modified_base 9: mod_base = OTHER; note = 2'-deoxy-2'-fluorocytidine-3'-phosphate
  modified_base 10: mod_base = OTHER; note = 2'-deoxy-2'-fluoroguanosine-3'-phosphate
  modified_base 11: mod_base = OTHER; note = 2'-deoxy-2'-fluorouridine-3'-phosphate
  modified_base 12: mod_base = OTHER; note = 2'-O-methylguanosine-3'-phosphate
  modified_base 13: mod_base = OTHER; note = 2'-O-methyluridine-3'-phosphate
  modified_base 14: mod_base = OTHER; note = 2'-O-methyladenosine-3'-phosphate
  modified_base 15: mod_base = OTHER; note = 2'-O-methylcytidine-3'-phosphate
  modified_base 16: mod_base = OTHER; note = 2'-O-methylcytidine-3'-phosphate
  modified_base 17: mod_base = OTHER; note = 2'-O-methyluridine-3'-phosphate
  modified_base 18: mod_base = OTHER; note = 2'-O-methylguanosine-3'-phosphate
  modified_base 19: mod_base = OTHER; note = 2'-O-methylcytidine-3'-phosphate
  modified_base 20: mod_base = OTHER; note = 2'-O-methylguanosine-3'-phosphate
  modified_base 21: mod_base = OTHER; note = 2'-O-methyluridine-3'-phosphate ((2S,4R)-1-[29-[[2-(acetylamino)-2-deoxy-beta-D-galactopyra nosyl]oxy]-14,14-bis[[3-[[3-[[5-[[2-(acetylamino)-2-deoxy-b eta-D-galactopyranosyl]oxy]-1-oxopentyl]amino]propyl]amino] -3-oxopropoxy]methyl]-1,12,19,25-tetraoxo-16-oxa-13,20,24-t riazanonacos-1-yl]-4-hydroxy-2-pyrrolidinyl)methyl ester
atggccttcgtgtacctgcgt

SEQ ID NO: 1340 - RNA, 21 nt, synthetic construct
  source 1..21: mol_type = other RNA
  modified_base 1: mod_base = OTHER; note = 2'-O-methyluridine-3'-phosphorothioate
  modified_base 2: mod_base = OTHER; note = 2'-O-methyladenosine-3'-phosphorothioate
  modified_base 3: mod_base = OTHER; note = 2'-O-methylcytidine-3'-phosphate
  modified_base 4: mod_base = OTHER; note = 2'-O-methylcytidine-3'-phosphate
  modified_base 5: mod_base = OTHER; note = 2'-O-methyluridine-3'-phosphate
  modified_base 6: mod_base = OTHER; note = 2'-O-methylguanosine-3'-phosphate
  modified_base 7: mod_base = OTHER; note = 2'-deoxy-2'-fluorocytidine-3'-phosphate
  modified_base 8: mod_base = OTHER; note = 2'-O-methylguanosine-3'-phosphate
  modified_base 9: mod_base = OTHER; note = 2'-deoxy-2'-fluoroguanosine-3'-phosphate
  modified_base 10: mod_base = OTHER; note = 2'-deoxy-2'-fluoroguanosine-3'-phosphate
  modified_base 11: mod_base = OTHER; note = 2'-deoxy-2'-fluorouridine-3'-phosphate
  modified_base 12: mod_base = OTHER; note = 2'-O-methylguanosine-3'-phosphate
  modified_base 13: mod_base = OTHER; note = 2'-O-methyluridine-3'-phosphate
  modified_base 14: mod_base = OTHER; note = 2'-O-methyluridine-3'-phosphate
  modified_base 15: mod_base = OTHER; note = 2'-O-methylcytidine-3'-phosphate
  modified_base 16: mod_base = OTHER; note = 2'-O-methylcytidine-3'-phosphate
  modified_base 17: mod_base = OTHER; note = 2'-O-methylguanosine-3'-phosphate
  modified_base 18: mod_base = OTHER; note = 2'-O-methylcytidine-3'-phosphate
  modified_base 19: mod_base = OTHER; note = 2'-O-methylguanosine-3'-phosphate
  modified_base 20: mod_base = OTHER; note = 2'-O-methyladenosine-3'-phosphate
  modified_base 21: mod_base = OTHER; note = 2'-O-methyluridine-3'-phosphate ((2S,4R)-1-[29-[[2-(acetylamino)-2-deoxy-beta-D-galactopyra nosyl]oxy]-14,14-bis[[3-[[3-[[5-[[2-(acetylamino)-2-deoxy-b eta-D-galactopyranosyl]oxy]-1-oxopentyl]amino]propyl]amino] -3-oxopropoxy]methyl]-1,12,19,25-tetraoxo-16-oxa-13,20,24-t riazanonacos-1-yl]-4-hydroxy-2-pyrrolidinyl)methyl ester
tacctgcgggtgttccgcgat

SEQ ID NO: 1341 - RNA, 21 nt, synthetic construct
  source 1..21: mol_type = other RNA
  modified_base 1: mod_base = OTHER; note = 2'-O-methylguanosine-3'-phosphorothioate
  modified_base 2: mod_base = OTHER; note = 2'-O-methylcytidine-3'-phosphorothioate
  modified_base 3: mod_base = OTHER; note = 2'-O-methylcytidine-3'-phosphate
  modified_base 4: mod_base = OTHER; note = 2'-O-methylcytidine-3'-phosphate
  modified_base 5: mod_base = OTHER; note = 2'-O-methyladenosine-3'-phosphate
  modified_base 6: mod_base = OTHER; note = 2'-O-methylguanosine-3'-phosphate
  modified_base 7: mod_base = OTHER; note = 2'-deoxy-2'-fluoroadenosine-3'-phosphate
  modified_base 8: mod_base = OTHER; note = 2'-O-methyladenosine-3'-phosphate
  modified_base 9: mod_base = OTHER; note = 2'-deoxy-2'-fluoroguanosine-3'-phosphate
  modified_base 10: mod_base = OTHER; note = 2'-deoxy-2'-fluorocytidine-3'-phosphate
  modified_base 11: mod_base = OTHER; note = 2'-deoxy-2'-fluoroadenosine-3'-phosphate
  modified_base 12: mod_base = OTHER; note = 2'-O-methylguanosine-3'-phosphate
  modified_base 13: mod_base = OTHER; note = 2'-O-methylguanosine-3'-phosphate
  modified_base 14: mod_base = OTHER; note = 2'-O-methyluridine-3'-phosphate
  modified_base 15: mod_base = OTHER; note = 2'-O-methylguanosine-3'-phosphate
  modified_base 16: mod_base = OTHER; note = 2'-O-methyladenosine-3'-phosphate
  modified_base 17: mod_base = OTHER; note = 2'-O-methyladenosine-3'-phosphate
  modified_base 18: mod_base = OTHER; note = 2'-O-methylguanosine-3'-phosphate
  modified_base 19: mod_base = OTHER; note = 2'-O-methyladenosine-3'-phosphate
  modified_base 20: mod_base = OTHER; note = 2'-O-methyladenosine-3'-phosphate
  modified_base 21: mod_base = OTHER; note = 2'-O-methyluridine-3'-phosphate ((2S,4R)-1-[29-[[2-(acetylamino)-2-deoxy-beta-D-galactopyra nosyl]oxy]-14,14-bis[[3-[[3-[[5-[[2-(acetylamino)-2-deoxy-b eta-D-galactopyranosyl]oxy]-1-oxopentyl]amino]propyl]amino] -3-oxopropoxy]methyl]-1,12,19,25-tetraoxo-16-oxa-13,20,24-t riazanonacos-1-yl]-4-hydroxy-2-pyrrolidinyl)methyl ester
gcccagaagcaggtgaagaat

SEQ ID NO: 1342 - RNA, 21 nt, synthetic construct
  source 1..21: mol_type = other RNA
  modified_base 1: mod_base = OTHER; note = 2'-O-methylguanosine-3'-phosphorothioate
  modified_base 2: mod_base = OTHER; note = 2'-O-methylguanosine-3'-phosphorothioate
  modified_base 3: mod_base = OTHER; note = 2'-O-methyluridine-3'-phosphate
  modified_base 4: mod_base = OTHER; note = 2'-O-methylguanosine-3'-phosphate
  modified_base 5: mod_base = OTHER; note = 2'-O-methyladenosine-3'-phosphate
  modified_base 6: mod_base = OTHER; note = 2'-O-methyladenosine-3'-phosphate
  modified_base 7: mod_base = OTHER; note = 2'-deoxy-2'-fluoroguanosine-3'-phosphate
  modified_base 8: mod_base = OTHER; note = 2'-O-methyladenosine-3'-phosphate
  modified_base 9: mod_base = OTHER; note = 2'-deoxy-2'-fluoroadenosine-3'-phosphate
  modified_base 10: mod_base = OTHER; note = 2'-deoxy-2'-fluoroguanosine-3'-phosphate
  modified_base 11: mod_base = OTHER; note = 2'-deoxy-2'-fluoroadenosine-3'-phosphate
  modified_base 12: mod_base = OTHER; note = 2'-O-methyluridine-3'-phosphate
  modified_base 13: mod_base = OTHER; note = 2'-O-methylcytidine-3'-phosphate
  modified_base 14: mod_base = OTHER; note = 2'-O-methylguanosine-3'-phosphate
  modified_base 15: mod_base = OTHER; note = 2'-O-methyladenosine-3'-phosphate
  modified_base 16: mod_base = OTHER; note = 2'-O-methylcytidine-3'-phosphate
  modified_base 17: mod_base = OTHER; note = 2'-O-methyladenosine-3'-phosphate
  modified_base 18: mod_base = OTHER; note = 2'-O-methylguanosine-3'-phosphate
  modified_base 19: mod_base = OTHER; note = 2'-O-methylcytidine-3'-phosphate
  modified_base 20: mod_base = OTHER; note = 2'-O-methyluridine-3'-phosphate
  modified_base 21: mod_base = OTHER; note = 2'-O-methyluridine-3'-phosphate ((2S,4R)-1-[29-[[2-(acetylamino)-2-deoxy-beta-D-galactopyra nosyl]oxy]-14,14-bis[[3-[[3-[[5-[[2-(acetylamino)-2-deoxy-b eta-D-galactopyranosyl]oxy]-1-oxopentyl]amino]propyl]amino] -3-oxopropoxy]methyl]-1,12,19,25-tetraoxo-16-oxa-13,20,24-t riazanonacos-1-yl]-4-hydroxy-2-pyrrolidinyl)methyl ester
ggtgaagaagatcgacagctt

SEQ ID NO: 1343 - RNA, 21 nt, synthetic construct
  source 1..21: mol_type = other RNA
  modified_base 1: mod_base = OTHER; note = 2'-O-methyladenosine-3'-phosphorothioate
  modified_base 2: mod_base = OTHER; note = 2'-O-methylguanosine-3'-phosphorothioate
  modified_base 3: mod_base = OTHER; note = 2'-O-methylcytidine-3'-phosphate
  modified_base 4: mod_base = OTHER; note = 2'-O-methyluridine-3'-phosphate
  modified_base 5: mod_base = OTHER; note = 2'-O-methylguanosine-3'-phosphate
  modified_base 6: mod_base = OTHER; note = 2'-O-methylcytidine-3'-phosphate
  modified_base 7: mod_base = OTHER; note = 2'-deoxy-2'-fluoroguanosine-3'-phosphate
  modified_base 8: mod_base = OTHER; note = 2'-O-methyladenosine-3'-phosphate
  modified_base 9: mod_base = OTHER; note = 2'-deoxy-2'-fluoroguanosine-3'-phosphate
  modified_base 10: mod_base = OTHER; note = 2'-deoxy-2'-fluorocytidine-3'-phosphate
  modified_base 11: mod_base = OTHER; note = 2'-deoxy-2'-fluoroguanosine-3'-phosphate
  modified_base 12: mod_base = OTHER; note = 2'-O-methylcytidine-3'-phosphate
  modified_base 13: mod_base = OTHER; note = 2'-O-methylcytidine-3'-phosphate
  modified_base 14: mod_base = OTHER; note = 2'-O-methylguanosine-3'-phosphate
  modified_base 15: mod_base = OTHER; note = 2'-O-methyluridine-3'-phosphate
  modified_base 16: mod_base = OTHER; note = 2'-O-methyluridine-3'-phosphate
  modified_base 17: mod_base = OTHER; note = 2'-O-methyluridine-3'-phosphate
  modified_base 18: mod_base = OTHER; note = 2'-O-methylcytidine-3'-phosphate
  modified_base 19: mod_base = OTHER; note = 2'-O-methylcytidine-3'-phosphate
  modified_base 20: mod_base = OTHER; note = 2'-O-methyluridine-3'-phosphate
  modified_base 21: mod_base = OTHER; note = 2'-O-methyluridine-3'-phosphate ((2S,4R)-1-[29-[[2-(acetylamino)-2-deoxy-beta-D-galactopyra nosyl]oxy]-14,14-bis[[3-[[3-[[5-[[2-(acetylamino)-2-deoxy-b eta-D-galactopyranosyl]oxy]-1-oxopentyl]amino]propyl]amino] -3-oxopropoxy]methyl]-1,12,19,25-tetraoxo-16-oxa-13,20,24-t riazanonacos-1-yl]-4-hydroxy-2-pyrrolidinyl)methyl ester
agctgcgagcgccgtttcctt

SEQ ID NO: 1344 - RNA, 21 nt, synthetic construct
  source 1..21: mol_type = other RNA
  modified_base 1: mod_base = OTHER; note = 2'-O-methylcytidine-3'-phosphorothioate
  modified_base 2: mod_base = OTHER; note = 2'-O-methyladenosine-3'-phosphorothioate
  modified_base 3: mod_base = OTHER; note = 2'-O-methylguanosine-3'-phosphate
  modified_base 4: mod_base = OTHER; note = 2'-O-methyladenosine-3'-phosphate
  modified_base 5: mod_base = OTHER; note = 2'-O-methyladenosine-3'-phosphate
  modified_base 6: mod_base = OTHER; note = 2'-O-methylguanosine-3'-phosphate
  modified_base 7: mod_base = OTHER; note = 2'-deoxy-2'-fluoroguanosine-3'-phosphate
  modified_base 8: mod_base = OTHER; note = 2'-O-methylcytidine-3'-phosphate
  modified_base 9: mod_base = OTHER; note = 2'-deoxy-2'-fluoroguanosine-3'-phosphate
  modified_base 10: mod_base = OTHER; note = 2'-deoxy-2'-fluorocytidine-3'-phosphate
  modified_base 11: mod_base = OTHER; note = 2'-deoxy-2'-fluorouridine-3'-phosphate
  modified_base 12: mod_base = OTHER; note = 2'-O-methylcytidine-3'-phosphate
  modified_base 13: mod_base = OTHER; note = 2'-O-methyladenosine-3'-phosphate
  modified_base 14: mod_base = OTHER; note = 2'-O-methyladenosine-3'-phosphate
  modified_base 15: mod_base = OTHER; note = 2'-O-methylguanosine-3'-phosphate
  modified_base 16: mod_base = OTHER; note = 2'-O-methyladenosine-3'-phosphate
  modified_base 17: mod_base = OTHER; note = 2'-O-methylcytidine-3'-phosphate
  modified_base 18: mod_base = OTHER; note = 2'-O-methylguanosine-3'-phosphate
  modified_base 19: mod_base = OTHER; note = 2'-O-methylcytidine-3'-phosphate
  modified_base 20: mod_base = OTHER; note = 2'-O-methyluridine-3'-phosphate
  modified_base 21: mod_base = OTHER; note = 2'-O-methyluridine-3'-phosphate ((2S,4R)-1-[29-[[2-(acetylamino)-2-deoxy-beta-D-galactopyra nosyl]oxy]-14,14-bis[[3-[[3-[[5-[[2-(acetylamino)-2-deoxy-b eta-D-galactopyranosyl]oxy]-1-oxopentyl]amino]propyl]amino] -3-oxopropoxy]methyl]-1,12,19,25-tetraoxo-16-oxa-13,20,24-t riazanonacos-1-yl]-4-hydroxy-2-pyrrolidinyl)methyl ester
cagaaggcgctcaagacgctt

SEQ ID NO: 1345 - RNA, 21 nt, synthetic construct
  source 1..21: mol_type = other RNA
  modified_base 1: mod_base = OTHER; note = 2'-O-methyluridine-3'-phosphorothioate
  modified_base 2: mod_base = OTHER; note = 2'-O-methylcytidine-3'-phosphorothioate
  modified_base 3: mod_base = OTHER; note = 2'-O-methyladenosine-3'-phosphate
  modified_base 4: mod_base = OTHER; note = 2'-O-methyladenosine-3'-phosphate
  modified_base 5: mod_base = OTHER; note = 2'-O-methylguanosine-3'-phosphate
  modified_base 6: mod_base = OTHER; note = 2'-O-methyladenosine-3'-phosphate
  modified_base 7: mod_base = OTHER; note = 2'-deoxy-2'-fluorocytidine-3'-phosphate
  modified_base 8: mod_base = OTHER; note = 2'-O-methylguanosine-3'-phosphate
  modified_base 9: mod_base = OTHER; note = 2'-deoxy-2'-fluorocytidine-3'-phosphate
  modified_base 10: mod_base = OTHER; note = 2'-deoxy-2'-fluorouridine-3'-phosphate
  modified_base 11: mod_base = OTHER; note = 2'-deoxy-2'-fluoroguanosine-3'-phosphate
  modified_base 12: mod_base = OTHER; note = 2'-O-methylguanosine-3'-phosphate
  modified_base 13: mod_base = OTHER; note = 2'-O-methylguanosine-3'-phosphate
  modified_base 14: mod_base = OTHER; note = 2'-O-methylcytidine-3'-phosphate
  modified_base 15: mod_base = OTHER; note = 2'-O-methyladenosine-3'-phosphate
  modified_base 16: mod_base = OTHER; note = 2'-O-methyluridine-3'-phosphate
  modified_base 17: mod_base = OTHER; note = 2'-O-methylcytidine-3'-phosphate
  modified_base 18: mod_base = OTHER; note = 2'-O-methyladenosine-3'-phosphate
  modified_base 19: mod_base = OTHER; note = 2'-O-methyluridine-3'-phosphate
  modified_base 20: mod_base = OTHER; note = 2'-O-methylcytidine-3'-phosphate
  modified_base 21: mod_base = OTHER; note = 2'-O-methyluridine-3'-phosphate ((2S,4R)-1-[29-[[2-(acetylamino)-2-deoxy-beta-D-galactopyra nosyl]oxy]-14,14-bis[[3-[[3-[[5-[[2-(acetylamino)-2-deoxy-b eta-D-galactopyranosyl]oxy]-1-oxopentyl]amino]propyl]amino] -3-oxopropoxy]methyl]-1,12,19,25-tetraoxo-16-oxa-13,20,24-t riazanonacos-1-yl]-4-hydroxy-2-pyrrolidinyl)methyl ester
tcaagacgctgggcatcatct

SEQ ID NO: 1346 - RNA, 21 nt, synthetic construct
  source 1..21: mol_type = other RNA
  modified_base 1: mod_base = OTHER; note = 2'-O-methylguanosine-3'-phosphorothioate
  modified_base 2: mod_base = OTHER; note = 2'-O-methylguanosine-3'-phosphorothioate
  modified_base 3: mod_base = OTHER; note = 2'-O-methylguanosine-3'-phosphate
  modified_base 4: mod_base = OTHER; note = 2'-O-methylcytidine-3'-phosphate
  modified_base 5: mod_base = OTHER; note = 2'-O-methyladenosine-3'-phosphate
  modified_base 6: mod_base = OTHER; note = 2'-O-methyluridine-3'-phosphate
  modified_base 7: mod_base = OTHER; note = 2'-deoxy-2'-fluorocytidine-3'-phosphate
  modified_base 8: mod_base = OTHER; note = 2'-O-methyladenosine-3'-phosphate
  modified_base 9: mod_base = OTHER; note = 2'-deoxy-2'-fluorouridine-3'-phosphate
  modified_base 10: mod_base = OTHER; note = 2'-deoxy-2'-fluorocytidine-3'-phosphate
  modified_base 11: mod_base = OTHER; note = 2'-deoxy-2'-fluoroadenosine-3'-phosphate
  modified_base 12: mod_base = OTHER; note = 2'-O-methyluridine-3'-phosphate
  modified_base 13: mod_base = OTHER; note = 2'-O-methylguanosine-3'-phosphate
  modified_base 14: mod_base = OTHER; note = 2'-O-methylguanosine-3'-phosphate
  modified_base 15: mod_base = OTHER; note = 2'-O-methylguanosine-3'-phosphate
  modified_base 16: mod_base = OTHER; note = 2'-O-methylcytidine-3'-phosphate
  modified_base 17: mod_base = OTHER; note = 2'-O-methylguanosine-3'-phosphate
  modified_base 18: mod_base = OTHER; note = 2'-O-methyluridine-3'-phosphate
  modified_base 19: mod_base = OTHER; note = 2'-O-methylcytidine-3'-phosphate
  modified_base 20: mod_base = OTHER; note = 2'-O-methyluridine-3'-phosphate
  modified_base 21: mod_base = OTHER; note = 2'-O-methyluridine-3'-phosphate ((2S,4R)-1-[29-[[2-(acetylamino)-2-deoxy-beta-D-galactopyra nosyl]oxy]-14,14-bis[[3-[[3-[[5-[[2-(acetylamino)-2-deoxy-b eta-D-galactopyranosyl]oxy]-1-oxopentyl]amino]propyl]amino] -3-oxopropoxy]methyl]-1,12,19,25-tetraoxo-16-oxa-13,20,24-t riazanonacos-1-yl]-4-hydroxy-2-pyrrolidinyl)methyl ester
gggcatcatcatgggcgtctt

SEQ ID NO: 1347 - RNA, 21 nt, synthetic construct
  source 1..21: mol_type = other RNA
  modified_base 1: mod_base = OTHER; note = 2'-O-methylguanosine-3'-phosphorothioate
  modified_base 2: mod_base = OTHER; note = 2'-O-methylguanosine-3'-phosphorothioate
  modified_base 3: mod_base = OTHER; note = 2'-O-methylguanosine-3'-phosphate
  modified_base 4: mod_base = OTHER; note = 2'-O-methylcytidine-3'-phosphate
  modified_base 5: mod_base = OTHER; note = 2'-O-methylguanosine-3'-phosphate
  modified_base 6: mod_base = OTHER; note = 2'-O-methyluridine-3'-phosphate
  modified_base 7: mod_base = OTHER; note = 2'-deoxy-2'-fluorocytidine-3'-phosphate
  modified_base 8: mod_base = OTHER; note = 2'-O-methyluridine-3'-phosphate
  modified_base 9: mod_base = OTHER; note = 2'-deoxy-2'-fluorouridine-3'-phosphate
  modified_base 10: mod_base = OTHER; note = 2'-deoxy-2'-fluorocytidine-3'-phosphate
  modified_base 11: mod_base = OTHER; note = 2'-deoxy-2'-fluoroadenosine-3'-phosphate
  modified_base 12: mod_base = OTHER; note = 2'-O-methylcytidine-3'-phosphate
  modified_base 13: mod_base = OTHER; note = 2'-O-methylguanosine-3'-phosphate
  modified_base 14: mod_base = OTHER; note = 2'-O-methylcytidine-3'-phosphate
  modified_base 15: mod_base = OTHER; note = 2'-O-methyluridine-3'-phosphate
  modified_base 16: mod_base = OTHER; note = 2'-O-methylcytidine-3'-phosphate
  modified_base 17: mod_base = OTHER; note = 2'-O-methyluridine-3'-phosphate
  modified_base 18: mod_base = OTHER; note = 2'-O-methylguanosine-3'-phosphate
  modified_base 19: mod_base = OTHER; note = 2'-O-methylcytidine-3'-phosphate
  modified_base 20: mod_base = OTHER; note = 2'-O-methyluridine-3'-phosphate
  modified_base 21: mod_base = OTHER; note = 2'-O-methyluridine-3'-phosphate ((2S,4R)-1-[29-[[2-(acetylamino)-2-deoxy-beta-D-galactopyra nosyl]oxy]-14,14-bis[[3-[[3-[[5-[[2-(acetylamino)-2-deoxy-b eta-D-galactopyranosyl]oxy]-1-oxopentyl]amino]propyl]amino] -3-oxopropoxy]methyl]-1,12,19,25-tetraoxo-16-oxa-13,20,24-t riazanonacos-1-yl]-4-hydroxy-2-pyrrolidinyl)methyl ester
gggcgtcttcacgctctgctt

SEQ ID NO: 1348 - RNA, 21 nt, synthetic construct
  source 1..21: mol_type = other RNA
  modified_base 1: mod_base = OTHER; note = 2'-O-methylcytidine-3'-phosphorothioate
  modified_base 2: mod_base = OTHER; note = 2'-O-methyluridine-3'-phosphorothioate
  modified_base 3: mod_base = OTHER; note = 2'-O-methylguanosine-3'-phosphate
  modified_base 4: mod_base = OTHER; note = 2'-O-methylcytidine-3'-phosphate
  modified_base 5: mod_base = OTHER; note = 2'-O-methyluridine-3'-phosphate
  modified_base 6: mod_base = OTHER; note = 2'-O-methylguanosine-3'-phosphate
  modified_base 7: mod_base = OTHER; note = 2'-deoxy-2'-fluoroguanosine-3'-phosphate
  modified_base 8: mod_base = OTHER; note = 2'-O-methylcytidine-3'-phosphate
  modified_base 9: mod_base = OTHER; note = 2'-deoxy-2'-fluorouridine-3'-phosphate
  modified_base 10: mod_base = OTHER; note = 2'-deoxy-2'-fluoroguanosine-3'-phosphate
  modified_base 11: mod_base = OTHER; note = 2'-deoxy-2'-fluorocytidine-3'-phosphate
  modified_base 12: mod_base = OTHER; note = 2'-O-methylcytidine-3'-phosphate
  modified_base 13: mod_base = OTHER; note = 2'-O-methylcytidine-3'-phosphate
  modified_base 14: mod_base = OTHER; note = 2'-O-methyluridine-3'-phosphate
  modified_base 15: mod_base = OTHER; note = 2'-O-methyluridine-3'-phosphate
  modified_base 16: mod_base = OTHER; note = 2'-O-methylcytidine-3'-phosphate
  modified_base 17: mod_base = OTHER; note = 2'-O-methyluridine-3'-phosphate
  modified_base 18: mod_base = OTHER; note = 2'-O-methyluridine-3'-phosphate
  modified_base 19: mod_base = OTHER; note = 2'-O-methylcytidine-3'-phosphate
  modified_base 20: mod_base = OTHER; note = 2'-O-methylcytidine-3'-phosphate
  modified_base 21: mod_base = OTHER; note = 2'-O-methyluridine-3'-phosphate ((2S,4R)-1-[29-[[2-(acetylamino)-2-deoxy-beta-D-galactopyra nosyl]oxy]-14,14-bis[[3-[[3-[[5-[[2-(acetylamino)-2-deoxy-b eta-D-galactopyranosyl]oxy]-1-oxopentyl]amino]propyl]amino] -3-oxopropoxy]methyl]-1,12,19,25-tetraoxo-16-oxa-13,20,24-t riazanonacos-1-yl]-4-hydroxy-2-pyrrolidinyl)methyl ester
ctgctggctgcccttcttcct

SEQ ID NO: 1349 - RNA, 21 nt, synthetic construct
  source 1..21: mol_type = other RNA
  modified_base 1: mod_base = OTHER; note = 2'-O-methylguanosine-3'-phosphorothioate
  modified_base 2: mod_base = OTHER; note = 2'-O-methylcytidine-3'-phosphorothioate
  modified_base 3: mod_base = OTHER; note = 2'-O-methylcytidine-3'-phosphate
  modified_base 4: mod_base = OTHER; note = 2'-O-methylcytidine-3'-phosphate
  modified_base 5: mod_base = OTHER; note = 2'-O-methyluridine-3'-phosphate
  modified_base 6: mod_base = OTHER; note = 2'-O-methyluridine-3'-phosphate
  modified_base 7: mod_base = OTHER; note = 2'-deoxy-2'-fluorocytidine-3'-phosphate
  modified_base 8: mod_base = OTHER; note = 2'-O-methyluridine-3'-phosphate
  modified_base 9: mod_base = OTHER; note = 2'-deoxy-2'-fluorouridine-3'-phosphate
  modified_base 10: mod_base = OTHER; note = 2'-deoxy-2'-fluorocytidine-3'-phosphate
  modified_base 11: mod_base = OTHER; note = 2'-deoxy-2'-fluorocytidine-3'-phosphate
  modified_base 12: mod_base = OTHER; note = 2'-O-methyluridine-3'-phosphate
  modified_base 13: mod_base = OTHER; note = 2'-O-methylguanosine-3'-phosphate
  modified_base 14: mod_base = OTHER; note = 2'-O-methylguanosine-3'-phosphate
  modified_base 15: mod_base = OTHER; note = 2'-O-methylcytidine-3'-phosphate
  modified_base 16: mod_base = OTHER; note = 2'-O-methylcytidine-3'-phosphate
  modified_base 17: mod_base = OTHER; note = 2'-O-methyladenosine-3'-phosphate
  modified_base 18: mod_base = OTHER; note = 2'-O-methyladenosine-3'-phosphate
  modified_base 19: mod_base = OTHER; note = 2'-O-methylcytidine-3'-phosphate
  modified_base 20: mod_base = OTHER; note = 2'-O-methylguanosine-3'-phosphate
  modified_base 21: mod_base = OTHER; note = 2'-O-methyluridine-3'-phosphate ((2S,4R)-1-[29-[[2-(acetylamino)-2-deoxy-beta-D-galactopyra nosyl]oxy]-14,14-bis[[3-[[3-[[5-[[2-(acetylamino)-2-deoxy-b eta-D-galactopyranosyl]oxy]-1-oxopentyl]amino]propyl]amino] -3-oxopropoxy]methyl]-1,12,19,25-tetraoxo-16-oxa-13,20,24-t riazanonacos-1-yl]-4-hydroxy-2-pyrrolidinyl)methyl ester
gcccttcttcctggccaacgt

SEQ ID NO: 1350 - RNA, 21 nt, synthetic construct
  source 1..21: mol_type = other RNA
  modified_base 1: mod_base = OTHER; note = 2'-O-methylguanosine-3'-phosphorothioate
  modified_base 2: mod_base = OTHER; note = 2'-O-methylguanosine-3'-phosphorothioate
  modified_base 3: mod_base = OTHER; note = 2'-O-methylcytidine-3'-phosphate
  modified_base 4: mod_base = OTHER; note = 2'-O-methylcytidine-3'-phosphate
  modified_base 5: mod_base = OTHER; note = 2'-O-methyladenosine-3'-phosphate
  modified_base 6: mod_base = OTHER; note = 2'-O-methyladenosine-3'-phosphate
  modified_base 7: mod_base = OTHER; note = 2'-deoxy-2'-fluorocytidine-3'-phosphate
  modified_base 8: mod_base = OTHER; note = 2'-O-methylguanosine-3'-phosphate
  modified_base 9: mod_base = OTHER; note = 2'-deoxy-2'-fluorouridine-3'-phosphate
  modified_base 10: mod_base = OTHER; note = 2'-deoxy-2'-fluoroguanosine-3'-phosphate
  modified_base 11: mod_base = OTHER; note = 2'-deoxy-2'-fluoroguanosine-3'-phosphate
  modified_base 12: mod_base = OTHER; note = 2'-O-methyluridine-3'-phosphate
  modified_base 13: mod_base = OTHER; note = 2'-O-methylguanosine-3'-phosphate
  modified_base 14: mod_base = OTHER; note = 2'-O-methyladenosine-3'-phosphate
  modified_base 15: mod_base = OTHER; note = 2'-O-methyladenosine-3'-phosphate
  modified_base 16: mod_base = OTHER; note = 2'-O-methylguanosine-3'-phosphate
  modified_base 17: mod_base = OTHER; note = 2'-O-methylguanosine-3'-phosphate
  modified_base 18: mod_base = OTHER; note = 2'-O-methylcytidine-3'-phosphate
  modified_base 19: mod_base = OTHER; note = 2'-O-methylcytidine-3'-phosphate
  modified_base 20: mod_base = OTHER; note = 2'-O-methyluridine-3'-phosphate
  modified_base 21: mod_base = OTHER; note = 2'-O-methyluridine-3'-phosphate ((2S,4R)-1-[29-[[2-(acetylamino)-2-deoxy-beta-D-galactopyra nosyl]oxy]-14,14-bis[[3-[[3-[[5-[[2-(acetylamino)-2-deoxy-b eta-D-galactopyranosyl]oxy]-1-oxopentyl]amino]propyl]amino] -3-oxopropoxy]methyl]-1,12,19,25-tetraoxo-16-oxa-13,20,24-t riazanonacos-1-yl]-4-hydroxy-2-pyrrolidinyl)methyl ester
ggccaacgtggtgaaggcctt

SEQ ID NO: 1351 - RNA, 21 nt, synthetic construct
  source 1..21: mol_type = other RNA
  modified_base 1: mod_base = OTHER; note = 2'-O-methyladenosine-3'-phosphorothioate
  modified_base 2: mod_base = OTHER; note = 2'-O-methyladenosine-3'-phosphorothioate
  modified_base 3: mod_base = OTHER; note = 2'-O-methylguanosine-3'-phosphate
  modified_base 4: mod_base = OTHER; note = 2'-O-methylguanosine-3'-phosphate
  modified_base 5: mod_base = OTHER; note = 2'-O-methylcytidine-3'-phosphate
  modified_base 6: mod_base = OTHER; note = 2'-O-methylcytidine-3'-phosphate
  modified_base 7: mod_base = OTHER; note = 2'-deoxy-2'-fluorouridine-3'-phosphate
  modified_base 8: mod_base = OTHER; note = 2'-O-methyluridine-3'-phosphate
  modified_base 9: mod_base = OTHER; note = 2'-deoxy-2'-fluorocytidine-3'-phosphate
  modified_base 10: mod_base = OTHER; note = 2'-deoxy-2'-fluorocytidine-3'-phosphate
  modified_base 11: mod_base = OTHER; note = 2'-deoxy-2'-fluoroadenosine-3'-phosphate
  modified_base 12: mod_base = OTHER; note = 2'-O-methylcytidine-3'-phosphate
  modified_base 13: mod_base = OTHER; note = 2'-O-methylcytidine-3'-phosphate
  modified_base 14: mod_base = OTHER; note = 2'-O-methylguanosine-3'-phosphate
  modified_base 15: mod_base = OTHER; note = 2'-O-methylcytidine-3'-phosphate
  modified_base 16: mod_base = OTHER; note = 2'-O-methylguanosine-3'-phosphate
  modified_base 17: mod_base = OTHER; note = 2'-O-methyladenosine-3'-phosphate
  modified_base 18: mod_base = OTHER; note = 2'-O-methylguanosine-3'-phosphate
  modified_base 19: mod_base = OTHER; note = 2'-O-methylcytidine-3'-phosphate
  modified_base 20: mod_base = OTHER; note = 2'-O-methyluridine-3'-phosphate
  modified_base 21: mod_base = OTHER; note = 2'-O-methyluridine-3'-phosphate ((2S,4R)-1-[29-[[2-(acetylamino)-2-deoxy-beta-D-galactopyra nosyl]oxy]-14,14-bis[[3-[[3-[[5-[[2-(acetylamino)-2-deoxy-b eta-D-galactopyranosyl]oxy]-1-oxopentyl]amino]propyl]amino] -3-oxopropoxy]methyl]-1,12,19,25-tetraoxo-16-oxa-13,20,24-t riazanonacos-1-yl]-4-hydroxy-2-pyrrolidinyl)methyl ester
aaggccttccaccgcgagctt

(The sequence listing continues in the following parts.)

1. A double stranded ribonucleic acid (dsRNA) agent for inhibiting expression of a target gene, comprising
an antisense strand which is complementary to the target gene;
a sense strand which is complementary to the antisense strand and forms a double stranded region with the antisense strand; and
one or more C₂₂ hydrocarbon chains conjugated to one or more internal positions on at least one strand.

2. The dsRNA agent of claim 1, wherein the C₂₂ hydrocarbon chain is saturated or unsaturated.

3. The dsRNA agent of claim 1, wherein the C₂₂ hydrocarbon chain is linear or branched

4.-8. (canceled)

9. The dsRNA agent of claim 1, wherein the one or more C₂₂ hydrocarbon chains are conjugated to one or more of the following internal positions: positions 4-8 and 13-18 on the sense strand, and positions 6-10 and 15-18 on the antisense strand, counting from the 5′ end of each strand.

10. (canceled)

11. The dsRNA agent of claim 9, wherein the one or more C₂₂ hydrocarbon chains are conjugated to position 6 on the sense strand, counting from the 5′-end of the sense strand.

12. The dsRNA agent of claim 1, wherein the sense the antisense strands are each independently 15-30 nucleotides in length; 19 to 25 nucleotides in length; or 21 to 23 nucleotides in length.

13. The dsRNA agent of claim 1, wherein the one or more C₂₂ hydrocarbon chains is an aliphatic, alicyclic, or polyalicyclic compound.

14. (canceled)

15. The dsRNA agent of claim 1, wherein the one or more C₂₂ hydrocarbon chains is a C₂₂ acid, a C₂₂ alcohol, or a C₂₂ amide.

16.-20. (canceled)

21. The dsRNA agent of claim 1, wherein the one or more C₂₂ hydrocarbon chains is conjugated via a carrier that replaces one or more nucleotide(s) in the internal position(s).

22. (canceled)

23. The dsRNA agent of claim 1, wherein the one or more C₂₂ hydrocarbon chains is conjugated to the dsRNA agent via a linker containing an ether, thioether, urea, carbonate, amine, amide, maleimide-thioether, disulfide, phosphodiester, sulfonamide linkage, a product of a click reaction, or carbamate.

24. The dsRNA agent of claim 1, wherein the one or more C₂₂ hydrocarbon chains is conjugated to the dsRNA agent via a linker or a carrier or via internucleotide phosphate linkage.

25. The dsRNA agent of claim 1, wherein the dsRNA agent comprises at least one single-stranded overhang.

26. (canceled)

27. The dsRNA agent of claim 1, wherein at least one end of the dsRNA agent is blunt-ended.

28. The dsRNA agent of claim 1, wherein the one or more C22 hydrocarbon chains is conjugated to a nucleobase, sugar moiety, or internucleosidic phosphate linkage.

29. (canceled)

30. (canceled)

31. The dsRNA agent of claim 1, further comprising a modified phosphate at the 5′-end of the antisense strand.

32. The dsRNA agent of claim 1, wherein the one or more C₂₂ hydrocarbon chains or targeting ligand is conjugated via a biocleavable linker selected from the group consisting of a DNA linker, an RNA linker, a disulfide linker, an amide linker, a protease cleavable peptide linker, a functionalized monosaccharide linker, a galactosamine oligosaccharide linker, a glucosamine linker, a glucose linker, a galactose linker, a mannose linker, and combinations thereof.

33. The dsRNA agent of claim 1, wherein the 3′ end of the sense strand is protected via an end cap which is a cyclic group having an amine, said cyclic group being selected from the group consisting of pyrrolidinyl, pyrazolinyl, pyrazolidinyl, imidazolinyl, imidazolidinyl, piperidinyl, piperazinyl, [1,3]dioxolanyl, oxazolidinyl, isoxazolidinyl, morpholinyl, thiazolidinyl, isothiazolidinyl, quinoxalinyl, pyridazinonyl, tetrahydrofuranyl, and decalinyl.

34. The dsRNA agent of claim 1, wherein the target gene is selected from the group consisting of adrenoceptor beta 1 (ADRB1); calcium voltage-gated channel subunit alpha1 C (CACNA1C); calcium voltage-gated channel subunit alpha1 G (CACNA1G) (T type calcium channel); angiotensin II receptor type 1(AGTR1); Sodium Voltage-Gated Channel Alpha Subunit 2 (SCN2A); Hyperpolarization Activated Cyclic Nucleotide Gated Potassium Channel 1 (HCN1); Hyperpolarization Activated Cyclic Nucleotide Gated Potassium Channel 4 (HCN4); Hyperpolarization Activated Cyclic Nucleotide Gated Potassium Channel 3 (HCN3); Potassium Voltage-Gated Channel Subfamily A Member 5 (KCNA5); Potassium Inwardly Rectifying Channel Subfamily J Member 3 (KCNJ3); Potassium Inwardly Rectifying Channel Subfamily J Member 4 (KCNJ4); phospholamban (PLN); calcium/calmodulin dependent protein kinase II delta (CAMK2D); Phosphodiesterase 1 (PDE1), Delta 4-Desaturase, Sphingolipid 1 (DEGS1): leptin (LEP); folliculin (FLCN): Zinc Finger Protein 423 (ZFP423); Cyclin Dependent Kinase 6 (CDK6); Regulatory Associated Protein Of MTOR Complex 1 (RPTOR); Mechanistic Target Of Rapamycin Kinase, (mTOR): Forkhead Box P1 (FOXP1); Phosphodiesterase 3B (PDE3B); Activin A Receptor Type 1C (ACVR1C), myostatin (MSTN); Cholinergic Receptor Nicotinic Alpha 1 Subunit (CHRNA1): Cholinergic Receptor Nicotinic Beta 1 Subunit (CHRNB11): Cholinergic Receptor Nicotinic Delta Subunit (CHRND): Cholinergic Receptor Nicotinic Epsilon Subunit (CHRNE); Cholinergic Receptor Nicotinic Gamma Subunit (CHRNG): Collagen Type XIII Alpha 1 Chain (COL13A1): Docking Protein 7 (DOK7): LDL Receptor Related Protein 4 (LRP4): Muscle Associated Receptor Tyrosine Kinase (MUSK): Receptor Associated Protein Of The Synapse (RAPSN): Sodium Voltage-Gated Channel Alpha Subunit 4 (SCN4A); and Double Homeobox 4 (DUX4).

35. (canceled)

36. (canceled)

37. A cell containing the dsRNA agent of claim 1.

38. A pharmaceutical composition for inhibiting expression of the target gene, comprising the dsRNA agent of claim 1.

39. A method of inhibiting expression of a target gene in a skeletal muscle cell, a cardiac muscle cell, or an adipocyte, comprising contacting the cell with a dsRNA agent that inhibits expression of a target gene, wherein the dsRNA agent comprises
an antisense strand which is complementary to the target gene;
a sense strand which is complementary to the antisense strand and forms a double stranded region with the antisense strand; and
one or more C₂₂ hydrocarbon chains conjugated to one or more internal positions on at least one strand.

40.-75. (canceled)

76. A method of treating a subject having a skeletal muscle disorder, a cardiac muscle disorder, or an adipose tissue disorder, comprising:
administering to the subject a therapeutically effective amount of the dsRNA agent of claim 1, thereby treating the subject.

77.-84. (canceled)

85. The method of claim 76, further comprising administering to the subject an additional agent or a therapy suitable for treatment or prevention of a cardiac muscle disorder, or an adipose tissue disorder.

86. (canceled)

87. (canceled)

88. A method of synthesizing a nucleoside monomer having the structure of Formula (I): [chemical structure]
wherein:
B is a modified or unmodified nucleobase;
R¹ is a hydroxyl protecting group;
R² is H or phosphoramidite;
R³ is C₂₂H₄₅
wherein the compound of formula (I) is free or substantially free of a compound of Formula (II) [chemical structure]
wherein:
B is a modified or unmodified nucleobase;
R¹ is a hydroxyl protecting group;
R² is C₂₂H₄₅
R³ is H

89. (canceled)
